United States Patent Application Publication US 2011/0183924 A1 - sequence listing, part 62

SEQ ID NO: 209594 - DNA, 1440 bp, Homo sapiens
gaagtctgcccggcctggccgccaagtgtcactaggtatccgcgtcaagccggaaccatgtatagcagctccttgtgtgtagggagaaagttaaaactgccatctaagggtgtcgatgggaagactaaaagtaggctcacccacctgctgtgaagcagcgcgcgcgagctgttactaacagtagtgaaaagccgggatccctgcccccgaggcacgcactggggcgccggctgacccagagacctgagggagactcattgccggactgcgttggaggagagagccaggggctggggcccggtgatggagcctgccttggggagtgcatgtgttggagagaggtgggaagcagataggataaccctgacctgagccatggagacgcaaggacaggactggtagacgggtcagtgggcagcaacttaagactgacctcgcttgagcctttgcctgcgaacgaggtataatacccacctcgggggcttgaggatcaaatgaggggctccacccacggcaaagtgtcactaagcgggatggaggaggatgcaggaagaggagtctgggaggacccgctctgaaaaggatggaactcgagagcaccattttcagggacgaagataagctgtttatttggggcaggctgtggggagagctgtgcagcaaacagccacccggggcccagggcagaggccttccaggctggctcgggcacttctgggtcccatgtccctggttttgcatcatccataccaatcactccatgttgctatgttccttcaccagaagactgggggctcaaaaagggcagggcagccctcactcaccagtctccccagcctcacccagctcagcacagggcaccaggcaggggctgagagtgctggggtaggtgggtgtggtcaaacagcttggaaagagtttggcctgctcattgcattcccctcagctcatcctggggatgtctgctcatgggagaatggcagagggatccccaacagtcattcctgatactcctctccctgtatcatgtcagcacatagtaggtgtggcctatgtatggcagattcatttctgcccccaataggatttgctgtagtttggatgtgtgtcccctcaaaatctcatgttgaaatgtgatcccaatgttggaagtggggcctggtgggaagtaattgggtcgtgagggcagatcccttatgaatggttcagcaccatccccttggtgatgagttcttgcttagttcacacaagatctggttatttaagagtctaagacctccccttctctcttactcctgctctcactatgtgatatactggctccccatcaccttatgtcatgatcttaagcttcctgaggttgcaccagaagcagatgccagcaccatacttcctgaaaagcctgcagaactgtgagccaattaaacctctttataaatt

SEQ ID NO: 209595 - DNA, 1565 bp, Homo sapiens
gaagtctgcccggcctggccgccaagtgtcactaggtatccgcgtcaagccggaaccatgtatagcagctccttgtgtgtagggagaaagttaaaactgccatctaagggtgtcgatgggaagactaaaagtaggctcacccacctgctgtgaagcagcgcgcgcgagctgttactaacagtagtgaaaagccgggatccctgcccccgaggcacgcactggggcgccggctgacccagagacctgagggagactcattgccggagctgcacagcctgtggggctggaggggaaccgtcgcccttggcgggcttccccaaccgccaaggcctgaggaccgccgagggcgtggcgggagcctgtcctcggttttacaggccggctggggagctgcgttggaggagagagccaggggctggggcccggtgatggagcctgccttggggagtgcatgtgttggagagaggtgggaagcagataggataaccctgacctgagccatggagacgcaaggacaggactggtagacgggtcagtgggcagcaacttaagactgacctcgcttgagcctttgcctgcgaacgaggtataatacccacctcgggggcttgaggatcaaatgaggggctccacccacggcaaagtgtcactaagcgggatggaggaggatgcaggaagaggagtctgggaggacccgctctgaaaaggatggaactcgagagcaccattttcagggacgaagataagctgtttatttggggcaggctgtggggagagctgtgcagcaaacagccacccggggcccagggcagaggccttccaggctggctcgggcacttctgggtcccatgtccctggttttgcatcatccataccaatcactccatgttgctatgttccttcaccagaagactgggggctcaaaaagggcagggcagccctcactcaccagtctccccagcctcacccagctcagcacagggcaccaggcaggggctgagagtgctggggtaggtgggtgtggtcaaacagcttggaaagagtttggcctgctcattgcattcccctcagctcatcctggggatgtctgctcatgggagaatggcagagggatccccaacagtcattcctgatactcctctccctgtatcatgtcagcacatagtaggtgtggcctatgtatggcagattcatttctgcccccaataggatttgctgtagtttggatgtgtgtcccctcaaaatctcatgttgaaatgtgatcccaatgttggaagtggggcctggtgggaagtaattgggtcgtgagggcagatcccttatgaatggttcagcaccatccccttggtgatgagttcttgcttagttcacacaagatctggttatttaagagtctaagacctccccttctctcttactcctgctctcactatgtgatatactggctccccatcaccttatgtcatgatcttaagcttcctgaggttgcaccagaagcagatgccagcaccatacttcctgaaaagcctgcagaactgtgagccaattaaacctctttataaatt

SEQ ID NO: 209596 - DNA, 422 bp, Homo sapiens
aggcttagaacccaagtcacctagattagtagtcctccagtaaaggcgattgtgcccccgggggacatttggccatatctggaaacattttgggttatcacaactgggggtagcgtgggctactggcttctagggggtagaggccagatatgctgtatatatatcctgtcgtgcctaagacagccatcacagggaagaattgtctggtctaaaatgtcagtagtgccaaagttaagaaacactgacctggatcctcctagtatgtttcttttagccaaaagtacaaagttcctaacttgtctcactggcaagacattttgtttgttcgttttgtttgtttgtttttgtttttcatatcttgctgtttccatcactggcagttttattatagaggaagcagtttgggaacgtcgctactgaga

SEQ ID NO: 209597 - DNA, 377 bp, Homo sapiens
ttcttctcttgaaaaaacatttttttaaagtcgtctaaatgattaggggcagaaataagtatctgaagaagaaatgtggtagcccctcctgggatgtggaatcctgaacaacccccaacatgagagatccttcatgagagattgggtcaacatggtattctttcaggggaaatctgtgcccatataaatgaatcgtagcacagacctgagttcagatccttgccttggcatttacaacttgggtaaacttgagtagagggagaatgaagagttttggaactcctttctctcagctgtacaatggagactaataacgcttacccaatgatattcctatgaagactcaataaaataataaaaatgtgcttgatatcatt

SEQ ID NO: 209598 - DNA, 509 bp, Homo sapiens
tagagtgcacaagatggctcaaaagggattaaggatgaatggagagatgggagattttgaccagaaactaaaatactggagtttaaatggctcaaggcattccttaatctactcaaagtgacacctaagattaaccatcacaaatggggatgaagtctggattagcgagagtctggaaagaccaagatcaggatgtcatcatggttggattctgctgagggcccacctctggattcatagaatggcaccttcttgctgtgtcctcacatggtctaagggactaaaagccctcatggcctgaccacctcccagtggtcacacctcctaataccatcactttgggggttaggatttcaatatatgaattccggggagacatagacatttagactatagtacctgccttttctatatgaactttactcctggaaaacaaaacagtagatgagagaatgtgtgtttttatgaaagtattccaactcaaataaaacagaaatgatagaaaatca

SEQ ID NO: 209599 - DNA, 329 bp, Homo sapiens
gcgcccggcctgtctcttcctttcttatcctctcttgccttcctgccttctatcatgggatgatgcagcacgaaggccctcaccagatgtaggctccttgatcttggactttctggccccagaaactgtaagaaataaatctctgctctttgtgaattacccagtctcctgtattctattatagcagcacaaaatgaactaaggcaaacgttgttatactatgagcatgtccttgaaaagtcaaggataagttaaatgttagcaaatggaaatgtgttttttaagtgagctcattaaagaaaccagagcgattttttctgtaaactaaa

SEQ ID NO: 209600 - DNA, 539 bp, Homo sapiens
tatctcgatgctcatttcaaccacaagactaaggaaaagtgtagcagcccaagaggaaacactctgtagcttggcattccaatatgtgcttgccagtgagtcatgggagtgctgatgcccgtgtcctgcaccaagagaacacgaagtccacggatgtgtgctgttaactctccatcccgtatgggttggtgactgcactttcctcaccatcaaatcctccctcctcacacctgtccagtggcagctctgccccttgttgatacctctgttatacgaaaggtagataaggagagtgaaaataatgggagacagtattctttgctggcaatttttttaaaggggtttaggtgaagctaaaggttgaaactaataactaccaagtttctggatcactggatctctacctcatttttaaaaactcttataatggaaaatttcaaacatatacagaagtatctgtcatccaatccaacaatcatcaattaatgatttatgatgttttatctatctccctcctctacttccccctccctgtagat

SEQ ID NO: 209601 - DNA, 279 bp, Homo sapiens
acttagttcggtgtgatggccatcacctgtggtccctgctactcaggaggctgaggggggaggatcgcttgagcccaacagtttgaggctgcagtgagctacaattgtgccattgcactcaagcctgggtgacagagtgagaccctgtctcaaaaaagaaaaatttcagatatttgatgataccaaataatacaatttttaaagtaagataacaatactgttattctttttaaaaaataattttcttttagaaattaccctgaaatattggccgggtga

SEQ ID NO: 209602 - DNA, 293 bp, Homo sapiens
acatcctttcagagttgctccaatataaaaaaagacttttcaaatgtctagcttaattaaacattttaatctttagaaaccctaccttggctcttttgagagtcaggttcatggtttcggttgactggcaccacaaagaggaagcaatgctgttaatgtaagttaaaaaccaagagagttttgtgatggaaagaaaacaaaaaagaaatcctagcagtaactatagtatttctatgctcattcattttacggctggtgccaaccaagaggtatcaaaaagagagaaaaaaaaa

SEQ ID NO: 209603 - DNA, 329 bp, Homo sapiens
caatgtttattgtaacactgttcacaatagtcaagaaatggaatcaacctaggtattcaacaacagatgtatagatagagaaaatgtggtgaatatactcagcggagtactattcagccataaaaagaattaagtcctgtcatttatggcaatatggatggaactgggggacattatgttacgtgaaataagccaggaacagaaaattaaactctgcatgttctcactcatatgtggaagctaaaaaaaagtttatcccatagaagtaaaagtgccttattaactatttatgtgattatttttaataaaatgttttatttgtaagtttt

SEQ ID NO: 209604 - DNA, 616 bp, Homo sapiens
tcagcgcacgatggcgcgtccagtttgagaattggtgtaagacatcacaatcccattattcagagcgcgtatggagtggaaacgcttatagggtttcaccaggatccacctctgatgttcagtgaagagtaccagaaaagtctgctagagcagtaccatctgggtctggatcaaaaacgcagaaaatacgtggttggagagctcatctggaattttgccgatttcatgactaaccagtcaccgacgagagtgctggggaataaaaaggggatcttcactcggcagagacaaccaaaaagtgcagcgttccttttgcgagagagatactggaagattgccaatgaaaccaggtatccccactcagtagccaagtcacaatgtttggaaaacagcctgtttacttgagcaagactgataccacctgcgtgtcccttcctccccgagcaagggcgacttccacagcagcagaacaagtgcctcctggactgttcacggcagaccagaacgtttctggcctgggttttgtggtcatctattctagcagggaacactaaaggtggaaataaaagattttctattatggaaataaagagttggcatgaaagtggctactgaa

SEQ ID NO: 209605 - DNA, 539 bp, Homo sapiens
tcagcgcacgatggcgcgtccagtttgagaattggtgtaagacatcacaatcccattattcagagcgcgtatggagtggaaacgcttatagggtttcaccaggatccacctctgatgttcagtgaagagtaccagaaaagtctgctagagcagtaccatctgggtctggatcaaaaacgcagaaaatacgtggttggagagctcatctggaattttgccgatttcatgactaaccagtttctgcaggctggaaatccaagatgaagtcacctgtagttcagtgtctgcgtctaagagagcactttgttgctgcacccgccatggggaagaaatactgtatcttctcatgaaggaaggaaccgaaggtgggaatagggaccaaactccctctttcaagcctttttgtagtgacattaattcatttatgaggatgccaccatcatgacataatcatttcccaaaggatttcacctcctcccactgttgcattgggaattaattttccaacacatgaattttgagggacacattcagaccat

SEQ ID NO: 209606 - DNA, 639 bp, Homo sapiens
aatgaacactttcacctggtaaagacaaagaacaagctctttggtgcctctttttgtaagggcaccccatcatgagggccccacccaaaggcctcatctctaaatgccattacattgtgggttagggcttcaacatataaattgcaaggagacacagacattctatccataacatccaccaaagccttttctatcattggttgagagctgcttcacagggcagtaacccttcagcgtttcctagttatcctacattcatgcagagcatgttcccatagccagaacaaatgtgtaaagccctcaagcagagagttagaagcgtttgcagtcattgtgtaaaggtgactgctgggaggatgtggacagggaaccacagacacaaccagcagcagcttttccacttactgactggtctcagcctcagataggcctttagtgctgcctggcaatcctgttgaatttctctagtcaactctctctctccttcctattcctcatactctcttaaacctccaagtccctctcacgcttcaccctcacctttgacctcaattcctctttcattaaaacaactgaggccatcagaagacaactccactttttccaccagtaggactaccccctctctgcatctgtgtc

SEQ ID NO: 209607 - DNA, 504 bp, Homo sapiens
taacattagaaagggaatatattattcttaccagttagtaatctattcacatttggtttagagggaagatttagaaggtgagataaaagcttgtgagagaatagtgtattcatgtgaaacttcttccatgggttcagagcatttagaaacaaacatcccttcacactcaaagcttacctttgagccagtcctccaatagtgaggtctttgaaggtcaggccaaattggctgtgggaggacctcaggttaggataggaattattttaagacatggcactatattcatgtgaaactcgcaaaaactagccttgcatataggctcatgtatcatgtctcagctgagatgtttgagagatcttaactagattctagaaaacaaaaaaggaagtagttttggggcaaatatatttgggaaacagtttattgtatttcctttccccaaatggattttcaagttcttcatataatctaaccccaacaaataaattgcctgtttttcaaaag

SEQ ID NO: 209608 - DNA, 452 bp, Homo sapiens
aaccccaccacaaacaccagtggcttcaagaggagggaagcagattcctcttttggaggcaggtaatccagggctagtgtggtagctccaaggtcaccagagacctggctccttctgtgctgttgctctgtcagcctcacctgctgcttctggtccaaaatgaccgctcacaattggcaaggtttttgtggtcttgataaaatgtatcataagagcaattgtaatgatgactcgccagccacgtgggggcttctctcattgtctttgggtgggaatgtcatatcatgcagactctgtggtgggaccagccacctgtcagcttctcactctccttcacctagccacctgctgcttaggttactgtatgaggaggtcacacctgtagggaatgatggtagaggatacccaggacagagagtgggagtcctcgctctgcagcagcaaagttagcc

SEQ ID NO: 209609 - DNA, 230 bp, Homo sapiens
ctctagcaggactccccattacataaacagagaggcttattgaacttgaaagtagagattcactgcttgtcaatctagatcatgaaggatttctgtacaaatgcaggtagtaacaaggtcacggtagctcaaactctgcttgtgcattcaaattcaatccagaaacctccaactgctaaaaccataaacgttctatatattatcgcctcaatattttacatttaatgtat

SEQ ID NO: 209610 - DNA, 279 bp, Homo sapiens
tatatttatgtatatatttatacaacataaaatatattttattatttaaacataaaatatattttattatttaatatagattcttaagtgataaatatgtttaatattattaaaataggttaaaataggttatagttagtacagtgaaaattggcagcccttttacaaaacatatgccataactatagcatttatcactgacagtcataccaggatagtcttttatttccaatcacttaaatattcctaattgcaaaagaaatttgaagactaaaattc

SEQ ID NO: 209611 - DNA, 360 bp, Homo sapiens
ttagttcgattattagaagactagattattgctcagcagtaaccactcctttcccacaaactcccctctctaggaggaatgtacctccccacccattcctgttaggcttggccaggtgaatcgctttggccaacagaatgtaactgacaaggtgagcagagatttgcagtgggcttgtgcttggtgctggtcctccggggctcctgcctttagccaggggaagcacactccccagcccctccttagccctctggccctggggagaatgagaggcatgtggcacagtcctggacccagccgtggctgggagcaagcctggaagcttgagcgagagataaatgcttggtctttttgtttgag

SEQ ID NO: 209612 - DNA, 551 bp, Homo sapiens
gtcatagctgtactagagtaacattgttatctgctagccattatattcttttggcctcatgatcataccacttgacttaggagttaaggtcgtgtggggcttcatgaggtcaggttttctgataagttctctcatagctgaccctgttccgaggaaagaacagtgtgtcttctcttcttgaacaagggtaaggactacagttgaagaaaaagttattctggtggtaaggaagacctcagtcaagaatactacaatgtaagtcatgactgttatcacaggggagagagattaggttcaactctgaatacagtgaagacaattggggatttatagctaacaagcagagtgaggtcagtgcatggaaagttactaacaggaaacatcaagttagggggactcgtgctaaactgacttaataggattcttgctgaaggcaggccaggatgatcagatgttgggggaggggatgaggaaattgatcagatatagagggtgccttagttcattgggctgctgtaacagaatactatagactgggtggcttataaaga

SEQ ID NO: 209613 - DNA, 195 bp, Homo sapiens
gacatttgactttagcaaaggaagattctggcttaaataatttggtgttggttttctccaaacagggatatattattgactggtagcaattttccctccttctcttagctgactgagaacttacctttgtttaatgagggattccttatttagaacttcagaggtcaggtaaaaagatttcatggccttacctgg

SEQ ID NO: 209614 - DNA, 607 bp, Homo sapiens
ggactcctgaatatttttcaaaactgaacaatttcagccatgtctgagctttccgtcttcctggaggcacaaatctagtttagctgaaccacaacagattgtacatatcctgcagaacctctgtggtcttaggaaggttgaaagtcaccaaatgtcacagaaaatgagggtcaggaaaggctgtgatcacaagctcttgatccagaggccactcgggtgcatctgtgtgactgacacctcattgcatcatcatttcttgtaaaatcagcttaattttgcagagaaatggccacagatttttagaattatgctgaattatgtaagggagcagccattttaaaaataatgtaatcaaataacaataataacataacagaagtttctgcaccacactgacactgaacatggctgtcaaccaactagccaaaccaaggtgaaagattctctgaacttcagttttaacttacttcgtccattctcccttttcagatcttatttcttcttccaaggcaactatatccactgtgaactgctgcatattaaacattcaaaacatgtctgtatctaacccagtgatggctacagcattataaaataactcctaagt

SEQ ID NO: 209615 - DNA, 430 bp, Homo sapiens
agaacacttaatagtgattcacaactttgtacattggaaacatctggggatcctaatgccagatggtttggggtgtggcctgaacagctgggcttttaaaaacctccccaggtgattttaatttgcagccaagattgagagccactgccttctggaaataaacttattttccaaatgaaatcaactattgtttgattgaatctggcatcatttctgagacaattcaattagtgttgtaccattatttcataagcaaatccttgggttaaaaattttagagctgtttggcttaagaaaaaatttaatctgctctcatccaaatgaaagatctacaggtaatggaaaccagagcaaattatctaacctgcctaaaccttggtttgttcattctttttgtactggaacaatgaaagttctaatgaaagccagc

SEQ ID NO: 209616 - DNA, 482 bp, Homo sapiens
gatacatcagcagcacaactttagattgaaacttttcttagaaagcactgaaacacaggctctcacaggagactttcagcacagaaaatggcatgtcaacattgcactgatatccttagatgggtcgcatacatattttatgaatgcacgaaaacagtctcacaataaattttagagtcatgtttatttcatatgcacgtgaacatggaacctacggaaaatttgcaattttcttttgatgcctgaccagaataaccagtaggtcaaagaatgtcatttacttgaacctatggtttgggggcagaggtctgtggagcagaatatgaaaacacctgatagccaggcgcggcggctcacgcctgtaatcccagcactttgggaggccgaggcgggcggatcatgaggtcaggagatcgagaccatcctggctaacacggtgaaaccctgtctctactaaaaatacaaaaaattagccgggcgtg

SEQ ID NO: 209617 - DNA, 183 bp, Homo sapiens
attttaatctacaatagaaatataaattcataaaacactaaaaattcttaaataagaatttattagagtaactcttaaatattacttagaaatgagtaattcttaaattagagtaactcctaaatgttacttagaaatgtcttcccattagcaagttatattatattctcacctttttttttt

SEQ ID NO: 209618 - DNA, 262 bp, Homo sapiens
tcagacgctgaactatgtgtagtgggctaacacttgtgaagccactgtgctccaccctgggcaacatagcaagacctcatttctaaaaaaacataagaagaagatgatggttacaaggtgagaagactggtgaatttgggattaaaccaaatctctaggactgatagtttccctttatttcctagttgtcaggccctatgctggatgtctttgcatgcgtaatcttgttaaatccccacatagttcagcgtctgatagacac

SEQ ID NO: 209619 - DNA, 593 bp, Homo sapiens
gccaggcagtggtagtgagaatgataatactgatagtaaatactgtcaacttatctaccacacaccagaaactagtctgggtacttttacagctgggtaatatatcagctaatctagttctcagactaatcctgcagggttaactttgatgcctagaggtggtcaataccatcgcctaagttcagacaagtttgtgtaaatgctggaattgcccatggctaattccagaggccaggtttcctgttctaggctattttgctagacaacgaagataaaaacatcttggtgttcaattttaagaggacacagggttaaagaaatcttaacagaagtcctgctatttggagcttccttggcagaggcaaacataatattatgttattatggtatttaagaaataaaaatatttttcatatattcactagtgatggtggcttagcttttttttattacagtaactacttaatattttgtatgcaaagattcaagttatacatttcctgcaatgacacttgaattcaacttattcagagctaatctcttctttgatccttggtttccccatgtgtaaaactggacaatctttgacctga

SEQ ID NO: 209620 - DNA, 274 bp, Homo sapiens
ggtctgtcatgactgtgtgccactctggttagtgtgcggcatgagcggtagtttgttcgtgagtttagatctgaaagtctttaggatgctaattagggtgagatccttacaatcacggctcagtggtcagccctggagctcatcaacagctttacagtgtagctttcccaagcatacatatcttcatggtctccctggtactctctggtttcctgcagctcttctttttggctctatcgtgagaaactcgtctaaatggaggaagggcacagag

SEQ ID NO: 209621 - DNA, 431 bp, Homo sapiens
ccccttctacctctgcaacctgacccagcaagaccaaccccttttcttcagcctaggtaatgtaaagacaaggaggatgaagatggttgtgatgatccacttccatttaatgtacagtaaacgtattttctcttccttatgattttcttaacatttttttctctagcttactttattgaaggagcacagtatataatacagatcacagacaaaacgtatgacaatctactgtgtatgttattggtagggcttctagttaacagcagtagttaagtttttggggagtcaaaagttacacataaattttcaactgtggggggaatcagcaaccctaaccactgtgttgtttaagggtcaactgtagttctcaactctcttattttaacttgtttctgccatagttaattacaaattcaatttctacaaatata

SEQ ID NO: 209622 - DNA, 540 bp, Homo sapiens
tcttgcatcatctttataccaactatgtcagatattcttaaccccattgtatgggtgagaagattgaagctcaaagacgttcagtgtttgttcagagtctatactgtgaacctcccatttaacactgtgccttaagtgtgaacagcagcttctgcagattctctttaccagggtgaagatttgctcatgactatttcagaacaatgggtcctcatagccccattctcactgtactctatctcaggaaccattctttttttgtctgggctactctagaggagagctggaagaaaactgggtttcatgataatggacacagtagaaacaaagtggtcaagagccagtaggcttgggttggtattataacaccagcatttaccagctatatgggcttgggcaagttacttgaccactccagactttggtttcctcctttgtaatatggaacaataatagttgtaagaattcaataaggtagtacatataacattcttagcacagaacctagcatataattattattcaataaatggtaaaaat

SEQ ID NO: 209623 - DNA, 450 bp, Homo sapiens
cctgggtgaccgagtgaaatcccatctctaaaaaaatatatagcatatatttaatgttcctgcctgtttcctgactcagagcccctaaaactcttaaaatttctgaataagtgtctaatgaagtacattaatgagacgagtggcacctgtgtagtctcaggaggggtctggttgctagcagagctgagcaagtgattagagggttaaaacatccattgctaccccagctaaccccctggaagggggattgaaggttgagttgatcagcagtggcgaataatttcatcagtcatgccaacgtagtgacacctccataaaccccaagaggagagagagagactttgaactagtacacatgatctactttgatatttatgacctttgggagaagatgttttatatgaagcagaaataaagtgtaagccaacattaaacaaaattctctgtaac

SEQ ID NO: 209624 - DNA, 1385 bp, Homo sapiens
agcactgtgggaggtcaaggcaggtagattgcttgaggccaggagttcaagaccagcctgagcaacatggtgaaatcctgtttctacaaaaaaaaaaaaaaatggctggatgtggtggcacgggcctgtagtctcagctatgtgggaggctgagatagatggtaggattgcttgagcccaggacagacctctagcaagactgaccaaaaaaacagagaagttataacatcaggaatgaaacaaggagtaccactccaggccctgcagccatcaaaaggataatgagggaatgccacaaacagctctacacataggaagttgacaacttagatgaaactgaccacttcctcaaaaaacacaaactaccacaactcacttgatataaaatagatcatttgaatagctctataaccattaggaaattgaacttacagctttaaaactccccaaagagaagtcttcaggcccggtggtttcattagagaattctatcgaagaattctttgtttaaagaagaattaacatttctatacagtctcttccagaaaataaagaggaaggacaacttcccagttcattttatgaagctagtattatcctgacactaaaaccagataaagacagtacaaaaaaaatcctttacagaccaacatcctcatgaattttgatgcaaaaaatatttaacaaaatgtttacaaatagaattcagcaatacatagaaagaattatacactgctgggtgtggtggttcacgcgtgtaatcccagcactttgggaggctgaggcaggggatcaggatcacttgagcccaggagttcaagaccaggctgggcaccatagtgagacccctctacaaaaaataaaaaaattaactgggcatggtggtacatgcctataatcccagctactcaggaggctgagataggaggattgcttgagtgagcgtgggaggtcaaggctgcatgagctatgattacaccactgcactccagtttgggtgacaaagtgagactctgtctcaaaaaaataaagaatgatacactgtgaccaagtggcatttattccacagatgcaaggctggttcaatattcaaaatgcgatctagagccgggagtggtagctcatgcctgcaatcccagaactttgggaggccaaggcgggtaaatcacttgaagtcaggagttcgggcccagcctggccaacatggtgaaatctcgcctctattacaaatacaaaaattagccaggtgtggtggcagacgcttgtaatcccagctacttggaaggctgaggcacaagaatcgattgaacctgggtaacagagtttgcatgagctgagatggcagcaccacacttcagcctaggcaacagagcaagactctatct

SEQ ID NO: 209625 - DNA, 1331 bp, Homo sapiens
agcactgtgggaggtcaaggcaggtagattgcttgaggccaggagttcaagaccagcctgagcaacatggtgaaatcctgtttctacaaaaaaaaaaaaaaatggctggatgtggtggcacgggcctgtagtctcagctatgtgggaggctgagatagatggtaggattgcttgagcccaggacagacctctagcaagactgaccaaaaaaacagagaagttataacatcaggaatgaaacaaggagtaccactccaggccctgcagccatcttagatgaaactgaccacttcctcaaaaaacacaaactaccacaactcacttgatataaaatagatcatttgaatagctctataaccattaggaaattgaacttacagctttaaaactccccaaagagaagtcttcaggcccggtggtttcattagagaattctatcgaagaattctttgtttaaagaagaattaacatttctatacagtctcttccagaaaataaagaggaaggacaacttcccagttcattttatgaagctagtattatcctgacactaaaaccagataaagacagtacaaaaaaaatcctttacagaccaacatcctcatgaattttgatgcaaaaaatatttaacaaaatgtttacaaatagaattcagcaatacatagaaagaattatacactgctgggtgtggtggttcacgcgtgtaatcccagcactttgggaggctgaggcaggggatcaggatcacttgagcccaggagttcaagaccaggctgggcaccatagtgagacccctctacaaaaaataaaaaaattaactgggcatggtggtacatgcctataatcccagctactcaggaggctgagataggaggattgcttgagtgagcgtgggaggtcaaggctgcatgagctatgattacaccactgcactccagtttgggtgacaaagtgagactctgtctcaaaaaaataaagaatgatacactgtgaccaagtggcatttattccacagatgcaaggctggttcaatattcaaaatgcgatctagagccgggagtggtagctcatgcctgcaatcccagaactttgggaggccaaggcgggtaaatcacttgaagtcaggagttcgggcccagcctggccaacatggtgaaatctcgcctctattacaaatacaaaaattagccaggtgtggtggcagacgcttgtaatcccagctacttggaaggctgaggcacaagaatcgattgaacctgggtaacagagtttgcatgagctgagatggcagcaccacacttcagcctaggcaacagagcaagactctatct

SEQ ID NO: 209626 - DNA, 398 bp, Homo sapiens
atcgaggcctggctgactttttcacctgctgattgtagagccacagtgccctgaatgaacatagacagttgttgtaaccgagtgagttacagagaaacgccacatgctgagatgaattcaggagtcctttattagccggtgaccaagagatggctagtacttaaaattctcttggccccaaagaaggtgttagattttcttatgtactttggtttagaaaggggaggtggggggagtctagttaaaacaatcttacagaagtaaagcaggcaaaaagttaaaaggataaatggttacaggaaaacaaacagttccaggtgcaggggctttaaatccattacaaggtgatagacgcagggctttgggtgttatcaactggacacaaacacaggggctct

SEQ ID NO: 209627 - DNA, 915 bp, Homo sapiens
atggcgatgaggctaatatcattccctgagaatagtaggtatcaatgatgtgactctgtgtaggagaggggattcaaagttaaatagggggtcaaagtaccacttggacttgtgtttcaagcaggaagcctctggaattaggtccagtgatccacaggggagaagagagctaggtgagcagttcttggagcagacagtcttttaatcctattggatgagcctgtattattgtctctgcagatgttctgtacccttctgcaaaagaggcaagctggcttttcccataactgatgaaatcaagagagcaggtctggaaaaaaacaagggaaatctccttatatcttactacgtgtaaaaagatgattctggaattcccgagtgcctactgaattaataaaccaggaagctgatttattttaccactctaaatccaacatggaagaaaccgtcagacatctactacatgtcatccagcagtacagattggagaagtaaactctgtcagcccacctttatcaaacagtgtaaataatcaccaaaccaagggaagcagaaggcagcaaaagtcgaataatttccaatgaagagtcagaggatctctctcagacaaagggaaatccttcaagtggagaggagatggtaggaggaaagtggcagcccagaggagatgagactgtggcaaattagaaagaaataaaacaatacccaaaggaactcaaaggagaggtgaagttcaagtcagggagaagagtaagtcaagaggactacctgccaagcatagcacagagcttggttactggctccactgtggagctggctcaccccatgggtagagtacaatccttcgagatccacaaggcacacacacacgtgcatagacacaaacacacacacacacacacacacacaaacccc

SEQ ID NO: 209628 - DNA, 650 bp, Homo sapiens
atgagctacacttacagcaaacaaggagagttgtacagcgatatagataacaaggtgacaaaactgcatccagagcttccttagtcttgtgaacgtctcttattagaagaatagcatacatctgtacaaattcgctaaaagtattattggagagtgaatttgcttgaggtctccccgggatacagtgtatccggggagaaacacaagaattatttgatgaggatgaccaattttctttctaggtaactctacttttcttccttatatttgtcttgattttttgaactattatctcattagtactcttccaaacctcttgcatccttgctttagcttttctacctagcaaaacctacaccctgagataaatgttgcaatctgctttctccatacctataatagatggctggaaactactggtggtatggagatatggggaagaagggaaccctgaaggtcgataccactacaaatccatgatctgtagcctcatctggatacttaatgtcacttgtcaattttctctcaccctgaattagctccttttctggatcctctcaatgactactccattatcattacagttgacccctgagcaatgcaggcattagggacactgaccccctcccccatgcagttgaaaatctgta

SEQ ID NO: 209629 - DNA, 304 bp, Homo sapiens
tatttttgtagagatggggttttgccatgttgctcaggctggtctcaaactcctgggctcaagtgatcctcctgcctcggcctcccgaagtgctgggattacaggtgtgagcctccgcacccagtcaatacactttaatccaagtcagtgtctatttaaattgtaagttagtttaactctgaaccatgagcctgtaccttggaaatatgtaatttagagtcataagtaacagttatctagctgagagtcatatgtgggttataccaaatgtactgccatcatgtgattataggttagtagtgta

SEQ ID NO: 209630 - DNA, 538 bp, Homo sapiens
cccacagtcacagtcatcatacagcccgtcaagtttcaccctgtaagcctggcattaccatcttccacattgctcaagctcagcccttatcccatggactacacaaactgcctattttattgcagaactgggtttagttttgttctacatttgttggctcacttgggcactgtctcagcctatctacttcatctacagtcagccaacacgcaactcaccccgcatcccagaaggcccagggacagaaacccgattcctccacgtcctcaccctggggcatcacaatgcctgttctcctttgttcaaagccatcccaaatattagagcttattgtcagaagcagacttagtttagaattaaagctgaataaacgggctataaaatcaggagtctatttgagataaaactacccgatctacggaagagagaaaaatgcagcatggcgactgtttcggacagaccagcagtatgaagagcaaatcctgaatgctggcaagcaacagtcgctgcactggccacagctacaacttgtttatga

SEQ ID NO: 209631 - DNA, 218 bp, Homo sapiens
ggccatgcacaggacggagctcttctggcaagcacagtactggacccatatggtccctccagggcgagtgagcttctgcatctagtctagtccccaggtcactcatgctaagctgtggtggtaggggtgatggcagcttgctcatgtggcactggggctgtatacgtgtctcctagggtcagtggcagcagtgttagctccgtcactgtggcaggagc

SEQ ID NO: 209632 - DNA, 646 bp, Homo sapiens
cacttggctaatttttttgtatttttaatagaagtgggatttcaacatgttggtcaggctgatctcaaactcctgacctcaaaagattcaccacctcagcctcccaaggaagctctttttaaatgtacaaccaaagactctgaggattcagctggtgttacttcagggctcccattgtgtgggaaccaaaaattactgtagtgctaacttgactgtctactgttagacatcatgttgctttatctctgtttcaacaaaagtagtttttgaaaactgcatcttttttagcattgtattggttaaccttttctgtaagaccactttatggggaaatatctgttcaggaagctgacacagaatggaacattaaaacttaggctttggtgagagaaaaattctttaaacagtggtctatatgcagtgcttaagtccttgcagtaaaaataagaattcaattacacttattgttgatcatgttctaaacctttgaaagctgtttatcaaaagtaatcaagaactcattatcactatgttcatgacaatcccaaacctagctaataagaaataggtctatatccatttgaatgacttaaaaaggacccttttatgcagaataagtgaaaagtacgactaccaccatattctt

SEQ ID NO: 209633 - DNA, 501 bp, Homo sapiens
ctcggtaccccgctagtcccaaccatactaataatgcaaggtgttaataagaaacattcagcatgagatttttaggaattttctatattatcttcacaatttcctgttaatctaaatctctcctaatgacaagtttatttaaaaagtaaaacaaaacttgaaggagggaggaaacaagaagggaggaaacattggagacagaaccagcttggcaagttgacagataaggtctgagaagtaggcaggggaaagatcattcatttcaggcaatatttttccattttacctgtataagaaccatatgagccctatttttctttctttcttttttctttctttcttttcttttttttttttttttgtagagatgaagatttcactatgttgaacaggctggtctcaaactcctggcctcaagcaatcctcccacctcagcctcccaaagcatgagccaccatggtgggcctgtatgaaggaactttttaaaaaatgctacaagcc

SEQ ID NO: 209634 - DNA, 563 bp, Homo sapiens
cattttatgcctgatattcctgcattctgtgggaggttattctttgcattgtaggatattaatagtatctttaggctataccaccacataccagtagcatcaccacctaatcattataattcaaaatgtctccagacactgacaagtgttctatggaaacaaagtcattccttgttggaaaccacttgtaaacaaaaagtctagtaatggtggaattatacagtgacagaaaagctcaggtttttctgattaggttgaaaaagctgctcagaaattaaatcctactgtgttcataaaaaacaaggaacccagccctgaagcaaagaactcatcagggaagttgttttctctttcaagtctatgatttcaaatgaccttaaagtggtcatctttacagtcagagaagcatatgtgtgttggggaggagaaaaaagaaggaaatgaggcagactttagaattatacctaggaaagaactgtatgtttggttataaactagatccaataaataaataaatggtttccacataactacttggcaaaggtacaataagcctattgtga

SEQ ID NO: 209635 - DNA, 396 bp, Homo sapiens
ccttacctaacaccatatacaaaaattaactcaatatagagccaaaacctaaacataagagctaagactgtaaaactcttagaagaaacaatagggcaaaagcttcatgacgctggatttggaaatgatttcttggatattacactaaaggcacaggcaacaaaagaaaaaacagacaaatcggacttcatgaaaattaaaaattttcctgcatcaaaatacactattaacagagtaaaaaggcagcctgaaaacaaaataacagaaaatatttgcaaatcatatatctgataaaggattaatatcctgaatatagagagagctcctaaaactcaacaacaaaaaacccttgtttcaaaaatgagaaaggacttgaacagacatttctccaaagaa

SEQ ID NO: 209636 - DNA, 611 bp, Homo sapiens
cagtcttactgcgtccatcagctgctgttggcaggtgtggtcaggtaggctggcactgtgtctgagcaagccagctctggtctgataacagagttttatctggaaggggaaacccagggctgggcttacgatctaaggtcagcagcctgtcacaccaagaaataaacatctgttaaggcaattggtacataagcactcagaaagtgtagcttgtcaaagtggcttaattccaactaggttgttattactcagttgacacctcttgggagagttttttgatattttctttaactctttagtgttatactttatgtatattcacatgaattgaaaacaggttcagttaaaagggtaattaaaaatataaaacattttttaaaaaagaaaacagggccaggcacggtggctcatgcctgtaatcccagtgctttgggaggccaaggcgggaagatcacttgaggccaagcgttcaagaccaggctggacaacatggtgagaccctggtctcaaaaaaataaataaaataaaatttaaaaattatctgtgcatggtggcaaacacctgtagtcctagccatgcaggaggcctgatgggagcaagatgggtaccga

SEQ ID NO: 209637 - DNA, 402 bp, Homo sapiens
ggcctccctcgtgttatccccagagcgctgggggccagtacagctggaggtgattagctcgcatctgaagtcaacatagatgggagagggtggagctggaggttgctttttctggaacgaatgtcactaggaaatggaatggggggaagaaaatgcagatttagctttatgacctatgaatggaaacttcatgatggtaaatatgttactgccctcagctgggatctggctgcaccagcatggaatggtatgagccacttgcaagggccagtctggttagaaagcaaggtgaggccacgcagctggggtggcacatggaaacactcatctcaaattaatgaataagtacaattcagctcttaacacagcttgtattagctaagtgctagaaaatataaactg

SEQ ID NO: 209638 - DNA, 633 bp, Homo sapiens
tatcactattatttccatgagccactactaggaaatctattggataatgagattcaaacagccaacatgacttgagacatctatgtaaggactagtgataagcataataaatacatctacatttaaaactaactgatgaagccagtcacaaaagggtaaatactatatgattccagtcatatgaagtaactacagtggtcataactcatagaaacaaagtggtggttgtcaagagctggagaaaagggaggaggagaattagtttttaatgggtttcagttttgcaagattaaaaagaagttcaagcaatttgttgcccatcaatgtgagtatagtcaacactactgaagtattcacttaagaaaagttactatcttaaccatttttatgggttttttaccacagtaaatgaaaaactattagcttgtaagtaaattaaaaataaaactaaatgatggttaaagtgagataatgatacaacccaaaacaaataaaaatatagggagaataagaagagtagaataaaaatacaataagtgggatgctgagacaggaggatcacttgagcccagcctgcgcaacatggcaaaactccatctctataaaaagtacaaaaattagccaggcatggtg

SEQ ID NO: 209639 - DNA, 372 bp, Homo sapiens
gggggctggcctgggtaagctttaaggatatcttcagagaagtcatttacttgtgttggaacaaaaataggtcttgcatagcagcagggacagaactgacttggaggtcggaacagggtcccagttcccccttgggggtcccaattccagttcctcttcttattagctttgtaaccactaccaccctgcagctattgagtgctcacattgtagccagtacacattgaaatgacctgagtgtaaaatacacgatgaattttgaagatttagtacaagaaaatgtaaaatatctcattactattttactagtaacataatattaatgttaaatgataatatttcaatatattgggttaaataaaatatatgagt

SEQ ID NO: 209640 - DNA, 306 bp, Homo sapiens
ctggggatggtgtggtgttctcattggctgtcctttctctattttctgtaggctctgctgggaatggtgtggtcttctcattggctgtcctttctctattttctgtaggctctgctggggatagtgtggtgttctcattggccagtggggtcctttctccgtgttctgtaggctctgctggggatgatgtggttttctcattggcaaatggggtcctttgtccattttctgtaggctctgctggggatgatgtggtcttctcattggctgtcctttctctattttctgtaggctctgctgggaata

SEQ ID NO: 209641 - DNA, 586 bp, Homo sapiens
aaagagggttggagctaatggtcaggcccaagaatgtggggatggagaccctgtgggggtgagctgagaagctaggaggaagcggtcagagaatggagatgctggaaactcacagagggaggaggggagccattattggtgacggcagtggctcccaacattggccagatgtccaaatcacccagggtaaccttttaaaatcccaaggcctaggctacactgaagcaattacatcagactctgtgagggaggacccaagtatcagtattaatttttaaaaatgcctcagaggtccgggcgtggtggctgacacctgtagtcccagcactttggaaggccgaggcaggtggatcacctgagggtcaggagttcgagaccagcctgaccaacgtggagaaaccccgtctctactaaaaatacaaaaattagccggcggggtggtgcatgcctgtagtcccagctacctgggaggctgagacaggaaaattgcttgaacccagcaggcagaggttgcagtgagttgagattgtgccactgcattccagcctgggtgacacagcgagacatggtctcaaacaaaaaaaaa

SEQ ID NO: 209642 - DNA, 499 bp, Homo sapiens
gttggttttttgaaaggacaaacaagatcaatagaccactaggtagattaacaaaaaaaaaaaaaaggaagatccaagtaagtacaatcagaaacaacaaagatgatgttataaactaccctacagaaatacaaaagatcctcaaagactattacgaacacatctatttacacaaaatagaaaatctagaggaaatggttgaattcctagaaacaaacaaacctcccaagattcaatcaggaggaaactgaaaccctgaaaagacccacaacacgttccaaaattgagtcagtaacaaaaacctaccaaacaaaaaaaaaccctggaccagaaagattcacagtcaaattctaccagatgtacaaagaagagttaataccaatggtaatcaaattattcaaataaaaaatcaagtagggattactcccaaactcattatataaaatcagtattatcctaatatcaaaatcaggccaaaacatgcaatatcacaatgaaa

SEQ ID NO: 209643 - DNA, 745 bp, Homo sapiens
aaaaaatatagtgaagatcaatacctaaaggtaggcagaaagtgagacaacactttgtggggaaatgagagagacagcgaagatgaaaccaacatgtagcacagagtcgcctttgataggaagcaggcaacctcttttcctctaaaatgggaaaatgagtaaagttggtaaatacaagttgacctcttcatagtctcaattttctgttcaataggagaaagagccatatgctaggggaggggcagagggcctaaggaaagtaatgaagtttggctcagccacagcgggaaatgggagagaggccaccctagtaacaaacataaggtttacattgagggcttttctaaggctgaagtgagacacttgtagtgattctactttgaaggactacccatcacaaagaactcagcatccccgaaaaggtagataataaataggattaatctgaggttgagggcttgccaaaggactagactaaaagaccagggaaagaagaataactggtgagattagttcatatagtatcccataaagctgagggtggatagggaagaaagcctgaaaggggctgacagtttaggaggaaggggagcagtcaagaaaagggggtaagaaggaactgaagaatgtggaatgagcataaaggagagaaaagtcaataaaataaggaagtgaaaaaactgaaaagagggcagttatcagttactgaaattttaccagaaagagaaactcaaggtggtgacat

SEQ ID NO: 209644 - DNA, 685 bp, Homo sapiens
taggcggtccaaagtctgctcccatcagcagtgaaagattactcagaggaagtattgccaagaatgaatgaaacaaaagtgttttctcctaatggcagagggaacccaaccagcccataatgatttagttttcttctctagtgaaactaggtggtatgtgggggaagccgtggaggtggcctgttaccctgagtaactgtcccatgaactggctggaaacatgaacagctttacgcttcggtacatttttggttttcaggcttccttgtggctgttttcttgtttttctcttctttactatggaccgtgtgttttcaagtcctaaagtgtctttcacctctgcctctgccagcagccaggggaagcagtctcagcacagtgaaatgtgctgtgcgttgatgtcatcagaagtcatccacctcagtgaaaacagctgccagtgcattttaggaggcaagatagtagggaatggggaagcaaaaatagtgcctaccatagactttaggctttatctgattatcacagaaaaagccacatgccctcactcagcaaacacttactgaacagcagccaaatactagccacattgtttgctgtggggaacacatgtaaaatggggtacacagtccctaatatcctcacctttatggggttccctgatggggagaaacttacttgcccctta

SEQ ID NO: 209645 - DNA, 145 bp, Homo sapiens
ttgcagagcttagaacaattttgaagataaggtgtctccaagggatctgttcctgctccgttgctctttccacagcacgctacctgcagcttctgctggtatcactgcaccagactctggagcacgctgcttctctggaggagga

SEQ ID NO: 209646 - DNA, 523 bp, Homo sapiens
gtcttttaaatcacatttgtggtttcatattatctcatttaattcggattcctcttaggcctggattatctggattacattaattcaacaagcacctactcctgttttttcagacccaatggcaggttctggtgtttctgagctgtaaagggcatagtccctacactgtgggagctcccatctgacagggaaggttgacaggtgagtccagcccactgtggtagatggtgacttgccgtgccactccctgaggtccaggctttcctctcatgcagtcaggatggcaagtgacacgggtggatcagcgtggagccacaaaccagtcaacagataatgatttcacatctatcatatgctgagcacagttctacacattatgcagcactggataaaagtacaaatccctgccctcatggggcttccattctaatgtatgtatgtgtgtatgtgtgcaaatctgaatatgttaaatgataaatggtatagagaaaaaataaagctggatggggaataaagaatgatg

SEQ ID NO: 209647 - DNA, 699 bp, Homo sapiens
tcaggtagctgtcaggggctctcgtgagactcgttacttaggaaaaatgtgtctggcgtgggacggtagtcagagaggatttcttacaagacacacactccttctatcccaatcggacagtgatatgaccctggggatgttccatgaatcatttgttcctctttggccccatctgattgtgtacttatctccttacacagtccttctgaccttgaaatgatccagaaaagatgtaaaagagtaaattctatagtcagtttaaaaggcagcaggaaaggattgggaagcattttggacaaggggtctaggagacaggcccagctctgcacttttccgtgggacaaaggcctttgcattctctcctgtaagtttaggggattaaaaaaaaaaatcagtgcttaaccctttggatggcaggaggccactctgagaaacctattcccaaaatgaatattcacaatacagctctttctataatttcggaatgttccgatttcccccaagcccacacatggattctggattgtaaaccctttacgaggtccttcatgtcctgaccagcctaactagctatctgtggatctgcgacaatcaaaggctttctccacgacctggcccaggagccccctccttcctatctacatcagtggaaatgtctgaaggtacaacccctaggccagtctcacggagatgaccaat

SEQ ID NO: 209648 - DNA, 240 bp, Homo sapiens
gcccgattcactgaccatcttaagatgcgtcagattaacaagcaagcgctggcaggatttctggtggtttaccctttacgaggtccttcatgtcctgaccagcctaactagctatctgtggatctgcgacaatcaaaggctttctccacgacctggcccaggagccccctccttcctatctacatcagtggaaatgtctgaaggtacaacccctaggccagtctcacggagatgaccaat

SEQ ID NO: 209649 - DNA, 384 bp, Homo sapiens
tctcccacactggggcactgcagagtccttcccttctcgaatgttctccctggcacttgtgtttctctccttcctgacctctgcctagtcgcagatagagatgcattttgacagaaccgggaagagttgttctatttccatggcaacgtcaattcacattctgcaggtacattggccgccactgcctaaatgaaggctcctcaaggctctgtgtgttgccgtgcctggccaaaaataactgggcatgccaccgttcctcacagccccatggagagaggcattaaactgactggatgccaactgtcaactctgttcctgtcttcctgctaaagaggaagaaacaggaactgccagtgttttgggggaggggagccagggaggctg

SEQ ID NO: 209650 - DNA, 629 bp, Homo sapiens
aggacgagggatagcattggtgagatatacctaatgctagatgacgagttagtgggtgcagcgcaccacacctggctaatttttgtatttgtagtagagacagagtttcaccttgttggccaggctggtctcaaactcctgacctcaggtgatccgccctccttggtctcccaaagtgctgtgattacaggtgtgagccaccatgcccagcccagataatactttcaagaagaaaaatgtgataaaggtaggactgcctgttttcttaagttgtttctagcacctctctttactctctatggcgatgaggaatctggctgttaaagactgagtggaagattagcgtgaaacttgtcttaggcttgtaaaacaaaatgtcagggaagtcttcaagcctccagagcagcactgcccactagaactgacgtgagccacagagagacttttccagtgtatgcataaaaacctaaaaagagaggcgaaattaattttaagagtagattttatttaacctattttagccatactgctatcacttcaacacatcatttaacaaatacattaattaggcaatttacattctttgttgaaatgcagtgtgtagtatacgtttacagcacatctcagtt

SEQ ID NO: 209651 - DNA, 577 bp, Homo sapiens
accaagatggacctcccggcgctgctccccgccccgactgcgcgcggagggcaacatggcggcggccccggcccgctccgccgagccccagcgccgctcggcgcgagccccgcgcgccgccgcctgctactggtgcggggccctgaagatggcgggcccggggcgcggcccggggaggcctccgggccaagcccgccgcccgccgaggacgacagcgacggcgactctttcttggtgctgctggaagtgccgcacggcggcgctgccgccgaggctgccggatcacaggaggccgagcctggctcccgtgtcaacctggcgagccgccccgagcagggccccagcggcccggccgccccccccggccctggcgtagccccggcgggcgccgtcaccatcagcagccaggacctgctggtgcgtctcgaccgcggcgtcctcgcgctgtctgcgccgcccggccccgcaaccgcgggcgccgccgctccccgccgcgcgccccaggcctccggccccagcacgcccggctaccgctgccccgagccgcagtgcgcgctggccttcgccaagaagcacc

SEQ ID NO: 209652 - DNA, 331 bp, Homo sapiens
  misc_feature (78)..(78): n is a, c, g, or t
cttggataagcggatgagggttggggctatcctgggacctccccagcccaggaaaaactggaagccttcccccagcanggcagaagcttggaggagggttgtaaaagcatattgtaccccctcatccgcttatccaaaggaacggcggcaagaggggtgcgggtgtgctactatatctagcgggtggaggccaggaatgctgcttaacatcctacacacaggagatactgcccatgacaaggaattagctagtccaaaatgtcaacagtgccaaagctgaataaatctgttcaagagcaacacatttctattccctcttccatagtaattg

SEQ ID NO: 209653 - DNA, 468 bp, Homo sapiens
gttgcccaagctagtcccgaactcctggcctcaagcagttctcccaaatcagcctctctaagtgttaggattacaggcatgagccaccatgcccagccaaaactttgaaacataaataaaagtaaacaataatataacaaagcccttgtatctattgttagttaaaacagctatcaattcatgtctagccttattttgtctactcacttccctcactcctgtattattttgaagaaacctgttagtcacctatttgatgttatgttttagtttcttgttctgtttgtctgaaaaagtctttttttctttttaacttttttttttctttttattttttttgtgagacaggattattgcacaggcacccgtgcagtggtgcaatgatggctcactacagcctcaacttcttgagttcaagccacctcagcctctcaggtagctgggactacaggcatgtgtcaccactgg

SEQ ID NO: 209654 - DNA, 307 bp, Homo sapiens
ctcttcttcgttcctttgagataatgatttcttgtctgatccaccctcagcctggttgtcacagctgggtagtgcccccagagaagaagcagctgtagccccaggagaagctccgaggggaagagccttttaaagtggaaaaggaggatctataagctacctttcaggtgcaagacttagagagagggccaggcatggtggcttatgcctataattccagcactttgggaagccaagtcaggaggatcacttgcagccaggagttcaaaaccagcctgggctttgctgacccatctctaaaataaat

SEQ ID NO: 209655 - DNA, 435 bp, Homo sapiens
ataacatggctgagtgttggtacaggctttccacagcaatattaaaactgaaaaaatcagcaatgaagctcccagccacatttctgcctaatgatttgggggaaaacaacagaggcactcctcaacttttccttcactgcacaaagtggatttggctggaaatgccaaatgtgcttgtagctgggatctttcaaatgaaagcaagctgggagtcaacctcctgcagccgcaggccagaaatgggttgagaccaaactattatagtaacactggtgcacatctaaacagatttaactccctcccagcaatccagattaatttaatatgctttcttaatggcattccgcatttctcattaaagcaaatgaacgtccatccctctgtgataaattaggtcaaaaaacattcatatatttagggcacagggaaggagga

SEQ ID NO: 209656 - DNA, 346 bp, Homo sapiens
atctcaaaaacattatgttaagtgaaaagtgccagacacaaatgacctcatatcgtatgattccatttatatgaaattctaggaaaaactatagtaatggaaagcaaatcaggggtgaggggccttattttcccacatagtaggttttttttttaaaggcaagaatgatttaaaaacttcaaatctatatcatctcagatttaatcttcacctcataagataaatttgcaactttcttccaaatgatttacttgctcatttacaaccaatagcacattttatcactcaattctccattaaaactgtaaatcagcattggaactttgtttttttttttgttgtgttt

SEQ ID NO: 209657 - DNA, 238 bp, Homo sapiens
attctgctgcacataaaacacctaaaacaatttagaacatttgccatttctttctattctaagggaaataataggattaatgagatgttgatgagaaattgtcttctctatgcaacactgctctctgcaaaaataccaaactatgtcaaacctgttcccaaaaggaagaggattaaattctacacctagaaaattaaattctcaagctacctaccacacagtctgtcaatttatatag

SEQ ID NO: 209658 - DNA, 406 bp, Homo sapiens
ggatgtagtttatctttctgctcttttgggtatcaatggaaaacatgcacgtttattttcttgctttaattcattaatgttatcatttaaagattgttcgagttgtagatgcctttttagtgccccgtttcaccatttcatggtaaatactacttttaagaagcttcctatggcgtagtcatttttcacctcttgattgatctcagtgtcataggtgggatttggatgttctttagggatgacagagggcacctccctgggagaatacagatagaagccctctcccccatttgtcttcaagaattcttactacagaatcaagttggaaagttgatctcattaagtcatatttggtgctcttagtggaatgttgataacataataaaaactaacatctattaaaaaa

SEQ ID NO: 209659 - DNA, 438 bp, Homo sapiens
taagaccttggggatcaatttcaatctgagcttgtagtggatgaaaaaccatttctaaaccagtagcaacaggtctcgttctacttttatgttcttccatatgttttaagattttgtcgagtttttttctttgatgccaatgttgcacatttcttgttaagcttattcctagatattttagctgttcgttctggatgctatcttttttccattgtctttctcctgaatgataatatgattatgaaggctattgatttatatattttaattatgtacccagccaccttactcaatttccttaagatctataactgtttttcactaaattctttaggacttttcaagtaagcactcagccgcaagtaccaattttgtgttactaagttttctcatgagtcattctttgtttcattcctgatttttttgtttgttttttag

SEQ ID NO: 209660 - DNA, 530 bp, Homo sapiens
tctgctctctgttcatttcctcttacccttcttagcttggatacttttgtacttccactgaactcaatggcaaatccaggagacagggagaatttggaagcaatgatgggttacaaaagagacatttacttcacctctcactcttggggaatgtgaagcatgggggggaaaaagagcctctgcctgaggttgctgcaggtggcagtgtttccaggggaccactgggccatttcagaaaaggcaagaagataaagggatcattcatcaaggaagcagagactgaaaggaaccaatgggttctagtgtgtacacagaagcagaggatagggaggggttggagaggggtccattcagggaatgttcagggcagagtacagatgagcatcttaaagatgagcatgatctggaggactggatttctggtgacaactgcaatggatatcagagcacagtgtgaatgagaacttctgggtggctgtttctacctgcgtctagtgatgtcactgctgttgagagcgtgcagctgctca

SEQ ID NO: 209661 - DNA, 606 bp, Homo sapiens
tcggctccaccccttctcccagcgcatctggccaggagaccccagctcaaagccccctccagcttcaaagggcaccctggggtgggaggcaggagacgagggtggatgccctgacccactgagtccgcaccccagggcccctctctccaagctgtgacctcacctcagggttcttaacaggccttgctaacactctcccactcagatcctgtcattgtcaccatggccttcctaagacaccctcatcttctcccatccgagggtgggggagaaccaattcgattcgcaacttcaggacccaggacccatctagccgcctgggggattccctaccccacctctgcagcctgtaaattctgggggaggaggccctggagggaggatcagaggcatgtccttccccaacctcccactctggcctactaagaaatgggagcagggctgaccctatgaaagtgtgggaggtgaaggagctggagtcgtgattcctgggtatccccagacagacatcaccacactacagcccctcttctaaggtgatcccagcactttgggaggctgaagcaggaggatcccttgatgagaccagcatgggcagtataagga

SEQ ID NO: 209662 - DNA, 540 bp, Homo sapiens
cgtagaggttttccattcccactatatagcccctacaccctgaagtctccactcagaaaaaagttggcaaccctttatctgtctcccacaacatgataagtgtttttggaccgaaaatgcaaagatctggaactccatgcttcccacctctgtcggggccttctccgggtcctcctgcatctgtcatcccatcctccagagagtccctagggcctgggcaccctgcaaactcttagtgcagtcaaggtttcctggctgggggcccaagagttgccacggacccgcacacgctgcccaggcggcgacgtggcgcccctacaggcttccccgcgattggggacacgcacacccagggccaccggagggacaggtggtcaggcggactcaggtcacaccggcggacgcggggccactcacctgggccggggcggggcagctcacctgggccggggcggggccgcaggcgggcggggcggggccgcacctgagctgctccaacccgcggccgacgcggccgacgctgcctggctccacagcagc

SEQ ID NO: 209663 - DNA, 427 bp, Homo sapiens
cttggaatctttctttagttctaggaataccataaaataagaatcactgaaatatttttaaaacttatttcacaaatgaacaatctgatttaataattctattatttctctattttaaacaatcttttaaaatatagaaaatacaaagtaacctgaaattgcagagaattgtactggaaacatatctcttgttattgcatagcagataactataactatatatatataactatatatgaaatatatatgagacatatataatagttatgattgaaaaatttttaaatgtaattggtcagatgaaagttctattctcatagcagctgccatatataatccaaaatgagtttctacaggtggacgttgatggtttcactaaataaaaacaggtaaaagattttaatactgaggggaataagagctctgc

SEQ ID NO: 209664 - DNA, 652 bp, Homo sapiens
gcctgtagtcccagctactcaggaggctgagacaggagaattgcttgaacccgggaggtggaggttgcagtgagctgagatggcaccactgcactccagcctgggagacagagtgagactccatctctaaaaaaaaaatagaaaataaaagataaataactgttccttgtgagccctaacaaataacagaaagtgtatagaatagatgcaagccgggacttgggtcctgaaggccagagttcaatgtttgcatttcctaaaggaaatctagggcaatcacatctctaacggacagcggtcactttcgtgccagagataagccttgagctcttgctcacttggtacatgttgcattttctccttcatttttaactcctcaggaacccctagaatggtaaactgggaagtcacctcatttaacttaacaaggaatctggggcccagagagcttaggggtgcctcagatgctactggttatgaccacgatctgatgggtcatcgttacttgaaggggtgagcagaggcttcgcttaacttccttaaggctctcaatggaagaaccgcaagtgtctgtccccttgtcattttctgaaaaagcaatttatcattaagtcctccctgttgctgagctattcaatacttttttacctgt

SEQ ID NO: 209665 - DNA, 423 bp, Homo sapiens
tttagagtattgattgctcagatggaattgaggaaattttagtaatttctagaagcaaaattatagagttagtaaaatcatcttagcagagaataagatggtttcatgatatattttaaaatactctatactgggccaggtgtggtggctcatccctgtaatcctagcactttgggaggctgaggcaggaggatcacttgaggccaggagttagagaacagcatgggcaacacagcaagaccttgcctctacaagcaatttttaaaatcttagctgggtgtggtggcatacacctgtagtccagctactcgggaggctgaggcaggaggatcacttgagcccaggagttagaggctacagtgagctatgatcatgccactgcattccatcctgggtgacagagtgagaccgtatctcttaaac

SEQ ID NO: 209666 - DNA, 794 bp, Homo sapiens
tcaccttccaccatgattctgaggcctccccatccatgtggaactaaatggaatctttctctgttgcccaggccagagtgcattggcaccatcacagcaaagtgcagcctcaacctcctgggcttggctaaagcaatcctcccacttcaacctcctgagtagctgggactgcaggaatggggacaaagctattgaaaacttctccttctcaggctcacttcgccaacatctgtggctgaatgtagacattcccccttttaggcaaatttctttaaattcatagcaaggtatgaccaagaacattaaaacaatgcttcattgcttatgcctgacgttgaagagcaaaatttacatctgctacacagttcaaggtttccatggccttagtagaggtcatgaaatgtacagttttaaaacttattggagtatctttatgaacgattttaatggactagagtgacaatatttttatacaacattgacctcccctgccccaaatgatgtgaaagactgtggctgtattagaatttagtctagtaagaccaataccatttcagggagttttttgtagttttcctccataaatatattttccacatcaactgctctgagctgagttgctggaacattttcaattctttataagtacatattttggctgagttcagaaaccttggactaggcactgtcctttgagtgagacgtcaggattgaggtagcataggcacaagaccaaattttagttcatgatggagtattgccagcttgtgagcctctggtgctttcaaggaagc

SEQ ID NO: 209667 - DNA, 449 bp, Homo sapiens
gccaaaggcacctctgtttgaagcatccaatgaaggcccttcagagcccaggccaggtcttgcccaaggtgggggagcggcggcacacaggggccagctctccaggctgcagatgcctgcctggtggctcctgctctcccgcactcactggtgaccaggacaacatctcttgcacctcagctttctcatctacaaagcagagccaggattagagttgaagctgaaagaagggggaccctgttgccaggctgctccagctcccctcagcagcatcagagccctgagccctgaaccaccagccaaaacttgtcacccaagggctttgctgctggggtgatgggacatccagggggtcctgagacaagggggtcctttgggttcttgcatgcctgacacccaacatcaggagtgggcgtggctggtggggcatcactgggtgccctgaagct

SEQ ID NO: 209668 - DNA, 373 bp, Homo sapiens
gaattgaaaacataaattataacacacataaagcttatgaactccatttatcttaaaatagtcaatggattttttgctcaggcacaaaccttaagtataatcatcaagagcagaaaacttgaatgaatggtgtgtgaatgaatgtatgtgtacacaaaagcacactcaggtctccgaagtttaagtaaatgaaatgaaagggctttgtaaactaaaaagagccacagataaaggaggtagtagagcaacagagttaaaagcgtggagccagcctgctcgggtgttaattatattagctgtgtaaccctgtacggtacaaaagttacaatactaaaatttcctgtgccttagtttcttcactgtcaaaatgggg

SEQ ID NO: 209669 - DNA, 632 bp, Homo sapiens
aataatcaggcgtttaagtggccaaatcaagaaactcttagttccatctgggatggggcctgaggggattggggttgggggctgcctactttgaatagccttttatgcggagtgtgtggcttctccctagacctgatgaagattcccattcacaaagagagtggcttggacacatacgtgcttttgtcagtttctttaacaaattcaagattctggatagcagaaccttgtggtttgggataccagcatgctgaactgtattcttccacattccctcccacattaggaaaagattcaaggctgacaggaggtgctcactaaataaccaaaggcagaaaattaactataagttacatcctctttttttcttttcttttttgagacagagtcttgctctgtcgcccaggctggagtgcagtggcacgatcttggctcactgcaagctctgcctcccgggttcaagaaattctcctgcctcagcctcctgagtagctgggattacagcgtgcgccaccgtgcccggctaatttttgtatttttagcagagatgtggtttcaccatgttggtcaggcgggcctcgaattcttgaccttgtgatctgcccacctcgacctcccaaagtgctgggatt

SEQ ID NO: 209670 - DNA, 223 bp, Homo sapiens
gcacagtcatgtgaggagatgctggactacagcagccatctggaaaccctgatgggaaactgaggaaagatcagtgcagtgaagttgccggtacagagagaaggaaaggacctgggctggggatgctggaagaaccgctaattaatcagccctagggatgccagggtcctgcaacagctcgctatgtgaggtaatgcatgtccacattgttcacgcttgctta

SEQ ID NO: 209671 - DNA, 304 bp, Homo sapiens
taggatctgcttgcctggaaaaaaagaacaaacttcccattcatacatctttgcaaaaggtctgagtccatcttactcggactgggtgagcgcattctgtatacactatgtaggtgaccacagagtcaggtgtaactcttaccttaacctctactctaggtgacccgcaacctcaaaaatcatgtacctgtctacctgcctgccagcttcccttcatttttccaatgagtatttattgagaacctgggataaatgcagtttgtttcagggctagcaagataaatgctctctgaatacgtttgaa

SEQ ID NO: 209672 - DNA, 632 bp, Homo sapiens
gtaaaaccccatctctagtaaaaacacaaaaattagctgggtgtggtggtgtgagtctgtagtcccagctacttaggaggctaagccagggaatcgcttgaacccaggaggtcaatgttgcagtgagctgagatagcaccactgtactccagcctgggcgatagagcacgagattctgtctcaaaaacaaatgtatggctagtgaagttgctcactggcagtgggggtgggtgaatgggtgaaggcagagtttgtggtgttgggggacatttgcatagacatgtccagacagaatttggatcttcagacccagaactcagagttgaggtctggattggagcaggtttgagaatattagagtgtaggcggactcttgggagtgactacattttgtcagatcacttattctttctttcttcttcaattggtccattctaattctaatttcttgttatataagatagcttttgtcttttatatttttgtaaaaatcagatactctcctttgctttaaaaaagtacaattgtgcacaactttcccccaatttttagaagactttgctttcccctacttgcagagaacaagtcttgtttaggagcataactgatgtggttagaatctacttgtgcag

SEQ ID NO: 209673 - DNA, 459 bp, Homo sapiens
tgttcccatccttttcacatatattcctttacatgttcctttattcaacccacattaaacaaatgtttatggaaaaaatgaacataagctctgtgccaggcatgtgaaaggcactggacatgccatgaagatgcatgcaagtttttctgtcttgaaggaacatacagtttcttgtaggagacaaataaacagagataaattataatccattatgataagtgctataatagaatcaaggccaaaggtttttaaaaagttcagagcatttggctacctggtagagtcagagaaggcattactgagttggtgactttagaatgggtgttaaattgcatgaaatatatagatgtagttttagatgaaaaatgctggtaagttatagtgaaaaataagccccccttggttgtttaggaggattgggatttacagttgttgttattattttttctttctatatac

SEQ ID NO: 209674 - DNA, 384 bp, Homo sapiens
ggtagcccccttcttcagcacacgaagcccactgaaaaaagctggaagttggaatgacttctctccagagacttcttttttagaagaggcactctcagtgataccaacactcgaattctggtttgttactgcaggtaggtcttgggacccttcttctcccacctggtcctggctggggcgacgctctgtctgaagaccaccgttgccagcttccagtttgctgctcatctcaggtggaatcctttgaggatcttctgcacagagctctgcaccattcatttccccagtgacagtattttccctgaaacctcctgggttttctttggactcctgagatggctcagataaaacaccactaggggactttgggccattggtgctgct

SEQ ID NO: 209675 - DNA, 707 bp, Homo sapiens
actcttagaagaaaatgggtaaatcttcatgaacttgggcttggcaagcattctaagatatgacattaaaaacacaagcagcaaaagaagagaatttggacttcattgaaatttaaagcttttgtgctttgaaggataccatcaagaaagggaaaagacaacctacagaattggagaaaatatttgtgaatcatatctaataaagactcagaaataactttaaaaatggacaaaggatctgattagacattttcccaaatatataaaaatggccaataagcacatgaaaagatgcttgacatcattagtcatcagggaaatgcaaagcaaaaccacaatgagatatcacttcacacccactaagttggctaaaataaaaaagatagtaacaagtgttgacaagagattgtagagagattggaagccacagatactgctggtgagaatgtaaaatggtgcagccactttagaaaacagttgcaatttctcaaatgattaaacacagagctagcctatgacctagaaattcctctcctaggtatataaccaagtgaaatgaagacttatgtccacacagaaattggtcataatctctcccacatgtgcgcataacccaaatgggacaagccctatatcctaaaggggcagcgttaactggcgaatcttccctggtatatcagccgcaggggtccggtatgtatatgtcc

SEQ ID NO: 209676 - DNA, 135 bp, Homo sapiens
agcactcagtgacttatcagcgtggattgtttctccctattctgtcggtcagttgggtggttgtcctcttatctggctggcctggggctggacaatctaggacggtctcacattctgaaggttggcagactggtt

SEQ ID NO: 209677 - DNA, 595 bp, Homo sapiens
gtctcatctttgtcttgcctcactgtgctccaactgttctctctatgctccactgttctctctatgctccaacaaaaaagactcctttcagttcttgagcatgttgtgttccctctgcctggaattctctctcccctcctccttttgacctggttaactcagtctcatccttcagttctcaattcagatgtcatctcctaagaaaaaactttgatgacctttcccagacttgatcagatcttactacggagcagttacacagtttgtaaatatggctgattgtatgacttattaatatttgcttcccctgctaaatccatagagtagaaggcacctgttttcttcccattgtatttccagcacctaccatctacctagcacatagtgggaacattataaatatacgtagaatgaatgcttactaaaaatatataaacccaggccgggcgcagtagctcatggcaaatatgacctaatctgcagtttggagctggtaggatcaggtagtctgcaggggcaaggtaggcgctgcacattgaaggagtcgaagatgctgtggagagagcagttaggtatctaaaatcatgggaagata

SEQ ID NO: 209678 - DNA, 388 bp, Homo sapiens
caggactgaggccaccagcgtgaagtgcaggggacgctgggaagggaatgggagatgaggacagaggaaaggagtgagagaaggggacaatctgtggccacaatcaaacaagagtcatgggagacgggtgctgtgaagcgcctaagatgtaataaattcatctttttttttttttttattttgagacagagtctcgttctgtcgcctaggctggagtgcagtggtacaatctcagctcactgcaacctctgcctcccgggttcaagtgattctcatgcctcagcctcccaagtagctgggattacaggtgcccgccaccacacctggctaatttttgtatttttagtagagacgcagtttcaccatcttgaccaggctggtctcgaac

SEQ ID NO: 209679 - DNA, 601 bp, Homo sapiens
atttgctctatgtactggtgtatattacagtaatgaacactacaaaatatcattatcacaaaggaaatttgcatttgtattcattttaaataatcataaactaatcaataatttaattgaacactgttattcatgttgttttatactgaaatttattagttgtttaaatgtcaaagaccaaagaatgggatttctattgtatttaactctaaaacactgctgctcctactaatttattcaaatgaataggggggcttataattataacatgaggtagtaaacatccttcttggaggatcctgagttgtataaattaaggaatgcttttgtttcagaagggaaacatcattagtgtggtccacttttcttttatacatgcataacaaactccttggtattcataaaacctatatgcaaagaccgtatcccaaaatgggcccagcatggatctcctcagctgagtttcaactttcactgcttgctgaacactatttggagaataaaatttgaaatacttgtagaaccagagggctattttttaattgttaactgaggtggctctgcattttgagaaagccaatgaaaaccattaaaggaaatg

SEQ ID NO: 209680 - DNA, 395 bp, Homo sapiens
tgctgtgcccaagggactgacaaaggaaaaagttgtatttattctttgtgatttgacgcacagatgaaaaactaaacacataataacggaagttggtggttaataaatcacatcctagtctttcagagcttccgtaagcagacgacatcttcagtttctagggtcttgcagttttaacactgcaaaaccaatgagcatatgtccagaatcagctaaaaagagcgtcagattctttttctcttagtttgtctatttttcactgtctcttcttcaaaagtgtatctgaatgattaccttccggcattctctgttattactcgttggggtgctctcgattgtccccgtgtttgagggctggttgggagagggtgcttgggaaggatgtgccactgtcg

SEQ ID NO: 209681 - DNA, 135 bp, Homo sapiens
gcactccctcagttgaaggatgctctataaatacaaagcatcgttataatttattattgaacagagtcaattttttcttctgaatcatttttcaaacctctcatagctcaggcctctctgatgggagctctgaca

SEQ ID NO: 209682 - DNA, 389 bp, Homo sapiens
gcagcagaatctagcaatgcatgggacacagggggcataaaaagagttctgagacaaacccggccatcattctgaaccagggaagtcagcaaggggaactcttctgatataatggggtacaaagccagagggacacagacgaagttatctggagaaggaggagagaggccaatttgggatgggctggcataaagctgatggctgatttcttcaacaagtggatgagctcaatggaagaagaacagagaagggattccatgtcagaccttgaagaatccccatactgagagggagaaggaagaggagaaagaggcacagaggagaactgtggcagcaaggacgcacataagctagtgaagcagagaatctcaaggtaggaggccaaccct

SEQ ID NO: 209683 - DNA, 247 bp, Homo sapiens
ctttacaaaaaatttaaaaaaaaaaaaaaaaaaaaagtcaggcatggtggtgtgcacctatagtctcagctacttgggaggctgttgtgggagaatcatttgagctccagggttgaggctgcagtgagctatgatcataccactacactccagcctggtaacagagcaagaccctacctcttaacaaaaaacaaataaacaaacaaaaaagatttgaaactaaaaattcaaaggttagtccgggcgc

SEQ ID NO: 209684 - DNA, 181 bp, Homo sapiens
taaataagtaaataaaaaataaattaaacagaaaagacgaatacttgaattcaacaagtttatactagggatgcagttaattaggcagagggaaatcatacaattataattgtctccaaaggatctgctagtaactgagaaaagttaacaagtggtcttaaatttcacgttctcctggcta

SEQ ID NO: 209685 - DNA, 428 bp, Homo sapiens
ggctcgcctgccgtttacttgtgtgccccgccccccacccccacaagccacacagttgctcggtgtttcttgcagagtctaccttaaagtccctttgtcctaaatgaagatgcctcgctcggcccaggtgcactgagtcacagccgcctgcacgatgcctcccaggggctgaggcttttcatcagtatccacattggtctcatacagaccaggagttaagggccatctgtctaaggattcagagaaacaggaaaaatactcatgaaaagatactttttttttcttttttccagttttatggaagtataattgacaaatagaaattatatatatttaaggcatacaacatgatgttttgatatgtgtataaattgtgaaatgattgctgcaatcaagctaattaaaacatctatcatctcatataatta

SEQ ID NO: 209686 - DNA, 268 bp, Homo sapiens
atttttctcagtttggtacaaaggtcagtgtggattttcttttcatccccaacccatatttagtattcaaaatttttccttcttccccatttttccctgactcaccctgatgttttcactcttgtataaagctattaccaaccaaattttaatttctccactttgattttcaaatatgcctctacctctaaggactatgttacctaaacctccatgattgaacatctcccctcatttgctaagaagattcctgttgaggatgagttca

SEQ ID NO: 209687 - DNA, 221 bp, Homo sapiens
ggctggaggttagagcatagtcatggcttctgattccagtaaacactcaaggaaaataataggaatacaatgactttctgactgccttgctttaccgagggacgggaactggcaggacccccgtaactctctgagctgagcctcggggctccaggaagagatttgccaccctgtggtggcccctgatatgtagctctgtctggcgtcttcctcctgtgtga

SEQ ID NO: 209688 - DNA, 367 bp, Homo sapiens
atgagaagctcttaaactttcttggtttggcagcagagttatttttctagacaaagtataatgtgaaagtttaaatggatgaaaatgaactgaggaggcccccttggtgggagccactggggtgtgtgtggcagttgggggatcctgcatggtctcccttcattcccctaatgcctcttgaggcccctcagtgtgggccattaaaaggcccctagaccagcagatcccttctacagatctgcttattgaaaaacctgctctgtgccaggcagtgcctggaattctaaacctgaagctcccaaatgctgctctccggggcctggctcacattatcaagtcacttgggaagcttaacaaataacgtggg

SEQ ID NO: 209689 - DNA, 325 bp, Homo sapiens
tgtagagtacgtgttgtgagtttaagcttctattggtggacaagcaggcccagcaccaatttatctttatctgcaccagaccactcggttcagtgctgtgcatgcatcttgaagagtgttcaaatatttgctaaatttaaaaaaatgaataaacactgactgcatcttaaaaaaaaatcagggctcgtggagtcatatgatctacatgtgcatatataaataggattaaaaaaaggaaccatgcctgaataatcatgcctcaggcaaaggaacagtgtttaggagcagcctaggtataaaacttcatgttagctgaagtaacgcc

SEQ ID NO: 209690 - DNA, 343 bp, Homo sapiens
aaactgaggaacaagagctcttagcaggacttggatgaaaggccagtttagaacccaaggccttcccccatttggatcccttagctactctgtatactagcagacatacaaatgtaaacagagcaaaaaagatgcaagggccctcttccaaccctactgacccacctagcacatccagacctccaggagccaggctgcgatctgtttggggaacattcactgatgtcacaattttgaagtctaaaattcaagtcttgtcaatacctagaacgctcagactccttggcggctttctacctactccagcccctctggctttggcaggggcttcgtctataccatc

SEQ ID NO: 209691 - DNA, 337 bp, Homo sapiens
ggtgaacactggtttggtctggaaaggccaaacaacttgaagcaaaggtgggacaacaaagtggggagggggcttccagatcataggtagacaagcaacaaatggttgcattcctttgagtttctgattagcctttccaaaggagccaatcagatacgcatttatctcagtgagcagaagaatgactttgaatagaaagggaggcagatttgcccaagcagttcccagcttgacttttccctataacttagtgattttggggccccaagatttattttcctttcacattgtataaagaaaaagtaaaccatggagaccctacagcggacccaggttc

SEQ ID NO: 209692 - DNA, 461 bp, Homo sapiens
gggaaacaaggttgtttatttttttaaacagtattcatatttataccgctgagtgaaattatttatacacaccctgtaggttttgcatcttcagaatttgttagcattcagaggatgataaactgtaccttggacttatttgtgaaaaaatatgtagatgacacctggtggagtttattgaaactattattcaggtgtagagccagagaaactcagcagaaagggaagccgggtttttagatgtcacaatggatggttaaaaatttcagctttggggcaacattataatactcaaattatttgcctctggtcctcattttctccatctctagcatcggttctgaactcagggttttctgtaaatattaaatggcataatgcatgctgagagatctgtgtgggccctcccagggttaagaatccaataaatgttagctcatgtatcatcattattacagaga

SEQ ID NO: 209693 - DNA, 420 bp, Homo sapiens
ggacaggtgtccttataggaggaggaagatggaaagagagatttttttccctaccatgtgagcacacagcagaacagggccacctgcaagccaggaagaggcctcaccaggaaccagatctgctggtaccttgagctgagcttccagcctccagagctgtgagaaatacaaatctattgttgggccaggtgcagtggctcatgcctgtaatcccagcactttgggaggccaaggcgggtgaatcgcttgagtccaggagtttgagaccagcctgggcaacatagcgaaaccccatctctacaagaaaatacaaaaattagctgggcatagtggctcacacttgtggtcccagctacaagggaggctgaagtgggaggatggcttgagcctaggaggctgagcctgcactgcacttcagcc

SEQ ID NO: 209694 - DNA, 418 bp, Homo sapiens
ttcggccccagactattgtctgcctgccctgactcagcccaaactcagaaactgtggattctggaaagtaacgagacttttcctttgggaaagggtcctgaagctgacccacagtgctcaagaaaattggcagagaggccaggcacagtggctcacacctgtaatcccagtattttgggatgccgaggtgggcggattacctaaggtcaggagtttgagaccagcctggccaacatggtgaaaccctgtctgtactaataatacaaaaatgagccgaacatggtggtgggcacctgtaatcccagctactcatgaggctgtggcaggagaatcgcttgaacccatgaggtggaggttgcagtcagccaagatcgcaccattgcactccagcctggacgacaagcgtgaaacttcatct

SEQ ID NO: 209695 - DNA, 652 bp, Homo sapiens
  misc_feature (652)..(652): n is a, c, g, or t
gctggatgggccagagagagaagggccctgggccagggacaggagaacgggctggcctgtggccccttcctcacccgtttcagggccacttggttcccacctccaccttcttagtctgcctgccctgctttccatcttcttggaattcgccttgctgccgccccgcgcccacccccgcgcccacccctgcccctgcaccgtcccatgcccttatggatttattctttacacgtaaatatgtctttcctctttttgaaaggatttggagttggaacagagaaattcactatggatgatgctatatctttatatgacctttggaatatctgtaatcatcctgagggcaatacttatgtaatgaagatggaagaagagagaatatgaatactccgtgcactttgatcttatcgtttagctgctgatcataccatccctggagtcctacttctgactccaagttatgaggtaacaaatttctttatagttaaagcaatttgattctgggttttctgttacttgcagttgaaggcatcttaaatggcttagcgttcccagactggatttatatcctagaccgttttcttttaggttttgaacaatcattttaagcgctcttattccaccggttcccttttaggaatggcccccttcn

SEQ ID NO: 209696 - DNA, 256 bp, Homo sapiens
ggtctcaggacccctttatactcttaaaaaccaaggaccccaagagcttttgtttaaatgggttctcttaatatgctgcaaatcattagtgaaaactaagaaagtttggacacaagcatctgccattggccatcagagtgagggtgtctccccatcacacagcctctggaaacctgcactacatgcctgagaacacgagtggaaaagtccaccagtgtcaggaaaataggcttgacaccacagcaccccgggaaag

SEQ ID NO: 209697 - DNA, 199 bp, Homo sapiens
ttgcttgagttcaggagttcaacctgggcagcatagtgagaccctcatttctacaaaattggaaaaaatagccaagcatagtagtgtgcaccagtagtcccagctagtcagcaggcttgagcctgggaggtggaggctgcagtgagccaagatagtgccactgcactccagcctgggtgataaagccagaccctgtctc

SEQ ID NO: 209698 - DNA, 105 bp, Homo sapiens
agacagggtctcaccctgcctcccaggctaagcgcaatggtgagatcatggctcactgcagtctccacctccaaggctcaagcgatcctcccatctgagtctccc

SEQ ID NO: 209699 - DNA, 482 bp, Homo sapiens
ttgggatggtttgaaggagtagtagacaaaaggctgaaaaccctgtcggagagcagtagtccaggagagatgaaactgagtgatagaatggaaaagaaaggttttgagaggtgtgttggggaagggaggttggagaaataactttctgattgccaaacatgtgttcagacattctgctcatcctttatctaatttaattttcaccaaaatccatttttcatatgcagtaactgaggctttgagatgtttaaaaacctcctagctagaagtgaataggattgagattcagagccaagcatgtttggctacaaactgtctatgatttcccatgaaaccttgccttacccactgaaaataactccaggcgggaggattgctggaacccaggagttcgagactgcagtgagctatgatggtgccactgtattccagtctgggtggcagagtgagaccctgtctctaaaaacaaagacagaaagaaa

SEQ ID NO: 209700 - DNA, 535 bp, Homo sapiens
ccgtgagaaagcacaccccatatctccaaaatgctgtcaattccaccccctaaatatttttcaaatctatctcctcctcttcatccatacaaggacttcccctagtccagtccctcattttaggtctggacgatcttaacagctgtcaagtggtttgcctgcctcctataaactttcttacttatttatttagagacgaagtctcactttgtcacccaggctggagtgcagtggtgcaatcttggctcactgcaacctctgcctcccgggttcaagcgattctcctgcctcagtctcctgagtagctgggattacaggcgcccgccaccacgcctggctaattttttgtatttttagtagagacgggttggccaggctggtctcgaactcctgatccacccacctcggcctcccaaagtgctgggattacaggcctgagccacggcgcctggccaaagtactgttttttgatatgagtgagtacatctataagagcagtaactaaatgtggaactgtgaggtcaagtctatatgc

SEQ ID NO: 209701 - DNA, 363 bp, Homo sapiens
  misc_feature (202)..(202): n is a, c, g, or t
  misc_feature (211)..(211): n is a, c, g, or t
gtgctcggccccaaatgggctttttaggagttctcatggaagagatggaagtttcttcttgagtgagagcaatcccagagtctgatatttcacctagtacatgggaagggaacatgttttgtcctaagccaggtgtgaagtatagtcattcatgttgggcaaaaacgtggcaggacttggaacttctgtggggacccacaanaggagaatnagaggagaagactccatgaaatttctggtcctggtgttgtgtggatggcccagggccctggccagagagattcaactactaggtgaggtttttttcactttagacaaccctgctaaggcttcatttcacttatatgccgtctgtgggccttt

SEQ ID NO: 209702 - DNA, 530 bp, Homo sapiens
aatcctgtgcttctgtggagggagagcgaaggaagagtgtggacagtgggggccaggaagttctcaggtagcccagcaggccacgcagaagtcaaggggtgtgtaggtacaggaggggccgtctccacagggagacgcctggatccatactccatccaggcttcatctgcagagaccaggggtggacacctcgtttgtgggggccgtcacagctgatgccccagctcaggatgtccaccagaaaccaggagtcaccatcctcttaagggtggtgcctgtcctccagagagcatatcactgggttcaaaccccagctcctaccggcaaagcccggggcctccacctgggtgttcccatccatgaagcggggatacacagtgtggagcccttgggaggttggggagtgtgcctgccctcaccgcgcatcagctcataaatacaacaacagttgccttcacgtgctgatgctcagtgagcagtggcgcagttccccagctggcgcagtcagtggtgtctgtctgctgtcagag

SEQ ID NO: 209703 - DNA, 311 bp, Homo sapiens
cgatgactgattttcttttaagtgaaacatgagacaagtcatattaggtgatgtgtctaaagagtcaacatatttcctcaagccatgaaatacttatcactgagtctctatgtaccatttgtattctgtacagttcttactgagacaatgtgctaatgaaacgtacattctattggaggaagcaaatacagaacaaaatagcaattaacaatgtttatcccctattggctctcatgggctccatatacaaatctgtgatgtccagacaactccttatctctgatgactcctaactttccaccagattactg

SEQ ID NO: 209704 - DNA, 228 bp, Homo sapiens
ctgctatttcctgatgagcaaggggagcagggagcctggaatgcgaccactctcattactgagggacccccccgtttgtcattcgtcttattgcatcatcactattttaattaaccatctttgccattgggcctgcaagtaattgttctctgcattgttcaaaccactaggatggatacttttcaaggtgcaggctttccgctccatcacccattactaattaaagca

SEQ ID NO: 209705 - DNA, 250 bp, Homo sapiens
accttctgccacccttaaacctcttataattcttaatagtcagttacagttcctgttcctccagctccatgtcttcccaaacttttatgatgtttgagcacattcttgactcttgaaacatgggatcaggatttaacagtctttttttttttttttttttttttttaaaaacggggctctcactttactcgtgtcacccaggctgaaatgcagggggtgcagccacagctcgcggcatttctcaacctct

SEQ ID NO: 209706 - DNA, 715 bp, Homo sapiens
aggtcggcggcctggttgccatggcagcggggtcgcgggccggcgccagggaaggccccgaggctgcgggcggccagggctgcccgcggattcccagacccggacgcccgagccagcaaccctgaggggcggccgggcagcgccgccaccatgttcctgggcaccggggagccggccttggacacgagtcaccttatctctctaagccgagaaaagtggcctcctggaggtccctcaggacggcagggagcatgcctctgggcggccgagcgtccctgaccccgcagaagctgtggctgggaaccgcaaagccaggaagtctgacccaggccctgaactcacccctcacctgggagcatgcgtggaccggcgtccccggcggcactcctgactgtctgacagacaccttcagagtgaagaggccacatctcaggcgctctgccagcaacggtcatgtccccgggactcctgtctacagagaaaaagaagatatgtatgacgagattattgagttaaagaagtcattgcacgtgcagaagagcgacgtggacctgatgagaacgaagctccggcgcctggaggaggaaaacagcaggaaggaccggcagatagagcagctcctggatcccagccgcggcacggatttgttcggactctggcagagaaaaggcccgatgccagttgggtgagtatggtgtgtgcaggacagagcctt

SEQ ID NO: 209707 - DNA, 725 bp, Homo sapiens
tgtccatcagtgtggctgtgccctgtggcctgccgtgtctacgtgtcatcacctgccttcaagaaacatttgcagatgtgcctgaggaggcctggccaaggatttcgattggaggattgaccagaatcacaaaaatgggctacaacttaagtcattaacgggctgaagcagaggatcctgaagctggaacagcagtgcaaggagaaggacggcaccatcagcaaactccagaccgatatgaagactaccaacctggaagagatgcggatcgccatggagacatactacgaggaggtgcatcgtctccagaccctcttggcaagttctgaaaccaccggaaagaagtatgatggccgcttgcaagctgtgttttgtgtgttgccttcacgttgtggaagctcctctgagaatgtgtggctgtcacgtgggtgcggcatatactgcccttagcttggcagtgctgccaacactgcacctgttctgttcagggttagagttgacacgtttccatttgcagtgttcacagactcctcatagtgaccacgtgttgatggccaacgcgtgttcaatgccgcccgtgttcgttatagattctacatcctgccttccagcttagagctagaaagtgctgtttcaaagcagagccacctttttaggaagacattgcacacaaggacaagtttactttgccacctaatgttttcctaaataagtttatcaggaga

SEQ ID NO: 209708 - DNA, 752 bp, Homo sapiens
ttcgcagaggccgccgcttccaggaagctctccgggacgccgcgccctcgcctctgggcgcctgcgagtctgcggcccgcaggtgacggagctcacggtaatgtttgactagagtcaccacgctcgtggattttgttttcctatttctgtctttctgaagttcatgtgttgagctcacatgttgctgtccggcacctctgaatccacgtgttggcttttccagagtcaccttatctctctaagccgagaaaagtggcctcctggaggtccctcaggacggcagggagcatgcctctgggcggccgagcgtccctgaccccgcagaagctgtggctgggaaccgcaaagccaggaagtctgacccaggccctgaactcacccctcacctgggagcatgcgtggaccggcgtccccggcggcactcctgactgtctgacagacaccttcagagtgaagaggccacatctcaggcgctctgccagcaacggtcatgtccccgggactcctgtctacagagaaaaagaagatatgtatgacgagattattgagttaaagaagtcattgcacgtgcagaagagcgacgtggacctgatgagaacgaagctccggcgcctggaggaggaaaacagcaggaaggaccggcagatagagcagctcctggatcccagccgcggcacggatttgttcggactctggcagagaaaaggcccgatgccagttgggtgagtatggtgtgtgcaggacagagcctt

SEQ ID NO: 209709 - DNA, 808 bp, Homo sapiens
aggtcggcggcctggttgccatggcagcggggtcgcgggccggcgccagggaaggccccgaggctgcgggcggccagggctgcccgcggattcccagacccggacgcccgagccagcaaccctgaggggcggccgggcagcgccgccaccatgttcctgggcaccggggagccggccttggacacgagtcaccttatctctctaagccgagaaaagtggcctcctggaggtccctcaggacggcagggagcatgcctctgggcggccgagcgtccctgaccccgcagaagctgtggctgggaaccgcaaagccaggaagtctgacccaggccctgaactcacccctcacctgggagcatgcgtggaccggcgtccccggcggcactcctgactgtctgacagacaccttcagagtgaagaggccacatctcaggcgctctgccagcaacggtcatgtccccgggactcctgtctacagagaaaaagaagatatgtatgacgagattattgagttaaagaagagatggggtttcaccgtgctggccaggctggtctcgaactcctgacctcgtgatccacccacctcggcctcttaaagtgctgggattacagggtcattgcacgtgcagaagagcgacgtggacctgatgagaacgaagctccggcgcctggaggaggaaaacagcaggaaggaccggcagatagagcagctcctggatcccagccgcggcacggatttgttcggactctggcagagaaaaggcccgatgccagttgggtgagtatggtgtgtgcaggacagagcctt

SEQ ID NO: 209710 - DNA, 868 bp, Homo sapiens
gctaaagagatctggaaacagctggctgtgtggatgtacccagggcatcttcgtcagggatgttaagatgtgcagacacccaagtgaccatcctaggaagattacactcccaggtccctagaaacaggaggcagggcacgcaaggccacgcaggagcggcgcgtcggccaggaggcggcagggtcgtgcggaagacctgggccagggcctttatcatgagaaggagagggcgaggtgaggcccaagagctcccagctcccactcccagcagcaggcactgcgagcaagactggccgccggattccagcgaggaggggctcccgcggccccgctccccctgctctgatgggagaagagacgccgcggccagagtcctgcaggcccagtggaaggtgtacaagcacaagaaaaaaaaggctgttctggatgaggcggctgtggtgcttcaggcagctttcaggggacatctcacgcggacaaagctcttagcaagcaaagcacatggctcagagccacccagcgtgccaggcctcccagaccagagctctcctgtgccccgcgttccgagccccatcgcccaggccacgggcagccctgtgcaggaggaggccatcgtcatcatccagtccgctctgcgggcacacctggcccgggccaggcacagtgctaccggtaaaagaaccaccaccgcagcttctaccaggaggagatcggcttcagccacacacggggacgcctcctccccacccttcctcgcagctcttcctggtaatttcattcatttggattctggcaccagggcagctggtctgctgaggtctcagccaaaagagtggccacctccaaggaagccgggctgttgtcggga

SEQ ID NO: 209711 - DNA, 5769 bp, Homo sapiens
aggtcggcggcctggttgccatggcagcggggtcgcgggccggcgccagggaaggccccgaggctgcgggcggccagggctgcccgcggattcccagacccggacgcccgagccagcaaccctgaggggcggccgggcagcgccgccaccatgttcctgggcaccggggagccggccttggacacgaaagcaaaaaggaaagctttccacaaacctccacccacatcgccaaagtcaccttatctctctaagccgagaaaagtggcctcctggaggtccctcaggacggcagggagcatgcctctgggcggccgagcgtccctgaccccgcagaagctgtggctgggaaccgcaaagccaggaagtctgacccaggccctgaactcacccctcacctgggagcatgcgtggaccggcgtccccggcggcactcctgactgtctgacagacaccttcagagtgaagaggccacatctcaggcgctctgccagcaacggtcatgtccccgggactcctgtctacagagaaaaagaagatatgtatgacgagattattgagttaaagaagtcattgcacgtgcagaagagcgacgtggacctgatgagaacgaagctccggcgcctggaggaggaaaacagcaggaaggaccggcagatagagcagctcctggatcccagccgcggcacggatttgttcggactctggcagagaaaaggcccgatgccagttgggtcattaacgggctgaagcagaggatcctgaagctggaacagcagtgcaaggagaaggacggcaccatcagcaaactccagaccgatatgaagactaccaacctggaagagatgcggatcgccatggagacatactacgaggaggtgcatcgtctccagaccctcttggcaagttctgaaaccaccggaaagaagcccctgggggagaagaagacgggcgccaaaaggcagaagaagatgggcagtgccctcctgagcttgtcccggagtgtccaggagctcacggaagagaaccagagcctgaaggaggacctggaccgcgtgctgagcacctccccaaccatctccaagacacagggttatgtggagtggagcaagccccggctgctgaggcgcattgtggagctggagaagaaactaagtgtgatggagagctcaaaatcacacgccgcagagccagtcagatcacacccgccagcctgccttgcatccagctctgcgctgcacagacagccacgaggggaccgcaacaaggaccacgagcgtctccgaggggctgtgagagacctgaaggaagagcggaccgcgctgcaggagcagctgctgcagagagatttggaggtgaagcagctcctgcaggcgaaggccgacctggagaaggagctggagtgcgcgagggagggcgaggaggagaggagagagcgagaggaggttttgagagaggagattcagacacttaccagcaagctccaagaattgcaagaaatgaagaaagaagagaaagaggattgcccggaagttcctcataaggcccaagagctcccagctcccactcccagcagcaggcactgcgagcaagactggccgccggattccagcgaggaggggctcccgcggccccgctccccctgctctgatgggagaagagacgccgcggccagagtcctgcaggcccagtggaaggtgtacaagcacaagaaaaaaaaggctgttctggatgaggcggctgtggtgcttcaggcagctttcaggggacatctcacgcggacaaagctcttagcaagcaaagcacatggctcagagccacccagcgtgccaggcctcccagaccagagctctcctgtgccccgcgttccgagccccatcgcccaggccacgggcagccctgtgcaggaggaggccatcgtcatcatccagtccgctctgcgggcacacctggcccgggccaggcacagtgctaccggtaaaagaaccaccaccgcagcttctaccaggaggagatcggcttcagccacacacggggacgcctcctccccacccttcctcgcagctcttcctgacccctctccctcagggccacaggccgtggcacctctacctggggatgacgtcaactccgatgattccgacgatattgtcattgcaccgtctctgcccatgaagaactttccagtttaggtccccgtcactgtctccacgctgtgatggcagcgctgccgaggacataggaaccacgactggaaagataatttatcgtgttaggagaagaacgatgatacctacttaacacctcagcatctgcgtcgtgtctctttgtgcttttgtttgtggaaggagacccaaatgcctttactttattctctggggagggccagcggctcgcatccccctcatctccagctgcagctcggatggtggattttcagtgccaacagacacatctgccgtgaactcgcatatgccagggagccctgtagtgacacgttctctgacagcaccttgccgcctgcccacgaccttgaccgtgaggagctgctatccgcaaccagcgccgacaccatgccccctcttcctggtgacaccctcaacaaccaggatttgctccatctcagcccagcaggccaggcagacacaccccgctgtgccttaggaaggtgtgagaccggcttcccccatccccacagcaaaacacggcctgtcccaagccagtgaggagctaaagacacccaggtccccaaatgatcttactccatgccccacccgctcacaccgtcctttcccgtcacccttgctatcccctggagcactgccctccagagctgcccttcccaggaaggaatttggttggattctgtcactgtggagaccaagattttttaaaattcccaattataatcacaaaagcagcatcacacttgcttctgagaacagcagggtgatgtctgttcccaagctggtggcgggagccttagcctgtgtggggccacccggggaagaggaggagaggagggtgaggaggcaggctcgccgttccaagggacagcataggctcgtggtggggcgtgttgcatctggtgtctgggacagtccccgtcaccccatgtgtgcggcctctgcactcccaagctccatggctgggctgggctgggctgggctgggctgggcgtgcggagcctgtggagccagcagctgcagaggcctaggagggagttcctgggggaagcgcacagtgtccagtgcccatctcttgcttgtgtgtgagattagcccttgctggggcgtcaagaggaagagccttagacctgggcaggccttcaggggcatctagacccctgcacagcccaggcctggtgtctgcatttccacagcacccctgtggggactcctgccggggctggccgctgtctcaggagagacccaatggttagaaagcccctttttacacagctgacagcttctcccaaggcttccgtccacggggacaggcttaacccctgggcgccttttctgcagcatggcggccttctgagtcacctaagctgagcctggggcattctctgtggcggtcagaaggccgatggccccaacacagtggcttgtgaaagggagagaggaggctctgcatgtccacctgctctatgggaggaggacacaggtgtccccagcccagcctgttctctcccagtcactcaagggatggggccacccaaagtgcaggacccgccccaccctgcggttcgaagcctggcccctgtctccacttagcttctgtttctgcagtgggtggaagcgagtcagcgggggccctggcttgtgtacgtgttttccttatttggtctgtgggttgccaagtccatttttttttccactgaactggctggtaacttgatggactgtgtaactgacacaggccctctttagacccctgccttcaccccacccgcccgggtccactccctggggcgctgccccagcgtcaagtgccaaagcaggccccatctaccacttcagggtcgacgttggtggcaggtgttgttcacggtgtactgattgtcactgcaacacctccacatcaccttgaacttcaagaacagcagcaaagctgtatctgctatcagaggctgttaggtagtccagctttaaaataacacactctttctctatcccatgccctttaaacaagcagccacaggagatgtcagtctccagggcctggccccactgtgttgacagcagtcatgtctgttgagctgacactgctgaggctgaagctggccctgtgcaggtggctggtgagccacaggtgcagtacccggaggtgtgctctcccctagaggcctgtccccaactcctcccctagaggcctattcccgctgctcacagacctcagcagaggcaccagctggagggctccagggacatccttggaaatacaggaggctttcctggcacagggcacagctcttaggaggcctttgtaggacgctgtctccccagcgtgtcctgctcatccaggatggggagaaagaggaggaggccccaggctcagaagccagggacagactgccgacgattaccaaactgaatccaggcagtgccatgaccctgggtgtcccttggttcacatcacccaccagacagctgcggagagagtgcagggaggggctgggaccaaacaggccagaaaccagcagaaaagaggcagaagtgaggtgggtgtgcctggggcacgaagccagcgccggggggatttcagtggagccttacagccaggctccgtgcggactgtgatgccagagaggcgtgcagcctctgggcaagtcgggagagggcttgggtggtccccacaaggcagaagaggtggaagggccagagaagaccaccaagaccaccgttcccgcaggcctggggtgagtgacctgactgagactagcgggcagagccaagcagggctaaactccaacccagggcccggtgttggacaaagtagctttttctttgctcgtttgtctgtgtattaagaagagactaaaatagccaaacgacgctggtcgcatgcgctggctgtggtctgtctgctgaatgtctatttttgtctcctgacgagacgtgaggaccatgcccttgatccctccgatggaccagaaacccccttccttgcaaaaaaaaggcaattgaattaggaaaagatagaccaacctagctcagatccaccaagataagcacagcaaagcttggctgcatttttgaggaataaaaacctgcagaaagcaccgataaccttcaagatctgaatgagattctattataacccgtctaaacgattgcaaaattcctcctttggttttggaagcagcgtttgctctcccgtggctcggattctctgaggaccagggagttgacacacaaaccccgccatgggtccgagccagctatttctcaaggctcccacctcgccaagctcccaagggcctgctggcagtgcctacgctgtgccaactaccctgtctggtacagaccacggctgggtaagcacccttaaaagcaacagaaatgacgtctggaagctgaaatgtgaaactgtcaagatggcttaggagaggaaggagtggacccgctggtctttggcattttgtatttagaattattctaactttatacataatgtataggccgatcttttggaagggataaggttttcattcttgtgcaactcattattctcattattggccttttaaataaaaagttgttttgc

SEQ ID NO: 209712 - DNA, 329 bp, Homo sapiens
aggactcaaatggggcttataatgtgacagtctaattttattttaggtgatgaatgaaataaaagagaaagtactataaattgataaactttcatatctatgtacatatatgagaatccacacacacacacactcactcacaaagctatgctaacactatgagttcagatgttgatgtactcagccctccagaggctgtcccccaagcagggagctgcctctctagcatatgctcaggtctattggtacccactctgaggccatggggtgtattaggaggcatggctggatgtgctgcctgtgcattttcaccactaagtgacatgtcc

SEQ ID NO: 209713 - DNA, 286 bp, Homo sapiens
ctagttcaagatctgcataaaatgagaagtggctgctgaatttgattcagagtcaatgcaatgccccttcctcctgattcagtttcgctatgagaaaatgcaggcccacatctttgtggagaatgccagcatcgcctaggcactgaagaatgtcagtggcaagattagggatgaggataacaaaaagatgtcaatctttgtcaaccccactgataccccctgcagagaaagctgaagtcggaaaaggcaaagcagataaagctgatggtgaagaagcgatgtgatt

SEQ ID NO: 209714 - DNA, 353 bp, Homo sapiens
agagaggctagagaagaggggctgaggagccaagggcagcagaaaccaactcctaggaagtcaaagcagaaggtgggtcacaggatcgacaaggggcctcgggtctgagtgtgcccaggcaaaggaggccccgaatgaggatgaggccaaggtctgagacctccctgaaacctggcatatctgggccagagtaaagccccttactattggagcccagatctcagcatcgggccatgagtcttgcatgtccctgtccacactaggcagcctcctgggcccccagcaagcaggaccccctgacccaagctgcatatcattggttactggcaatggagaagggctctgtcgggggg

SEQ ID NO: 209715 - DNA, 273 bp, Homo sapiens
gaatttattcatcttataactgaaattttgtaccttttagccaacatctccctatttctcccaccccacagcccctgggaaccaccattccattctctgcttctttaagtttgattattttagattcatcatataagtgagatcatgtaatatttttctttctgtgtctggcttattttacttagtataatgtcctccaggttcattcatgacactccaaataggatttcctttattcccaagactgaataacatgcatatatatatggatgt

SEQ ID NO: 209716 - DNA, 376 bp, Homo sapiens
cggggagtctccccactaaaaacagctttgtcccttcaggcgtctgaccttagtgtctcagagggccaggaagcacaggccatgatgggctgccctagagctgtcagaagccagcccttgtcagagggttaaagctgctctccaaagcctgcccccagcagggcaaaatggcccaggctgcgcagccctggtggacacattcagcccaggacacatgtacagccgatgacttctgatgctgctctggggctcttagtctccctgtgttcaatgaaactgctgttggcttcagctcttgcatttaattttttaccactaaacaatcatttggatttgcccactgtggtgtttactgccagcatacagagggccagat

SEQ ID NO: 209717 - DNA, 578 bp, Homo sapiens
gctacatataaggatattctcctatgtgatcacaatacaaacaccaaaagtcaaaatcagaaactaatgttgccatattactaaaatcttatcttcaaaccctattcagtttttcccagttatcccaacaatgtcctttccagcatgaggattcagttcaggatcatgggatgcatttagttgtatctacatccttcgttctgtaacagttcctgatgtcttttgttggttactacaacattgacacctttagagatcataggccagttatattgttaaatgtcccacattttgtgtttgtctgatgtttccttatgattagatttactgtatgcatctttgggagaaatatcacataagggatgctgtattcttctcattgcaccctatcaggcaacacatgccttcaggttatccctgatgattactgatgatattcgctttgatcccttaattgtgatggctcctgtcaagcctctctactatgaagttactcatttcccctttgtactttttgaaataaatattttgcaaagagatgctttaaaaccatgtaaatatgccacatctcaccaaat

SEQ ID NO: 209718 - DNA, 700 bp, Homo sapiens
gacatatggcaagccaagtacaaaaggaaatttatatacatcaaaatccagttaactgtgcaattgtagcgcttccacgtactctttaattggaagtgattaatctacactacaatggcatgctaaaaagcaaatatcaagggaagaatctaacagaattctatatactccctcccaagcaataaatatcacaatgaaaatcatatgcccatgtactagtatctgcatttagcagtaccaatctgtatgaggacattttcaaaggggaaatctcattcgagatcaacatgagcaatccattttaatgaaaacaataaccttattaagtgatgcaattatccatccctccaaaattaattcaattcttaatgagacctgcattaccaaaaaaaaatttcaattatttttatttgaattttgtcaatacaaattggtggaaatttatcttctctcttgtaatataaatctgtcaccccaggctggagtgcagtgccataaggctcactgcagccgcaacctcccaggctcaggtgatcctcctacctcagccttccgcgtatctgggactacaggtgtgcaccaccatgcccagctaacttttttttatttttgtggaaacaaggtctcactatgtcactcaggctggtggagaattcctgggctcaagtgatcctctgacctcggccttccaaagtgctgg

SEQ ID NO: 209719 - DNA, 410 bp, Homo sapiens
tggaccacgtggccttttccccagtatagagtatactcttggccacagctggccaagtatgactagcaggccaaatccagcccatccagcccaccacctgattttttttttttttttgagatggagtctcactcactctgtcacccactgcccaggctagagtgcagtggcttgatctcagctcactgcaacttctgcctcctgggttcaaacgattctcctgcctcgggctcccgagtagctgggactacaggcatgcgccaccacgccgggctaatttttgtatttttagtagagatggggtttcgccatattggccatgctggtctcgaactcctgacctcaagtgatccagccccctcggcctcccaaagtgattttgtaaataaagttttattggaagacaacca

SEQ ID NO: 209720 - DNA, 823 bp, Homo sapiens
gttcattgccacagcactgttgtttctcctttgttaagtatttcagaggaaattctggacaaaggaaaggtatatgggtcttcaagtagagcagggatgtgttccagtagttgtcaactagactgagaaaacttggatgtcttacgaaacaatgtcagaaatccatttctgtgttctgtgactttctacaaacacaatttttaaaaatccaaatatagcttagaccatcagtagtctaattcagtgtttcccagatttgagatttcttttggaactttagaacgtcaaaatgaatcttgggacattgataagattgcagactttttattttataaattgattaaggatattaaacttgccactttcaatataaaaaattaaggaaggttataacctttgtgaaaaacttgctacatagttatttatctcatcaaagaccagtgaaaactttctcatagaccaacacttggaaactatcagtctaaataaccagtctatattcaaaaattcagtaaagatttcttcacttctaatgctcattgacttcagttatcttataggtggaaagaagtagataccaaaacagatcttgattacaaaattcgttgatgacctagttgactctttccccagtcattactaatcctaacctttgggagcaacattctactagtctgctccaactggccacttggcccgtcgaatcgagaaccggcattccatacgccgggtatgatccagcggggatcctacctcgggacaagggcccggtggacacgcggcaatcgctccgggctgacacgtccgagcgtccacttggttt

SEQ ID NO: 209721 - DNA, 1013 bp, Homo sapiens
gttcattgccacagcactgttgtttctcctttgttaagtatttcagaggaaattctggacaaaggaaaggtatatgggtcttcaagtagagcagggatgtgttccagtagttgtcaactagactgagaaaacttggatgtcttacgaaacaatgtcagaaatccatttctgtgttctgtgactttctacaaacacaatttttaaaaatccaaatatagcttagaccatcagtagtctaattcagtgtttcccagatttgagatttcttttggaactttagaacgtcaaaatgaatcttgggacattgataagattgcagactttttattttataaattgattaaggatattaaacttgccactttcaatataaaaaattaaggaaggttataacctttgtgaaaaacttgctacatagttatttatctcatcaaagaccagtgaaaactttctcatagaccaacacttggaaactatcagtctaaataaccagtctatattcaaaaattcagtaaagatttcttcacttctaatgctcattgacttcagttatcttataggtggaaagaagtagataccaaaacagatcttgattacaaaattcgttgatgacctagttgactctttccccagtcattactaatcctaacctttgggagcgaaaaatatctaaataagttctggtttacaaatttgcaaaatttttgtcaacacttcagaattcagaaaaaaacacaggacatttttactatataacttcctaagtttatatgatatatcaaaagtcagtaaggattataccataataatatttacatttcacagggaagcaaaatacttggagcctctccttgtctttgtctaaagatttgtcattcatttgcattcaaataaattctttgctttcattcatccagaatggttctcaatttattagctcatgagactacataaatagacttgtattcatacattttaatttcagtgtaaaatggctttcctcaatttttttt

SEQ ID NO: 209722 - DNA, 706 bp, Homo sapiens
cccagctgcaacaataaacaaaaaaatgcatgaaacaatgtttttttcaagacactagacatcaggtgacaaaagatagtgttcgagagatggtaaacgtgaggtgagccctgcaattgcttagcttacagacttgagagtttatcaggtcatcacacagggaaggagaactaagacaagagaccagctgacttccttggttgtaacagagctaagtccagaaagaacaaggtaactgcagcttataaggaagggtaccagagagagagttttgcacagagagagaaccccggagatctgcagaggaacccctggagtatgtagcagagtacatcagcatacacgtgtgacataatcacttgcttctagggaaagaaccatctgaatgcattggaatagtgcttgacactcagacagggccaagaacaatgcctgttcagaattcacaggtcattgggtagaggactaagcaaggtcttgcctcattagaggggaaaattagccttagattgcacactgcctaatacccacctaacagggcataacagcaagacttgaatgcatcaaatggttcccaagtagcttttttttttttatttttttgagatggaatctcactctgtctcccgggctggagtgcagtggcaaatctcggctcactgcaacattgtttcccaggttcaaatgattctcctgcctcagcctc

SEQ ID NO: 209723 - DNA, 838 bp, Homo sapiens
cccagctgcaacaataaacaaaaaaatgcatgaaacaatgtttttttcaagacactagacatcaggtgacaaaagatagtgttcgagagatggtaaacgtgaggtgagccctgcaattgcttagcttacagacttgagagtttatcaggtcatcacacagggaaggagaactaagacaagagaccagctgacttccttggttgtaacagagctaagtccagaaagaacaaggtaactgcagcttataaggaagggtaccagagagagagttttgcacagagagagaaccccggagatctgcagaggaacccctggagtatgtagcagagtacatcagcatacacgtgtgacataatcacttgcttctagggaaagaaccatctgaatgcattggaatagtgcttgacactcagacagggccaagaacaatgcctgttcagaattcacaggtcattgggtagaggactaagcaaggtcttgcctcattagaggggaaaattagccttagattgcacactgcctaatacccacctaacagggcataacagcaagacttgaatgcatcaaatggttcccaagtagcttttttttttttatttttttgagatggaatctcactctgtctcccgggctggaactataaaagaaagaaagagagagagagagagagaaaggaaggagggaagggaagggaggggggcagaagcaggaagcatgtaaacaggtggtatgtgattggcagggctaagaccagaaggatgagaaggagccagttgtgtcagagttagaggaaaagtagttcacagtaggaagtcaggagcaaagactgaggcaggaa

SEQ ID NO: 209724 - DNA, 705 bp, Homo sapiens
tccttgcctgccaatagtggcttcacccaacttggggtgcattcttctacagtttctgatttctcaacttcacctaacattcccttgccttcttggatccctctcttgcccaacactaccatgcatggctgatagggcactgttctgccccatatcccatgggttctacttaacccagagctggcttacctggaaaccaagcttattctgtagtggcagacctcacgccatcttgcttaatagccttcagttttcctttagttgattaatgtatcactcaatagattatgcaagacctactctgctaggcactgtactaggccctgtggtttatatttaaatgaagagggaatgatctctgactttaaaatgctggaagaagagatgagatgcatcaagaccgtcaaaccacaagtgataagtgctgtcagagatgtgtggatcactggctcagggagttccaaggatagagacatattatctgtttgggaagggcttggtgggggaaaggcattcagccgggccttgaaaatcaattaaagtttgaatatgaggaaagaaagaagagcatctcagacaaggacatggcatggatgaaggcacagaggtatgggcgtgcagggcatctgtggaaatggacagctcagttctcgccgagggagggagttggtgcagagcctgggggccctgccttcagaagataaa

SEQ ID NO: 209725 - DNA, 451 bp, Homo sapiens
tccttgcctgccaatagtggcttcacccaacttggggtgcattcttctacagtttctgatttctcaacttcacctaacattcccttgccttcttggatccctctcttgcccaacactaccatgcatggctgatagggcactgttctgccccatatcccatgggttctacttaacccagagctggcttacctggaaaccaagcttattctgtagtggcagacctcacgccatcttgcttaatagccttcagttttcctttagttgattaatgtatcactcaatagattatgcaagacctactctgctaggcactgtactaggccctgtggtttatatttaaatgaagagggaatgatctctgactttaaaatgctggaagaagagggttgacgggaactttaacacagatcgaccaacatcccaacatcactgtgagtgggaccagactgta

SEQ ID NO: 209726 - DNA, 552 bp, Homo sapiens
aatgatgtccttctaccataacattttcaggcagaggtttcacctctacctctcatgggtattctagaaagagattatcatactggattagaatacatgcaaggcttttccatctgggagagagataagaaggaaataatacaaaggagactgtgccatgggataggagaggtggcgaatagctttgttctgaaatatgtgcagttggaataaaacaaccacattgattggagagaagacttctttcatcatttgaggaaaaaatactctcaaaatatatccagaatgtcaaacagtgctatcaatagctagaagttaaattaaatccttcattgctagtgagcttactgtccttttgttgtttaattgaaatgactttttattgtttgcctaaattggtgtgctttttactaggatgatggatggggaagcatatctcattctacactcctccaccagttaattgactagaaaattatcatgggccattttctcattggctagtgctgaatacagctgtaccagagctttgcaaacaattccactaagaaa

SEQ ID NO: 209727 - DNA, 356 bp, Homo sapiens
agcaggcccagtgggctgctagaatcccagcagccaggagagtgatgtgtcccagcagaggaggccactggaacagagcaaaaaccacaggaaccgaaacttcccgggtgcccatgagtcaccaccctgtgagggctgggccctggggctgggtgggaactttcccaggccttgaccctcagctcaagggcatgtcccttgaccccatgacaacacaaagagagggctgcagcctggggttcacaccctggtatgtctctgtcttactctcagtatctctgccaagagatcatttgattcattaattagtgtaagtatgtatatctttagaataggaaatacaggcatattgcaaa

SEQ ID NO: 209728 - DNA, 623 bp, Homo sapiens
tttaaattcgtttcagtgagtgaataatgcccaagcttttggttttcagatataatcattgtaatatttaatcccttgaaattacctcttaatcttaaagtctatcagctttaaactctaggcagcaaatgcactgcaggcatgttttagggagttttgacttctttgggtttgtttgataacatttgataaataattgcctttctgtgttgaatttctttcttttttccctttttttttttttgagactccatctccaaaaataaaaataaaaaataaataaaaattaaaaaatttaaaaaatgccaaaatattttagagaaagaaaagactgactgaacctaaggaattccaacatctggaagtctggtaggccaaatcagatcagcagataagactcaggagtggcttccagagaggtggcaggaatgtgtactatcacagtaacctgtagtagtttgtgtcttgtgttcattttcttagtactgcctttttgaaggacagaagtttatagttttggtgaagttcagtttaccagctttttttttttttttttttttttttttttttttttttttttttttttttttttttttttttttttttttttttttttttttttt

SEQ ID NO: 209729 - DNA, 358 bp, Homo sapiens
taaaaaatgcacaccatcttccagcaactcatacaaatgtttccatttcagagaaatttaagaacttttgaaggctgtattcctcttaaatgtgagacttatacttcagaagtttctattaaggtatgtgttaatccacaccaagagaaagaacttggaaaaacttgctctgtcaaaactgttggaaaccatctcgagatggttcctctagctagataagtttaattaaaagtgcatgcaccactggtgtacatgtgcacggaccccaccaccccatcaccactggcacatacacatggaccctgctgccaccgtcctggcaaagtgcttttgctggcacccccacattggaatgtta

SEQ ID NO: 209730 - DNA, 294 bp, Homo sapiens
accatgctccagcctttgctccagagtgagattctgtctcttaaaaaaaagggaaaaaaaaggaactattgaagatctcttgaagccctcaaaaattacaggaaattttcacttactattccacctgtctgtttgatgcctcttcattatccagaccactttcacgtttgtttctatagattaaaagtttgggatattccagggttctccagcttttacagagttccatttgggattctgattgttagcaatagcttgaggtgtgacagtttctccttgtctctgttttgtaaa

SEQ ID NO: 209731 - DNA, 399 bp, Homo sapiens
tgccacagtgactgaggaatgggcatgtgagactgagtttgggccactgaaacatgatggtatctgggaaaaggcttcttgcttctgtagatgggccatggaagcccgctggctccggctccctcctgtgctggatgtaaatgaggaagcatctggccccaactgctccactgccacactacagccagagaaggactcaccttaggcagaggtcgacactgtggagggcagtgtggtgacccctaagaaacctggacccttgggggaggggggagggaaagcattaggagatatacctaatgtaaatgacgagttaatgggtgcagcacaccaacatggcacatgtatacatatgtaacaaacctgcacgttgtacacatgtaccctagaacttaaatt

SEQ ID NO: 209732 - DNA, 204 bp, Homo sapiens
ctccctaaggaagttaacgttcactattcagtatcttttcatacttttttctttgtttctacagtaaacataaatagctatatatagtgtcccttttaataaaaatgtgattgtgcaatacacattatttttattctttcaacacgtgttcagggttctgggccggggtggacggtgggtgggatggaggcgaccttggagcag

SEQ ID NO: 209733 - DNA, 546 bp, Homo sapiens
ataagacactaactcaatttcatttcttcttctacgtgctgagaataaaacaaggtataaaacatgattatccacatcaaaaaacttatccaccactatcaaatagactttaatccctctgatgcaagattggttcaacatacagaaatcaataaatgtgattcatcacataaaaagaactaaacccaaaaaccacattattatctcaatagatgcaaaaaaggcttttaataaaattcaacattgctttatgttaaaaaccctcaacaggctgtgcgtggtggttcacgcctgtaatcccagcactttgggaggctaaggcaggcggatcatgaggtcaggagttcgagaccagcctagccaacatggtgaaaccccatgtctattaaaattacaaatattagccaggcatggtggcatgcacctgcaatcccagctacttgggaggctgaggcaggagaatctcttgaacccaggaaatggaggttgcagtgtgccaagattgtgccattgcactccagcctgggtgacagagtgacactctgt

SEQ ID NO: 209734 - DNA, 991 bp, Homo sapiens
  misc_feature (514)..(514): n is a, c, g, or t
  misc_feature (518)..(518): n is a, c, g, or t
  misc_feature (523)..(523): n is a, c, g, or t
  misc_feature (574)..(574): n is a, c, g, or t
  misc_feature (578)..(578): n is a, c, g, or t
  misc_feature (613)..(613): n is a, c, g, or t
catctccacacactaataaatcccacccatgcttaaggcctggccacagtctttgtgtaccccattctgtatgtgctggatctccccactcagatcagcctgtgctagaggagcagaggtgcttctgaaggaggtccatatggctggccaaccaagtcgtgttttcctaagaggctctctcttcatgaccaagttttggtgctcacggagatctatggcccctgtcccagctcaggcatccacatgcctttcaggggccgggctccaatctccaacccttattccatcctagctgccagaaggagctttctcacacagtttactgtcactcctctgctcaaatctgtcaatggctcccctgtgcctgcagggtaaagacctagccctttagcctgacattcaaagcccttggtgaggctgggcgtggtggttcatgcctgtaatcccaatactttaggaggccgaggggggcagatcaccaggctggtctcgaactcctgaccttgtgaaccanccanctcangctcccaaagtgctgggattacaggcgtgagccaccgcacccggactcggngctncttttctccctgaataacttctactgggctgatcnaacctcccatctcagaaagtccaccctcaagatgttccaggcacctcctttaactccgaagtttccagttccatggcgaatcccatgatggtgtcggcgccataaatgggtgccgtttttccttaaaccattatttcccaggggccccatttctcgaggggggagaatgctcagtggtcctcacacgcacttcacagcaaccccttcagggcgacacccggtccgacctcgttcctgtctgggcggcgatacgcgccggatgccccgccccggcccgccactggcgcccgcgcgcgcgcacacagacccgaacccgcagggcacggaggcaccgacaccgcaccccgcgccccccgctagccgccggccgcgcctgct

SEQ ID NO: 209735 - DNA, 742 bp, Homo sapiens
  misc_feature (514)..(514): n is a, c, g, or t
  misc_feature (518)..(518): n is a, c, g, or t
  misc_feature (523)..(523): n is a, c, g, or t
  misc_feature (574)..(574): n is a, c, g, or t
  misc_feature (578)..(578): n is a, c, g, or t
catctccacacactaataaatcccacccatgcttaaggcctggccacagtctttgtgtaccccattctgtatgtgctggatctccccactcagatcagcctgtgctagaggagcagaggtgcttctgaaggaggtccatatggctggccaaccaagtcgtgttttcctaagaggctctctcttcatgaccaagttttggtgctcacggagatctatggcccctgtcccagctcaggcatccacatgcctttcaggggccgggctccaatctccaacccttattccatcctagctgccagaaggagctttctcacacagtttactgtcactcctctgctcaaatctgtcaatggctcccctgtgcctgcagggtaaagacctagccctttagcctgacattcaaagcccttggtgaggctgggcgtggtggttcatgcctgtaatcccaatactttaggaggccgaggggggcagatcaccaggctggtctcgaactcctgaccttgtgaaccanccanctcangctcccaaagtgctgggattacaggcgtgagccaccgcacccggactcggngctnctttctccctggatacctctcctggctggatcaaccctccatcttaaaagatccacctaagattgtccaggacatcatttcgacgtgtccaggacaatgcagatccatagaggggtgtggagcatagcagtgcagattttaccttaatactgtcttttcccagc

SEQ ID NO: 209736 - DNA, 409 bp, Homo sapiens
gattagcaatcctacttcagtacactttcattgggagccagctcgtgcccaggggtgggatgggaagatgaagttgggaagctgcccttcagcggttcaaaggaggggtcctgcaggtgggccgcagtggcaggtggtgaaagacacaaggccaggggaagccctgacaagggagggcattcactttcccagtgtgaagacggcatttgtgtcattttctaattactgaggcagtttttctttgtggttaagtccacactggactctgaacccagactattacctgctgggtgtggcggctcacacctttaatcccaagaatttgggaagccaaggagggtggatcacttgagcccaggagttcaagaccagcctgggcaacatcatgaacctcctctctgaaaaaaaa

SEQ ID NO: 209737 - DNA, 319 bp, Homo sapiens
ccaataggttccaatgatgctcctgagatgagggatgttaattattagttgcttcatgggtagctgtccctgccattgttaaatactaaaactctactatataactgtggtaatgattcccctttgactagttatggcctttcccttaaaagtaaaatgacaacactctaatatttattgccaaaagcaaccagaaaactgtagcaaatatctgaaacaaaaacaaacaaagaaacaaacaaaaacagcacttcaccccttgtaaagcaaaagtcaaaatttttctatttcaaagttcaccaagctctcaggcctctta

SEQ ID NO: 209738 - DNA, 395 bp, Homo sapiens
atgtatatggaagccaagaaaagggtttccagaaggagaggtggtcaacactgctgaacatcagaagaggtcaagggaaataactgagaaaataagacaaggatgggctgttgggaaccctactggaagggaattagagtggtcaggtagccatctctcttttttttttttttaatggccatgtagaaggcatattaggagtgtatgctactttaaggagaagggaaaggtttgtctagaatgataaaggaatgaggatgttctgtagatgtgaggatgtagcttgtagcaagggagtacagatttaatagaatgatatctctgaacctgtgctatcctaaaagaaaagatgcaaagtgggcattttttcttcctgtagaatgtgtattattgct

SEQ ID NO: 209739 - DNA, 439 bp, Homo sapiens
aagaaagatcctccccccaatccggggtttgacagacaggtctatatggtgtgattccatggatatgtggtatataatatgccagaatgtttgacctaccaggtaggaatctaaccatatcttcctccacaagcactaacatttaggattttggtttttgtttttcctcaagttgttattttgaacatcttatttgtaagttctctgagggaaattgaaatttaaaatatctaagacaaagaggaaaaatctaattgagttgatcatttctgagattactttaagtctttgtaaacttagtttaaattttcacatttgttccaagtaaatacttagaaaacttaagaactgcatttgatgccacagttgatcttctggcagcagatagtaaatgggagaaaagtaaagccagtaaaaacggttcttaatagaaatgtaa

SEQ ID NO: 209740 - DNA, 158 bp, Homo sapiens
tgcaaaaggtaagacacttgagtatctccactcttaaccatgtaaagagactgggagacaagggaagcttcagccatagttaatgctatagtttccttgtcacaaatccatggagtacatgagtctattacaaagttttcacccatccatgataaaat

SEQ ID NO: 209741 - DNA, 410 bp, Homo sapiens
gatcttgcttccttatcctgtttgagaagtcagttgagactttccctggcagcagggcagcagctcctcagagccagatccctcactcccttatcttttgtttgttcctctggctttgaaatttcataaagtaaaccaaacacctaataaatgaacatctggcgcctacaatttaaagaccaaaaatagtgagaaccaattatgaacatttgatacatgcatttttaatgtattaatgtgacatttccaaaaatgtattccttggaaataaaatattaatgatggtttggtgaaaatggctccatagtcaagcaaggcatggggctcacacctgtaatcccagctgcttgggagactgagaggatcacttgagcccaggagttcaaggctgcagtgggctatgatcttaa

SEQ ID NO: 209742 - DNA, 658 bp, Homo sapiens
tcgaattcttgctgtaacagtgttgtgttggtatgttctatatattgtgtcagtctccaaaatgtaagtttctatagggcagcaatcatctgataaattaatcttaaaatgttttcagctgtgactaatcaaatatttgcaccatttgggatgctgactttcaagaagcaacaaataatctaatactactttgcctttatttgtttccaaggaattggaattgtaaatgcacttagagttatcatatgatgattatctcttagtcataagtcaggatttttcgctctataacaatagcaattatactcatttaaggctgtaagcaagaatcttgggcaattcctatggcaacaaacttgagtgttagcatgagaagtgggcagtcaagttttaatttagaaagtgccaataagaacaccgcatttttccattattaatttaaatacaatcaatcttacttcacaaaatatatttatgttttagaactttctagcaggaaacttagcaatgccttcccctctgtactctacacgtatacctacatttctccttcaatcataaaaagctacctcattccaccatagctaccgtcttaattgttaatgaagttagagaaaacaccagaggccaggcgcggtggttcacgcctgtaatccca

SEQ ID NO: 209743 - DNA, 412 bp, Homo sapiens
gggctgctgtgactctcatttcacacctaaagaaactgagtctaaggaacactcaagaccacaggcccagcgaggtggcgctgctggagtccagctactcatgctgcacctcgcctgcctccctcgattccttagctgattcctcagctggggccacacagcgcacccagctccctctgccctgggacaagccagccaagtccaaggccaagatcccatcatactcctgaggctgctccaggagtccagagcctggttctgttgggagattctggaaaagtcaatgaaccctactaaaaaccaggcactgttttatgtgcactgtctcactcgaatgtcccaaccatggaagaaacatactattctttttctttttttgaaacagagtctcgctctgtcacccaggctggag

SEQ ID NO: 209744 - DNA, 160 bp, Homo sapiens
tcacagtaaggagaaggagaaagagccgcatggagactccaaatgcagttacagaatgagaccacaggctaaactcaaaggagaacatggaatactttgccccaggcttagagtctataagtgagactttcaaaaaccgtttttccccactggtttgaag

SEQ ID NO: 209745 - DNA, 384 bp, Homo sapiens
aagccccctgggaaaggggccagcgtgggattactctccaacctgccagactgtctggcgattgctgcacaccatgggccaggtgtgatcagcagatccaagatatgcccgtcccccagaatgacccacagctggcatggggttgtataagtggcctccagcaggaaaggagcatgtgtactccattgccagttgcagcacaatccaccactcttccctctctaagtggcagacaggttgaaataaacctaaaacgatatccaactccttacccagaggatttaaagaatatggtaaaatctgttcaaaatttggtgggtaagccaagccatggagtgcgtgttgagaattcaaatccaactgctaacacggagcaaactgtga

SEQ ID NO: 209746 - DNA, 333 bp, Homo sapiens
tctggagaatgagacttccaatgaaatcaggtggaaatgacatctcgccgctttcagcatgctctattggttggaacagttatggacttagctagattcaaaggaagggaacaaagaccccctcctctcagagagtggggcataatgagagaatttagggccatgttatccaaccaccacaaatgccttctgaatttgaggttctgcctcaaaagttcatagttcctttgactgaaggacttctatatatccaagcatcgtcagccccaggtatattgttccatgtaagtgaccaggactaccttagtatttcgtatagggaaagtgacctga

SEQ ID NO: 209747 - DNA, 418 bp, Homo sapiens
tacagggaacccatcactcccagagctgcctcatcgggtgctgggtactctgatcatgagaaagagtttctttctgactgaggcatatactgttcccctctaatacccctccccaactcatggttcttctctctcaagccaggtgagggagcttatttcatcttttgtatggcagcccttcacaaattgaaatctgcttctgttgaatcacagaattttgtagctggaggaaacttcagacacaagtcctgttacagaagaggaaactggcacagagaggaaatggtgcttgcataaggtctctgggtaagttactggagaaatcagtgtgcaaacccagacttcttgacttctggatcaggaatttgtagtgaattatgtgaggggataccaggtctggttgtgcaggctgcgcatt

SEQ ID NO: 209748 - DNA, 307 bp, Homo sapiens
ccccaatggaatccctcctcctgggagccaaaaggaagtctctcaaaataggcaattaagtccttttctatggctaattttttttgtaagatgttacaatcagatctggaacttaaaaattatccagttcaatatcttactttatacaaggaaaagcagtcactgaacaaggacatgactgaccttgcaggtcagaactgaggtctctgtttttatttaaatgttctttcaccctcaccacactgtgatctgcaaagagagaatagttatccacactcactgctccatttcctcacctcctactcat

SEQ ID NO: 209749 - DNA, 345 bp, Homo sapiens
catgctagatagtgctattcaggctatagtcttgtttctggaatttttccaaatgggaggaatgtgtttcaaggatgcagagtattctttaaaaccgtatgaccaaactgacctctattgttaaagggatctaactaaaagggttcgtgtttcccactttgctttgtgaatgcctgaaaagcaatccaaaggttgagaacactggaaaacagagctattttattgcagtcctgagaatgcagtcattactgttttattccttcttatcttttgaagcaatactttagtaattctttagtaacagtatgctttaaagaaggtatctgacacatttttggcatgtgc

SEQ ID NO: 209750 - DNA, 535 bp, Homo sapiens
tcttatgtatgtttaagtatgtaatatatattatattaacatataatacataaaatatataatattaacatatatacagtaaaaatatcaaatgtgggatttcaagtaaatttcatgcaaatcttatgcaacacaagggctcaaatgcagaccctctggtgtaggaagaggggatttaaaaggaatgctaggtaatatgtgattttgattctccagctgagaacaggagaagcctggggagaggagaagtgattgccctgagtggtcctttggcccttgttgccaaaatacattttattggtttattctgattataaaatgatattggcacactaaagaacatttggaaaatgtagaaaaagaagtttgaaatacctccaatcccactgtcgatattttaacagactttcttctagacttttctatgtccatatattaaatgtgtatatatttaacgtttttgccactatgctcttaatacagttttatagtctgattttattattaaaattttttagaaaacataaaaaaaaaa

SEQ ID NO: 209751 - DNA, 142 bp, Homo sapiens
ggataattgttaagccacgtgggtgccctttctccctcggcctctcctcccccgacccccggggagagctgacccccacagctcctggccattcagcaggaggctggggaagtagctcccacctctgaggcaggatgggctg

SEQ ID NO: 209752 - DNA, 812 bp, Homo sapiens
cctggctggaggaacttaggaggggagagccccagcctgccacagggctccctgttccacagcggcacagcctcgagtagccagaacggccacgaggaaggggcaaccggggacagagaggacgggcctggcgtggccctcgaggggcctctgcaggaggtcctggagttgctgaggcccacggactccacccagccccagctccgggagctggagtaccaggtcctcggcttccgggaccggctgaaggtatggccaccccgccccgggcggtggccctgctttgctgatggcatgatgactgggagtcgggggctctggggccacgcagcctgggccgacatcctggcctcacctctgcgtgacctgggtgggccgtgtctctctgggccttggtttcctcatctggcaagcggggataacaacagccctcatggggctcaggaagattttaagagttcacagtagataggctcatgcacatccagccagaaactggccccatctcgcaccttctgacctgggtgggcggggctgtggcttgtggctacaaacccaaacttggagtgttgtcagggtcgcagctggctccatggaaggccccacacagttccctgtttgcctcatccacgcaccccgcactgaaccttctccacagggctcataccccggggctgttctcagttcacaggagggcttaggtggcaggtggctttcagaggtgctgacctaggcaaattattacattctcctctcgtgtttacacaaatttgaatgtacatcaaaaaaatgtataccactagtacctacta

SEQ ID NO: 209753 - DNA, 453 bp, Homo sapiens
taatagagcgtaaaagtgttcatagtttagtcttgttcagagatggaaaagactacttaaaagacaggatgagctgcactgacttgcctttggtaaccgcacagctctctacttaactagtcaagcgactttcaagggaacactgtgaatattacttaggattagaatcagtatgtatgcatatggtcactgtatctttaaagaactgttgagttctttttaattctacagtttctttatctttgcacccctttgaatgcctcgcacacctagtaggtgctcagaattcagaccaatgtgtcagtgttaggaaactagatttaagctccatttaagatcgtctttttcacttaggtttctggacacgggataatgggataattttgtctgtattttgcttttgctaagcttttaattattgacctagggtcatattatagtgcgaattgcaca

SEQ ID NO: 209754 - DNA, 523 bp, Homo sapiens
atatgagagatactgatgccaggagttgataccagcctggcgacatgccaaaatcccatttctaacaaaagatacaataattagtagatgtggtagtgcctgcctatattcctagctactagggatgctaaagtgagaggactgctagggcccgggagttcaaggctgcagtgagctgtgatcatgccactggagtccggcctgggtaacagagtgagaccctgtctcaataaaaaaaaaaataacttcccatttggagagttctgatgtttgtttttaaaaagccgtcctaggccaggcacagtggtgcctacctataatcccagcaccttggaaggctgaggtgagaggatcgcttgagcccaggaggtcaaggctccagtgaactatgatcttgcccctgctctctagcctgggggacattgggaccctgtttccaaaaaaacacaaaaattagagtaaaaacttcaagatgattttatgttatggaccatgagatctccctgcttggcctgtagtgctt

SEQ ID NO: 209755 - DNA, 467 bp, Homo sapiens
actctgtgggttgtctgtgaactctgctgattatttattttgctgtgcggaaggctttttgcttaattaagttccacttatctttgtttttgttacatttgcttttgggctcttggttgtgaagtctttgtctaagccaaagtctacgaggggttaatagttttaatataagtgtgggacatgtttatgtcactggaaaagatggaagggcaagaattgagtcatgactaaaattattgagcacaaagattccctttaagactgacttcttttctccagtcctattggcctctcagccaggtgttaattttttttttttttttggtaccatgagcccttttgccagtctggggaaatccatgggctccttctcaaaataatgtcttaaacttaataaaactaaatacataagattacaaggcaaaccaatgatatcaaaagacagttattaaaatatcaacaacaaa

SEQ ID NO: 209756 - DNA, 561 bp, Homo sapiens
gacaggagaattgcttgaacccgggaggcagaggttgcagtgagccgagatggtgccattgcactccagcagagcagggtgagcacctgtaatcccagcactttgggagggcaaggcaggtggatcacttgaggtcaggagttcgagaccagcctggccaacatggtgaaaccctatctgtactaaaaatacaaaaaattggacgggtatggttatgtgcacctgtaatcccagctacttgagtggctgaggcaggaaaattgcttaaacctgggaggtggtggctgcagtgagctgagtagcctgggctctccaggctgggcaacagactaagactccatctcaaaaaacaaaaacaaacacatttcataaaaacaaaaacaaaaacatacatgtgagatgtggagccaaaagaccttcaactgtcaaactggaaatgacagtagtaataattatctctgctcagcccacctcacatgcccatgatgtgaattaaatgagatcgcagatgtgatggtcctttgactcagtaaaggaatgtatttgtaggatacaggctct

SEQ ID NO: 209757 - DNA, 408 bp, Homo sapiens
cccaccccctcttgtcatttagttgagaaacatttgccctggaacagcacacagagtttgcattagcatccctgaggacagaactttgaccccacagactaaggaagctacaaatggaaaattccaagttgctgtactcttttattttcatgctaatgcttctgcagagagtatttaaggaaacagatgcacaagaataataaagagctgaggactaagaactcctctggcaactgaagttatgctccgtccagcatgatcctgtatctccctgtgcttgcacaagtccaggagggtcaaggtgaaaccctgatttcattttatgaaaaagctgaaccagcactgacatagagaacccaggattacatccagtcaggatttgaaaattgtttaagtttcatttcactt

SEQ ID NO: 209758 - DNA, 363 bp, Homo sapiens
ctagagcagaggctgtgacgtggggcagttctcttccatcaaagatgctttcgttagcaggtgcttgaggtgggactcagactcttatttatattttcgacattcatgtaggaaaatggaagacagtttctcaaagagtttgttgtgtgtgtttatttgtttcttagagaataatttgtaactctgggtcaggaagattccatctaaattaattaatcagaatagtagtgttaaggtaccagagtgcctagagattctttattaggacaaaaccgctggcccagataactccagcatttcattctcgacgtctgagttgtgctgacagccagtgccttggcttccatgggcagtgacttacgt

SEQ ID NO: 209759 - DNA, 560 bp, Homo sapiens
catagtttgctagactctagtatgaaagaactgtcttaaatgcccagtatcttattctatagttgaatagtctatataaaaataagtgccttttccagccgggtgcggtggcttacgcctgtaatcccagcactttgggaggctgagatgggcagatcacgaggtcaggagatcgagatcctgcctaacacaatgaaaccccgtttctactaaaaataccaaaaattagctgggcatggtggtgggcgcctgtagtcccagctactcgggaggctgaggcaggagaatggcgtgaacccgggaagcggagcttgcagtgagccgagatctcgccactgtactccagcctaggcgacagagtgagactccatctctaaataaataaataaaataaaataagtgcttcttccaacaaataactgaaccacaggccagcaaggtcttccctgccctcttaggtagactgggaagattgctgtgtgaaccaccgatctcgtgatgcataccagcagcaacaagtattgcaggactgatgaagatgattgttatttgtctgtttt

SEQ ID NO: 209760 - DNA, 528 bp, Homo sapiens
ttgcgcacaggctgccctcggtttattgccacatgggcttctccagcaaggcaaaaacacacatgctgagaaggcaatagagagagcctactagcaagacagaagtcttttaaaacctaatcgtggaaaatgacattccgcaacttttgctatattctgcttattagaaaagaggcaggaataccaggagatagggatcattggaactgatattaaatgactatcaaagttcaccctctggcctctaacgattttttatttccctaccaaatgtgaaataactcctctcaaggttctcagacgtctcattccattataacatcaacttgaagtatagaatcctcatcgttaaaatcagctctcactctttgttcagtgtctctcaacctgtgacctgtgactattcagaccagccccatgacacctatttatgccatatggagaaaagcaccacctagaaaagccttcccaaattcctgaacctcaagtgtgcagaatttaataaaatggttgttttttaaaaaaaaa

SEQ ID NO: 209761 - DNA, 182 bp, Homo sapiens
tggttggaaatggagctgaggacatcagaggaacggaacctggatatggcatctcgaaggggaggcaaagacagcaccttgggaaacaccctattctggtgcccagaggaggacccttgagtgattcctggctcccaggtggtgctcgagaagtatttgttgaaataatgaatgctgatggt

SEQ ID NO: 209762 - DNA, 457 bp, Homo sapiens
aaatgctatcttcaatgtacttttgtaattaaatgtatccttattgataatccaggtattaagtagaacattttattaattagggcactccagctctagccttacagaaaacaacctgttatatgtgatttcatctgtcagagtgtaaagagatgccattgatcgtcagatgctcaaaagctagtcctctggatggttccattgataccataccttttcattctcaggacaacattgacatacaaattaacatttcatctcaacatcctaatttggagaaaacaagattacatatccctgtgaaaagaagagatggtactgaaattgagagggtctacagagatattttccattggaacagcaccttttattggaaaacaaagcaagaacagtaaaaactcatattttcattccttatttacccacatgaataaaaaaagaactagataaccaggtc

SEQ ID NO: 209763 - DNA, 591 bp, Homo sapiens
tcaggagcaaattagaaagctgttgtaggtgtcctgggaactgatttcaggacctgtacaaggatggtagtttggatggaaaggaggagctggaaccaagaaagattttagtaaatatagtcggcacaactcagtggctaattacacatcagagaagaatgagaaggagccaagaaagaatccaggcttctagtttggggaactggacggactgcaaccctattacccaaaagaggacatacagaagcattatcaactatcatctaactgtgttttgaaagcaaaagatcttggtaggacccatcattctagacaaaggactctgtgaccttccttctgtgacaactacacactctctctctcaagtgcctcaaacccttttctttctatagactccttcccttacaggattgtaggtgatcagagatgtgagaaggttccagcagcatttagcctaatgccttccttatacagttggaaggtctacagatattaactgacttgtgcaaaaccatatctttttaatttaagattgccctaacatcaaaatgaaaaacaacaaacacatacgtatacacttttccatcagct

SEQ ID NO: 209764 - DNA, 1289 bp, Homo sapiens
tagataaaaccaagaagtgacagggctggaagggatcttaggaattagttcataaagaacttcaggctcagagaagacatgtgagttgcctaaggtcacacagcaaatctgaagcaaatcagggctagaaacccatagacgatggtcatgagcactggttttgagtcatccatttgaacacacctgtgttcagattctacctctgttacttatgagctgatttcttacctgtgaaagtgggatacctacccaaggggttcacgggaggatttaataagatgatttggattaggaaaaactgacaaatttccccttccttcttctccctgccttcccctcacctgttaataaatagatccttgtgaaaggtcagtgagcagcatcagccagaaaggctttgttttcagcaaggtccctgcatgtatgattacaatcctaagtaatatcagctgttgcttgcgttggtttctcagctctctcttggtgatctctctctttagctgttgaatgagttcaaagatctaggaagagctttgaaacccctctagcagcatttctgtctccagtcccagcacaggtctttggaggatgagataaaaagggttttgcccagggtcaaatgctgtgtacacgcttggtcactcttccctttcttgagatgacatgtccccttcttggagacccaagatgattgacaacaataacattcctttacaacgttttcttctcatctagagcactgggaggctgccttttaacagagatatcacagagtagcaagcatgcagacattctcatgacatcctggcagatatcaagaccaaagaacatcccatgttccctcttgaaggcttgtaataactgccataaattatcttgtgggaatggagtggccctggcctaagctgtgctgtaccggactctcctggtgacagttttagtggctgcatatgtttgcagaagaaggaagcgtggtaacttggcaaacagctccaaacgctcctggcttgctgccacaggattgtccttgagacttgggcacagtgatgtgtgaaaaatgcccacctttgctcttggtgtccagtgggccttctatgggccctctatagaggtcatcacctggggattcctgactctggccaggtcctgaggtctttccatgttactctccatgttacttgagtaacataagagcttcttatggctcttatgttctgcaggacggatgaactaggtacccaggacaggtctgtttgtgcacaaggctgtctccttctccccctccttgg

SEQ ID NO: 209765 - DNA, 513 bp, Homo sapiens
gtggaagccccaagccttggcagcttccacatggtgttgagcctgcagatgcacagaaggcaagaactgaggttcgggaacctccgtctagacttcagaagatgtatggaaacgcctggatgtccaggcaaaagtttgctgcaagggcagggccctcatggagaacctctgctagtgtagtacagaagggacatgtggggttggagcccccacacagagtccccactggaacactgcctagtggagctatgagaaaaaggtcaccattctccagaccccagaatggtagatccactggtagcttgcaccgtgcgcctggaaaagccacagacactcaatgccagtccgtgaagggagccaggagggaggctgtacactgtaatgtctgtcagctcacccctttttatattcaagttattggttatggttattggtttatatgcccagttattggttatgcttcacacaagatgaggaaatcagggctgccataagggcagcttggaaaatcac

SEQ ID NO: 209766 - DNA, 482 bp, Homo sapiens
ctcagttttcccatctataaaatgggaagaccaattggctgatcgctgaagccttctctggtctgtgaaatggtaacaccaataatgatgctgaagtattttgggaactgtgggggtggaaggctattagcccaacttgcttttaagcttagcagaagaacaaatggctccaaggaatctattagaccttttgcataattaagtatatcctgtaatcagtgctaacaagaaagagctaatctttcattaaattagtttttaatttaattctatgctaatttaattttgcatcacttaaaatgtatgtttttaaatggatgtttacacgctgttgcaggcggctgtgaaattaattcattcttcgcttaacctgccaacctgagcgcccggtattccagttccttggcaattgttgccaacgccacaattctcttaaagcatttcttagattccctggtgatttggttgaatgcttaaaaaaa

SEQ ID NO: 209767 - DNA, 572 bp, Homo sapiens
aaaagcaaaaacccaagcttacagtcagggaatccaactaactgatttgcactaccagatgcaggaattagaagcaccgtgtacttctgaagatgatagcaactatgttaaagaatgaagaagctctctatatactaacacataaagtcctccaacgtgtcagataaaaaaaagcaagaaacaaaactgtgtgtacagtgcgacacctttattgtaaaaaggaagataaagatacgcatttgtatttgactgcaaaaatttaaataagatttgcacataaaactctataaaagccgggcatggtggctcatgcctgtaatcccaacattttgggaggctgaggcaggtagatcagttgaggtcaggagttcgagaccagcttggccaacatggcgaaaccctgtctctaccaaaaatacaaaaattagccaggtgtggtggctgtagtcccagttatggaggctgaggcataagaatcacttgaacccaggaggcagaggttgcagtgagccaagatcacaccattgcattccagcctgggtgacagagcaagactctgtctcaaaaagaaa

SEQ ID NO: 209768 - DNA, 536 bp, Homo sapiens
tcatttgaaattattgagtcagagtaacaacagcaacacaagaatgaagaaaagtaaagaaagcctgaaggacttatggtgtaccatctggctgaccaatatatacattatgggagttctagaaggagaagagagaataggacagagagcttatttgaagaaataatggtcaaaaacttccaaaatctgaggaagaaaatggacattcaaattcaaaaaactcaacagactgtagatatgatgaatcagaagaggtgcacactgtgacacattataaactgtcgaatgtcaaagacagaatctgcaaagcagcaagagaaaagcaacttgacacatacaagggagctcccataagttatcagtggatttctatcagaaatgttacaggtcagaaagagttggaagatatactaaaagtgctgaaagaaaaaaaactgccaataatactgtatctggcaaaattatcatttaaagatgaaggagaaataaagaccttcttggataaacaaaagctgagggaattcatcatttatcat

SEQ ID NO: 209769 - DNA, 388 bp, Homo sapiens
tgcagggcgccttctgacgccacctccagccgccatccaccagacgccagcttccccgctgccctgaacttcctccagcgcaccaggccttcctctgtcctgtctgaggatttgctcatgcaacgtgctgtggccaaacaccctgccctcctcccttcgcagatgtcttcctctcctttaaggcctggctcaggtgtcgtcttggtggcttcgggtgtcagctgctctgttttgctcacgcacctgcttgtgcttctgttgttgcctcctctccctggctgggctcgagctgcttcagggcaggaaccacgtctttacagtttgatgttcccagagctgacccagtgtttggcataggggtgtgctcaatacaatcgagttgacatga

SEQ ID NO: 209770 - DNA, 815 bp, Homo sapiens
gaattacttgaggccaggagttcgagactagcctagccaacatggtgaaaccccatctctactaaaaatacaaaaattaattggacatggtagcaggtgcctataatcccagctactggagaggctgagacatgagaattgcttgaacccaggagacggaggttgcagtgagctgagatcgcaccagggcactccagcctgtgcaatagagtgagactcggtttcaataaataaatgaacaaactggaaatgacattttttccaaccatttaaattcatgttgaaaaattttagatgtctgtttaaatgtgtgagggcatatatagtttataaaaatttaatttatagcaggtatatgtgcagaatttttttgaagatgactaatctatagcagggtttctcaacctcagtgctattgattttttggactgggtaattcattgttgtggggaggctatcttgtgcactgtaggatgtttatgagtatccctggtctgtactcactatatgcccctagcagctccccagtgacaactgaaaatgtttccagaccttgccaaatgtcctctggggagtaaaaatgccccagttaagaattactgattttactgagttagggctagttacatcatggtggctcacacctgtaatcccagtactttgagtggctgaggcaggaggatctcctgaggccaggagttccagcctggccaacatcaaaacctcatctcttaaaaaaaaaaaagaattagtgatctaaaaccatgttgatctcctttcagtgacatagaatttatatcaacatttcagacttt

SEQ ID NO: 209771 - DNA, 337 bp, Homo sapiens
ttgaaaggcctctcagattaagagagaatattgtgtcttggggaaatcaatcatattattatgaatcatagaattatgagtcatgtgttataggttgtttcaggcaacaagacctcagatgtccttcacttcaaccactcttgggatactgaagggtattgccattgcaatctgtggccaacatctacttccacatctctccctcttggggctttcaagtccaagcttggagtcatgtttgtaggagcctcaaatctctctctcaagaattttcatttgttttccccagttctcccctgtggaaccatggaaattaaaatcgaaaccctgttctatt

SEQ ID NO: 209772 - DNA, 380 bp, Homo sapiens
tttcttacagtagaataaagatgcagatatgtctcggttcacagtcaggctgtaaacattctatttaggtgttcagcaccacttcaattatactaaagatgaaattggtcagatcagaaatttaaccatcatttgtaatgttttgcttgtggttttaaatacgttattgaaaaattacaaatataagattgtttataggtgaattataggggaaaatgtaagttgatttaagctattttcattccaatataatactttctgctccagtgctacttcaggggaaaattaaagcattaactcttgactagtacagttgaaatataatggaatctgaggaagtacttaatatgtaacatggattaacagcagatctgtgtcat

SEQ ID NO: 209773 - DNA, 169 bp, Homo sapiens
ctctagaggaccccgacggcttcaacggaactttacatgaaaacagatgttagattctttatgagataaaaatacgctaagacttggtctcttttctcagtgtagctggaaaccaaaccactccctggcttcaaaatccacttcttacattatgaaacctttgtaagtt

SEQ ID NO: 209774 - DNA, 267 bp, Homo sapiens
cgatccagtcctagatcctgcagaccctgcattgcatttgccatgtctctttattcttctataatctagaaacattcttcagcgttttttttctttcattacatgaagagtcaagaccagtggttttgtggaatgcatgataatctgggttcttaaaaatcatttcttcttgattagatttcccattgtcttgaattgactcagtcagcctttcctcaccgctactccaggttcactaatgatctccctgttgcccaaccaatggtt

SEQ ID NO: 209775 - DNA, 351 bp, Homo sapiens
tctcttcattctttactttttttcttaatgagttcaaaaatgcttgagaattcatttgtatttcatattttaaccttcaaagctggaaactattttgagaaggggcaacaatttttaaaaaccagggggcaattagaaaaaatgtttaaagggaggggattaccatttttagcttatactcctactctataataaaggcggcggggggtggggtgtaaggaaaatgatctaatctacttgatcaagaaaagggaatgttaatagccctcagaaaatatattcatttactgaacagttatatcccttagtttattgtgaatgagaatgggggcatcttagagattgggaggg

SEQ ID NO: 209776 - DNA, 547 bp, Homo sapiens
attcagaggttccatttcttggagctcccattctacttgcagacataattattacattgatctgaagtcttatgtgaggcaaaagaaggaaatatgacttcttcttgggagtaaagcatggtactaatttttgaagaagactcttgtcctaaaccatgacttggattactaagaacaaagtcatttgctaataacattcagtgtgtgcttcccaaaatgatgcacatttaagtcacccttctgcactgagttcaagactcaggatataaaacacacattcccacaagcatacaggaagataacaaatacaagcaaaccttggtttcagatatctcaataaagcagatcacacaaaacttttggtttcctagtccatataaaagttatatttacactatactgtagtctattaagtgtgcaatagtattatgtcttaaaaaatgtatatactgggccaggcgcgatggctcacgcctgtaatcccagcactttgggaggccgaggtgggctgatcacgaggtcaggagattgagaccatcctggccaa

SEQ ID NO: 209777 - DNA, 313 bp, Homo sapiens
tggtgtaggctgttgcttttaaataaaaatttcaggaaatagtttataaactaatctcaaaagagactcatggacgctgaaaattgttagatatagaattttttagttttggatgtgttgtattaatctatttcagtcagctaaccccagagtctaaattgttataagtacagtattttcttggtgcattttgagaggtacctttttggattgcataacagataggtttatatagtatatatatgtatgttacttgtatttgaatcaggtgttggtactgaataaaaggttatatttcttaggtatatgtaaa

SEQ ID NO: 209778 - DNA, 787 bp, Homo sapiens
  misc_feature (41)..(41): n is a, c, g, or t
  misc_feature (79)..(80): n is a, c, g, or t
  misc_feature (82)..(82): n is a, c, g, or t
  misc_feature (93)..(93): n is a, c, g, or t
  misc_feature (108)..(108): n is a, c, g, or t
  misc_feature (201)..(201): n is a, c, g, or t
  misc_feature (203)..(203): n is a, c, g, or t
  misc_feature (225)..(225): n is a, c, g, or t
  misc_feature (758)..(758): n is a, c, g, or t
ggagacgacgagcgggcgaggatgagcggcggcggcggacngagagcgaagtaccgggcgcgggcagagcgcggcggcnngngtgtgttccanagaacaagccttcanacatttgctatattgacgctgagctgtcaggggactcaggcttatgaggaggtatgttacacaaaacagtgtctagtgaagacgacaagaaanangggaaaggatcggaaaaagaanctaaaatactatagaaaaccatagagatctattcgatcttttgctaatgatgatcgccatgttatggtgaaacattcaacaatctatccatctccggaggaacttgaagctgttcagaatatggtatctactgttgaatgtgctcttaaacatgtctcagattggttggatgaaacaaataaaggcacaaaaacagagggtgagacagaagtgaagaaagatgaggccggagaaaactattccaaggatcaaggtggtcggacattgtgtggtgtaatgaggattggcctggttgcaaaaggcttgctgattaaagatgatatggacttggagctggttttaatgtgcaaagacaaacccacagagaccctgttaaatacagtcaaagataatcttcctattcagattcagaaactcacagaagagaaatatcaagtggaacaatgtgtaaatgaggcatctattataattcggaatacaaaagagcccacgctaactttgaaggtgatacttacctcacctctaattagggncgaattggagaagaaggatggagaaaatg

SEQ ID NO: 209779 - DNA, 435 bp, Homo sapiens
cgagggtgacgtctttgttttttgtgtgtttcgttttgagactgtctcaaaaaaacaaaaaaacaaaaaaaaaaacaaagaaaaaaatgtagttttgtgttagcatgctgaaactcagttttccctactgcttccctgctatctcctatcagtttaaagtaccttttaaagactcgagaaaaataaattttttttttttagttattgagctgtgcatgggttttaaatgctggggaaaaaaaaatttctctcgattagagcaaaactgatttctgttaggaaaaggagaaacctactgtttttcaaaaaattacagcgtttctgaacagactttctcgagtcatgtcatttcaagtggttctgtttcagctgatgtgcctctgggctgatgtcagaaacaaggaaattgaccacagagagaagcagtcaggacgc

SEQ ID NO: 209780 - DNA, 979 bp, Homo sapiens
gctgggtatgatggctcatgcctgtaatcctaacactttgggaggccgaagcaggaggattacttgagcccaggtgtttgagaccagcctaggtaacataaggagatcctgtctctattttctttaaataataacatttttaaagttaaagttaaaaaaaatttttttaaagatttggggaggcaaacagttaatgccaaataaatgcgtgctcaataaactgttaccacaatggtgattaggtcttggggccaaaagcagaaaagaggaagttttacatgtggttaggaaccctcagatgtgggtttttaaagaaaaaaatggggctgggcgtggtggctcacgcctgtaatctcagcactttgggaggccgaggcgggcggatcacgatcaggagatcgagaccatcctggctaacacagtgaaaccccgtctctactaaaaatacaaaaattagccaggcgtggtggcgggcgcctgtagtcccagctactggggaggctgaggcaggagaatggcgtgaacccgggaggtggagcttgcagtgagccgagatggtgccactgcactccagcctgggcgacagagtgagactgtctcaaaaaaacaaaaaaaaaaacaaagaaaaaaatgtagttttgtgttagcatgctgaaactcagttttccctactgcttccctgctatctcctatcagtttaaagtaccttttaaagactcgagaaaaataaattttttttttttagttattgagctgtgcatgggttttaaatgctggggaaaaaaaaatttctctcgattagagcaaaactgatttctgttaggaaaaggagaaacctactgtttttcaaaaaattacagcgtttctgaacagactttctcgagtcatgtcatttcaagtggttctgtttcagctgatgtgcctctgggctgatgtcagaaacaaggaaattgaccacagagagaagcagtcaggacgc

SEQ ID NO: 209781 - DNA, 806 bp, Homo sapiens
gttggctctgagttgagcacgggccctcagtgacagggtgagaggtgggctagcctgggcactgaagccagacttctttattaatgagttgtatgtagtcttgggcaagttactgaacctcccttatcctcaactttctcatcaataaagcggggaagatgcagtaatggctactattggttgagtgataactgtgtaccagacactgtacctaatgcttttcttggaatgtcccattttacagatgaggaaactgagctaagacatcatctcctaaggttaggtggtaattgaatgagataacatgtaaagctctcaatagagtgcctgggtcacatgaaccgctccaccaatcttagccgttagtgtcatcaatgagaggaggctggatccaaattgaaaggccaggagcatcatgcagagtctgggcttcagcctataggcagtgagagccctggaagattttgccaagtgaatgctcaggtgggaccttgtttaagaaacttggccgggcacagtggctcacacctgtaatcccagcactttgggaggccgaggcgggtggatcacctgaggtcaggagttcgagaccaacctggccaacatagtgaaaccccatctgtactaaaaatacaaaattagcggggcatgatagtgcacgcctgtaatcccagctacttgggaggctgaggcaggagaattgcttgaacccgggaggcagaggttgcagtgagacaagattgcaccactgcactccagcctgggcgacaggtgagattccatctcagaaaaaaaaaaaaaagaaa

SEQ ID NO: 209782 - DNA, 385 bp, Homo sapiens
tgggaacacttcgagatgtgcttcaacactgcttgctacatgatgcatggtgatcttcctcctacaaaatgcttgaagacagtagttattttatgtgcattctggggaagaggctgggttttatctttgagttgggaggctttagaagagacaatatgaattgaaagatgaactcaagtcagaggtaccataagaacattgttacattccagaaattcacaaataaatctggtagactgtggacttcctcagtctgtggaaaattgagatgaggcaattgaatagaggtctcagtggactagaagccctcagtggataccaggttccactgtgtgggttttttgtaatagaattggtttagtaacaaaatattcttttttagaaa

SEQ ID NO: 209783 - DNA, 160 bp, Homo sapiens
atcacgccactgcattccagcctggaagacagagcaagaccctgtcttggaaaacaaaacaaaacaaaaaaaggttgaaacacagcttagaatctgctcaattactttttgaatttcaaagagatctgtccctgtcataaagacctgcgaggccaggcgc

SEQ ID NO: 209784 - DNA, 448 bp, Homo sapiens
ctgagtcacaaaatggaacagctggaactgagtcttcaaaaagctgttcaagagttctgaagaccagctgcttctggatgatggaatgtacagtaagaccagaacgtagatggagctggtggccattattcttagtaaactcatgcaggaacagaaaaccaaatactgcacgttcccagcttacagggaccaggtggagataattgaatcatgggggcagtttcctacatgctgttcttgtgatggcatattctcagtttgggtgtggtggcgtgtacctgtggccctggctactcagaaggctgaggaaggaggatcccttgagcctgagagtttgaaggtatagtgaactatgaacatgccattgcactccaacctgagcaacagagaaagatgctgtctctaaaaaaaatgataaatgaaaaataaaaataataggccacgttta

SEQ ID NO: 209785 - DNA, 750 bp, Homo sapiens
ggattgcttgagcctaagagttcaaggttgcagtgagctatgattgtgccactgcacttcggcctgagcaacagagcaaggctctgtcgtaaaaaacaaaaaacccactttgagtttgctttcttctttcttcctaagcctttggagcttatcttcagcattatatcaagacatttattcaacccagcaatcccattactgggtagatacccagaagaatataaatcattctaccataaagatacatacacacaaatgttcactgcaacactgttcacaatagcaaagacacggaatcaacctaaatgcccatcagtgacagactggataaagaaaatgtggtacatatacaccatggaatactatgtggccatgaaaaagaacgagatcatgtcttttgcaggaacgtagatggagctggtggccattattcttagtaaactcatgcaggaacagaaaaccaaatactgcacgttcccagcttacagggaccaggtggagataattgaatcatgggggcagtttcctacatgctgttcttgtgatggcatattctcagtttgggtgtggtggcgtgtacctgtggccctggctactcagaaggctgaggaaggaggatcccttgagcctgagagtttgaaggtatagtgaactatgaacatgccattgcactccaacctgagcaacagagaaagatgctgtctctaaaaaaaatgataaatgaaaaataaaaataataggccacgttta

SEQ ID NO: 209786 - DNA, 721 bp, Homo sapiens
gacccttagacttgagagcagacaggcagaatgaccatgtcttctgtgtatagtacaccatcacagtgcacatggaaatgacatgctggtgtatagttcctatttctccctcatatttcagaggcggaagcccctcccagaagtttcctctgagttccccaaagctggattcagtgttcctatagcccttcgattcccctgattgtgacatttaccagcctgacttggattcgtctgtttcttttccaatatttctcacctgaccttcctgaggacagagagtgggggtgagtccctgccgcatggccagcacctggcaaggtcatggcaggaaggaggtgttcccgatgtgtgtgtggaatgaaggaaggcacaaacgggtccgtgtgaggaagggacagacctgccagggaaactgaggtatagagtttgatgagtacccccaaatcatctgcttaaaagcaggtataaaatgtaaggtcctctggtgcctaaagcacactcatcctgtgtacacgtgactattaataatatatagcattgataattctgtgaatctagtcagagtacatgaacattgtgtcttctggttggtcttaaagttatgtcccttcaccctagtccaattccatctattaatataaagagcttgcagatataaggaatagcttcaccaatatcactcctgagatcctgggcgatgctgctcttgttgggactg

SEQ ID NO: 209787 - DNA, 127 bp, Homo sapiens
gaaacaaagattgacaaaactgattactctgccagggactatttttggtgctataccaaactaaaggtttcattcttgacctttttcctgagaatgcataatttatactattaaaatggtacacgtt

SEQ ID NO: 209788 - DNA, 204 bp, Homo sapiens
aaaactaacatttcccagacttgtgtggcccaacatttaaaaataagagttggggagttcctgaccatcctggccaacatggcaaaaccccgtctctactaaaaatacaaaaattagcctggcgtggtggcacacgcgtgtagtcccagctactcgggaggccaaggttgttggatcacaaggtcaagagatccagaccatcct

SEQ ID NO: 209789 - DNA, 168 bp, Homo sapiens
acacctggcctatagaaactatttgtgaatcatgtatctcttaagggtctagcatccacaatatataaagaactattacacagaaaaagccagtccaattaaaactgggcaaatgacttgaaaaacttttctccaaagaagatggagtggccagcaaacacaagaaaa

SEQ ID NO: 209790 - DNA, 427 bp, Homo sapiens
tgctggtaagatttctgaaatgactgtagccattgtcccaggtcaggatgtaggcacacacaaaatagatattaatgaatgagtaaggttgacagcacagttcaggatagggagctggataagctggtagaaggaaggagaaatcagaaagctggaaactgagactggccttttctgctcttctgggatgtttatgactcatttctaggttttaatatgccctgtttacatccatgcctctggcaactaatcttggggtcaagctttactttgtttccattccattccatcacttgatcctaattccccatggcttctgcctttccctctttgataatgtcatctattggagtgatgcccaaagaccacgccacagactggtgccaggctgactgtcatataataaaaaataaatatttgttcttta

SEQ ID NO: 209791 - DNA, 474 bp, Homo sapiens
tgtcttcaggaaaggaaagctgccgcatcatgtcaagaagctgatcaatcaagaagcaaggagatcctggcaccttgactaactacagacccatgctgccgactctgcctggatccccagagccaccactgctacttcagaaagctggagaatcaagaagctgctgactctagaaccatgatactcttgtcactgtctgtaaaaccagaacaatgcttatatcctctcttttgcaccactgactcagttccaagtcagagtctctcatgagtgcatctgacttgtggaatctaaatcacgtccagaactctactacaaaggagttgagaacatttaagttttagctttccaacttttgcacagtggaaggggactgaagtgggtattgagcaagtcattccacagtatctgccacagacagtatttttctccaatcataacaaaaataaatgagacatattgatggaaagttgg

SEQ ID NO: 209792 - DNA, 167 bp, Homo sapiens
cctgggggacagagcaagactccgtctggggaaaaaaaaagaatgagacccatttaaaaatgtaatttgtttttgctgatttaaaatgtttgatcacagtggttttcctgagttaaatagatggaatagctattacattttatgtatattcagatatctttacctct

SEQ ID NO: 209793 - DNA, 146 bp, Homo sapiens
ggatcaagtacagatacataccaaatagcatgtttggggctcatattgcagattgaatgctaagtacagatggttgtacaggaatctaaataatgtagtaaacttcttcactgctattaaacctttgaaggtttattctgggatga

SEQ ID NO: 209794 - DNA, 164 bp, Homo sapiens
ccctggtttcactgcccccactcccaccccaagaaatcttcaacactgaaggaggctaatggctaagaattcaaaagccatagaattctaaaactggaagttacgttgaagctcaatagttttccatttgttttgttttccattcattttctccacgagttatc

SEQ ID NO: 209795 - DNA, 368 bp, Homo sapiens
ttcaaaatgatgtttaaatccaaaaaaccccccagataactgcaagttaattttctttgcaaatgttaaccattttcccttaattaaatcacacgaaatagtataaaattagaagtctactgccaggtcaccacttaaggacacttaagacaggagatatatccttaattatacatctgtaaacaagccagataccccaaaccttcaatttttcgggatagttatctgtgaggaagcttgatctctatgatctcacctgaattttatgtactaaaatacaggtcactatgaaataacgctaaagtactctgtccatcccacagacaatttatttttcaaatgtttctataagtgcatatatagcgttg

SEQ ID NO: 209796 - DNA, 354 bp, Homo sapiens
catggacatcaaaattaaaatatgatgccatttataatggctcagaaaataaaatacttcagtataaatctaacaaaatgtgcacaacttgtatgctgaaaactgcaatgctaaaagaaataaaatctaaaagaaatagaggaaataaaaacaatctaaataaatggagaagctaacatatcatgacttggaagactcaaaatagtagagatttcaattctccctgaattgatatccaggttgtaatgagttgagtttggcccctcaaaagatgtgtttacagcttgcagcgagccgagattgcgccactgcagtccgcagtccggcctgggcgacagagcgagactccgtctc

SEQ ID NO: 209797 - DNA, 393 bp, Homo sapiens
actttatttaatggggtgaaggagtatattttctgattttctttttatgactataaggcagatctgacaccattagttttctttctgtcataaatatagatgaatgtaatttgacaggcgtcactacaaaataggttatagataagttcaggcatctctccttccacacagaccttttatactcagttctgatggagctgcttgaatagaatgaccaaggtttgattttaggcttctaggtcacagtttcaccttgacaacagttctttcatttccagcagtaacagttgctaggatccctaaggtgctttcatttttaaaaaaaaaaaaggatagaaaaaaagataaatcttaattcacatgctgcaggactatctctgtgtctccggccaa

SEQ ID NO: 209798 - DNA, 468 bp, Homo sapiens
tgcaaagaaaaaataagagttttttaaaggaaacaggattattcatgccaataaagaaggaggtacaattccaaacagaaagtcatctaagaaaacacatacatgcatacatgcttagagctggagactgaaaacattatcacaattaagtgctgtctacatggtaacattgaaaatgttcttacaaaattgcttaaaaattttttgagatatgtaaattataaagatttattttatttactatggaatatagcttttaatctctaagcccttttatactcatttgtcatcataggtaatgatatgaaaattcccacttaacagtttataaaaaataaaaaaaatcattttctttgtcagacacgtgagtcataaactttgagtcataaagtctttgtgtcaaaatataatttttggaaagctacaaatatgatgcccacaaatatagaatgatatatatgttaactt

SEQ ID NO: 209799 - DNA, 367 bp, Homo sapiens
  misc_feature (12)..(12): n is a, c, g, or t
  misc_feature (24)..(24): n is a, c, g, or t
aggatagtcagnagaattagaatngtgaagatgataagtgtagagggaaggttaatggtcgatattgctagggtggcgcttccaattaggtgcatgagtaggtggcctgcagtaatgttagcggttaggcgtacggccagggctattggttgaatgaggggaagaagaaaggagagaagaggaggggaagggaggggaagagggaggaagacagggtgaggccgcggagtcccaacagaaccagacagtgtagggctttgtaggctaccttggagggggctcaagaggaacagcaggcatagacaactctttgaggagctttgctgtagctgaaggagagcagagaaattggatgatagctgaaggt

SEQ ID NO: 209800 - DNA, 1457 bp, Homo sapiens
ctctcccaggccctgaccctcaactcccttgggacaactctcactttccactttccatccaaattgtttatgatgagaaccataataaagggctaccatgtattgagtgtcccgatggtgccaggcattgtgctaagtagttcatgatattaaatgtcattaatccttacagtaaccttcccagataggtcttagtgtccccattttagagatgaggaaaccaaaactccaacagtaaaataaattggccaaggtcacacagctagtaagtaactggtgatgaaaccatatgatttatttggaggaagggggattctagacccccataatttctatcagtgccctctccacttacaaccaggctacccccctcaaaccccaatgtagagaaattccagtgccaacatggtaggtggcagatccaggcctggctaactccaaagcactgccctattcatttatgtatatgtcttatcacccagaaaactctaagttcttgtgtccaagtcatttctatcatcttcacagtttagaaaaatgcttagcatggtcataagcattcaaaatttatgaaggtctatcatttgattcccagtataccctattgagtcttctaatcattcatccatataattgccaagtgcgattctaccctcagtcttgagaggcaatgatttgttcatttatgttgcaggtgcacttgggtaaatgactgctgtgttttatgcatccgtgatggtgaacagacactgcaaatgtgcacgtagagatcatgagtacaaaaataattatagtgcaactttcaaaacgttttaacatacagtatttcacaatggccctgtgaaacaggcgaggcatgtatacccattttcatgcattctactatctgacgccaatccttagcactgaggattttttaatgaaggagtttatattctagtaggagtgacagataataaatgtgcaaatcatcaaaatatatgttagatggagaaaattgctacagagatgaagcagaggaggagggcagatgcaccagggtgaagagctgctatcttaaacaaggtggtcaggaaaggttttcctgttagagtggcagtgagcaaagaggtaaggaggtgcttgatgtggtgatgggatgtgttccaagaggagggaacagcaagtgcaaaagcgacaaggcacaagtgtgtctgatgagttggaggagcagcagggaagtccatgtggctacagtgagtgaatgaggggaagaagaaaggagagaagaggaggggaagggaggggaagagggaggaagacagggtgaggccgcggagtcccaacagaaccagacagtgtagggctttgtaggctaccttggagggggctcaagaggaacagcaggcatagacaactctttgaggagctttgctgtagctgaaggagagcagagaaattggatgatagctgaaggt

SEQ ID NO: 209801 - DNA, 524 bp, Homo sapiens
gaccagaactggatggagacatagatggcttctctgagagagtcacaactgaactgagtgttaaaggatggacaaaagtcaatcgagcctagagagtgaagtgatcattttcaaaagaaaaacagcatggacagaaacaagtgtgtggccaaagatcagagagggatactgattccccgctaataagaaatgttagtgcagtttcaggtacacttgaaatatctatcggtatatgttttgatatctaaattataaggagccaccttagggagagtgtgtcacactttgatattcaaattaaagctttgtgctcactaattgcctttgttgactttttttgtcatcagtcggtaactgtcagcatttgtatgtcttgcagcggattggatcctgcctggatcttcattgtcaatagctttgcttaattccagggcttctccaatatcacttgtactgaccttatgtaatcttgaaaggtatacaaatcacattgcaattgatttgctcctgtttatattggatga

SEQ ID NO: 209802 - DNA, 419 bp, Homo sapiens
atttaaaatgaatttgaattataaattttctcaattagaaacttcccaaactaagttataacaataagtcaaatttgggacttatataaactttatataaacagtttagattcctttatttgcattatctcagaacatttagtttttttatggagtattaaagtggaggagtatatgttttatcaaagctgaagtttttggaaactaaagaaggttgaggatcagtcactgatgggaatgcagtgtttttgaaattcagtaaataaaaacagaagcaacattgagctactcacaaccttgtttggaatgggacatgtaagataaggtttgtagtttgttttttttcctcttcatttttatttttcctttaaatcgtaaccatagtgtctatagcttctttggatattatgtagaagaaa

SEQ ID NO: 209803 - DNA, 373 bp, Homo sapiens
tgataatgaaacaaacaaatgtgaagagaagacgcttagatgatgttggccctgaattggaaaaggctgtctgggagctcggctgcccacccagcattcagtgtctgctacctcctgtctgttatgcttgtgtctggttttttcaagttttaattttttttttaattcttagtttttgtgggtacatagtaggtgtatatatttatgggttacatgagatgttttgatacaggcatgcaatatgtaataatcacctcatggagaatggggtacccatcacatcaagcatttatcctttgtgttacaaacggtccagttagactcttttagttattattaaaatgtacaattaaattatttttgactatagtca

SEQ ID NO: 209804 - DNA, 563 bp, Homo sapiens
ctcagtttccaactctgtaaaacagggtcgttactgtagtcctctcacatgattgatgtgaatattaatagattttacacttaacatacttagcacaatgtctggtacataataaatgcaaacaaaatttttaactattggccaggcatggtggctcatgcttgtcatcccagcactttgggaggccaatgcaggcagatcacttgagcccaggagtttgatactagcctgggcaacatggcaaaaccccgtctctacaaagaatacaaaaattatccaggccttgtggcatgggcctgtgttcccatgactcaggaggctgaggtgggagaatcacttgaacccgggagaccaaggctacagtgagctgtgatcacaccactgcactccaacctgggctacagagagagaccctatctcaaaaaaaaaaaattgttaaccgttattattatattgatctgtacccataaaccttaccaaactctcttattcaaagctttatgaagatacaaagatcttcagtaaaaggaaacacataataaaatataaaaatcagaattatt

SEQ ID NO: 209805 - DNA, 530 bp, Homo sapiens
ttttccctaacatctccatgctaaaagttcccaactgtcccactcctctcaaaatgtcagtgcctccagggagtaaagttctagttgatatttgaaataaagcacataaatcataaaaataatttatgatatatagatcatttaaaaactttcagtttgcatatacattaagagctactgtctagtaagagcttagtacgtctttggcatggggtcatgtacactgtatgtatacagatcttcatttaatccttagagtaaccctgggaggtaggtacaatcatccccattcacagaagacaaaatagacttgacaggcgaggtgaaccaacctgcccaaaggtcacaccactgggaggtagtaacgcccaatttcaagtctgaagtgtcagactccaaagctcatgctcttaacctttttgacatatgttaaagaagacgcttgttaccctaaacttgttactctgttcagtggcacttgacaaggataaataagaaaaactccaacagcaagcaagagggcaggaaag

SEQ ID NO: 209806 - DNA, 631 bp, Homo sapiens
agaggcagtgaatcgagctcggtgaccatctcgtgaccggcaatttgatcccaacttccattttaccatttacctgaattgtggtttcctgcttgtctggtttctcttttccccccatttttgttccttttagtatttccaagccacgcaccagtcttagctaaaaaccccttctctttgatactgagctttcttagtatggctactatgtgtttcatctcattattcctccttgtctatcacagtgcttggtgctaggtaaataccccattaacattttaagaaaattaatgaataagtcatggcaatttagtgggctcttttggtggattctcatagtgattgctactctaggaaattacataccatagttgtcaagagaatggactttggaatcacatggccctgggtttgagttcctgttccatctccagttttagctgtgtaatattgtgaaaattgttgcatgtctatgaatatgtttcctcatatgtaaaattatgacagtaagagcatctaccctacaagctttttttgtttaagacaagtgcagtagtgacaagaggggaaacagtagaacaaggagttcaatatgtaactgtgaataatcaattgagataacttggtacct

SEQ ID NO: 209807 - DNA, 822 bp, Homo sapiens
acacatgaagaaatagaacatcttaatagttctgtaactcttaagaatttgagcctgtagtttaaaatcttctcaaagagacaactcctgtttgggatgacttaattggcacatcctaccaaactcctaatgaaaaggaaaatccccaattttaaacatcctcttccagagaagtaaaggaagaaagatttcacaatttgtttttaaggccagcaaaagctgcatgacaaaaccaaggaagaacatttgagaatggaaaattataggccactctcagctgtaagactcagaagatgcataagatgattataagatgcaaaaatcctacacacagtatcaggaaactgaccagtcattagcaaaaaacccaagacgataagcccaggatgatacatcatgacagagttggttatatccaggaatgcaagatccgtttaatgttacagagtcaatcggtgtaattaatttaccatggttaacaacaggaaaaaaaggatcatcccagtgcataagatgggtttgatcaaattcaatgtttcttcatttaaaaaaaaaaaaaaaaactcatagaaaactaagaataagaggggcagttcttaatctggccaaaaggaaaaaattcctatggaaaacattatacttactggaattgtaagccaccttctctttgagacagaacaaaacccaaatgactgtttctattcagtattaaacaggagatcatagctagtccaccctatgggtaaaatattcaaatcaatagtgacgttagccaaactacaggatccaaggcctgcaagtaaaaacctgttctatttcagg

SEQ ID NO: 209808 - DNA, 969 bp, Homo sapiens
tccttaatgttaaaaagaacatctctcaagctaacagccaacatccaacttcatgacttcagaaggtttctttactgtagaaaatgaacttgtatttctcaagaatgttcctaagtgcatttgtctggggagagagtccatggcttattgactgtagattactgaagcactctgtgactcaatataggttaaggtactgagtgaaacactagggcagtcctttcacaaagacaagacaagactcactgtgatcacgttcatgttatcactaacattggtccatatcttctaaccatttcaatgtcaacaaaaagaaacgggtcgttcattttagaaaggagaagacaaaattatccctgtgtctgactgacttgcttaccacctgaagagaaccaactgaaaaattagtagaaccatcaggagaacccagtaagatggcagcaactatttagaaaatctagtggaagaaagattcacattcatagtaccaacaaaagaagcttcatgaggaataaactcaacaataaacacataggctctgtatgaagatgcctataaatagtaaaagtcttgtgtaagttaagaatcagatcatgttcctgtattaaaatgttaatactataaagataacaattcccctgttgaaaattagttttaagtttaatgcaagcctaacaaaaattccaaagaaacattttgttgagaatggaacttaatgttttaaaatttcatctggaagaacatcaggtaacgaaacaggttatgaagccacagtgattaaaacatggtattggtgaaaaaacgcacagatcaatagagcagagaagagatcacaaacaaacaaaaggaggcgtgagcatttggcatatgacacaagtcatgggaaagggagaagaagtttaaacaaatatgatgtttagataattgcctaaccatttagcaaaaaataaattaaattcttgcctcacg

SEQ ID NO: 209809 - DNA, 634 bp, Homo sapiens
tcctacacctcctataatactggctttctggtgagtaaagatgccattctcatgtgtaatcaggtggcaaatggagatatgaccaaagtaaccacctgcctacactcataaccctgtacacactcttcctgtgtcgattcacattcatagtaccaacaaaagaagcttcatgaggaataaactcaacaataaacacataggctctgtatgaagatgcctataaatagtaaaagtcttgtgtaagttaagaatcagatcatgttcctgtattaaaatgttaatactataaagataacaattcccctgttgaaaattagttttaagtttaatgcaagcctaacaaaaattccaaagaaacattttgttgagaatggaacttaatgttttaaaatttcatctggaagaacatcaggtaacgaaacaggttatgaagccacagtgattaaaacatggtattggtgaaaaaacgcacagatcaatagagcagagaagagatcacaaacaaacaaaaggaggcgtgagcatttggcatatgacacaagtcatgggaaagggagaagaagtttaaacaaatatgatgtttagataattgcctaaccatttagcaaaaaataaattaaattcttgcctcacg

SEQ ID NO: 209810 - DNA, 375 bp, Homo sapiens
tagtttggatcgagcttgtacccacaagtagtggtttcatgttgctctttgttctgttttcaagtggactgatttaatttttttagtggttattttaggaaaagtattccttctttaatagatcacaaaatcttccttagttttacatcaaagctactctattttgggccatccaaatcctgactttttttgttctgtttttttccctgtatttttcccacggtccgtttatagactttgctaaacatttggcctagaaaaattccaaacaaccactacttgctgctgccagatcttttctgattgacttcaccttggtccgctattttttctttgttgttcatgttgtgctcatcacattccttcaaccattta

SEQ ID NO: 209811 - DNA, 920 bp, Homo sapiens
gtagcccgggtgcggtggctcacgcctgtaatcccagcactttgggaggctgaggctgacagatcacctgaggtcaggagtttgagaccagcctggccaacttggcgaaaccccgtctctactaaaaatacaaaaactagctgggcgtggtggccacctgcaatcccagctacccaggaggctgaggcaggagaatcgctggaacccgggaggccaaggctgcagtgagctgagatcgtgccactgcactccagcctgggtgacagagcaagactctgtctcaaataaataaataacatctgtgtttagcaactggctctcaaagttcttgacaaggagacttcgtgagcgctcagggtctggcggggtgtgggtgaggcagaaggagctgtgtggtggggtgtgtcgggggcgcctgggttgccgggcagagtccctggaggtgcagtcagtggacatgaggggcctgcaggaaaaggcggtggtgcgggcccaggccctgctgtactgtgtgtggactcaccgggtccttggggggcatccgggcagccggcttccccgtgactcacaggctggctacgccaacgccaggatgtttccctggagcccctccccgctctcctcacagagccaggtcagtgcgggggtgcagacggcttctaccaggaagccgtgggtctgcgtgggtgaagcctccaaggacacttctctgtttcagggttgcctgggaacaagctctccggctcccagtgagaccctgatgtggtgcggcctgggttgcagcgcaggctcctcttctggttccagcagccgccagaggccccagtgacgccacaggccacacgctgaccagcagcctcgtcactcactcatttttccaacaagtctttgccaagaggcagccgggtgcccacctggca

SEQ ID NO: 209812 - DNA, 791 bp, Homo sapiens
ttgtgttaacagcttagcagatggagaaacagaaggagtagcctcagcttacctgaatgatttttttccagcaccaggcacattgacttgctgtctctagtaacttgataggagttggagcaattggaaaatgggaaatgatatatgacttctgcagtgttatttactaaaacaattggcatttctttgttatcattatatcttctttcccagtctcgtaccaggagaaagcagaattatagcagcctatctggtttgggctataatgaaaataaaataaacaataatactaatattgctttgggcatagattagcatgttcataatggttccaggacagtagcggtgatttagcagcagcagtggctttttgaaacacaaattgtgagagtctgtggcaccattttttttgtaatagcattgttctttttacacaggaaaagtgatttttttttttttaattctgaagggactttttactgaggcacagtcctagagagagcaaagcaaggctttgaagcaaggagggaggacagttaatggtgtgaatacccttatactagctatattttattcacttgcagctttaaataaactggatgtgctcaggtctgctagcagattatttaaagatattgatcagctcactacgttttctttggttaaaagaggaaaacttgtgaatgaagcctgtgagttcctagttagagtctgtgtggttttccctttggagataagagcaagaagcgagagatgaccatctgaaataaaaataatggggtgtggatata

SEQ ID NO: 209813 - DNA, 269 bp, Homo sapiens
gaatccctcaagtcctggtttacctcaataccaatttgaggagaaaaagcgaattttctgcttttgtttttgttttgcattgacttgcctttgattctgtcagaaaggatttatggaaaagaggaatcttattttaatcttctatactatgttatatatatatatttttaatttatatatagtattacattgttgtaagtttacacttataataaactatccaaaatgctaactaatttaaagattaaattattagtcccatatactgt

SEQ ID NO: 209814 - DNA, 467 bp, Homo sapiens
tcaaaatacacaattgtgtttgcaaactaccaccgttaatcccgtgctggacacttatggctccttttagtcttaatttggccaggaaacaataagaacatttcatcaggtctagtcagatgttggagacttcgcaaaataccagttcactgtgcattcctggagcctgagaaaatgctgatgtaaggtattcaagcgctagtgattcttgaactgtgctttttgctgtactctagctgatatattatgtcaggagagatgccaaactggataaaagaatgtatggtgtcatttgacagtcttcctctttgatacagcaagatgaaacaagcatataatgccacagaaagagctcttccagcattattctttctcagactgagatgcactttcaggtgaggtgttgtcttcccccacagtgctgcagcgaatattagtgcttactcagttggttcccgctgagtgat

SEQ ID NO: 209815 - DNA, 257 bp, Homo sapiens
acttctttaacacaaatgccgagattagggtttcctctgtgcaattgatgtgatattaaattggcattcctgtcattgggcactgttaaggaaattgagaaatgggtctcttatgtgaagcataatctgtgtttaagtataaacaggcaatacatttataatggcctacggaaggtgtaatttgattcataaaaaagaaaacagctggaaagggctagaaatgttaaatcaaagattcacatgtacttagatctttg

SEQ ID NO: 209816 - DNA, 186 bp, Homo sapiens
catcttacaaagctatggaaaaatatcaaaagccaggaaactgacattggtacaatactatcaagtagactacagaccttattcagatttcaccagtgcttacatccattagcttatttgaaaaaacataattgggccatagtatgaaagaagggtcagcctagcaaaaacacgcattagttacag

SEQ ID NO: 209817 - DNA, 766 bp, Homo sapiens
cgggagccagcacgagcaaagacataggtagatgttggaggaagagggccacacgttcctaagggacagaacataagtgtgcatcccaggtttctgttaatgcatagcaatctaattcagcaaacgtgaacatttacacttcataaaacttttcaaaatcttacaagttcccgtcgatttgtatgaagcttgctatcacagggatcctttgtttccctttcaagactcaaaatgtacgttttagatatttttattttgtgatgtaaaatctatttttatagttttgaactaagttggtcactttgagttcttattctaaaactaaggaggcatgaaagccgcctttattagttttgtttttgtttttgtttttgtttttgagacagagtctcactctgttgcctaggctggagtgcaatggctggatcttggctcattgcagcctctgcctcctgggatcaagcaattctaccttagccttctgagtagctaggaccacaggcatgtaccaccatgcccggctagtttttgtattttgagtagagatggggtttcacctatgttagccaggctggtctcaaactcctggcctcttgtgatccccccgccttggcctctcaaagtgctcaataaagggtaggtatgtaccgggggaagcgattaataaccctattttctaaggaatgcacaacgtcctctgggcccctaataaaaggtttcagacgataataggcaactaattaactagacgattctatgagccact

SEQ ID NO: 209818 - DNA, 310 bp, Homo sapiens
ccatgttctctgttgttcatgtatttcccatctgtagttggagggtaagctgttgtaacagctcccacctagattccagtgtctgacatattttgttctggatcctttctaacaggatgctttctaacatcaccgcctgccattctgattctgaacagtcatggcagagtatatgaaaaagtatagacccaataaatgtgctattcaggctctcctctatcatcttcatctcttcatcttcctatctcctatgctttaattgtagggaattactactccccaaatataatacaccaccgaattatctttc

SEQ ID NO: 209819 - DNA, 497 bp, Homo sapiens
aacactgctggtccatagtgagttgagtagaaaggatgtgaggatgagctgaggaaggagacaatggtgggatcagtgagaaagtcaatgggccagaaacaaaaagagctgaggtttagatgccagttttccacatgttatttgagctacaactcctccaattagctcctgaagtctgtttacccaactgttaaattgtaataaaaattctagtttgccttacccacatcagagagttgagctgaggctcccgtgagaagacatacacactcaatgtatgacgtgtgcgacagttaaacaaatatgtgaaggtaatgctattgattttgtatagtaccttgtttctggaaagagattatgtgagcagttagaaactcctaaagcttaacccactttaattaatctgtaaaaacctaacagcatactgcagtgtgtacacagcaagagctcagctatatagattgcacagaagaaaaaaaagatagaagaaaaaaaaa

SEQ ID NO: 209820 - DNA, 264 bp, Homo sapiens
gggtggtcaggaaggccagcctgaagaatctggagtgtatcctctgtggcttttatggaaaaggtgatgtcaccagagttgtgggtcaagaactgtgtaagcagtgcacagaacatgttagaaataggagtaatggaggtgaaaaatcaattaaaatcattgcaacagtgaccagctgaaaagcaacaaaatgtctgaaccagcacgctgtctgacagcaagaatggggaggggacacacaggagtcgatgaagaggcatggcc

SEQ ID NO: 209821 - DNA, 952 bp, Homo sapiens
ctttctgattttagtaaatctgatggttataaaattgtctcattttaatatgcatttctttgattagtgtagaggttctgcagctcttcatatgctcactgcctattgtatacttgttaagggagtcattcaaatggaaataggtgaagttttgggaaaagaataatctaaagaaggcaaatccaaagagaagaaaacagaggactgagcacaaaatcttagagcacattcaaagagcagggaattggaagtgggagaagaatgagccagtggacaccaaaaaaaaagtagtcagataaataggagaaaacttagggcagtgcaatgccaccaaagccaagggagacacatgttccaaggaaggtgtgtggaaaggttgcttaacaaatgacgaaagttgagaagacaaaggaaaatgaggatgattaaagaataaaagtaaatatttttcccacatttggcttccttctgtagatataaaaaatacatatttatttgtttagaagttgtggcaaatgttaatgccgtgactgcaaagtgtatccctaacttacataaatgcacatcggtgtgtggattcattcattttaaataaatactgagtaaataaaaatatttttacagcaaagttgcaggatacaaaatcaacaccaaaacaagttgtatttgtatatcctaaagatgaaaaatccaaaaagaaaaataaggaaacagtttcattacagtggcatcacaaagaataaaataggaataaatttaaccaaggaggcaaaaaaaaaaaaattctacattgaaaactgcaaaacattgcagaagaaattttaagacttaaatggaaagatatactgtcttcatggattggaagacttgctattgttaagataacaatatttatcaaagccatctacagattcaaatcaatctctatcacaatcccaacagtagtctttgc

SEQ ID NO: 209822 - DNA, 252 bp, Homo sapiens
tcaccaaatctctttggtctttgttgctgttgctgccatcagtccttttggtcatgtgggactcttgaaactgtgctctccgtaaagagatagatgctgcttatcctttctgatggtctagtcctgctggcccaattccccagccagaactctgcaagcttttgaggcaagatgattctactgcctatgagctaagccaagtcaaggggactttgtctggaataacgggttagtagaactcagtgctcagct

SEQ ID NO: 209823 - DNA, 538 bp, Homo sapiens
gaagctccaggggagaattcgttttcttatgttttccagcttctagaggccaccaacattccttggcttaaggcccacttcctctatctagtaagcaatgtggcatctctctgaccattcttctgcggtcacatctccctctgactttaaactcagccaggaaaggttcactgactttaaggacccatgtcattatattagtccaacaagataatcgcccccatttcaaggttcttaactttatcccctttgcaaagtcctttttgccatataaagtagcatcgtcctagtttccagggattaggaagtaaacattggttgcagggccatcattctgcctaccttgaccccccttctatcttaagcttccttctttctgagagatactcagtgaaggaaataatgtatacagtggtccatttccaagacaaaatgccttgaattggcttaggtaagcaaactacagaagaaacaggatatactaggcccctgcttggatagatgatgcctgcttgtcagcctcccgctttctcccttt

SEQ ID NO: 209824 - DNA, 145 bp, Homo sapiens
gctgctaacatcagaaaaagagagataaccaaatattcagtgcctctgatgaagacagatgccccacagtgtgacatattctagctgaaataaaatagagctgaccaagcagggagagttgcattatccaatagaactttttgtg

SEQ ID NO: 209825 - DNA, 604 bp, Homo sapiens
cagtagagagaaacatttaataaaccagtgaccagtcttgtctcctctgtatccccactttcctcctccaaccagattattttcaagaaaatctcaatcatatcatttcataccctgccacttttataaactagcaagttttgaattaggaagcatgtttgttattgaaaaatattttcttgtcatgatggatcattgtaaataaaccacttgtttagtgttcagtgtcttgatatcgctgagccagaaatttaaagtagattgataactgtcctgaatatgagacaggtaggcattgagatggaactcagctgagtgctgatccattgtagtatgttaaaagcttaatgaattgaattaaatgaagtagaatttactaaggcaggcaccttggcttctaggcacccagcatagttctgagatggtggaagaacattttggcttttaaaaaactgaactttgctgggaagtctacccttgccaagatctcgttgcacagttctgagttctctcagaactgcacagcttacagaacacaaattaaaggctttttttttctttcccagcaagagattatgttttacctaaaccaaattatttaaag

SEQ ID NO: 209826 - DNA, 776 bp, Homo sapiens
caaaagaagattatagtactgttctttccttttgaacattggctcaattcccattctttaattaatctgcaagaggctgacactattgtctttcctaattttcttgttttggaattgcctaatggatttcctctcttatctctgtactcacatcccattgttcctactatgttattgcatataatttatacaaattctaattgcatgtaatttattcaaattcttagttttcctgcctttatttcaattccttaatactaaactttatgcttacctcactcctaggttctttcttcataatgctaatctacagatattaagagttacacacacacacacacacacacacagagaggcagacagagagagaacagagagaggtcagaaatgtgtatatcacattttagtcaagaacttaaatttttatcagaaatggttcagagattacaaggtaaaaaatcatttaactaagttgtaaatgtgtcttgaagcatgttatcagccaaagcaatggggtgcgacattataatgatggtacactgaagtaagaaattgttcatgaatgcattttccctaggccttctgtgatactatatggatttcattgtttagaaagaggcttttaaaaactgttgtgtttttgattaggcaacttaaaactaagagctcatttgtgccttggataggagctttgttaaataaaaaccagttcgtattaactttatgataaatgaacctcaacaatattatatcaaggcatgtaagcataactacaa

SEQ ID NO: 209827 - DNA, 216 bp, Homo sapiens
ggcaaaaccccctcccccacatgaagcacattccactcccctactccagtgggggtgtgcaggcatgcccttctgctgccaataaataactcatggtggctgcgtaaacccagaggcaaagtactagtgagtgtagacatgcaatttgacttgttgctatctgggggaaagaccaggaaggagtggcatcccctggaggtcaggaggagggggttt

SEQ ID NO: 209828 - DNA, 350 bp, Homo sapiens
actcgcacagaatactatcagattgcatcccagggcagtcacactagttgacacttacaccaatagtgcattaagttagcttctcccacattctgtaaactgatatcttcatagtttcaatttttatttctctttatcactaggaatgttgggcatctcttcaattacatattaactgttcatcttacaccttctttgagttgtctgttaatatcatttgttcatttgtcttttgaatctcatgcctttttcctcttgattttcagagttccttttacagttgatattgtaatccttagccctttgagaagatgcagtgtcttttgcaagtcctttcccctttgagtagt

SEQ ID NO: 209829 - DNA, 565 bp, Homo sapiens
ctgtcatgagacgaccttagaactgtgactgtaaaaccaggtaagatatggaagacatgcaaaatccaggtgggttttattttaaaatagttaaacatttaaaatacttaaaaattgtggcctgccaaacaaaaagaataaaagaacacaggacagaatcaagtaacagattaaataaaataagtcagccaaacatcctgggtgtggggctgaaggcccatcacacaggaggattcagtgatggggaacttgagtccacaggtggcaggcttggagaacagctcactgggaaggcaagacctagagtcactactggcagaggtaatacaactaggctcaacttatcccaatttcatgagaaaaatcacccagacatctatagctctagaccccacatgttttcacaagattcaatctcagttatctgagaacatgaccccaaattggctttaaaagagtaacctctagccaggcgtagtggtgggcacttgtaatcccagctacttgggaggccgaggcaggagaatcacttgaacctgggaggtggaggttctagtgagccaag

SEQ ID NO: 209830 - DNA, 572 bp, Homo sapiens
gggagaactggagtgagccgctgtctgtcagactgccttggcctgctttggtcactctgccacttctaggagtgatgcagttcaagggcagccctggttttccagactaagccagaggctctgcagtccttgagcaaaactggaggtgggaatgttctatgcctgagctgtgggctcctcaccctcttcactttggtagtaactgtgccaccttgggccacagtccaccagagaggaagtgtccaggttcaggttatatccttaagattccagctggtgatccagaacagagttaactgactggcgtggtcttgggagataggctgggtttgggggaagagcatgagctcagagttggtgcacataggtcggctcaagctctgaggctatgggcaggttggcctccctgcacctcagctgccacatctgcaaaatggaaataatgatctgtctaaggttcctactaggccctcaactaagtgttggccccagtccctcctttatgaaaacagcttctttcataaatcccaagaacaaaataattaccattttgtatttctataaatattgtg

SEQ ID NO: 209831 - DNA, 504 bp, Homo sapiens
atcatgaggtcaagagatcaagaccatcctggccaacatggtgaaacccgtctctactgaaaacataaaaattagccaggtgtggtcgtgggcacctgtaatcccagctactcaggaggctgagacaggagaatcgcttgaacccgggaggcagaggttgcagtgagctgagatcatgccactgcactccagcctgggtgacagagcgagactctgtctcaaaaaaaaaaatcagtgcatcttttccatctcaagaggctttgaatgggaatccctgggcagcttttagagaggtataaagaatctgctgtgccaggaaaagatgagaagacttctttcttgcaatatttcaggaacttcatggtatcggtcagttcactgtcagcagaggcctaagaaaataaactggccgggctcagtggctcacgcctgtaataccagcactttgggaggccgaggcgggtggatcacaaggtcaggagtttgagaccagtctggccaaca

SEQ ID NO: 209832 - DNA, 201 bp, Homo sapiens
tacagatgtgagccatcacacttggctgtggatttctgcttcagtttctgtcctaagaacttagatttttcatttctttttcaccttaaaattattttttaacatatactggtttcatgaccttttatttatttttttcttttatatttaaagaagcttagcagaggctgggtacggtggctcacacctgtaatcccagca

SEQ ID NO: 209833 - DNA, 293 bp, Homo sapiens
atagaaaagaaacttggagtgaagaaagaaaacccaggatttcgtccagttcaaactcttccttatgaattagttattcaaactcatattgttgatatttcttaatattgtggtaacgaacattttttgccacgttacaccaaatgttgagggtatgaagttttttgtacttaatttgtgcttacttctttagtgtgtaactagaggaattttccataccagtagctgaactcttgaaaatatttaaagtacaacttaaaaaaaaaccaataaacctgtttctttccactcaa

SEQ ID NO: 209834 - DNA, 773 bp, Homo sapiens
aaaaatacaaaaaaaaaaattagctgggcatggttacaggcgcctgtactcccagctacaggtaggagggaggtaggagaatggcatgaacccaaggaggtggagcttgcagtgaaccgaaatggcgccactgcactccagcctgggtgacatagtgagactccgcctccaaaaaaaaaaaaaaagacacaattgacaagaaaatttgcttatttctgtggcatataacaatttaacacaataatcatatgaatcataacataggccaagacatatcataattttaggaatctcatacaattttggagcacatattaataacacatttctgcaaatgtaactcaaagttaaatgccacttctatttgacagtgttttccatatgatttttatataccaaaattaaaagttagtttcaggtcaaaaagacttaattttagaatataaaatttgattttgagaagtttgtcaactattaaaggcttaaaacacttgataggaaaataagaaaggtttcaaaccctggatcaaaatagaattacacataagtaatccttatcttacacaaataagttactcatttagccaaagtgataattcaaagatttcaaaaagcaaaaacccttactctttgatagagaggagactcagttctctaaacagtcaaaaagacaaagacagcatgaggcaaactctcttttttcttttgcaatgtatttaaaaggtgaacaaaaaatcttgcatttgttatctctttttttttttttttttttg

SEQ ID NO: 209835 - DNA, 134 bp, Homo sapiens
taaatgaattcagcaaagtttcaggatatgaaattaatgcacacaaatctataaaccactatataccttgctatacaccagcagcgaccaagctgagaagcaaatcaagaactcaaccccttaacaatagctgc

SEQ ID NO: 209836 - DNA, 117 bp, Homo sapiens
atgctagtggtgcagagatgccctgtgatatatcaagacaagtatgagtttcttcctgggctcaactctgccttgtgctacatgctgggtgtgtgaccttgggcagtttacttgttt

SEQ ID NO: 209837 - DNA, 395 bp, Homo sapiens
gaggtagtaaagatgctgaattgttttttgcattttatatttcacatgacctgggactcttctggctaatttggagatgtatgagggaagcatgctcggtaaagatgttggttaaaaagaagaccgtcttttttctgcatataaagttaatacatagtcataattgaaaagaaaattagagaacagaaaaagcaaaaggggaaaaattagctttatttcagtatccagagaaaattgatttatttcctttttgtctttttttcttatagttccgtttgcaaagctggtaacttaatgttagttcatttatgtcctgttttttgtttcacttaatcttctaccattaacattttctcctgttattaacttggcttaaaatagttgcatgctcttaa

SEQ ID NO: 209838 - DNA, 557 bp, Homo sapiens
tgaaacctggaatgaggaaaatctagtctatatgattattgagtaaaaagaaatcctactgacagcccgagatggtgagcaggaggtgatgggcaattagccttcctgcacctttaatcagtctttgcttgagtgagtcgcgccgtcagctcagtggcatgactcactcgccttactcagactcaggtcgctgaattgtacagagaagagaatcaggctcaactgacagcactcagcattgcgtcacctgtgccgtggaatactatgtagctttttaaaagaatgaggtaaatcaatataaattcagatgaaaagatagctatagtatatattaagtgaaaaaggaacttgtaaaatttacatatatttcattttatataaaatatatagtttgcgtattttttgaattatgtatgctaaactcttaaagtaaataaaatatctttggggtggaatgatggataacttttactttctccattttgtgttttaaagttgtttgaaattttactgttaagatttttttataattaaaatttttttctgtttagataact

SEQ ID NO: 209839 - DNA, 487 bp, Homo sapiens
tccttgtagcaataacatgctaaattccaacctgactctagcatagcatcacatgacagataacaggccctgaaagaaatcaaagtattttactccaagatatatttctttgtatattttgaaatgaccctgcaaagctgtctcttatgagcaaaacctagaatatatagaatctccttcccttttcaggtcttttcctgatcccggagagaattaactaggagtccggtacctttttaagtctgataaaagacatttacatctattttctctgaagcttgttacctagaggcttcacctacataataaaaaccttggtcttcacaacccctcattttagacactccacagcccctcattttagaccaggtctttagaaaataactctttcaaccaatttctttttttatttatttttatttttgtagagacagggttttgccatgttgcccaggctggtcttgaactcctgggcttaagcaatact

SEQ ID NO: 209840 - DNA, 556 bp, Homo sapiens
atgatcggtccctatttcctccctaacatcacctcctcccattccctagcccctctccagctatactgaactacttactattctggcagtttcccaccatagtgctagctgttttacaccccggtgtctatagagctcttagaaggcaatatacaaaaacccattaaacaaggctgtttatggtgatacatattaaaccttttttttgaaaccaaacatttatttcgcatttgatttcattggttcaaatgtttaaaagctggagtaaatccacctgtctttcttctgggctcttcctccaatgtgtgttaatctggccaagtatggcatatgctgttgctgaatcctggtcctctaaggcctaagaggctcatccccaggcagggcccggagtcaaagcaaatgcagaaggcggccacaggtacagtctcagtagcatcagacattgtttgggctgattcctgagtatctatcctgtccctcaggacagccagggtttggcactctaagtagctactggctcacgatcataagatcactgcaagaacaccaaccc

SEQ ID NO: 209841 - DNA, 1001 bp, Homo sapiens
tgtgcactgcgttatctccacttcagctctgttttcaaaatatttcacagcaagtcgcggccgcgtcgacggtgaaaggcagtgacaggagtgacgtttatagtcatgctgcttcaaaaaaccctaccataacttttattctgcaccatggaaacacactcggacagatttgcataacgtaaccttaaggctcagggaatccgaaagagtcccttaatatttaatagaatgagattatggtatttctaaaaccctgaacaattcaaaagccaccagtgtgaagataggaaggttatttggagatatctgtgcctgctaaacacaaatgcatcggcccacagaattgccttctctgctgttaaaatgcttggcaaatggaactcctagctgagggggtaacaacaaaaaattcagaaatcgtttagcggtggcagtatgtgcgaaaatggaatttcaaggcctgggaagttaatagattcagtggtctttatttcacacacgagggaaagttggggagagaaagggcctccatggggatgccagtagataaataaaaattacaaaaaaaaaaataataaagatagattgtactggccgggcgcggtgagctcatgcctgtggtccagcactttgggagactgaggcgggcggatctcgaggtcaggagttcgaaaccagcctcaccaacatggtgaaaccccatctctactaaaaatacaatagttggccgggcgtggtggtgcgcgtctgtaatcccagctattcaggaggctgaggcaggagaatcgcttgagcccgggaggcagaggttgcagtgagctgagatcgtgccatcgcactccagtctgggcgacagagagagtctccgtttcagaaagaaaagatatattgtacctaggaagcagtatttcggaaaggtggtgccatggcaaccctggggcgtgaaggtgtcgccaggttacatgtaagccgtccaaactccagaaacctttcgtcccccg

SEQ ID NO: 209842 - DNA, 1720 bp, Homo sapiens
  misc_feature (84)..(84): n is a, c, g, or t
  misc_feature (87)..(87): n is a, c, g, or t
cgcccggccgggtgtgcggagagcgagggagcgcgctccctcccgacgcgcgggccgcagcggccaagcccgagggtgcgtggngcncccgcccgcccggcccggcccggccatggcccccgcccggggccgcctgccccctgcgctctgggtcgtcacggccgcggcggcggcggccacctgcgtgtccgcggcgcgcggcgaagtgaatttgctggacacgtcgaccatccacggggactggggctggctcacgtatccggctcatgggtgggactccatcaacgaggtggacgagtccttccagcccatccacacgtaccaggtttgcaacgtcatgagccccaaccagaacaactggctgcgcacgagctgggtcccccgagacggcgcccggcgcgtctatgctgagatcaagtttaccctgcgcgactgcaacagcatgcctggtgtgctgggcacctgcaaggagaccttcaacctctactacctggagtcggaccgcgacctgggggccagcacacaagaaagccagttcctcaaaatcgacaccattgcggccgacgagagcttcacaggtgccgaccttggtgtgcggcgtctcaagctcaacacggaggtgcgcagtgtgggtcccctcagcaagcgcggcttctacctggccttccaggacataggtgcctgcctggccatcctctctctccgcatctactataagaagtgccctgccatggtgcgcaatctggctgccttctcggaggcagtgacgggggccgactcgtcctcactggtggaggtgaggggccagtgcgtgcggcactcagaggagcgggacacacccaagatgtactgcagcgcggagggcgagtggctcgtgcccatcggcaaatgcgtgtgcagtgccggctacgaggagcggcgggatgcctgtgtggcctgtgagctgggcttctacaagtcagcccctggggaccagctgtgtgcccgctgccctccccacagccactccgcagctccagccgcccaagcctgccactgtgacctcagctactaccgtgcagccctggacccgccgtcctcagcctgcacccggccaccctcggcaccagtgaacctgatctccagtgtgaatgggacatcagtgactctggagtgggcccctcccctggacccaggtggccgcagtgacatcacctacaatgccgtgtgccgccgctgcccctgggcactgagccgctgcgaggcatgtgggagcggcacccgctttgtgccccagcagacaagcctggtgcaggccagcctgctggtggccaacctgctggcccacatgaactactccttctggatcgaggccgtcaatggcgtgtccgacctgagccccgagccccgccgggccgctgtggtcaacatcaccacgaaccaggcaggtaggcggagaaactccgtcccgcagcgtcctggtcccccagcttcccctgccccagacccatccagggatcagagctctgccggggacgtgctgtgggcctttaggcaagtgcctctctggccctgcgctcctcaccaggacccagagctggaggctcttcattgcctttagaaaagtggaacacattctataagtaagagaaatcccaaaagctcagaggcaggctagtgtggccgtcgaaagcctaggttccagaactttccctctctgtgcctctgtttcctccctggt

SEQ ID NO: 209843 - DNA, 1124 bp, Homo sapiens
  misc_feature (84)..(84): n is a, c, g, or t
  misc_feature (87)..(87): n is a, c, g, or t
  misc_feature (1056)..(1056): n is a, c, g, or t
  misc_feature (1116)..(1116): n is a, c, g, or t
cgcccggccgggtgtgcggagagcgagggagcgcgctccctcccgacgcgcgggccgcagcggccaagcccgagggtgcgtggngcncccgcccgcccggcccggcccggccatggcccccgcccggggccgcctgccccctgcgctctgggtcgtcacggccgcggcggcggcggccacctgcgtgtccgcggcgcgcggcgaagtgaatttgctggacacgtcgaccatccacggggactggggctggctcacgtatccggctcatgggtgggactccatcaacgaggtggacgagtccttccagcccatccacacgtaccaggtttgcaacgtcatgagccccaaccagaacaactggctgcgcacgagctgggtcccccgagacggcgcccggcgcgtctatgctgagatcaagtttaccctgcgcgactgcaacagcatgcctggtgtgctgggcacctgcaaggagaccttcaacctctactacctggagtcggaccgcgacctgggggccagcacacaagaaagccagttcctcaaaatcgacaccattgcggccgacgagagcttcacaggtgccgaccttggtgtgcggcgtctcaagctcaacacggaggtgcgcagtgtgggtcccctcagcaagcgcggcttctacctggccttccaggacataggtgcctgcctggccatcctctctctccgcatctactataagaagtgccctgccatggtgcgcaatctggctgccttctcggaggcagtgacgggggccgactcgtcctcactggtggaggtgaggggccagtgcgtgcggcactcagaggagcgggacacacccaagatgtactgcagcgcggagggcgagtggctcgtgcccatcggcaaatgcgtgtgcagtgccggctacgaggagcggcgggatgcctgtgtggcctgtgagctgggcttctacaagtcagcccctggggaccagctgtgtgcccgctgccctccccacagccactccgcagctccagccgcccaagcctgccactgtgacctcagctactacgngagcctgaccgcgtctcagctgaccggcacctcggacagtaactgattcatttaatgganagtatttg

SEQ ID NO: 209844 - DNA, 875 bp, Homo sapiens
ggtctggctcccagcctcccctgagatttccctggctcaccagggggctgtgtctggtggcagagagggctttggaggaggcattgccctgaaaccctggcagagcctgggcacctaagagagaatgagcaacagggctaggaagtgtgacagggagtccacaacctcccaggatcttgggagggcagggatgaggcactgagcacggcctggaagcccacgggaagcagggacccctctgtcgagggctacacctactgctctcagcatcaagcctgcagccaggtactggcaccaactcccagtgcctggcagagccctggcatggatgctaggcacagggtgccagacacgggggtgggcagggtggggggccactgggccacacacaagcatggagaccttcacacacgcaggcagaaaaatccacccacactcataccacttattttaccccctgggggttcaggggagcaaggcagggaccaccctgtcctagaggctgccttcaccgacgtccctctggcctggctcttggggttggcgggggtgggccataagtaatgggagacctaggtgcttcctctgacaccccaccctccactgacccccacacacatacatttgtgaggcaggaagtggggttgtgcgtccccaggtttaagccctggaaggaaagggaaagacggggcagagactccaagaaccgggagcggtcgtcctgttcccccgccagcccctgtcccaggcaggttttgtggccgcgagctgctcaggggtgagcgcgccttagggtgtgtgcgccagggacctggcgcagccgaccacgtgggagtgcggcgcgtgtacgggcgcgggcggcagcggcagcggca

SEQ ID NO: 209845 - DNA, 1033 bp, Homo sapiens
  misc_feature (26)..(26): n is a, c, g, or t
ggctgtactggtctggaattttgggntcggctcagtaccccggttccggcgctgccgggtctcggttcgggttcgttgccccggtgccgggaccgggccggtctctccggccgccccagccgggcgcagcagccggaggtgtcgggaccctctggacccaccctagcgggccccgccggcggtcggcctccggtccgggctcccagtcgcgccgtcctcgccgccccatggagtcccagtgcgactactcgatgtacttcccggccgtgccgctgccgccgcgcgcggagctggcaggggatccgggccggtaccgggcgctgccccggcgcaaccatctgtacttgggggagactgtccgttttctgctggtgttgcgctgccggggcggtgcggggtccggcaccgggggcggcccgggcttgggctccagaggagcctgggcagaactggcaaccgccctggccgccctggcctcggtcagcgccggaggcgggatgccggggggcggcggcgccggcgaccaggattcggagcccccagggggaggggatcctgggggtgggggtttgttccgaggctgcagcccccttctcacccacggcccgggccctgctacctcagggggagcgaccacgctgcctgtggaggaaccgattgtgtccacagatgaggtcatcttcccactcaccgtttcactggatagactgcccccagggacacctaaggccaagattgtagtgactgtgtggaagcgggagattgaggcaccagaggtcagagatcaaggctacctgcgattgctgcagacccgatctcctggggagacattccggggcgagcagagcgctttcaaggcccaagtgagcacgctgctgactctgctgccccctccggttctgagatgccggcagttcactgtggctggaaaacacttgaccgtgctcaaggtgctgaacagctcctctcaggaggaaatctccatctgggatatccgaatcctccccaacttcaacgccagttatctacctgt

SEQ ID NO: 209846 - DNA, 1165 bp, Homo sapiens
gcggagcggcggcgggctgcagctagcggggtggtcgcgtgagcggtatggtgcgacgctcggtgttccccagcggagccggtctctccggccgccccagccgggcgcagcagccggaggtgtcgggaccctctggacccaccctagcgggccccgccggcggtcggcctccggtccgggctcccagtcgcgccgtcctcgccgccccatggagtcccagtgcgactactcgatgtacttcccggccgtgccgctgccgccgcgcgcggagctggcaggggatccgggccggtaccgggcgctgccccggcgcaaccatctgtacttgggggagactgtccgttttctgctggtgttgcgctgccggggcggtgcggggtccggcaccgggggcggcccgggcttgggctccagaggagcctgggcagaactggcaaccgccctggccgccctggcctcggtcagcgccggaggcgggatgccggggggcggcggcgccggcgaccaggattcggagcccccagggggaggggatcctgggggtgggggtttgttccgaggctgcagcccccttctcacccacggcccgggccctgctacctcagggggagcgaccacggtgaggagcttagggggacctggcacaggacggaggggcggataagctgggggcctgaggcaggaggcagatgaactgacggactaaaagggaaaggctgcaggctgcctctgacttgctcctgacctctacaccccttttccaaacccagctgcctgtggaggaaccgattgtgtccacagatgaggtcatcttcccactcaccgtttcactggatagactgcccccagggacacctaaggccaagattgtagtgactgtgtggaagcgggagattgaggcaccagaggtcagagatcaaggctacctgcgattgctgcagacccgatctcctggggagacattccggggcgagcagagcgctttcaaggcccaagtgagcacgctgctgactctgctgccccctccggttctgagatgccggcagttcactgtggctggaaaacacttgaccgtgctcaaggtgctgaacagctcctctcaggaggaaatctccatctgggatatccgaatcctccccaacttcaacgccagttatctacctgt

SEQ ID NO: 209847 - DNA, 1184 bp, Homo sapiens
  misc_feature (26)..(26): n is a, c, g, or t
ggctgtactggtctggaattttgggntcggctcagtaccccggttccggcgctgccgggtctcggttcgggttcgttgccccggtgccgggaccgggccggtctctccggccgccccagccgggcgcagcagccggaggtgtcgggaccctctggacccaccctagcgggccccgccggcggtcggcctccggtccgggctcccagtcgcgccgtcctcgccgccccatggagtcccagtgcgactactcgatgtacttcccggccgtgccgctgccgccgcgcgcggagctggcaggggatccgggccggtaccgggcgctgccccggcgcaaccatctgtacttgggggagactgtccgttttctgctggtgttgcgctgccggggcggtgcggggtccggcaccgggggcggcccgggcttgggctccagaggagcctgggcagaactggcaaccgccctggccgccctggcctcggtcagcgccggaggcgggatgccggggggcggcggcgccggcgaccaggattcggagcccccagggggaggggatcctgggggtgggggtttgttccgaggctgcagcccccttctcacccacggcccgggccctgctacctcagggggagcgaccacggtgaggagcttagggggacctggcacaggacggaggggcggataagctgggggcctgaggcaggaggcagatgaactgacggactaaaagggaaaggctgcaggctgcctctgacttgctcctgacctctacaccccttttccaaacccagctgcctgtggaggaaccgattgtgtccacagatgaggtcatcttcccactcaccgtttcactggatagactgcccccagggacacctaaggccaagattgtagtgactgtgtggaagcgggagattgaggcaccagaggtcagagatcaaggctacctgcgattgctgcagacccgatctcctggggagacattccggggcgagcagagcgctttcaaggcccaagtgagcacgctgctgactctgctgccccctccggttctgagatgccggcagttcactgtggctggaaaacacttgaccgtgctcaaggtgctgaacagctcctctcaggaggaaatctccatctgggatatccgaatcctccccaacttcaacgccagttatctacctgt

SEQ ID NO: 209848 - DNA, 191 bp, Homo sapiens
caccactctgacctccccagcgcctgccctctggtatgtttttctctatacatacatacctatgataaagattatttgttaggctaataataaccaataaaatagaaaaactataacaatatattataataaaagttgtgtgacgtgctctctctttttcaaaatatcctgtattcttatgatgatgatgt

SEQ ID NO: 209849 - DNA, 207 bp, Homo sapiens
gttcttttcctctgggtggtggtggcctgggctcgtggttgggtgttggtgatgtggtcacttgagaacacgatcctgttctttgggatccgttctagactttccactcttttggagcagataaaggctgtgtgtttgcccaacaaaagggcatataccttacatgaacttgaggagatggtaccttttttttttttttttgagatg

SEQ ID NO: 209850 - DNA, 690 bp, Homo sapiens
atacattagtggtataggttttcccaagagggtggggtgattccaatatcagtgaccagaggagaggcaggcctttagacacacatatggaagaagtctttaggtggggtgaactggggacttagcttctttttcttgccctggtttccaaggattctggagttggaattacttctagtaagtggggtgaaaagggctctgccacatagtagataggttagaagccaggatagagggattccccacagtaagtctgtaagtgaagaagcatttactgtgttttgtaagttatattgtctccattagtgatactctgtgtttgctgctcttctgttgttactctaagcctgtaagtaaagcattttgttgaatgttttaacctaaggattcttaatggggacacaggcctgtgttggtggaagtgagtggtacagtcatgacagaaatgctaggtgttttttcaaatcattatcctccctcacatccttgagatcttaaagcagactccccttgcctttcctttaagactcactcatgtgctaagatgggagatggatcctcagtaaaagtatgttgatgggaggctgaggcaggagaatggcgtgaacccgggaggcggagcttgcagtgagccgagatcccgccactgcactccagcctgggcgacagagcgagactccgtctcaaaaa

SEQ ID NO: 209851 - DNA, 139 bp, Homo sapiens
aaattagagaaacaaagtgtatcacaccaggttttgaactcaggataaaagaactaagaataatgtcctgcttagatttcacaattaacgttaagtacacataaaggtaaaaacaaaaccctaacaccaaacaatggaa

SEQ ID NO: 209852 - DNA, 465 bp, Homo sapiens
atggggtatgctgcgtgttgccaacaagtgacttattttatcatctacattgcaaacctagaagatgcctcttcaaaaggtgttgttcagagaacccctgatcccgcggggctggaacatggacgtgacagggatggcatccttggcatggcagagagagcagggggagcctgggtccctaacaccacggagtgcccattgcttcgtgcagaggacaccggacttgttgcagagtgaaaacatacttctagcttgtttcagctgctgcggttgggggactttgtaacctcagtgggacttgtatctgattaatatacaacctgaagtgagaacaagaaccaaagagaagtaggaaatggttaggatttttttagccccggaaggtgaatttatttctgaaaacaatcttttgtttttctttaaataaaaagcggctttttaaaataaagaaacagccaaactaaa

SEQ ID NO: 209853 - DNA, 379 bp, Homo sapiens
cgatctcggacgcctcacgacgaggcttcatatgcctcgtattttaactgagtgtagctctttgaagcaggtaccatatattttacatccttttatgtgttcacagagtttccaatatagtagacactcaaaaacttttaaagaatagtatacaacattattttgttgaggaaagattaaaatatttggaaggacttccctaaatttaggcaaagccttcacttggacccatcttccactttactgttttcctgttcaagcagtggtctgagattcagggatcagaggaactcctggtagaattccaatcattagactacatgagtggccatgaaacactttggaggcaagaccaagcctgttctgttcactgcctgca

SEQ ID NO: 209854 - DNA, 602 bp, Homo sapiens
ccactgttttttctactaaagctttattccaacttcttctaaccctttcttcccccacttttaaagatatttgggatttgtagtgttcaaattgggttaacaaacataaaaggatgttttctggacataaaggaaatttgatttacagactttttccaggatttgttaataaacaaacgctgacatcttagaataaattaagtatcaatactacacgaactgaatttaatattctttgtgtttttttcataatttaaaacaatttaacaaatttcaaaatgtttaatgaaaaagttaataaaattctcatatttttgtacattatttaatgtaaaaattactgtacttcctacattgtatttgaaagtatataatgccagacacagtcgcttaggcctgtaattccaacactttgagaatgtaacagccaatgtagtgaaaccttgtctccacaaaaaaatgcagaaattagttgagtgtgatggcatgcacctatagtcctagctactcaggaggctgagatggaaggatcccttgagcctgggagattgaggcttcagtaagctgcgattgcaccactgtgcaatctaatttaatctctt

SEQ ID NO: 209855 - DNA, 651 bp, Homo sapiens
ccacactggccggcacctttgctactgtgtgctccatctccagaatgtcctgggaatcactctgtgtgtaggtttctacaacctgtgttattcgtgtctgtttgtgtgtttgttttcgcttctctgagggaggagccaagtctcatccgtgtagctccacgtgtaataaatgtgagtcgagtgaacgaatgaaagatttccccaagccttgtagtggacgtgcttggaccatggtggtccatcagtgtggcagtggagtccctgagcattgaggattgggagacgtgtgactagagaggtagaccacacaagccatgaagcatctaggggtgactgcaaactgagtgaggcaggtcttctggtcctgtgctgctccacacagaaggtttcagggatgacttggaagcaagaaacaggtaaatgcagtgctgtgtgctaagcgttgcaacctcctgcacaaactgctctgggcgcttcaattaatttggactgtgggggttggtctgggaagactggcgttttgagttgagtcttcaagagcgtgcagttgcccaccaaatggagaagaacaaggagcatgtttcagaagcagcatgtaccacgctgtagaggtgggaattgtcattttcttgagaagttgtaatggagctt

SEQ ID NO: 209856 - DNA, 481 bp, Homo sapiens
  misc_feature (21)..(21): n is a, c, g, or t
tttgaacccgtttcgaattcnagctcggtaccccgactagtcccaaccataccttggaccatggtggtccatcagtgtggcagtggagtccctgagcattgaggattgggagacgtgtgactagagaggtagaccacacaagccatgaagcatctaggggtgactgcaaactgagtgaggcaggtcttctggtcctgtgctgctccacacagaaggtttcagggatgacttggaagcaagaaacaggtaaatgcagtgctgtgtgctaagcgttgcaacctcctgcacaaactgctctgggcgcttcaattaatttggactgtgggggttggtctgggaagactggcgttttgagttgagtcttcaagagcgtgcagttgcccaccaaatggagaagaacaaggagcatgtttcagaagcagcatgtaccacgctgtagaggtgggaattgtcattttcttgagaagttgtaatggagctt

SEQ ID NO: 209857 - DNA, 549 bp, Homo sapiens
aataccgtaaaaaagaaaaaggctgtcaaaacacaagcagtgtttgaaacgaagctttgtaggtccccctacaccaccaccgtcgtgggcagcatagcggatgagttctgggacaccagctaaaatgtgggcaagagaagccagggcgcgtagcagatgtgtgtgtgtatctttatgggattcaagtcatgtctctgttttgttgaccaacttccgctagaattcatagccatctagcctatgtattggatttttatttctgtgatgtctgcttcttttaaaaatatcagttggggccgggtgtggtggctcatgcctgtaatcacagcactttgggtgaccgaggggggtggatcacttgaggtcaggagttccagacccaacctgcaatatggccaaaccctgtctctactaaaaataccaaaattagctggacgtggtggtgtgcacctgtaatcccagctactcgggaggctgaggcaggagaatcacttgaacccgggaggcagaggttgcagtgagctgagatcgcgccactgcacttcagcc

SEQ ID NO: 209858 - DNA, 126 bp, Homo sapiens
cagacatgcactgagccaggagagcagcagtgagcacagaaggaacagcaaggtcaaaggccagtgaatcaaatgagagctggagcctatgggaaaatgcctggcacatagcagatgctcaataaa

SEQ ID NO: 209859 - DNA, 202 bp, Homo sapiens
accaagtctccatcagagagtgaaatgacgtgaaaccgcagtgtgtggtgagcagatgggcataaacttgcttacgccaatttccttcgtatacttgtgcatcctgaataagttgtccaaggttggacgttttgtatttgtaaagaatattttagattttcttattaaataagctgatttctcatttgtcaccgtttgagtc

SEQ ID NO: 209860 - DNA, 447 bp, Homo sapiens
aaatgtaaccctttctaccggaagtgaagcagatgaatgaatagacccatcagttctgcccagaatggaggtgaagaaatcaggaagctcagatctgtcccagtctcagcacttgacatgctctttgttgctgtgagcacagaagttgtttaatgctcctggttttcagctgtggaggagccacactaccagttaattgctttgcagcttatgctctgaagactcctgagaatattggacataaattgcttttgagctctctgtgtaaatacaaagcatttgtatcctaagtgtacaggagtcgtgatccatcctcaaagatgtaaacagccaatctcagtttgacagcactgttttggtcaagccagagctccctttgagaaaatcttgctgttgtctgttctggaaagaggcaggaatatgtctccaaaactccatagtagccat

SEQ ID NO: 209861 - DNA, 479 bp, Homo sapiens
cacagagcaagactgtctcaaaaaaaaaaaaaaaagaaaaaaagaaaaaagaaaagagatgaaggtcgtagaaaaaatattcattccagaaattctaccatacgactctttttccagattcaattatgtaacttaaacaaaaaactatgatcaaagtaatatatgcacataatttaaaaacaaaatagataaataagtttttaatgaaaagcaaccattccctccttccctacctctagtcttgaattacagggtcaaccatttttaaatgttctgttttcagtttttctggtgcttactgccatatctgtaagtttaatctcaaatagggctaatgaaaaacagccctgaaaaataatgaagagtcataaaatatgtaataatcattgttcacatggaatcattcttactagtttcattatgaaaatcattaaaaatattctagacaaatgccttctatgtaatgatattgttgaatt

SEQ ID NO: 209862 - DNA, 195 bp, Homo sapiens
cctggccttaatttttgtatttttagtagagacggcatttcatcacgttgcccaggctggtctcaaactcctgacctgaagtgatctgcccgccttggcctcccaaagtgttgggattacaggcatgagcctccttgaccggccagaacggtttatcttttttatgagtgaataatatcccattgtgtagatgga

SEQ ID NO: 209863 - DNA, 924 bp, Homo sapiens
ggaaagttattttcctgcacaagggattcagggtttccagaacttagctgtcaacttagactgtgctttttttgcagatgtaatgatccccgaaagccctgaggcctatgtaaaactcacagaaaatgcaatcaaaaatacctccggtaggcacaacaagccggagccagcctccctccctcccctgtatagcaatcctcctctcttagcacatctgctgtctctctcccagctttgtggctctagcatgttaaggcacagccttcctctcttactgctgtactagaaaaaacagctggttaaatccacaccaagaataagatttcactaattgagcgaaataaagtaacttctcaacttgttaaatggtgattggtctcattaggtatagacctctcatgtccattaactgcagaaaatatgagaaggaaaacccagtcatcagcctctgcgccctagtgttctacgtggtgtggtaatttcagcttcactgcatgcagacctacctgtggctggagactcagggtgcaggctctggtcccaagtccgccagcctgcatgagtgacctttggcccatccaccactttatcctcctcatctcaagaatcccgtatgagacaaggggtgagaacacacattcacgctcacacaacaaaataggacgccctccccaaggcgccaccacacgcccgcacgcttcacacgagtgcaccaaagagaacctccgtgcgaacaaacacagcggcgccgcacacccccaatcgctacacccgctcacacgaaggacccaaacacacaccacactcacgcgaccaccccaggctatatgtcagggaaaccatatgacaccgctccaccgcgcgagccgccactccgcacctccccatcccaccacgcccgacacccaccctagccaccacacc

SEQ ID NO: 209864 - DNA, 561 bp, Homo sapiens
tgtccaggtagatatcaacaggaggtaaaggagtatagtgcttgacccataataaatattcaatatatgttatttgctgataaggtgattgcagatgtactatttttttttttaatttttgaggacctaccagatgtcagatactatgcataaaatcccctgttaattctcacatcgcaacaaagcaggcaatattactcctattttgccagtaggaaaactgaggctcagagaggttacaaaacttaattttaaaagtcatgtatctcatacatggtggagttaggcttaagatttagctgtgtttgatttcaaattctgtcttcgttccaccatgctgctgttgtttcttctctagcagttctcagagcctcaagagaaggcttttccctctaggagtgtactgcatttgctccttctggcctggagacctgcccctttaataggtaacctggatgaaagaccccagagcgacctccccacagtcacacctcctagttcctttctggttctcacatgggcaggcactgataaatcagctcacggtacacaggctcagtt

SEQ ID NO: 209865 - DNA, 621 bp, Homo sapiens
ttcccttttgatctcactgttgccttttcattttagctcctgattcacagagtccacgtcctcccgcatccaacatcgaatgtagcagtttactgagactttcttctagatccttttgcagatatatttcagagatctgttctctgtgtatcctgaaggcatgcgtgagcaccccatctcacctggccatttttgtgatttgcaatctgtgtgcttagttggagaaagatgttgggaaaatggcagaatatcagatggcaggaaaagagcctgcccatctcaggaagcatgagaggaatggctggcagcccaccagtcctgggactctgagtggagaccccgagaacggagaagtgaatgcttttactcattcctcattgaggcatttggtccatgaaccaaaagccaaggcagggtcagctgttcctctacggctccttctagtctcagttcctcctcttcctgacttggcagtgtctgtcggtctcactctggagtgttgtgagtttgggtccacatcgatgcctccctgcatggagcccccctccaaaaacagctttgaggccaggcgcagtggctcacgcctgtaatgccagcactctgggaggccaaggcaggtgg

SEQ ID NO: 209866 - DNA, 396 bp, Homo sapiens
aacccctagcctccctcccttccccatccagcagtgatgctgcctctgtggtggtaggtggggagctgcaggggaggagataaggcctctgcctgagtttgggagaccagggccctcatagcttctttcagaggatggagtcagaaaggatccacagctactctgtcacctgcccccatcactgtgtcatgctgtctgccctgttgtcatcagccaacacccaggcatagccaggagcccacctgccctaccgccaggatacacctctgtcctcagaaggttttctcctggatgagactgagccaatgggaatgggaccccttcatccccctggctcgccccagccctgagtcccactctcagccgatccctgagtaaacccagcacagactgact

SEQ ID NO: 209867 - DNA, 361 bp, Homo sapiens
ataggaagcatgcaattcctgactgtctctttatgatgttaacagtaattagtatataatgcatagatctattaatccattgggggctataaatggtattattctaattttattaccttttcatttaaaagttagaatacttttgtacatgatactacctcttatctattattggttgctgttcacatagtttacaaaggaaaatcaggacaaatgcttctttctctttatttgccagttttcatttataatgaattgtttctctgttattctccaaatttggcagattcttttttaaaaaaaatatcattatgaatgtatggattaaataattgatgtatttcagtctcttgcaatcatt

SEQ ID NO: 209868 - DNA, 296 bp, Homo sapiens
gctcagctctgtgctttctgacatctctatttgcattcagcctatccacagaggtatgcattccaatttttttccttccatatatttaggagcttgttcctgtggggaaggcctattgttgtctatcatgcttgtgactaggtgtgtacattgtttagttaagaggaacatattagaaacttcattataatcatgcatcctgtgttttccaatatctgttcaataataaaaataatgtttgatttccatgtaagtgacttttatgtctattctcaattggctctgaaatcatgaaa

SEQ ID NO: 209869 - DNA, 239 bp, Homo sapiens
tgtcttacacttcttacagtcccctctttactacacgacaggttaacttaatcaggacagactgtataagttacagggcccagtgcagaatgaaagcatggagcctgttgtatagaaagtaggacaaaggtgccattaaaggtggtaaaatataaaatatttttcttctaggggatctctctcaactttttatggtgttttaaattagctgtttaatgttgctttaagtgaggaaaaat

SEQ ID NO: 209870 - DNA, 359 bp, Homo sapiens
agtgttgaggtgcttgtttccatgcatttgagaaattttagctgagcctgtgcttttgattttgatggcatgaatattaatgcctgacaaaaagcattgtacactaggtcctcgaataaggtcattttgttcaacaccatttcattaaatgatgagaaaaaaacatcaattactggtagggccactgtattgagtttgcacattctccctgtgtctacatgggttttctccaggtattctggtttcctctcatatcccaaagttgtgcatgttaggttaattggcgtgtctaaattgtcccagtgtgagtgagtgtgtgtacatgtgtaccctgcaatagaatggcatcctgtccaggg

SEQ ID NO: 209871 - DNA, 824 bp, Homo sapiens
gacattccccaaattccgatctttgcggcctcggctcagtgggaccgaggacagtgggaccatctttgggtcggtgggaccccaccaggctcccttggacttccgcttgtggtgccacagggaagctgtaaccgggctgagagccagggaactatggggcgcacacctcctcctcttccttggagtcttgcactacctgttgttcacacctgaaatcagttgcctcataaatgttgtccaattttatggttgtttaatgtgggagggtgagtccaggaccgaggactctgtcagagctggagaccaaagcccacccaatatccctgcagaagctccttttcacctgagctcagccagaacaggcttctattgctggcagccaggagccccgcctgagccgcgtgataaataatgtcctctagaacctccctggaggcaggttccagggcacctcctgtggccccttgggacccatggatcgcacagagtgcaattcagcaggggaagttttctgtacggaaggaaagatagagagaaaatgtatatattaggttggtgcaaaagtaattgcagtttttgccactgaatgtaatggcctatcctcctacaaggccgagtttagggagacatttcaaagatccagagcaacagattccaccctacagaattcatggatagtcacatcctgggaaaccatggagctatcgcgagggtcccacgaatccatgtgatcctaagaattcgctatagactcaatactgggctgtttccaggtatgcacagaggctgctgcattttataaaataaaaatccattttaaaact

SEQ ID NO: 209872 - DNA, 346 bp, Homo sapiens
attggtcatttgaaaaatattggtttcctgaattatgcagattttgtaaacacttacccattttattatacagtgttaaaaatcattaatatcatcacagatttctaaggaaaaaattttaaagtattgggaagctgtcaagcttacagtggtttgacagcttgaattttatcactgataacaatactgttggttattttccttgaattgttaggcccagttgtttatgtttgagaaaatgtctgtcaaatatccaaatctgaatagttatagtttgtttcatttcacagaatttaaaaaattattgttctcaagggttgagatttaataaagttaataattttta

SEQ ID NO: 209873 - DNA, 519 bp, Homo sapiens
ggaggaggtgatgctgggcttgagtgagtgtggttctggccaaaaacctgtaccagttccccaggccagagttctttagcccagagtttccaccctctcactgacctgcatttgactggcctgaattcttttttcctttgtttttcctcctgcaaaagacccagagggcagagatgtggccactaagtggagtaaagaagaaaagggctggcaatacccaaattgtttaaaccagccctgagtatgaaggagcccaggaggagagacactgcgggctggagtgggagttttgtggaggtgatggggagggtgtgtgcccacccacagtcaggaaagacagtgggagaacattctagaaggactaccaaatcttctccattgttttctggtgaagcagcatggagggttacacccaccgtcagggtggagtcccagggcttgggtttagggtccatctctgaccctgctgtgtcagagcaaatttgctgctataaaaaagagtctgcaaatctccatata

SEQ ID NO: 209874 - DNA, 149 bp, Homo sapiens
tcctgggaagctgactcttatcaacaggctcccttgttttttggattccagttgtatttagccaatggggagcactaacaaggagaaatgtgagattaggctatctatttccaggcaccctgcctgagaggttgctgggcattccttga

SEQ ID NO: 209875 - DNA, 567 bp, Homo sapiens
tttagtggaaatggggtttctccatgttggtcagactggtcttgaactcccagcttcagatgatcctcccacctcagcctcccaaaatgctgggattacaggcctgagccatagtgcccgccctggtacaaatatttttatctgctttgattttaagctgtttggggtcaaaaactatatgtattgtcgagaagaatatggaaataatataaaagattgctaggtgcttcttgtggctccttttattatttccttatattttatttattttttttttatttgagacagaattttgctcttgttccccaagctggagtgcaatggcacaatctcagctcactgcaacctctgcgtcccgggttcaagcaattctcctgcctcaggctcccgagtagctggtattacaggcgtgtgccacttcgcctggctaattttttgtatttttagtagaaacggggtttcaccatgttagccaggctggtcttgaacttctgacctcaggtgatcgcctgcctcagcctcccaaagtgctgggattacaggcgtgagccatcatgcccggcctat

SEQ ID NO: 209876 - DNA, 331 bp, Homo sapiens
taggaacagaggcaatgaaataaataaacatggacttcctcacatcacagctgatctgccactgtcactgctgagtgcccagatttctaaaacggaaggcaacactgaacccttatttggcactatttcttggaagtatcagccacccaggttgataatatcagaccactacattatggaaggggcaggaatttgtcttcatgggaataattacatatactggagagtaacttccctttcctgtgcatgttgcttccgccagcactaccatatgtggttgataggctgccttattcatccccatggtgtcacacacagcattgtcactgat

SEQ ID NO: 209877 - DNA, 382 bp, Homo sapiens
cacctgcccatttcaaacagcagaggtcactaaatgtggagttggcaagagatacatagacatagtactctatacagtgtttctatcatatagatacagtagatataagttgccccaaaaacataataatacaaaatgtagccaaatcattcagaagttatgagttttgaatacttatttccattgtttttaatataatttgtttaattatagttaaaaatttttatgtaatttaatttttaataactgttgggtattaacaactgacttataaatactcctaaaaatgtaacagaatgtagtgagggacaaaatggatgcggtctctgctttcatcaagtttacattctggtagagaaagacagaaaataaacaagttaac

SEQ ID NO: 209878 - DNA, 474 bp, Homo sapiens
cgctctagagtatccccagtcgcgtgtgcttcttcaaaaaatacaaatctttagatctaaccccaatagagaaaaccaaagctgaactgctttggctcaagtaggaggctgtgactctctgtcaccctcctctaagggtgaaccctattgaaagagcagagattttagctctgtgccctttcccagctcttatttttattttcccacagaagaggctagattctttaaggagatataaagaagggagagggaaagatataaagattctttaaggagatacaaagacatcctctcatcagctggaaatgccagctaggtgagacctgactatgcatatgcattgtttgcccttagtaattccatagcaatctgcaaattcaatcagcttcatcagcagaaaactttgatagaaaccatgtgtaaaagggctgtgttcttaaagtggaacatttaaatcgaagtttttcaagcaca

SEQ ID NO: 209879 - DNA, 560 bp, Homo sapiens
gttttctttctttctttctttttttttatccccgaggtggagtcttgctctgttgcccaggctggagtgcagtggcgtgatctcagatcactgcaacctccgcctcctggatttaagcgattctcctacctcagcttctggaatagctaggattacaggtgcatgccaccacacccggctaatttttgtatttttagtggagacggggtttcaccgtgttcgccaggttggtctcgaactcctgacctcgtgatctgcctacctcggcctcctgaagtgctgggattccaggcctgagccaccgcactcggctagattttcagatcagctgggtatatacctaggaacacaagctggattgtgtttgtcccattttgtattctcaccagcaatgaatgagtgtgtggcttcaatccttgccagcaactgatattgtcagctattttgtgttttaggcattctagtatgtgtgtagtaatcttgcttttctcagctttatccagaccactcttggacagttacgtctggttctgggtgcctcacgtgaggggtgagggtgg

SEQ ID NO: 209880 - DNA, 534 bp, Homo sapiens
  misc_feature (33)..(33): n is a, c, g, or t
tatctctacattatagacatttattttagtttnattttcaaagtcattgacctcttgtatcagatttaaggcaaagaagaagatacatgtcccaggactataggccaggctgttgactgcactgggatttagatggtgtaatctcccttagttctaccagggagacctcagcccaggtcttgttgccggggcacagttgagcactggattcaggtagagggctcccaggtcagtctgagagttaatgttagagatacttattttgctgtcttttctgtattgtttgaattgtttttacaatgacagtgtatctttgtatgcgtgtgaaaacaatagtcattaaagaaacaagaattggagaaaataaatttttgaatccagctaaataattttactgtaatacttgataaccacaaatcacaaacttatccattttgctttaaaatcaggggaatgtgctttttttaaaaaaatttgaagacattatagttatgtaggtagaaaatttatgtctgtattaatgacttaacagtg

SEQ ID NO: 209881 - DNA, 148 bp, Homo sapiens
gactccttgcttgaggggcagagtcctcttgctctaaggtaagaaattggttcttcctttcatctacttttcctgccagtgtttatttgctagcccatatgttcctgcacagggtcactcctattgtgaaataaatgctgaataaata

SEQ ID NO: 209882 - DNA, 268 bp, Homo sapiens
aatactgcattatttgttaacagcaagaaatttaaaacaactcaaatgttcatcagtaggtacacagaatatatatatatatagaaggatcttcatttcttctgtatcacagaagaaatgaagatttccattaacttgtttttgagacagagagtctcactctgtcactcaggctggatgaagtgcagtggcataatcatggctcactgcagccttgacctcctgggctcaagtgatcctcccccctcaacctcttgagtagctggga

SEQ ID NO: 209883 - DNA, 172 bp, Homo sapiens
atttttagtagagatggggtttcaccatgttggccaggctggtctcaaatgcccgacctcaggtgatctgcctgcctcagcctccaaaagtgctggcattacaggcgtgagccaccgtgcctggtcctgtccttcattttccagttaaggaaacggaggctcagagtgggga

SEQ ID NO: 209884 - DNA, 739 bp, Homo sapiens
ctagaatgagtgctttgtaaacaaactgttgattttatgatggcattagagtctgtcaaattgccaatcttccagatttatacagccttagaaatcatgtgatttaattaagcattccatgattttgttcttattgctatctccaaagtttatgttcttgacctaacaattagttgtcagagttactgctctgaaagaaatggtgaatattgcaattggaatgatagcccccttattttataactcatcttaccttccactacagtgtggtagactggatagctgtctagccttagtcaagccacttaatttctctgtgctttagttttcttacctgtaaaattgggctgctgaaaaccatctcagattattatcaggattaaatgcaatgtgatatataatgtgcacagcactgttcacatagacacttagtaatttatagattcctttcaacttctcaacttcttttaatatgagtaagtgttcttcacagttccctcttgataatttcctcccctcaccactgttaacctttttgggttcttatccttcttgcagaatctgacgtaagcagtgacccctcctcccagaaaaacgcacatgtctattaaattttgcctacaactttgggacttcatagaactccccccgcccagaaaaaaatcccccaatctcatgtgtggaccaggttaaggatcctcttacccttggtagacttactcagttttcctagctttgg

SEQ ID NO: 209885 - DNA, 151 bp, Homo sapiens
ccattgaaagagacccgtgacaatatgaaaagacgtgcagatgaaacgaaacagagccaagattaccaggcaaatattagacacagttgcctgcttctcattccatatgaatcaagccaccctccgatagaagtgggaaaacaagagtttc

SEQ ID NO: 209886 - DNA, 210 bp, Homo sapiens
tatatagtttaattctatcttttttttcttggtagagataaggtcttgaactcctggcctcaagtgatcttaccaccttggcccctcaaaggagggactgcagaagcatttagcaatagttaattgtttaataattgttgttatttgttactgtagtattatcatgtatcagtagcaaattaaaagtatacactttttgaagaatgtcat

SEQ ID NO: 209887 - DNA, 427 bp, Homo sapiens
ttgtgctcgtgactacgatgagtttcactgtgaatatccatttccttctagcgtaggtccctcccactccaagcctttggttgggcagtgtggtggagtcttttccccttcatctcccgccttttcttccttggtcttcatcctttgtagcaaaggcagtgtgactccttgtatctagccacaagatgagcaagtgggtccttcatctggttctacactgtcaaagagtgaagacgtctatactgtgaccccagggaaatttgcaggaactcttctgtgtatatattttaaatattttttatttacacaatgtgcaaaaattctgcatgctgcaaaattgttttacctaatttatttttgcaagctaattgaaaactttaaaacatcttgctaacagactgtatgtagttggctggccataagttgt

SEQ ID NO: 209888 - DNA, 232 bp, Homo sapiens
tcaccacttttattcaacatagtactggaaattctaacaagagcaattaggtaagagaaagaaacaacacccaaattgggaaggaagaagttaaattctctttatttgcagataatatgattttatatttagaaaaaatctaaagatcccaccaaaaacgaactgtaactaagaaactgattttatttataaaaccaacatacaaaaatcagtagcacaaatgccaactgtg

SEQ ID NO: 209889 - DNA, 343 bp, Homo sapiens
ggaatagagatgttgagtttcaggttcatatgagagatgtgggtggagatatccactaatctgtctagagcttttaagagaggctgggctagaggtctgaaagtcacaggtgtaataaatgtagcaaactatgacagtgaagttgcccagagagaactatgcaagtgaggacaggggagatgcaacaactggagaagaaaagtggggtgactaggagaaggaggttcaaggagagagttgttttttgtcttttttttttcttttttgagacggagtttcgctcttgtcacctaggctggagtacaatggcacactctccgactcccgggttcaagcgattctc

SEQ ID NO: 209890 - DNA, 392 bp, Homo sapiens
gatgttttccaattgcctgagtattccagtttgtaaatttcccattttcgagtaattacagattaataaaatatacttgacactaaaacttgtctaaataaaattaaacttttacgccaggcacggtggctcacgcctgtaatctcagcactttaggaggacgaggcgggcagatcagctgaggtcaggagttcgagaccagcctgaccaacatggtgaagccccgtctctactaaaaatacaaaaattagctgggagtggtggcatgcgcctgtaatcccagctactcaggaggccgagtcaggagaattgcttgaacccaggaggcggagattacggtgagccaagactgcactccagcctgggcaacaagagcaaaactctgtctcaaa

SEQ ID NO: 209891 - DNA, 345 bp, Homo sapiens
atttttcagcaaggatttgatttaaagttgctggacaaaactgagcctgacagagctgaggggctccagggaaaccccccccccccacaaaggaaatatttgctgaagaagaggattgaagttcaaaagttccagaagccttggtggtgctgttttggtcggggaatagagacacagagggaggcaggagagctcccgaggccgcagagcctctctggctcttcccttctcatctcactccgcatgtatttagggggggcctactatgcacctggcactgtgcagagaccaaggcagaccccgtctgtgcccttgtgattgtcaccatctatggaggacacagcc

SEQ ID NO: 209892 - DNA, 419 bp, Homo sapiens
aaattctgaacatccaaaaatcaaatgaatttgtttaattaaaatatactctgacatagtattgaacttttactataaaagaagtttgtgacatgcaaaggcaaataaaatgttcaagtttaaactgtataatttaattgcctttgtaatttaaatggaatcactatctgttagaatttaaaatacatttattttaatgcttcctttagcatttttattttacctatcgaaaaaattatgtcttatgtcatatagaggtcactgatatactcattgacataattgttgatatcataattaatatggtattttaagtatattctttgtctccataacaattatagataaaagaaagatcatgtttcaaaaaattcttaagtatgtattttattttcattgaaggtcacagaaacaaaggc

SEQ ID NO: 209893 - DNA, 387 bp, Homo sapiens
tgcctgctgtcgctaaatgctctcttcacttagtccaaactatgagctttcacactctggctgcccggcctgtgaagctcttctcctggacccagctggaaccctacccacaccctaccctcctactaaggtttcttgacatcctgtccagagggctcatctccccttctgaactctagggctctggggccattcatctggcactttatcatgtggcacttaggactcttagttcacttctcaagtttgtgtgattagacccacatttaatgtaggagttctgtggctggttgtttaaaacaaaagtaaattctcccatacaaatgacgtttttaagaaaccccaacgaggttccatggccagtccacaaacactatttcaataaac

SEQ ID NO: 209894 - DNA, 407 bp, Homo sapiens
ttagtttttagagagctcactatcctcattttccaatgaggtcactgaggcagaggcagccacacttctccaaggttacatgtaatccaaaactaaatgcctagactctgggcccatgattttttttttttttttctaaatgaaagtcttcgcccattggccaggtgcagtggctcatgcctgtaatcctagtactttgggaggctgaggcaggcagatcacttgaggtcaggagtttgagaccaccctggccaacatggtgaaaccccgtctaaaaatacaaaaattaggcgggtgtggtggcgcacttgtaatcccagctactcaggaggctgaggcaggagaatcgcttgaacccaggaagcagagattgcagtgatccgagatcgcgccactgcactccagcc

SEQ ID NO: 209895 - DNA, 510 bp, Homo sapiens
aattagagtctcactctatcgcctaggctggagtgcagtggcacaatctcggctcactacagcctctgcctcccgggttcaagcaattcccctgccttaccctctcaagtagctgggattatagacatgagccaccatgcccggctaattttttgaatttttagtagagacagggttttgctatgttggccaggctggtctcaaactcctgggcctcaagggatctgcccgtctcagtttcccaaagtgccaggattacaggcataagctaccatgcccggcctcatattattatatggttgaactgcatggcatgcctactgttggcttctagctaatgaattacttccaaagaatgagtgattctttccaaaggaaactgtaacatgtgctcttaaccataggcaagggctgaatatttgcagatacagttcatcaaaggcccaagaatggacaaaaggatgcccaggccagtgacagaatataatttatgtgttgcccagagctttc

SEQ ID NO: 209896 - DNA, 382 bp, Homo sapiens
aagcaagaagtgtcttgagaagtgattacaacagggggttgctttctcttgctgctgtgacctcttccactaccacgaggataactcctactaacctaatggatgatgacagacacatagtcatcaccccatctgacatctgaccaactgccagacatgtatgagtgtggccccttagaccagctagcctgccagcaactaccagacatatgaacaagagcattctagaccatccaggcccagctaagctggcccagaccagaagacttccccagcaaacccacagactgatgaaaaagaataaatgcttattgtttaagagtgaaaccagtaagttttgaggtagtttgttctgcaataaaaactgaaacacaaagcatgt

SEQ ID NO: 209897 - DNA, 308 bp, Homo sapiens
caacgcatgtgccgctcccagtctctctgcctcaccttctgggtgtggagaacttggtcagccactgcggaagcctgagctccctgcaaccaccagttcctctcttccctgaaacacgagcactgatctcagcactttacctctattcatctgtgaaatcctcccagtagccctctgaagtgagtactgtaatatcctcatttcagagatgaggagacataagcccagagaaggtatgtgactcctccaaggatacacagccagtaagtgatggagccaggatttgaacccaggcagtctgaccccaa

SEQ ID NO: 209898 - DNA, 210 bp, Homo sapiens
tattaatctaaaaggtactatgttccagacactgtttggtactggaaatagagttattaaaacagtcgctgtctcttccctctgttagtgaaggacacatatgttaaagaatcacaaaaacatccatataatcacaattgtgacatctgtgaaggtggggtctctgttcagtatctctctgtatattgcccaccttccatcttcccaccc

SEQ ID NO: 209899 - DNA, 900 bp, Homo sapiens
tcctatatatccaacaagatctggacatgtgcctgcctgcccgagttacctcatacagctaactaaaaattcatcactttccttcccaaagtcctcttccagcagttcctttttctgccagtggactcaccatcctcctagtcatccaggccagacacgggtgtcatccttgactcctccctttgccttagacccctacccaaattatcaagtcctgcaattctctcttcatttcatctccgatctccactgccactaacctagttctggctgcctttggatctcacctggactactgcattagggcaggtctctctgtctccactttctctccctcatttccttctctcttgacattgtagtcaagtcaccttttgaaaatgcaaatctgatcatgtgattctctctataaaacccttaactctgggccaggtacagtggctcacacctgtaatcccagcactgtgggaggcccacacgggtggattgtcaggagttcaagaccagcctggccaacatggtgaaaccccgtctctactaaaaatacaaaaattagccgggtgtggtggtgcacgcctgtaatcccagctactcgggaggctgaggcaggagaattgcttaaacctgggaggcgaaggttgcagtgagccgagatcgtgccattgcactccagcctgggcaacaagagcaagactccatctcaaaaacaaaacaaaacataaaacacttaactctgtacactataaaagggtgaatattatggtatgtgaattatgtctcaattaaaaaaaaataaaacttaacctggtttacaaagccttctatgatttggtctggctcagcgtctctcattggcttccctcccccgcctcccgctttcctcttagctttaccatgcta

SEQ ID NO: 209900 - DNA, 560 bp, Homo sapiens
cacaggggccaccatgcccagctgtagatcttcttcgattgaccactgtgatggaaactgaataatcctatacaaaatggcaaaaaccaaactttttcccatttgacattgctttttaacaatttcttaatagttttctgttggctggccagctagaagtatcttgcttttcatctgttttcaagccccagttgttccagcagaattgcacacttttcccagctgattaactatcctttaggttataaatttgtcatgggaaatgctaacccacactggcttcctcttaccccttcacttgctcttgggccctttcaccatctagcactccagtctgggcaacaagagcaagactccatctcaaaaacaaaacaaaacataaaacacttaactctgtacactataaaagggtgaatattatggtatgtgaattatgtctcaattaaaaaaaaataaaacttaacctggtttacaaagccttctatgatttggtctggctcagcgtctctcattggcttccctcccccgcctcccgctttcctcttagctttaccatgcta

SEQ ID NO: 209901 - DNA, 498 bp, Homo sapiens
catggccagggctgaccagtctcttaacatttgcacagtatttgatacaaattaggtacagcatactcgattaggtatttacttcctaggtcatgagtatgttttagacctttgtctgctctttttttttaacctaggtcctcttgattggagtttcggatgttcccaaacccctcagtcatcccctaagactctggaattttgggttattctctaaatgactaatctcattctttgtgtgtgtgctttagaagtttaactgtgagaaggaaggcataattcctggtcgcaggaggaaacttaaaatttccactaataaaggatctatgttgttacattgctgtgtctcctacagtccctagaactgtgacttgcctttaataaatggctattggtagtaagattaatcatcctaaacttgggaatccaccactgaagcataaatgtgcttgaagaagactttgccttgtaataaacttgtgaaatgaaagagggtcc

SEQ ID NO: 209902 - DNA, 132 bp, Homo sapiens
tacatatatcctcaaaataatataggtttctctaaataactagggtgccttattttgataatcaattaatgaactgtactgcaatgcagttatgtttcaggggctacaaaagtatgtgggactaagcagccc

SEQ ID NO: 209903 - DNA, 656 bp, Homo sapiens
gaaaagagcgcatgacccattgctctgatggcgctgggcagaaaacagcaatgaagtgaatgcaactgatgcctcctcaaaagtttgctacctgccaagactttcaagcatgaaaatatctttatttttcccttttaaaattgatgggtaggccatatgggagagagggaaatactgacaaagagggcacctcaagaaaagcatgcctataaaaataatgtgacaaacaatgaaacaacacacaaacagtttgacagataagagagcaaaggatcaccacacgcccgtgattctagagcaagtggtgactttagtgtgtggctgtgctcatgcatatggaccttacacaactgcaatcagcatctgcatacctacacccagtaacctgctttctctacctaatatgatataatgagcatttttctatattgctacatagtctttataattactttaaatgactgtataatattccattcattatatcactgctgaatatttaggttgcttgtagtttttcctttgctcatttttatgaattaacaaatgtaaagtatttcacccactaccttcaaattatatatacttggtcggcactttatttccttcccgttctgcccctttatataaataaagaaaagtatgaaagattcata

SEQ ID NO: 209904 - DNA, 507 bp, Homo sapiens
taggcactttcaaaaatgatcttatattactgatttcaaagagttattattaagctcccttaccctctgatttctcccattctgacacatcttcttaaaaaccgtcaaagagtctgaaaacatatccctccccaccctttttttcagccaagacctcactcttacaatgtccaagaaatattttatattaaaattaacaataaggggccgggcgtggtggctcacacctgtaatcccagcactttgggaggccgaggcaggcggatcatgaggtcaggagatcaagaccatcctggctaacacagtgaaaccctgtctctactaaaaatacgaaaaaaaattagccacgtgtagtggcgggtgcctgtagtcccagctactcaggaggctgaggcaggaaaatggagtgaacctgggaggtggagcttgcagtgagccgagatcaaaccactgcactccagcctgggtaacagagtgaaactccatatcaaaaaaaacaaaaaaaca

SEQ ID NO: 209905 - DNA, 233 bp, Homo sapiens
aagtctgaataattatactttgtctttcagctgtactttcaggtaagaatggtgctccatgagtcaagcgattacttcagctcacaactcaatcacttaaggttttttcctcgataaagtcatcatactttgatatgcagcgtaactgtttatgcatccttcccattttgtcacacaaactattaaaaagatgtgtatctaagagttgaaatttaataaaatttgtaacttct

SEQ ID NO: 209906 - DNA, 562 bp, Homo sapiens
tcttaaaagatatgtcaggaaattatcaaaagaaagtaaaggtgacggctgggcgcagcgggtcacgcctgtcctcccaaagtgctgggattacaggcatgagccacctcgccctacccatttttgttttaaaaaataaaaatagatgtacccagaattcaggtcaaagttaggagagtacaacaaggaggatacagaaaaaatgataggtgtatggtacaacatggatgagtcctgaaaacactatgctaatgaaagaaaccagtcacaaaagaccacatattatatgattctagttacatgaaatgttcagaatgggcaaatctataaagacaggaagattagtggttatctaaagttggggtgggaaggaaggagaaaaggggattgattttagtggaagaacaagaatgttctgaaattgattgtgatggctgtataatcctgtgaatatactaaaacattgagttgtgcactttacatgagtgaattgtgtggtatgtgaatttatatctcaataaagctatttttaaaatgataaaagcaaatgttaatgaactgt

SEQ ID NO: 209907 - DNA, 531 bp, Homo sapiens
ctagaaactgtgactatgttgtggtgtcatgcctgtgagtatgttatgctacatggcaaggggtactctgtagatgtaactaagttcactaatcagttgtcattaagatagggagattatactgaattatccaggtggacccaaggtaatcacatgagccatcaaaagaagaagagcagatgaaggcagaagaggaagtaaaagtgacttaacacctgtggaaggatttagtgggccatggctgcttcgaggctggaaggtgccacagaagaagaaatgtgagcaatttcagggagccgaccactggtgaggaaataaggatctcagtcctatagcctcaaggaattggattctgaaaactacttgaatgaacttggaagtggatttttctccagaggctccagataaggacccagctggctactcgcttgattttgaccttgaaacgtgagcagaaaactcagccaagcccactcagatttctgacctatagaaactgagataataaacttgtgttgttttaaactgtta

SEQ ID NO: 209908 - DNA, 212 bp, Homo sapiens
acaggcccccgtgtgtgatgttccccttcctgtgtccaagtgttctcattggtagacttttcaatgtaaagaatgatgtcatcagttctgtgtatttatgtcattggttgtagtagcaataatagtattgttattgggttattacctctattacattatttttcttcctttgaaatgagtattaaaatttggatcaatgttgtcttttaatt

SEQ ID NO: 209909 - DNA, 212 bp, Homo sapiens
tttgcaataaattcaagactcttcttattggtaattttccacacaatccctctgaaataagggagaggatatagacctttttaactttatagttagaaaaattggcctcagtgtgaaatttttccagtcccatagctcatggatgccaccagcttgcggtagtagcaagatgcttactaccacaccgttttcctcggtggcccaatagctcg

SEQ ID NO: 209910 - DNA, 648 bp, Homo sapiens
attttcagtattttatagatgatgtgtaagcagcaagcttaataggatgttacccgacactttgcgagactggcagctgatttgatccagatgtctctaattcttttttctttttctttttctgtttttttttttttgacagagccttgctccgtcccccatgctggagtgcagtggcacgatctcggctcactgcaacctccacctcctgggttcaagcgattctcctgcctcaggctcccgagtagctgggattacaggcgcgcgccaccatgcccagctaattttttgtatttttggtagagacagcatttcaccatgttggccaggctggtctcgaactcctgaccttaggtgatctgcctgcctcggcttcccaaagtgttaggattacaggcgtcagccactgtgcctggcccagatgtctctaattctaacatgagatgtattgcaggatcatagcagagtgagttgctgatgtatccagaaggaaacgagcatggaacactcacgacagctgtcctgagaagtgtgtgtgtgctgtgcttgaatatctcactgctcatttatacacaggctttctggtgactgagttaacagtatctgtttcataaataatgtagccctctttctttctttctctctctc

SEQ ID NO: 209911 - DNA, 361 bp, Homo sapiens
tgagcacctgcaagccatgtgaagaccatgattgctttcccttcagccttccacctttgtaagtttcctgaggcctccccagaagcagaatcctgcatagtctgcagaactatatcaatcatgcctaggtaatgaagcctccataaaaaacaacaacaacaacaacaacaacaacaacaacaacaaaacagggttcagagagattctggatagctgaccacgctgaggttcctgaagggtggtgcatccaggaagggcagggacgcttcatgccttttctcccatactttgccccatatctcttcatctttatcctgtgtaatatcctttataataaacctataaacattagtaactgttt

SEQ ID NO: 209912 - DNA, 243 bp, Homo sapiens
gttgacatttacagaacattccacccaaccacagccagatgcacatgattcccgattgtatatggaacatataccaagaaagaccaaattctgggccatgaaacaagcctcaatacgtgtaaaaataatccaagtcacacaaagtatatcctctgaccacaatggaattaaattagaaatcattaagagaaagatctctagaaaaatccataaatatttgaaaactaaataacacacttttaa

SEQ ID NO: 209913 - DNA, 555 bp, Homo sapiens
cagctcccagcgagattgatgcagaagatgggcgatttctgcatttccaactgaggtctctgaagaatctccataccatcttccacaattgttgaactaatttacacttccagtaacaatgtgaccaacaacacatggaagctgccaaggcttggggtttacaccctctgaagcaatggcctgagctgcaccttggacctttttagccaaagctgaagcagctgagaggcaaggccccaagtctcaggcttcacacagtagggggcacctggacctagcccaggaaactatttttcccttaatggcataccctcccatcacaggcccagaagcctaggacataacctggaggcattttcccctttgtcttggtgattagatgcagcacccccagggggaactttgcccctcccatttgggcacaaccactgaagacttcctcatctttgccacataaaagccccagaacacagccccatttctggcaaccctctttgggtcccctctctttgctgagaacttttctgttgcttaataaaactttgctctacatta

SEQ ID NO: 209914 - DNA, 167 bp, Homo sapiens
aggttacaactggaacattttaagatttagtatccagaaattaaatgcatcatgaaacgataggtggagtttaatgtacaccttatcagtgtgggtcagtgacctggaacattttcaggattagtatgaatagaaaatattcccttctattttctctccatatagga

SEQ ID NO: 209915 - DNA, 238 bp, Homo sapiens
agtccagaccccagctctggtacttactagctgtgtgaccttaggcaagtgctttcacctctctgatttggttttctcatctataaaacggtaataatgacagtatcttaccccttaagaggattaaatgagctatacatgtaaaaacctttagaaaagtacctggaattagtagcataagtgatggtagtggttgttgttgttttaattgaaaaaccacttagcactggctacatag

SEQ ID NO: 209916 - DNA, 381 bp, Homo sapiens
tgctgtctccttccccaaaagagggagagagaatgggttgcagggtttaacctgtacctccacaaatggcatttatctacaaagaaaacttaatcttagggaattttattctccttctataagcactgatcatagtaattaagtacttgacataatttcatactctataaaatgtaacctgtagtgggaaaatcactggctttggagactgtgcttgaattccagctcagatgattacaaacgctgtatgaccttaggcaagagccttcctctctgagcccagatgtctaaaataaaaaatgagccacttgctccaacagcagcatttccccaactcctttacatcactgctttttctactcccaaaagtcttgatgtaat

SEQ ID NO: 209917 - DNA, 149 bp, Homo sapiens
tttggaggatctgggtaagggccagttgagttgggtttagtgggattgtttatgtgggtctcactgtacacctctgtgtatagtgatgaacttggacaagaaataaaggaaggttatttatatgctcccccaccgacctcaccccagtc

SEQ ID NO: 209918 - DNA, 362 bp, Homo sapiens
  misc_feature (13)..(13): n is a, c, g, or t
gacgatcccaccntaatgctgtctttgagaaaagaacaaacagctaggaaaacacagggtggttaaaagatgtttgtgatgtttgtgccgtatggaacaaaagaggcattcgggagactcagcattgttctgcggagtgaggacgaaacagccctcggaggcctcctctcatctgggggcatccagctcattgtcgtggaatgtagctccagccatcgcttcattgtcaggccatatactctgtgcggggcccgggctaggagtgtgtttacacttgattcacttggaatcctctcctggtttctgatccattctttctgtcttcttgttgggaaaagtggctcatgttatcacccagtcac

SEQ ID NO: 209919 - DNA, 227 bp, Homo sapiens
aaaattagactcccatttgaaaaattacagaaacgatggctctggagatggaaaatgggagatgagcagatttatatgggctcctctgaactgatattggtgccaactcacagaagccactgtgtgtttagctcagctgctctttgtgcatgcctccaggggttaatagctaaagctacatctgtgaaggaaatataatgacaacactgtccacgggaagagacatt

SEQ ID NO: 209920 - DNA, 139 bp, Homo sapiens
ttttacagatttattcatccaacaagcattcattgtcctctatgtgtcaggcattattctagctggtagataggcagcaatggacagatctaacagccctgactcatggagctgacaaactgttggggggtatgtgggg

SEQ ID NO: 209921 - DNA, 371 bp, Homo sapiens
ttttaacaaagtacagtgttaatttctattctgatttcctttcagttaagctttactaagaaaaccagtcctagaattgtccctaacaacacccaactcagaacaaaccccaaacttcctggtatactcccccaagccacccattccaagcccaaatccaatcctcccggtcctttccaacctcctcttcccaagatgccccactttactgaagtttcccatggtgtgtgctcaccattgctttcctggcaatacactcagctgacctgctacaggtgtgtgccctgagacctttagctggaaggtactgacaatacaattatattttctatctaaaaagctactgtagtaatttagaatgacctatttta

SEQ ID NO: 209922 - DNA, 174 bp, Homo sapiens
cacagaagagaggcatcttggggtgaaggtttcatgggagaagccttcctggaaaaagtggtggccgagctaaaatgaagtataacaacaacaacataaataatggcaactaatatatactgagctttttaatactatatgccaggctcatgttaagtactttgcatatatttt

SEQ ID NO: 209923 - DNA, 591 bp, Homo sapiens
aaatgaccttcacagtggcaaggctagaatttttcctggaataaaaaatattcttctgttggaataagggatacaaattacattcttagggcttttaggcactcttcagactccttatgagagataaacaccctccctacccctttgacacttttctatctaatcaaaagaaatttgggggaattagaagggtgattttttaccatcttaattaagacaccagcctccagaaccaaacagcagctgttgtattagaaataccactatgaatcttcctgagagaaatagctctccctccttaccatctgatgttgtctcattcagcttaacacttctagtacctatcatggtgcttgacacatagttgatactcaatgattaatgaatgaattcctcattaagttatctcatccatgcattcaataagaaagagggaaattcaccctttgctgtagcacatttccttcttagacttttgggaatgaaaaagcatacatgatatttatttatgtacaaggaagcatgaatgaaccatgagaatacagacatgagtgaactgcttttgtaaataaaaggagctttaaaaaccta

SEQ ID NO: 209924 - DNA, 232 bp, Homo sapiens
cctgagccaccaggtaacaccaggtgagcccacaccgcccccccaccccttcaactccagcaagcatcaagtcactgttcccggcgccaactccagcatcgccagctgctccacaattacttctgccttaaatttagacccatctgttatctccagggggtgggggcgccagcaaaggaggaagggaggctcctccgaagacagcacaagagggggtgaagctgcagctggt

SEQ ID NO: 209925 - DNA, 312 bp, Homo sapiens
ctgttgaaaatgaggagggggaaggggacattgtggtcaagtaagtttgggatttcagtaaggttaattggtttctgttgctgtagactctttacatgctgccctgaatggcctctgttcaacaaggaggtgttataggcagggtttcccaaacttcattaagcatggagcacctcctttcatgctaccactccttcaattttaaactactttactagtttaaactactaaaaacaactttaaactactttagtttttaaacctattaccatattgttctgtggaagatagtttggtaaatgcagatttaag

SEQ ID NO: 209926 - DNA, 533 bp, Homo sapiens
actacaaatcaaaaccacagttagatactctatggcaagatttggccactttggaaaataatctgatggcttctaaatatattaaacatagaattataaaaataaataaataaataaataaataaataaataaaaataaaagcagtcaccaaaatgtcttaagtgaataaaacattaagattttcatgagacatggagctggttccaaagaatagaccatcattactcttcctctctatcaagaaattagttaactagcacagagggagaacataattaagagcacttccattacccagggtctgatgggcttcatctgcaataacaatttggagacgtttgccaagcaatccacatacttctaaccagtgacatgcccagtatatttgatactcagagaagatcatttttcagtaacctcttcctctgtatgacaaaattattttcagcaagaactatcatatgaaactaaaataatgtcctggaaaaaatacaaggaaaatttttctttattaaacttaatatacataata

SEQ ID NO: 209927 - DNA, 240 bp, Homo sapiens
cgggattcgctcacattcaccaagggaagaaatttagacttgaccgttccacaagagattatacatgcagttgctgagataaatccacaaattaaaagataacattcacctcggtgatcactggaccataaaggttgtggtggactaagaatacgcagttcccttggaatagcctgatcatattgaactgttttcatgccttaagcattaactccttaaatgcaaatatttaacacttgc

SEQ ID NO: 209928 - DNA, 597 bp, Homo sapiens
aaatcattactcttgtggctgtatacctgtctatatgtttttgacattctgtacatttttacataagtgtctgtttcagttgtaccaaggagacatgtgtgggaaagtggagaaagggtgagcacttccaattttatatgtggctatagaaggtacatttcctagaacacttgctacagaagtgggacattgcttctgaatgtcctacatgtatgagccagaggatcctaggggacatatgtgtttgacttagaaaccaagagtaaatgactgtgtccagtcaggtatgctgagctgttcaggctggctggagacctgtatgattttggggtatggtgctgggtgcagtccagtagctggaagttggccagaatgccaagtgcttgatatatgtcctgggatgattggcattaccttgaatgtgacagagagtagaggagtgacataatgggattgcattttaggaatatcaccctgggggactgtgttttggtttaattttttttttaatcgcagaataagacacatgtataaacaaaagaatggctgaagaaaaacaaagtctgtgatacttacatatatagcacaagttgacat

SEQ ID NO: 209929 - DNA, 269 bp, Homo sapiens
ctcccctctgatcaccatggtcacatcagaggtctcctcttcttaccttgccgaacatttctttcaggattggaggaagcagcaatgtgcaggaagcactgtctccagcaggccctgctaaaatacaagtgtgtttttctgagaggctgttgcctttggacgtctcctcatggccagagactgtgttaagtacaccctatgtaattaacatggttcctgtcatatgatggtcctgcagtaaatatgtgttgactgattggcttaggcta

SEQ ID NO: 209930 - DNA, 339 bp, Homo sapiens
tttcagttttattttttttctcttctgtatattaatatgtccctttcaggataactttcatctgttctaggcaatgacacctgctattaggtgttttctgcctttggcttggtcctcagttgtgctcatcttagaaccagcctccttttttctgttgttcagcagcagttccccagggttcactctgacacaaatcagtggtggaggaagacttgggaatagggaatgtggtctctgccctggagccgtgtgtcctttaggagaaggcacttcaaagcagcagctgttcccattacaccagccgcagctgataccaggagttcatacatgtcccaggtt

SEQ ID NO: 209931 - DNA, 441 bp, Homo sapiens
cagtaagtcagacaacatttgccacaataatgtctgtcaaagtggcttgccataaagccattctcatccaccttatagtatttcaggacagccagcttaaccttctttctcttgtgcttattcttcttgggagtggtgtaagacttcttcttccttttcttagcaccaccacgaagtctcaacacaagatgaagagtagactccttttgaatattgtagtcagacaaagtacgtccatcttccagctgcttgccagcaaagatcagtctctgctgatcaggaggaattccttccttatcctggatcttggcctttacattttctatcgtatccgagggttcaacctcgagggtgatggtcttccccgtaagggttttcacgaaaatctgcattttggtggcggctccaccgaaaccggggccgatagcggccgaggggaac

SEQ ID NO: 209932 - DNA, 798 bp, Homo sapiens
cagtgggagtggttttgtagaacaaacaatggcttatttggagagctccacacaatagattatcctctcctgtgggagccagaaagagatgagctcacagataatgggtttcttccttcctggtagttacgaataaataatagtgtgacagactcaccctctagtggttgttggtagtactgaaacaggaagaattgtctcctggtttgatttttcttactttcaattgctttctctgttcctagtggctgggcttcccaaatgtgatgttggtgaataggcttcattttgaaagagctggaggtattgtctttagaaattggaggatggaatcttacctcttaacacatttgttgagtagcagacatgaccttggaatgactgtgaaaattacttttcaagtttatacctcatcagtaccaaagccagatcctcctgtgatgtagcaggaagccctttattagtttttctctatcaatccatcttttataatttccaaaataggataaggagaagcttaaatatgaaatgtatttaaaggtcttatcctaccagttgtttcctgtgtgtaaatgcctaatttcctgtttggttaaggaactgttctcagacttctgtggcattgagtcagttgctttggttaattctgttctctgagagtttatcctgatctctacctagacaagttaataactgtcagatatcattcaaataaatgataagtagtaaggatttggttctttctttttgattagcctttcctgaatgcttgttactttctaagcctgcagacttcaa

SEQ ID NO: 209933 - DNA, 539 bp, Homo sapiens
taccaaaagaagcatcataaattcagactgcctggaggcatttagatgtagacgaacatctgatttatagaatgattctctaaaacatactttaataaatttaaactatacacaatgactagaatcaagctattagaggatcagagaagacccattccttaattattaagttgctctgcaactacaatttaaaattttaattccttcagcaaatgactattgaagtttattatggccagttttacttttgtttttttaaagacggggtctcactatttttcccaggctggtctcccactcttgggctcaagcaatcctcccgcactcagccagcctcctgagtaactgggattaccagttactgtagccagctcatattatggccagttttagagacaactgccaagatataattgtatatagctaatgatagatataaatattttaaaatgctatttggagccaggttttacatgcttaatttctcaattttttttttctttttttcttttcttttttttttttttttttttgataga

SEQ ID NO: 209934 - DNA, 830 bp, Homo sapiens
gcctcttctcttgtctcctcctcctcccattgtttcccttttgccggtttgcactgttccagggagtcctttttcatgtctttaggagttgcatgagaatcgtcaatatttgcacttcatgtatttatttttcagcagactgagctgaaacattggttcaatcgatgtctcagtcctggagtgtgggttcagggaagcaaagccatgttgaaatcgctgtttgccatactagaaaattgggttttctgaggcaaagtccattaaggaaggctagatgcttataacattgcccatcattggtgatggtgagggaggtgggtataatagtataaagaagaaagctcacctgctttggcgtcatttcggattggtttgggtaggatgagagagtggagtcacatttatatccatctcagccttagtttcttcaagtaatgagacttaccttcaaaggacttataaatttttgtaaaatactttgccaatagtgaacttcccagaaaggttagtttctttcccttgttcctatgaagttttacctgattctaactcagaaataactgtattgacattttttgcttttgtcatgcttgagaaaaagcacacagatgaggcgaagtggcttgggtgtgaattttcttactttgtcaggggctttctcattattgaccttttgtctacttgtagataatatctctgcagcttgaggcatacttgcacacaccgtgtttacccagcagggagaacttcaacccactttattgcagtagctacttgacatattttggcagggatttaaaaaccaaaggttttgaaagggaccagcaatt

SEQ ID NO: 209935 - DNA, 656 bp, Homo sapiens
tgtagttatagattttagaagcagaagaaaattttctaaaacagccaaacttagattcaggttctagcagagccacatgctgaatgactgcaggcaagttaccaaacttctcagtctcaatttcttaatatgtagcagtgggacaaaatttctggaacacaaagttttgtaggggtgtttttcaaaatgtgttcaattggcaaatgtttctcaaatagaattttcatagttaaataacccatagagcgtcactctaaatgttcctttactacatgctatctcagtgtgcgtcacaagtttttgcgcattgagaattttcaacaaagtagaaaagtattcagcacttctgaagcctattagattgcagatttttttccccacagcatcttgacagaccagtgttccacagatcatcctcaagggaacacaggtatgatcatgtgaatctcatcccataatagtgtacaagacatcttgcattgtgcttggcacatagtagccactcaataaataattatgtattctttagagtaaatttctaagcctcaattttcttacttgtaaaatgaaggtaatattatggactttatacatttactatgataattaaataaaatcatggcatagaaaatgaaataattaataaaagtcctgtt

SEQ ID NO: 209936 - DNA, 114 bp, Homo sapiens
gtgctgctggctctcccaaaacccagcccgaaagaatgagaggagggacaagatgtagaatgcaatggcatggcatttattgagcactactgaatgtcatcaccgcatatttca

SEQ ID NO: 209937 - DNA, 201 bp, Homo sapiens
aaatgattaacccacctcggcctcccaaagtgctgggattacaggcgtgaaccaccaagccccgccaggatttcagttctttggaaaggcttagcagtgctttccttggtaccttgctagctttttcttcttcttcttcttcttcttctttttttttttttttttgagacaaagtctcactctgtcgcccaggctggagtg

SEQ ID NO: 209938 - DNA, 541 bp, Homo sapiens
gtggagaggtggggctagaagcccagttggattggttttaaaagagactatgatgtaaggaagcaactgttgacagttcttgcaagaaagctgtgcaaagaaatgggcagtgatgggaagatgtgatcagaagtggtttaagtcttactttgtttaatcatagggaagtatggcattcttccctattacaatgtgttgatggcaggcactgagtcttgctagtcaatatccctgcgttctggaatgggcatggcacatagtaggtccagtgacaaatatcgagttaaactagccaagctttcctttttttaaaacaatgctccatcttatgtatagtgattttgccttttcagaatactttcatgtttataattttattttaattacaacactctgcagtaaataggacaggccttgttccctgtttgacagaagagtaaactgaaacatggaaaggttaaaaaccttgttcaagatccacagatatgccaattctttactcttctcactagaccacaccacccctaatcattagagactt

SEQ ID NO: 209939 - DNA, 180 bp, Homo sapiens
gaagccaaagcaaaataacatctcaaagactcactattttttgaatactatggatgagtaccaagcgaaacaaaaacaaacaaacaaaaaacagaaaagaccaactccaaaactctgagtatataaaatggatgacaataaattacaaaggttgagaatccctaacccaaaaatccaatc

SEQ ID NO: 209940 - DNA, 394 bp, Homo sapiens
agcatgtattaattcatatattattcatataaaatggactaaacttgttagtctatgtcttagaggccaaatgaacatgggttcaaatatgagccacttgttattggctagaccctgatgagagactgctagtcgtacccaaagtctcatcgccaactgttgaacattttagtaataacatcttctacacacttgtctgtaaagaagccctatgcagccttctatgtagctgtgtataaccatgaccaaattttacccactgggatgttggtgtaagtaagatgtgcaactttggtacaggacattaagaaaaaaactgtggcgaattctgaattccttccactttgtccctgtttctttttctccctcttggctggaacagagcaaaatcagc

SEQ ID NO: 209941 - DNA, 115 bp, Homo sapiens
tacacttctgtttaaaccctggacctgctccaagttctcttctgtagctttgtgtacactgttttctctatgctgtcctctcaccgattttcttttccccgctaactccctatgt

SEQ ID NO: 209942 - DNA, 293 bp, Homo sapiens
acgcctggccaagcctggcatactgttatgttccacttggaagctacagttgtagagctaatcacttgggaaagaatcaaggagatgctcaaacagaagcagatgtactatggcaatggaaccctcaagagagagagcaggagtagaactgtctttataagaacctgatgtagaactcataaacattcaagtgccatagatggtttaaggaaaactttatgaacagtgtgggaaactaccatttatagttttctcaacaggatcaaatcagccaattagaagggtacacagat

SEQ ID NO: 209943 - DNA, 397 bp, Homo sapiens
tgggcacttagcaggtgagacgctgccacacacgcgatctcgggcgtctctggcctccgcggggtgctcttgtacccccgtctccccttaccatccgtgggcacaggcctggcccccctcgcatccgccaaggctatcgaccccgaaacgacgcggtgcgcaagtggccacgacacctaggcactaagtcattttcccgaggtagcggtaccctctgctccaacgaagccaatctccagaaaacctaacagactcaaggtaagggaggctggggaaacccttcgctagcctttcggtggccctaggcggccgaccagtcccgcctctctggggagacccctctgcgtcaccgtgacgaaccattcccacgcaggtgtccctcttctcaaggcggccg

SEQ ID NO: 209944 - DNA, 612 bp, Homo sapiens
actttacccccagtatatattttaggtgcatacatatctccatttctacttacagcaccaaaataagccactatccactctcacctggactactacatagcataagttgtttctcttgctacctcttatctcttgctaatcaattatcctaatgctattcaaagtaaagttttaaaatctaaaacaatcaatgacttgccatcaaatatcaaataaaacccaaactccttgccatgacctagctagttaagatgttttgtgttggcaagctgcagaaaacccaattccaactaccttaaatggtatcaaaatgcactgactcatatcattggaaatccagaaactacagaggcttcagggttgacttaacatggctctggcttggatttactttgattctctaggttttatccttctttatgtggctgcttatcctttcagatggcagcaagataactgtaagagttccagttttacatccttcacaagagagtagccagagaaagaaataaaagttgcctctcataatcttccagagaatgaggaggttcccagaagcctgaaggaagccatttctggggcctcaccggctgtgcaccggtttctatcctg

SEQ ID NO: 209945 - DNA, 474 bp, Homo sapiens
ctcgtccactctggggtcctggagccactggtgaatctgctcactgccccagatgttaaaattgttctcatcatccttgatgtcatctcttgcatcctccaggcggcagagaaacggtctgagaaggaaaacctgtgtcttctgatagaagaacttggtgggatcgatagaattgaggctttacagctgcatgagaaccgtcaaattggccagtcggctttgaacatcatcgagaagcactttggtgaggaagaagatgagagccaaactttactgagccaagtcatagaccaagattatgaatttatagattatgaatgcttagcaaaaaaatagccaagctccctacctcctaaaccaacaacccagtgctaaaggataacttctttaagaagcagcagtcctctatcttagtgtaacccaaatgtgaagcttttaaaacttgacattaataaaatgttcaacactttcacg

SEQ ID NO: 209946 - DNA, 728 bp, Homo sapiens
catggatgtcatcagcattgacaagactggagagaatgtccgtctgatctatgacaccaagggtcactctgctgttcatcatattacatctgaggaggctaagtacaagttgtgcaaagtgagaaaaatctttgtgggtacaaaaggaattcctcatctggtgattcatgatgttcacactatccactaccctgatcccctcatcaaggtgagtaacagattcagattggtttggagactggcaagattactgattttatcaagttcaacattggtaacctgtgtatggtgactgaggggtgctaacctgggaaggataaccagggagagacatcctggatcttttcatgtggttcatgtgaaagatgccagtggcaacagatttgtcacccacctttccaacatttttgttattggcaagagcaacaaaccatgaacttctcctccctgaggaaagggtatctgcctcaccattgctgaagagagagacgagagactggcagccaaacagagaagtgggtgaaatggtctctagagacatgttagaaagctttttgtacttaattaaagataatatagcatgaagaaaagatcattcatcatgaccaagttggatttatcccaggaatgcaaggattgttgaacatacacaagtctatgaatatgatacatcataccaacagaatgaaagcctaaaaccatatgatcatttcaacagatgccaaaaa

SEQ ID NO: 209947 - DNA, 406 bp, Homo sapiens
catggatgtcatcagcattgacaagactggagagaatgtccgtctgatctatgacaccaagggtcactctgctgttcatcatattacatctgaggaggctaagtacaagttgtgcaaagtgagaaaaatctttgtgggtacaaaaggaattcctcatctggtgattcatgatgttcacactatccactaccctgatcccctcatcaaggtgagtaacagattcagattggtttggagactggcaagattactgattttatcaagttcaacattggtaacctgtgtatggtgacaaatctgttgcactggcatctttcacatgaaccacatgaaaagatccaggatgtctctccctggttattcttcccaggttagcacccctcagtcaccatacacatgtaccaat

SEQ ID NO: 209948 - DNA, 248 bp, Homo sapiens
agttattgttatccttaggcaaggtttttgtgagtgaagaaaataatctttagtggctggtatgtttgaattaggcctttatcatttaacttatttgcattttaccaacattttaaaaatatttaaaacctaaatacagaggctcctcccaccttaatctcaatactgctatgtagtactggtgaacaactttggagaacctagatttattttaatattctaatagataattaaattttaaaatgata

SEQ ID NO: 209949 - DNA, 813 bp, Homo sapiens
gccaaggcaggcagatcacgaggtcaggagtttgagaccagcctggccaaaacggtgaaaccccgtctctactaaaaatacaaaaaaaaattagccaggcgcggtgccgggtacctgtaatcccagctactgaggctgaggcaggagaatcacttgaacccaggagacggaggttccagtgagccgagatcgcgccattgcactccagcctgggcgacagagccagaatccatctcaaaaaaaagaatgcagacactttattcaggcctgttactcctcatatttggggttagagaatgaaaggctcttttctccctctagtggctttttctgtatttctaccttctcagcttgctgtgtctgtggccagcaatctagacaaatttaatagttcacaagatagtcattcttacctttctatcctcctattctatttccttacctaagtttggttgattttagcaactcagatttaccctgttaggaaattgcttattccagtgatcggggttccctgttcaaaagtatccatgtcctggctgggcatggtggctcacacctgtaattccaacactttgggtggctgaggcagcaggatcacttgaacccaggaattcaagactagcctgggcagcatagcaagacccccaccccttacaaaaaaataaaaaattagccaggcacagtggtgtgcacctgtagtcccagctactcaggaggctgaggcggggggaatctcttggggccaggagtttgagaatgtagcaagcaccactacactccagcctgggcaatagagtgagaccctgtctc

SEQ ID NO: 209950 - DNA, 171 bp, Homo sapiens
gggatgaggctgacacaagtaaaatgaaagtttgtggtaagtactaacatgatctttattttacattccattatctctgatcaacctcatccttaagttcatatatacatgattattataggaaaataagtattggtaaggatgtggagaaatcagagccctcatacattg

SEQ ID NO: 209951 - DNA, 428 bp, Homo sapiens
tgaaccaataagtataatgcagatattccaaatctgaaatctaaaaaacttctggtcccaagcattttggataagggatattcaatctgtactgtatgtcaagaacagtgcctggtagatagtaaatatacaataaaatgtggttcttggccaggcgtggtggctcacacctgtaatcccagcactttggaaagccgaggtgggcagatcacgaggtcaggagttcgaggccagcctgaccaacatggtgaaaccccatctctactaaaagtacaaaaattagcctggcgtggtggtgcgcacctgtagtccaagctacttgggaggctgaggcagaagaattgcttgaacccaggaggcggaggttgcagtgagccgagattgtgccactgcactccagtctgggcgacagagcgagactccattta

SEQ ID NO: 209952 - DNA, 274 bp, Homo sapiens
ccatgccctcatacctatggttctatctaaaacatgacctctattcaatctcaagatcccactcaaatgtcacctgtgataagccttccctaatcctagaatagtagttctcaacatgggcaattgtgacaatttctggagacgatcttgcttgtcacaactgtgtgtagtgagggttctactaccatctagtgggtagacgtcagggatgctgctaaataccccaatgtaaaggacagccctccctgcccccagcaaagtattagcccaaaat

SEQ ID NO: 209953 - DNA, 180 bp, Homo sapiens
ccaacgctgctcacagtaagcattccaataacagaagctactattaaatccctctcaacttgtcattaatgttcattctaaaaacaaaatacttcccattagaacaccacactggagtatgtgggattaaatgtctcctatcactggtggattttattattgtgattgtgagagcgttgg

SEQ ID NO: 209954 - DNA, 330 bp, Homo sapiens
cacctcccatcaggcccacttcaacattggtgattatatcaaaacatgagattggagaggatgtctaaaagatatcagctaagataagaaatgtattttgtttttaaaggtaatttttaaagaatgagtagaatatttaaaagaagctaaataaacacattttaccttttaaaaaaatatttcagatattttttcaagaaaaatagagtcttttaggcttcttctaaaagattgttatcttgtttattgttctaatagcattcttgattgatagtataagctttctagttgaatataaagcagaagcctcactgatgggagaagactgcg

SEQ ID NO: 209955 - DNA, 552 bp, Homo sapiens
gtaggatgtatgaacggaaaacaccacaagtccaggggcaatgcagcatctctgccttcttctgggtattcctcttaaatggcttgacaataaccaccaaccagcactgccatacatgtgtcctgtacctatcagaggcactagggcagttttggaacagagagcccatagaaaggctactgcttagagatagccattttcttcttggagctggaccagtgaattagacgcatggaggagagctggaaaatccctttttggaagagctacacaaaaccaaaatttggaattcgtagctaataaccataaaaattaagaaatgactgttggaagagcactggaaatcacctgattaagttaagaaaaaataactagctcatgagaaaattattttcaggccagctgtagcctgtacccttttgaaaatcccctgactagtgagttcatttttgttggaatatagaatttttcttttctaagcagatgtaaacttgtctttctgtggttggctttggagcccacaagataattaaatggcagtgctaactgaaa

SEQ ID NO: 209956 - DNA, 650 bp, Homo sapiens
aggagtggtgcagaaaaatggcctgtgctacttcgcagttggaaaaaaccaacgtcatgctctctggcattatacaggatcacaagaaaagtaatggtcgtctaacttctacgtaaaaataacatcagtaactgggcaatgcagcatctctgccttcttctgggtattcctcttaaatggcttgacaataaccaccaaccagcactgccatacatgtgtcctgtacctatcagaggcactagggcagttttggaacagagagcccatagaaaggctactgcttagagatagccattttcttcttggagctggaccagtgaattagacgcatggaggagagctggaaaatccctttttggaagagctacacaaaaccaaaatttggaattcgtagctaataaccataaaaattaagaaatgactgttggaagagcactggaaatcacctgattaagttaagaaaaaataactagctcatgagaaaattattttcaggccagctgtagcctgtacccttttgaaaatcccctgactagtgagttcatttttgttggaatatagaatttttcttttctaagcagatgtaaacttgtctttctgtggttggctttggagcccacaagataattaaatggcagtgctaactgaaa

SEQ ID NO: 209957 - DNA, 901 bp, Homo sapiens
  misc_feature (901)..(901): n is a, c, g, or t
gtaggatgtatgaacggaaaacaccacaagtccaggggcaatgcagcatctctgccttcttctgggtattcctcttaaatggcttgacaataaccaccaaccagcactgccatacatgtgtcctgtacctatcagaggcactagggcagttttggaacagagagcccatagaaaggctactgcttagagatagccattttcttcttggagctggaccagtgaattagacgcatggaggagagctggaaaatccctttttggaagagctacacaaaaccaaaatttggaattcgtagctaataaccataaaaattaagaaatgactgttggaagagcactggaaatcacctgattaagttaagaaaaaataactagctcatgagaaaattattttcaggccagctgtagcctgtacccttttgaaaatcccctgactagtgagttcatttttgttggaatatagaatttttcttttctaagcagatgtaaacttgtctttctgtggttggctttggagcccacaagataattaaatggcagtgctaactgaaaaaaaaagaaatgcgctgttggccaaaggggggctccgggacgttcccttagtgagggaaattatagccttctcctgactcccggctggggattaggtgcagaagcggatccgctcatcggggcgactccgtgttccacgaataggggaaacaagaaagatattggacagcggcaggtagggccgcaacctaaggccggtgttggagggtcgtcggccgagcctggagtgggatatacggggctagggcagggggaagcggagatataagaccagacgttcatgagactacattgggtttggttgtccttgttagtgacgggtcttttccttgagacgggagttgtgtan

SEQ ID NO: 209958 - DNA, 475 bp, Homo sapiens
tgaaatgttctctccaatatatttagcttttgaaacttcatgagagtgaatggaaattcattcaaatctggctttgtaatgagtggttcatggtttttggtttgttatttttaacctgacgtatctggaaacgttcccctccccagacttgtttattggctctcctgctctctctcctcaagatccaaagctaaaaaacatgctgttgaaaacaaaacaactctagccaagggaaatctatgcaatggaaaagggattctccagaataaagtgtaacctcaaaactgtgcatattatctctcaaacaggatgagtaccttctcactgccaaagtagttggagggacatcaaacaccagtgatgggaacactgaacctcacataaggtaaagcgattcaggaaagttttggtaagctctcaggtcctgaatatagatatataaacttaggaaatggttttctctgctgagcggttt

SEQ ID NO: 209959 - DNA, 573 bp, Homo sapiens
tccttccacccaaacaccatcctttatgacggaaccaaccccgggagcccctttgagggcaatgcagcatctctgccttcttctgggtattcctcttaaatggcttgacaataaccaccaaccagcactgccatacatgtgtcctgtacctatcagaggcactagggcagttttggaacagagagcccatagaaaggctactgcttagagatagccattttcttcttggagctggaccagtgaattagacgcatggaggagagctggaaaatccctttttggaagagctacacaaaaccaaaatttggaattcgtagctaataaccataaaaattaagaaatgactgttggaagagcactggaaatcacctgattaagttaagaaaaaataactagctcatgagaaaattattttcaggccagctgtagcctgtacccttttgaaaatcccctgactagtgagttcatttttgttggaatatagaatttttcttttctaagcagatgtaaacttgtctttctgtggttggctttggagcccacaagataattaaatggcagtgctaactgaaa

SEQ ID NO: 209960 - DNA, 477 bp, Homo sapiens
gtaggatgtatgaacggaaaacaccacaagtccaggggcaatgcagcatctctgccttcttctgggtattcctcttaaatggcttgacaataaccaccaaccagcactgccatacatgtgtcctgtacctatcagaggcactagggcagttttggaacagagagcccatagaaaggctactgcttagagatagccattttcttcttggagctggaccagtgaattagacgcatggaggagagctggaaaatccctttttggaagagctacacaaaaccaaaatttggaattcgtagctaataaccataaaaattaagaaatgactgttggaagagcactggaaatcacctgattaagttaagaaaaaataactagctcatgagaaaattattttcaggccagctgtagcctgtacccttttgaaaatcccctgactagtgagttcatttttgttggaatatagaatttttcttttct

SEQ ID NO: 209961 - DNA, 424 bp, Homo sapiens
tctagaagttggagcagataacttccaaaataaggtaatttaatctagttgcatcctcttttcaaaatacagaaatgttagattcaaaaagcatattaaaaataactaatgcttaaccaagtttgaaagaaagaagttttttgatgtcagaaatgaaaaggacctgaaaggcacagcttttaggcccgtgggatacccagtatcaatataagccccaagaactcaggttttggaatacatataggaatagaagacatagctttggatcttatgggtgggagttctaattaagacctctttatgaagtgaccgtctcaaggaactccgctccatgaaatgacaagacataacttcccgccaaattagggaagctacagaggagattgtcattggcctggttattcttgatgaaggaagaaaaatc

SEQ ID NO: 209962 - DNA, 566 bp, Homo sapiens
acgttggccagtctggtctcaaaactcttgatctcaagtgatctgcttacctcagcctcccaaggtgctgggattataggcgtgagccatcatgccaggcctacagaaatacgtctattggtaggggaaatagaaagaatcaatggaacacctgtatgtacctactgttcatccttatcccacttaaaaaatatatgtgcaatggcagagtaatggaatattttaagacttagaaagactctaggcaacttaggcaaatgctctcatttcacaaaagataattaaatggctcggaaggtcccatagctaattagaggcaataatgagattagaacacctatctcctaattgccacctagcctaatgctaagatcactctaccacagtatcagtccccttagttactcgatgtctaaggtggtccattattgaacaatacaatttttttttttttccgagacagagtcttgctttgtcacccaggctggagtgcagtggcacgatcttggctcactgcaacctccaccacccgggttcaagcagttctcctccctcagcctcccaag

SEQ ID NO: 209963 - DNA, 243 bp, Homo sapiens
tatgctgcccttttaattcctgattagttggttaaccactatttctaggtctttaaaaaatagttaatatttttttctttattgagatgttattcacataacgtaaaactcagctctctacagtatacagttcagtggtttatagtatattcactgtgtagtattctaatatattcactaactgcagaacacttccatcacctcagaaagaaaccccttccctgttagctgtcactccccatt

SEQ ID NO: 209964 - DNA, 577 bp, Homo sapiens
catatctgtcaaaatcccagctgtcatttttatagctgtacacactgatacttaaaggaatgtgaaataacagtgacactttgggaagtattttggcagtttttttaaaaataaaatgtaagaaacagaaaaccaaatactgcacgttctcacttataagtgggaactaaatgatgagaactcacgaatacaaagatgggaacaacgcatatggggcctatcagaggctggaacgtgggagaagggagagaatcaggcaacaagttgacaaatggacatgaatttcacctctgagagtttcataagctggtattgtcctgacattgcaaagtgtttaccacaaagatcctgtacatccatcatccagggccagcgtttgcctgattctaattccactgacattgaaatctacagctctctgtgagtcatttatcacacttattaaaatgttccattgtgaattggaatagcaattcactattatttcagagtgctgcccaaggggcattctatgcagcaaatcttaatgctttattgaaatagtagtttggttttaataaatgattctttgcaaaag

SEQ ID NO: 209965 - DNA, 447 bp, Homo sapiens
cagccccgaccattagacgctaacccaagttttttttgttttgtttttcattttttctgctacatgttataataatccaagtttcttttcgatgcttgcctattgtcttacaaaactcctctgcttcctgaaagccaaccttaaacagccatccatgccctacctgttttgtccttaattatttttctggccacttttctttaacttctgtgctacaatcctacaatcctgatcttaaaagcctgggtttttaaatatctattttttgcttttctctccaattcctccaatttgttactaaaatattgacaattaagccctcagaacaaacttttttttttttttttttttttttttaaaggggtccccttgggggggggaacccctaaaatccacccgggggttttccaacttgggcaggggcggttttttaaacccttttggcgg

SEQ ID NO: 209966 - DNA, 1185 bp, Homo sapiens
tctaagaattttgcttagtttcagcacagtatggtaatgtattttcatgaggttaagaaaaaaaagtcctaagatattttataaaatcaattaacaaatgcttctaaagttcagtcttcaggcatctgaaaaatggttaagtataccatctaaataatccccactactaaataatctccaaggcaggatctaggtactgcaaagaccaagttcacagatcaccgaaaggaacccttaactcacaaacagtccctaaacctgtggtgtaaaacagtggttccaaaattcagctgcatttcagtattgtctgagaagcttctaaaaaatagattctcgtggccgggcatggtagctcacacctgtaatcccagcactttgggaggccgaggcgggtagatcacgaggtcaggagttcaagaccaccctggccaagatgtgaaactccatctctactaaaaatacaaaaaacagccgggcatggtggcgggtgcctgtaatccccgccactagggaggctgaggcagagaactgcttgaacccaggaggcagaggttgcagtgagccgagatggcaccaccacactccagcctgggcgacagagctagactcatctcaaaaaaaattaataagattctcaatcccaccatttccagaggtggagtccaacatccatggtcttaaaaaatttctaattattctaatgcaggcttattctaatgtaggccagtctcacatctatctaagtgcaggatttctcaacctcagcagtgttgctatttgggactggatacttttgctggcgggcagggaggaggctatgctggacactgtaggatgtttagcagtatccttggcctctaccctccagaagcacactgcccactcccagaggtgtaacaagcaaaaatatgtccagacactgccaaatgtttcctggggggtgaggggggaaccacccccaactgagaactcttgaactagagtaaatcaaaagacaatcatttgaagttaagaaaggaaagaaatatgaaagctgtttaaagccaagaggccagatctttttttcagtacattagaaaaagtagcagccaatactggggtgcagaccataacttctaaggaccaagtcaatgctgagttttagttgagcagatagaagagctttattttcactatcatttactc

SEQ ID NO: 209967 - DNA, 465 bp, Homo sapiens
tctaagaattttgcttagtttcagcacagtatggtaatgtattttcatgaggttaagaaaaaaaagtcctaagatattttataaaatcaattaacaaatgcttctaaagttcagtcttcaggcatctgaaaaatggttaagtataccatctaaataatccccactactaaataatctccaaggcaggatctaggtactgcaaagaccaagttcacagatcaccgaaaggaacccttaactcacaaacagtccctaaacctgtggtgtaaaacagtggttccaaaattcagctgcatttcagtattgtctgagaagcttctaaaaaatagattctcgtggccgggcatggtagctcacacctgtaatcccagcactttgggaggccgaggatctggaccagactgtcgggggcttggtaactccatccagaacatcctcagggaggagatgtcagcggaaaagagg

SEQ ID NO: 209968 - DNA, 513 bp, Homo sapiens
gagttttggaagctggcagtgcacccagtcccggctctcctccattctggtgggtctcaccagagattggccaagaagagatcaaactgttcctggaccaaactgagggtggggctgctatctctcgtggcccaataacgagatgcagatgaactggggagaaagagactttttatttctgtaaccagttacaaggagaagacctggaaattatctccagaccaactcaaaattacaaagttttccagagcttatataccttctaagctatatgtctatgtgtaagtgtgcattcatctcaagacgtaagtaattgacttatgttaatctataactaaggtctgagtcctgaagaccttcctctggatcctcagtaaatttacttaatctaaaacccttatcttgtctcctaaatcatgggggtttgggaagttccttcagacccccagtaaacttatttgtggagtcctggggaatttcttcagatccccaataaaacttatttaatcctaa

SEQ ID NO: 209969 - DNA, 657 bp, Homo sapiens
gttttgtattgttgcccaggctgatcttgaactcctggggtcaaggattctgcccgccttggcctcctaaagggctggaattacaggcataagccactgtgcccggccagtttatataatttaaacactgccttttggttccttgattcccatatgctaggacaagtaattattattttattttattttactttaagttctgggttacatgtgcagaacctgcaggtttgttacataggtatacatgttccaaggtggtttgctgcacctattgacccatcatctaggttttaagtcccacatgcattaggtatttgtcctaatgctcttcctccccttgccccccaccccccgacaggccttggtctgtgatgttcacctccctgtgtccatgtgttctcattgttcaactcccacttattagtaagaacatgtggtgtttggttttctgttcctgtgttagtttgctgagaatgatggtttccagcttcatccatgtcgctgcaaaggacatgaactcattctttttatggctgcatagtattccatggtgtatatgtgccatattttctttatccagtctatcactgatgggcatttgggttggttccaagtctttgctatggtaaatagtgctgcaataaacatacgtgtgca

SEQ ID NO: 209970 - DNA, 223 bp, Homo sapiens
ctgtatcccgggaagaggtagggctggggtccgaataatcaccacttggtgggggtttaagcccaagccaatgaaatgaacataaaaattagctcagtgcggtggtgcatgcctatagtcccagcaacttggaaggctgaggtgaaaggtttggttgtgccctaattaccacctgatattctatatatttattttttaatttatcgactgactccccaatctc

SEQ ID NO: 209971 - DNA, 538 bp, Homo sapiens
agatgagatagattttcttattatcccgattttacaaatgagcaaacagaggcacaagcaggttaagaaacctccccaaggttaaacagtgagaaacagcaaagatttgaacagtgagaaacagcaaagatttgaaacagcaaagatttgaacctattgttcgggagtccatgctgttactcatttctttatgctgccataatctaatataaaattgaataacaataaatgcaccttatatttgtatagctatacacactaatttacatgatcttcataagaactatgaaatggctgtgattatccccatttttaaaatgatactataaaggcataaaatgctgtatttatggtatgcaaccctttggtgaacaaccctataaatatttaattacttatattgatgttcttcctacgtctaagaaaaatgttatttccattcccaagatgttagtagagacgaagatttttcaatttgtctccttgattttgttggattatagcattaaagttatttttacaaagccatctacggtaa

SEQ ID NO: 209972 - DNA, 2421 bp, Homo sapiens
gcggccgcaagcacgggggcgaatccccgctgggtcgagggcctgaacgggagccaatcgagcagccgaggctactgccaatcacgcggctccctccaatcccacccgtgccatttccaaaatctcggtcccactgtgcagctcaaatgtggtgttcactctgccaatcgctggaggatagagtgggaacaggaataagcagagttaagaggccaggacaaaagaagttaaagagcgcccaatacatacatgtttttgaaggcgggcagagggaataaagtccccccagtgagggtctatgggcctgattgtgtagttctgatggagccccctttgagcaagaggaacccgccagcgctgagattagcggatttggcaacggctcaggtccagccgcttcagaatatgacaggcttcccggcgctggccggcccgcccgcccactcccaactccgggccgccgtcgcgcacctccgcctgcgggacctgggcgctgaccccggcgtggccaccactccgctcggacccgagcacatggcccaggcgagcacgctgggcctcagccctccctcccaggcgttcccggcacacccggaggctccggcagccgccgcccgtgctgcagccttggtcgcgcaccccggcgcgggcagctacccctgcggcgggggcagcagtggcgcgcagccctccgcgcccccgcccccagcccctcctcttcctcccaccccttcaccccctccccctcccccgcctcctcctcctcctgccctctcgggctacaccaccaccaacagtggcggcggcggcagcagcggcaaaggccacagcagggacttcgtcctccggagggacctttccgccacggcccccgcggcggccatgcacggggccccgctcggaggggagcagcggtccggcaccggctccccccagcacccggccccgcctccccactcggccggcatgttcatctccgccagcggcacctacgcgggcccggacggcagcggcggcccggcgctcttccccgcgctgcacgacacgccgggggccccaggcggccacccgcacccgctcaacggccagatgcgcctggggctggcggcggcagcggcagccgcggcggctgagctgtacggccgcgccgaaccgcccttcgcgccgcgctctggggacgcgcactacggggcggttgcggccgcagcggcggccgccctgcacggctacggagccgtgaacttaaacctgaacctggcggctgcggcggccgcagcagcggccgggcccgggccccacctgcagcaccacgcgccgcccccggcgccgccgccgccgccggcgcccgcgcagcacccgcaccagcaccacccccacctcccaggggcggctggggccttcctgcgctacatgcggcagccaatcaagcaggagctcatctgcaagtggatcgaccccgacgagctggccgggctgccgccgccgccgccgccgccgccgccgccgccgccaccgcccccggccggcggcgccaagccctgctccaaaactttcggcaccatgcacgagctggtgaatcacgtcacggtggagcacgtgggaggccccgagcagagcagccacgtctgcttctgggaggactgtccgcgcgagggcaagcccttcaaggccaaatacaagctcatcaaccacatccgcgtgcacaccggcgagaagccctttccctgccctttccccggctgcggcaaggtcttcgcgcgctccgagaacctcaagatccacaagcgtactcatacaggggaaaagcctttcaaatgtgaatttgatggctgtgacaggaagtttgccaatagcagtgatcggaagaaacattcccatgtccacaccagtgacaagccctactactgcaagattcgaggctgtgacaaatcctacactcacccaagctccctgaggaagcacatgaagattcactgcaagtccccgccaccttctccaggaccccttggttactcatcagtggggactccagtgggcgcccccttgtcccctgtgctggacccagccaggagtcactccagcactctgtcccctcaggtgaccaacctcaatgagtggtacgtttgccaggccagtggggcccccagccacctccacaccccttccagcaacggaaccacctctgagactgaagatgaggaaatttacgggaaccctgaagttgtgcggacgatacattagaatttattattaataataataagtgaaataataagtgggagtccttggaccacatcctaacctgagacaatgccgagcctgagacaaacccgtgactcagacttgccaccgggtctaattagccctatttattcagtatgaaaccctatggtgtttgtacatttaattaatttaattaag

SEQ ID NO: 209973 - DNA, 768 bp, Homo sapiens
agagatggggtttctccatgttggtcaggctggtctcaaactcctgacctcaggtgaactgcccgcctcagcctcccaaagttgattgctattaatataatcctatagttaccagaacacgtatactagaattacagtacactgaaatggtcaaaaggcaaataaaatagaaataagaaaatttgatgaaaatctggagaattaagtctttctgtaattgagagttgattttttgattgtggaatccttgaaatggtttgaaagaatgatgtgacttgaatgggctttataaacacagcctggtaaggatagctgtgacagcttgggacagtggatttggggtaccaccagttaacatttctggccctgttttcctgtctttaaagtggagataccaactcagaatagtaatgtgaggattaattgaggtaacttatgctaggcactgaacagtgcctgatacagtattgataatgctgtttctttttccatgtgtaataacacaggtgaactgcctaggagtgccatacatagatgagcagtagctactatgtcagtgttccttttgttcccttttatgagtgcattttgttttgcattttcttgtgtctgttgtggcttaagggataagatttgtgtgtctgaaatgctgtgctaaacaggacgttgttccttgtggaatacttgggtaatatggtttcctagatttcatattcactatttctactttgagagtctactgttaggaggcttctgtgttcaaagaaa

SEQ ID NO: 209974 - DNA, 825 bp, Homo sapiens
agagatggggtttctccatgttggtcaggctggtctcaaactcctgacctcaggtgaactgcccgcctcagcctcccaaagttgattgctattaatataatcctatagttaccagaacacgtatactagaattacagtacactgaaatggtcaaaaggcaaataaaatagaaataagaaaatttgatgaaaatctggagaattaagtctttctgtaattgagagttgattttttgattgtggaatccttgaaatggtttgaaagaatgatgtgacttgaatgggctttataaacacagcctggtaaggatagctgtgacagcttgggacagtggatttggggtaccaccagttaacatttctggccctgttttcctgtctttaaagtggagataccaactcagaatagtaatgtgaggattaattgaggtaacttatgctaggcactgaacagtgcctgatacagtattgataatgctgtttctttttccatgtgtaaaatgggcataccactagtctcttgggtcagtaatgcatttcagccaaatgaaataaataacacaggtgaactgcctaggagtgccatacatagatgagcagtagctactatgtcagtgttccttttgttcccttttatgagtgcattttgttttgcattttcttgtgtctgttgtggcttaagggataagatttgtgtgtctgaaatgctgtgctaaacaggacgttgttccttgtggaatacttgggtaatatggtttcctagatttcatattcactatttctactttgagagtctactgttaggaggcttctgtgttcaaagaaa

SEQ ID NO: 209975 - DNA, 407 bp, Homo sapiens
cagttagaacacccactgtacgactctcaattgtttgcaaatttgcttccaaaactcaggaatgcactactcaactgaggccgcatttgagagcacacactcaatacttcctccaataaaagaaattttcatctcagctgtacactcagagaccaggatttttttcgcctatatgttgataaaacccaatgacgcatagctgagcaagtctttcacctaacagcacaccaagcttctaatggaaaattcacagaccaggtgatgcagtcaccatacagcatacagacacaatatttgcactcttcctatcccctcccctggaatccagactcagcctgctcactctgaaagctttctcagttcatcctgccatttgccccttctcccaagccacctctacacccggg

SEQ ID NO: 209976 - DNA, 511 bp, Homo sapiens
gatcgcaactcctttccttgacctataaggccctgcaaggtctggccccactgatttcaaggatcagcctccctctggccagtgggcttccaccctgtgcacctccttgcacactggaaatacaccagccttttcttttcccacctcacaccttcccacatgctgtgccttctgccccaaatgttctcttcattttgcgtggcagctttttccttttccttcagtgtaaatgtcacctcctctgagaagccttccctttccattttgtctaagtaagaacctagttttgaggaaaagccctatatattcactttaatttttttttttttttttgagacagagtcttactctgacactcaggctggatggtagtggtacgatctcagcttgctgcaatctccgtctcccgggttcgagcgattctcctgcctcagcctcccgaatagttgggattacaggtgtccgccaccacgccagggtaatttttgtatacttagtagagatggggttt

SEQ ID NO: 209977 - DNA, 363 bp, Homo sapiens
ccacgataactctgtgagccagcatgtattatttttctgaagggacaaataaggagctgacaccttcaaggcaagtggttaaagccaacactggaattcaagagtcctatctcataaccagagtttttttaatgttctgccacatgatttccaagcccaatccctgttttgagtctacatgatccagggctgaaggtaactttgaaagatcgtatgtgataaggagaaaatgcaactgaaataaccaaaaacacaattcagtaattatcgagtgcctggcatcttgtcagtacaattgtgaggaacgaatgagacagtatatgcgaaggaacccaccacagtgcccggaacacttccgtattt

SEQ ID NO: 209978 - DNA, 308 bp, Homo sapiens
caagccaagagccatccagcgtcagtcctctctgggtagcccaagtaaagcaggagcataccccagagagaaagttcgcagggctgttcacctgcagtgctgtggacttcaaccttcttgttccttcttcagtaagtgaaaataacagtcattgaccatgactattatcgaccgcttttgaaaatgtaaacatagtgactttattgctgtaaaaatcatacgtgtttatcatcttaaaattcaggaaacatggacaggtacaaagatgtgcaaaatatcatccaaaatcccatttgctggccaggcac

SEQ ID NO: 209979 - DNA, 720 bp, Homo sapiens
caagcaattctcctgcctctgcctcccaagtagctgggattacagacgcccaccaccatacccagctaatttttgtgtttttgttagagacggggtttcaccgtgttggccaggctggtctggaactcctgacctcaggtgatgtgccggcctcagcctcccaaagttctgggattacaggtgtgagccaccgtgcctggcctctcttccattcttaatcatctaatggaaccttaatagttttcagcagtgatgtctatatcaaggcctgctagactgacagcaagccttcattccccacagggatcttaccaagtgtggaaaaatggaatatgggaagcattcatgttaacagtggttctcaaagtgtggttcctggaccagcagcattagtaatacctggaacttgttagaaatgggaattctggcccagcaagtgactcacacctataatcccagcactttaggaggcagaggtgggaggctctcttgagcacaggggttcaagaccagtatgggcaacatagcaaaaccccatctctagaaataataatttaaaaaattagcctggcgtggtggcacatgcctgtagtcccagttattctggaggctgaggtgaggacattgtcggaatccaggcagttgaggctgcagtgagccatgattgcaccacctcactccagcctgggcgacaagagtgagagcctgtctcaaaaagag

SEQ ID NO: 209980 - DNA, 212 bp, Homo sapiens
atggggtctcaaagatgtcccagtttagatgataaattatgtgatcatctctacacttagcagtcttttccacatgcagctttagccattttgaagactctgttgtagggcatttaggtttctaccagattatccacatattgacccatattttgtcttgtgtgtttgttgcctaaatgaaatcaagaatgtgcaccttctctcaatcctcc

SEQ ID NO: 209981 - DNA, 1726 bp, Homo sapiens
  misc_feature (3)..(3): n is a, c, g, or t
  misc_feature (5)..(5): n is a, c, g, or t
ggnangagggaggggcgggggctggaggcagcagcgcccccgcactccccgcgtctcgcacacttgcaccggtcgctcgcgcgcagcccggcgtcgccccacgccgcgctcgctcctccctccctcctcccgctccgtggctcccgtgctcctggcgaggctcaggcgcggagcgcgcggacgggcgcaccgacagacggccccggggacgcctcggctcgcgcctcccgggcgggctatgttgattgccccgccggggccggcccgcgggatcagcacagcccggcccgcggccccggcggccaatcgggactatgaaccggaaagcgcggcgctgcctgggccacctctttctcagcctgggcatggtctacctccggatcggtggcttctcctcagtggtagctctgggcgcaagcatcatctgtaacaagatcccaggcctggctcccagacagcgggcgatctgccagagccggcccgacgccatcatcgtcataggagaaggctcacaaatgggcctggacgagtgtcagtttcagttccgcaatggccgctggaactgctctgcactgggagagcgcaccgtcttcgggaaggagctcaaagtggggagccgggaggctgcgttcacctacgccatcattgccgccggcgtggcccacgccatcacagctgcctgtacccagggcaacctgagcgactgtggctgcgacaaagagaagcaaggccagtaccaccgggacgagggctggaagtggggtggctgctctgccgacatccgctacggcatcggcttcgccaaggtctttgtggatgcccgggagatcaagcagaatgcccggactctcatgaacttgcacaacaacgaggcaggccgaaagatcctggaggagaacatgaagctggaatgtaagtgccacggcgtgtcaggctcgtgcaccaccaagacgtgctggaccacactgccacagtttcgggagctgggctacgtgctcaaggacaagtacaacgaggccgttcacgtggagcctgtgcgtgccagccgcaacaagcggcccaccttcctgaagatcaagaagccactgtcgtaccgcaagcccatggacacggacctggtgtacatcgagaagtcgcccaactactgcgaggaggacccggtgaccggcagtgtgggcacccagggccgcgcctgcaacaagacggctccccaggccagcggctgtgacctcatgtgctgtgggcgtggctacaacacccaccagtacgcccgcgtgtggcagtgcaactgtaagttccactggtgctgctatgtcaagtgcaacacgtgcagcgagcgcacggagatgtacacgtgcaagtgagccccgtgtgcacaccaccctcccgctgcaagtcagattgctgggaggactggaccgtttccaagctgcgggctccctggcaggatgctgagcttgtcttttctgctgaggagggtacttttcctgggtttcctgcaggcatccgtgggggaaaaaaaatctctcagagccctcaactattctgttccacacccaatgctgctccaccctcccccagacacagcccaggtccctccgcggctggagcgaagccttctgcagcaggaactctggacccctgggcctcatcacagcaatatttaacaatttattctgataaaaataatattaatttatttaattaaaaagaattcttccacctc

SEQ ID NO: 209982 - DNA, 1941 bp, Homo sapiens
  misc_feature (3)..(3): n is a, c, g, or t
  misc_feature (5)..(5): n is a, c, g, or t
ggnangagggaggggcgggggctggaggcagcagcgcccccgcactccccgcgtctcgcacacttgcaccggtcgctcgcgcgcagcccggcgtcgccccacgccgcgctcgctcctccctccctcctcccgctccgtggctcccgtgctcctggcgaggctcaggcgcggagcgcgcggacgggcgcaccgacagacggccccggggacgcctcggctcgcgcctcccgggcgggctatgttgattgccccgccggggccggcccgcgggatcagcacagcccggcccgcggccccggcggccaatcgggactatgaaccggaaagcgcggcgctgcctgggccacctctttctcagcctgggcatggtctacctccggatcggtggcttctcctcagtggtagctctgggcgcaagcatcatctgtaacaagatcccaggcctggctcccagacagcgggcgatctgccagagccggcccgacgccatcatcgtcataggagaaggctcacaaatgggcctggacgagtgtcagtttcagttccgcaatggccgctggaactgctctgcactgggagagcgcaccgtcttcgggaaggagctcaaagtggggagccgggaggctgcgttcacctacgccatcattgccgccggcgtggcccacgccatcacagctgcctgtacccagggcaacctgagcgactgtggctgcgacaaagagaagcaaggccagtaccaccgggacgagggctggaagtggggtggctgctctgccgacatccgctacggcatcggcttcgccaaggtctttgtggatgcccgggagatcaagcagaatgcccggactctcatgaacttgcacaacaacgaggcaggccgaaagatcctggaggagaacatgaagctggaatgtaagtgccacggcgtgtcaggctcgtgcaccaccaagacgtgctggaccacactgccacagtttcgggagctgggctacgtgctcaaggacaagtacaacgaggccgttcacgtggagcctgtgcgtgccagccgcaacaagcggcccaccttcctgaagatcaagaagccactgtcgtaccgcaagcccatggacacggacctggtgtacatcgagaagtcgcccaactactgcgaggaggacccggtgaccggcagtgtgggcacccagggccgcgcctgcaacaagacggctccccaggccagcggctgtgacctcatgtgctgtgggcgtggctacaacacccaccagtacgcccgcgtgtggcagtgcaactgtaagttccactggtgctgctatgtcaagtgcaacacgtgcagcgagcgcacggagatgtacacgtgcaagtgagccccgtgtgcacaccaccctcccgctgcaagtcagattgctgggaggactggaccgtttccaagctgcgggctccctggcaggatgctgagcttgtcttttctgctgaggagggtacttttcctgggtttcctgcaggcatccgtgggggaaaaaaaatctctcagagccctcaactattctgttccacacccaatgctgctccaccctcccccagacacagcccaggtccctccgcggctggagcgaagccttctgcagcaggaactctggacccctgggcctcatcacagcaatatttaacaatttattctgataaaaataatattaatttatttaattaaaaagaattcttccacctcgtcgggatccgttttctgcaatcaaagtggactgcttgctttcctagcaggatgattttgttgctaggacaaggagccgtgtagaagtgtacataactattctttatgcagatatttctactagctgattttgcaggtacccaccttgcagcactagatgtttaagtacaagaggagacatcttttatgcatatatagatatacacacacacatt

SEQ ID NO: 209983 - DNA, 1656 bp, Homo sapiens
acagggctgtgtggaaaggtcacatgagctgctgtttgtggcagcacccaccatactgccttggcacatagtagggacactgcccaagtttactgatgcatttgatgcatatttggggggcacctgccatgtaataggtactcacccggagccacatctttgaagtgccacaatccatttattcagcagtcatttagtgaaccagcagacagcctccctgccctcagggagctcatcctctcaggaggaagacaagtgatcaattccttgagggcagggcattgcctgtcaggtgcacagctgtctcctagcatgtggcttctcctcagtggtagctctgggcgcaagcatcatctgtaacaagatcccaggcctggctcccagacagcgggcgatctgccagagccggcccgacgccatcatcgtcataggagaaggctcacaaatgggcctggacgagtgtcagtttcagttccgcaatggccgctggaactgctctgcactgggagagcgcaccgtcttcgggaaggagctcaaagtggggagccgggaggctgcgttcacctacgccatcattgccgccggcgtggcccacgccatcacagctgcctgtacccagggcaacctgagcgactgtggctgcgacaaagagaagcaaggccagtaccaccgggacgagggctggaagtggggtggctgctctgccgacatccgctacggcatcggcttcgccaaggtctttgtggatgcccgggagatcaagcagaatgcccggactctcatgaacttgcacaacaacgaggcaggccgaaagatcctggaggagaacatgaagctggaatgtaagtgccacggcgtgtcaggctcgtgcaccaccaagacgtgctggaccacactgccacagtttcgggagctgggctacgtgctcaaggacaagtacaacgaggccgttcacgtggagcctgtgcgtgccagccgcaacaagcggcccaccttcctgaagatcaagaagccactgtcgtaccgcaagcccatggacacggacctggtgtacatcgagaagtcgcccaactactgcgaggaggacccggtgaccggcagtgtgggcacccagggccgcgcctgcaacaagacggctccccaggccagcggctgtgacctcatgtgctgtgggcgtggctacaacacccaccagtacgcccgcgtgtggcagtgcaactgtaagttccactggtgctgctatgtcaagtgcaacacgtgcagcgagcgcacggagatgtacacgtgcaagtgagccccgtgtgcacaccaccctcccgctgcaagtcagattgctgggaggactggaccgtttccaagctgcgggctccctggcaggatgctgagcttgtcttttctgctgaggagggtacttttcctgggtttcctgcaggcatccgtgggggaaaaaaaatctctcagagccctcaactattctgttccacacccaatgctgctccaccctcccccagacacagcccaggtccctccgcggctggagcgaagccttctgcagcaggaactctggacccctgggcctcatcacagcaatatttaacaatttattctgataaaaataatattaatttatttaattaaaaagaattcttccacctc

SEQ ID NO: 209984 - DNA, 783 bp, Homo sapiens
acagggctgtgtggaaaggtcacatgagctgctgtttgtggcagcacccaccatactgccttggcacatagtagggacactgcccaagtttactgatgcatttgatgcatatttggggggcacctgccatgtaataggtactcacccggagccacatctttgaagtgccacaatccatttattcagcagtcatttagtgaaccagcagacagcctccctgccctcagggagctcatcctctcaggaggaagacaagtgatcaattccttgagggcagggcattgcctgtcaggtgcacagctgtctcctagcatgtggcttctcctcagtggtagctctgggcgcaagcatcatctgtaacaagatcccaggcctggctcccagacagcgggcgatctgccagagccggcccgacgccatcatcgtcataggagaaggctcacaaatgggcctggacgagtgtcagtttcagttccgcaatggccgctggaactgctctgcactgggagagcgcaccgtcttcgggaaggagctcaaagtgggtgactgcctgggctgagggtcccatgtctggggatccccacactctgcaaaaaggactccatcattttacccatctagggctgtgagagtgcaacacatgtctggtgagctggtgaatgcttagaaggatggatttgaagacctttccagtgagagagacagaagcaaggggcgggccagctccattttctctctgccatttcttaacaatacgccatcttgcccaagcaaaagacctat

SEQ ID NO: 209985 - DNA, 337 bp, Homo sapiens
ttccagcctaccaccaatatcctaaatcaggccatcatctcttactgcatcaactttctaagtcttcttcctgcccagacatgctctcactgagacagccaagtataaaggggtccctggagaacttctgactggaccgcacactgagagaggagtgtgcactggggtggggcctcaggaagttcgtccatttgcagtggggaggagtctggcccctcctcttcctggatagtacctgagattcaacctgaggtgggaaaccagctaggaggactctcgctttgctgagagtccctgtttcctttttttttttccttttcacccaataaattcaatt

SEQ ID NO: 209986 - DNA, 525 bp, Homo sapiens
gtctgttctatcatacaccaagctctcatggttctgtttctgtggatattttttacctattgatctagttgttcattcctgctctacgtcatgtttttatttaaaaattatggtaaactctactttacatagaatttatcattttaatcctttttgagtgtacaattcagtggcattaagtacactgacgttgttgtgcaaccatcactactattcatctccagaaagttttcatgatcccaaaatgaaatgctgcacatattaaacagtaacatcccattactccctggtaattaccattctccctaatttgtctataaatttaactcacttaagtatctcatatattatgcaatatttgcacttttgtgactggcttatttcacttactataacgtcttcaaggttcttccatgttgtagcatgtgccagaatttccttcctttttaaggttgaataatattctattttacatgtataacacgttttattcatccactcattggtcaatcataccatctggtt

SEQ ID NO: 209987 - DNA, 883 bp, Homo sapiens
ggagagctggtgttcctttggcctggggcccacccagaatggacacacttgggggcagactggagcccaccttgcatctggagctaagctgtcagacctgcagcttgaagcagggcagcctggctgaggcccacccagatcagccaacttgcaaacacagaagaaaccagtgcttcttgtgacagggtctctctttgttgcctaggctggagtgcagtggaacgaacttggcttattgaagcattgaccacctggacccaagtgattctcctaccttagcctcttgaatagctgtgacaacaggtgtgcactaccacacccagataaattttgtaatttttatagagagggcatttgaccatgttgcccaggctggtctcaaactcctgagctcaagtgatactcctgcctcggcctcccaaagtgctgggattacagatgaagaaaatgaggcactgagagattacataacttcccttgagtcatatttgcttgtaagtggtaaggctggatgttgaacccaggacaaagggtctcactctgtcgcccagtctggagtgcaatggtgtgatcacggtcactgcaacctctgcctcccgggttcaagcgattctcctgcctcagcctcccaagtagctgggattacagcggcttgcagtaaacttcttggaggagaattggcattgcaagggtgttactggagacctcggcaagaaagtgaatgcaaagacagatgacccaggaacccgtgatggataaggctcttgacagccaggacgtggaattacagggggtctctttgagagacaaaataaaaaaaatagcccagtaatcttccttccacccttttctcccagatctaattacagatgtcttgacattc

SEQ ID NO: 209988 - DNA, 463 bp, Homo sapiens
gacaaaaatttcagaggcaagaagaatggaagagaggaagagaagaagagaacatgagacaaaagagccagcctggggtgctaaggagctgccaaaagactcaaagtagcagaatgggtgggcaggccctcactgcctgagccaagccagcacctgttcacacccacagactcagactctatggccaagagcactgaatccatgtttttggccttccactaatcagactggtttttatcacaggcccatatggagatggagcaacttgcatcatcctggtcatataaaagaaatcaagggctgattgtccttgccaaccgtctccctgtactcagcccgtcggaggaatgacattacataaatcctcaaacataaagaggcataaggacggcacacatcttgccttggcatcccacatatctaatctaaacattctctgttctcaccaggacatcccaacaca

SEQ ID NO: 209989 - DNA, 589 bp, Homo sapiens
acatgtggcttttattggacatttgcagtggtagctttggagggagaaacaaggctttcccaggatgggtgtcttgattgactgggttatggtcctgccatcggctggagagcctaccttgggagaacttggtagttaagaaccaggcatggagtcacactggtcagtttgagtcctggttctgacatatgctagcagaggaactcttgagcaagttactgaatgtttttgtgcctcaatttccttacctataaaatcgggggatatagagttgtttttacatttaaatgaactagaatgtaaaatgtttctcaggttgcctggcctagtaacaactctattagcatttgtgagtattattacgatcattattgttgctgctgctgttactgctatcagaattgaggtgggaaatgaagagacatagtactcagaacctggagggctgtggcatttaaatatctactggcgccaggcgtggtggctcaggcctataatcctaacactttgagagaccaaggcagaaggatcacttgaggtccggagttcaagaccaacctaggcaacatagcaagaccctgtctctaca

SEQ ID NO: 209990 - DNA, 345 bp, Homo sapiens
gggaaagatacatagttgatatattgagattctcccgaaaaacaaagtagataagaaatccatatctatactgatatctatatctatatctacctatgtctatgtctacatctatatctacatcgagttctatttctactccaatacggagaaagagagaaagagaggcaggaggagagagaggaagggagagatggatcaagaggaactagctcctgtgattatggaagccgagaagtcccgggatccgcctctgcaagctggaggcctagggaagctggcggtgagattcagttagaatccaagggcccgagatcaaggggagctggtggtgcagctcccggt

SEQ ID NO: 209991 - DNA, 313 bp, Homo sapiens
atcacggccctgtaatagtgtatatatactccttccagatgatgtatttttcaacatctttactgggatagaaatctataaattcacttaaggtatacaattcaacaattttagtattctcacagagttgtgtaaccatcaccacaatctaagttgtgaaaatatgcaccaccccgcaagaaacctcctacacatcagcagttactccccatacccccactgggacactactctactttctgtctctgtagatttgcctattctaggcatttaatataaatggaataataaaacatatggcttttttaaactc

SEQ ID NO: 209992 - DNA, 753 bp, Homo sapiens
gcctttataccatcggttagactaactattcccctttgcacctcattcaccctcaaaggtatttcagagcttcagagtaccattcagtaaaattccacacatagataaaccttacttgataaacacactatagctgcacatcaaaattattttatattgttctcagggaacatataaacaagtgttaccgtgactattctaaagagggtatcatttaagtatgtatcatcaaaattatgacttaatctgtggcttttatgaaatagcattaaaatgtttaagaattataataagagctattgcaaaagtcaataacaaataacaacttgtaattatatcaaagtattgccaataattgctttgcctactatataaattcctttatgaaacgtattatggcaagcagtgattacattttaaaaatataatttgacaagcaatatatccatacaataatgactcatgatataatagggacctattgcacaaataaactgtaaaaacagacacaagcataagatagaacactaagtatactcagacttcaacaattcaatagcaaattgttgtagttgtttatacttggagtggcttagaacacgaatgaaaaatatgatactaaaataattcaggattctgaatattgctaactcctctttctccttatatagtaagataattatctcttgaataaagcccttcctccctctttccttttctttcaattttatttcttctttcttttcctccata

SEQ ID NO: 209993 - DNA, 191 bp, Homo sapiens
taaactgtaaaacttatgtttttattgcatataagcacatctttataaatgaattcaaaagcataattctgtgaggcatttgaaaacagccaccaatcctctgacatatgctggaatgtggtttgtcacctgtagaaaactaattctgattagcactaagattagtcattctagtctccactgggttgcag

SEQ ID NO: 209994 - DNA, 238 bp, Homo sapiens
tagtgctgcaataaacatacgataaagcacattattcttagcccttatgtaatcaaaaatcaggttcagtcacatgccacttacagagtccagttaacaagagcaagatctggtataaagaaagtgacttttggctgggcacggtggctcatgcctgtaatcccagcactttggaggccgaggtgggcggatcatgaggtcaggagatcgagaccatcctggctaacacggtgaaacc

SEQ ID NO: 209995 - DNA, 748 bp, Homo sapiens
agctacctcatctctctgcacttaagtctccttatctataaaatgaggaattaaaaactgtactcagtctcaaagtgttatattaaatgagttaatatatgtaaatcaaaacagtacccaactcataggaagtctatatgtattagctgctatcttagtccacttgggctactgtaacaaaatagcatagactgggtgacttataaacaagagaaatttatttcttatagttctggaagctaggatttggtgtccgatgagggcctgctttctgattcataggtaatgccttcttgtgtcctcacaggatggaaggggcaaaagagctctctggagcctcttttataagggtaataacctcattcacggggcctctgccctcatgacctaatcacttcccaaaggcctcaccacctaataccatcaccttggggttagtatttcaaaatacgaattcagggggcacaaacatttagaccacagccgtggcaattattgttgctattgctgcatatcaagtattatggtccttttcctagtctgtagttatcagtctagcacttctgtagagaagattagaaaagtccaccaaagagcatccacaagacatctttcatttgaataaatatgtattcagccaatgttgattcaacactcaatactacaggttgagcaagttacgtaaactttctgtgttttctcttaaaacatattaataactgctttatagtgtggttataaagagtaa

SEQ ID NO: 209996 - DNA, 504 bp, Homo sapiens
ttctttccttccttctttcttcctttcttcctttctttgagacagagtttcactcttgttgcccaggctggagtgcaatggtgtgatctcagctcactgcaacctctgcctcctgggttcaagcgattctcctgcctcagcctctcaagtagctggaattacaggcacccaccaccatgcccagctaattttttgtatttttagtagagacaaggtttcaccatgttggccaggctggtcgaactcctgacctcaggtcatccacccacctcagcctcccaaggtgctgggattatgggcatgagccaccgcatccagcccatcccatgcttgattacctctgatgatagtgaactcactacatcccaaatatttcagaaggtatcgttgtaaacctggggccaaaacctttctccctgtagctttcacagaggatgagactcttctatgtggcagcccttcagatatctgcagccagccctcatgtccctgtgggtctcctct

SEQ ID NO: 209997 - DNA, 328 bp, Homo sapiens
tccataaacataatgacacaaaggacaaaactaaaacatctgaaagaggattttttcagacaatgtttttccaaagttgaatgcagacacatttactactagtagtttgactgtacaaaaataacactagaagttcctgaaaattttatttaacaaaaattgctgtttaaaacaatacattacttttgagagggaatttacttgggtgtagtagaatcaaataatattggtaaatatggtcactgagagttcggatcctttgccagagattccttcccccaaaagtgaaaggttccgctttcgtatcgtatggaaacgctcacaagac

SEQ ID NO: 209998 - DNA, 1267 bp, Homo sapiens
tgctccccttgctaccgctgacacttggcaccgccgcctcctagcagcggccagacgcggggctgggggccttccacgcaaaccgaaggagatacggacatcgtcattctccccaccgcgcgagccgggcccgccacccacgcaggggagaccgtgcccgtgcccctctcccgcgcctgccgcagatgcagggaaaaccgcctgacatcatgagagcgggacaaacgctcactttgaaggattcctgggcaggacttcaagtgaaatcatatgcctgagaagaacttgataccggtctagagaaaataaccagttctgactttgccaaaccatggaatgtgcaaaatgctctacttttttgcaagaggccaaatgtcccttaaaaagctccattatgaatatgaaccttaagaccgaagggtcaagaagcttgtgccgttgttgagtgtgggaaaaaatttacacacatcgtgcaagtttctgctccttaacattattttattaataatacgttccactttggggaggggaacctgtaactgtgcgtgaattatcatctggacatgtgcttctgtgaacaaaaggggaaatgtgcatatgggtaaaaaaattactgctttcttataactaaaggctatcaatctgaccaacttataaataaaagtaatcaatagcacagtaaaggaaacattaaattttctacaatttacccaagacaatttaatacaatactttcccctagcaaatgcattctgaaggaaaaagatcccaagtgaaccaacacattaattggaaagccttagcttcttatttccgaaaacaagaggtaattcattctatgtgttctttaaataagggtaggtagcaaaaataaaatgaaataacataaaatcaaaagaagatataatggtggaggaaaagaaacaggtggcttcatttctattctaaaaaagaatttcacgatttatgtcttgtgtatacaggggtagggattagaatctgcaagctggaaactgcattccagtagttaatatttttcattgtgcagtcgcctcattcaaaataaaattaccacctttttcattcatttatttctctgaaaatctggggggaaacattaccttcagattagtatttaatattactataaatatggcatttgcttttctccaaagtgtttccccttatgaaaaaagtagaaaaagcaaaacacattaaaaaaagaaagaaataaaagaaaggcaaatggagagctacctttctttga

SEQ ID NO: 209999 - DNA, 349 bp, Homo sapiens
atttgaggggagtcccccactcccttgtccttagggtacgtcataaagcagatgggaccaggtattttgaagaatcagccaaataacagaaggacatgacagaggctgtcctagttccttgattaaaatgtgtaaggttgattagagaaaagaacttaatgctgtttatagatagaaaactgttgctttctcatttcttattaccaaagtgagactgaaacaaatgttgattctgttggcacatttgtattgagcacttaggttccctgtatcatcttggtcatgattaccgctgtgtttcccctcgagaggccattgcaggttttagtctgggctatttgtattcagc

SEQ ID NO: 210000 - DNA, 348 bp, Homo sapiens
gagtgctgggattacaggtgtgagccacccaatgcttggccatactctactgttaatgcagcagttcagcacagtcaattcacgtttctccctgctcacagccctcacagaataaaagccaaagtcttataaagccctctaaaaagtgtcctccccttacctctctggccttctctcttactctcctcttcactaactcaattgcgtagacactggcttcctcactgtttctaccacaagctaggcatggtcccaccttggggcatttttgctgtctgttccctcttccagatggcctcatagcttgttcccttacctcctttagccttttcaccctttccagcccac

SEQ ID NO: 210001 - DNA, 344 bp, Homo sapiens
aaggtgactggtgggttattggaaggatgatttaggcagatgctgaagccactgggagtgacaagagtcatagtggtgcaggggaaggcagcatgaccgtcaagatcattaattgcagccttgtttggaggaacaaaagcttaaagacaatcaaaatgtcctttaatagaggactgtctaaatcaattagggcatattcattcagtagagtaagatacaagatacacagcctattaaaaagaaagaatgagggagctttcagtactggtataaagtaatcaagatattttgttaaatgaaaaaagtgaagttaagcaaaaagtactgtacctagtatgctgcta

SEQ ID NO: 210002 - DNA, 505 bp, Homo sapiens
aggtaaggctgctacttaggattacatgaagtggaaacaacccagaatagtttgccagcaaataaaacttctttctcacaattttcaagatattcatccaaaatcattttgattgtaacttttggatagctgaatagcactgttcttatactaagcatatgattataaaagacccagaaatgaaagttgttgtgcttactcacttccttccctccttaatttaataaatgtttgttaattgtctactgtaagttggaaactctcccagacacttgtgaaatatcaatgaacaaaataaatatatttcactctcatggtgcctacattctagaagggagaaataaaataaaaatcatacattaaagtaagcacattatgtattatatttaaaggtgaataacactttggcaaagaaaggaaaaagaaagaaaaggaaagaaggaaggaaggaagcaagaaagaaaaaagagaaagaaagaaagggaggaaggaagggagggagaga

SEQ ID NO: 210003 - DNA, 402 bp, Homo sapiens
cagggttttctctggggggtgggtgttccccctcttagcccaagctctgccacacgagaagcagatgtcttgttctaatcttcaagtgggatgattcgtggacactgccattagctagttttcttaacatgaagagacagctgcttagtggctatttctatgtgggctgagctcattcagtagagcagctttcccctctggagaacaagagaatgataagcgagcataaatcatgctaaaaggaacgactcctcatcatgagtcattaggacacatgccacattggcgagcagatgaaaaacctttgatgaagaccagttgtaaaagcacaagctaatgctggagaaatgcatcatggtgacttgaaagtgtaatatatgcatgctcacgctttcggtctta

SEQ ID NO: 210004 - DNA, 503 bp, Homo sapiens
tgagtgtggtggggggtagaaaagtggaggcgtacatgaatatatttttagaattttatctttttatgtattactgctatgtgtttagagtataaatttacagtgccatcctgactggatgaattggatttaactattcataccaggaaactgggcatccctgccaatactaatctcttgggaacaggtatcaaaccatctctaacaagattcatagaactctagccaacacaatgagggcaggagactgagataccctggggtcaactgaagaaaggcccaattgaaactgctctcccattcccactgccaccttcattccagtccacagagggatagggcagggcgtgcagacatgcaaacgggatctttcagatgtggcctgggcaggccttcactgacccaggtaacacgggccttcagtctcttccacaccatttgcccatttcagtctttcacctgactagtgaaaactgcacactggccatacaaacacccctgat

SEQ ID NO: 210005 - DNA, 492 bp, Homo sapiens
gcccctgttttttcttaggtattctgttttattacctttaatgtggactttaagtattttaatactataaataatgatagggttttgtacgaccaactctcctggggaatacctgaatgatgttttatcaaagaaaacctggagaaataggcagagctgccctgctaagatggtgaaaattcactgtgcttcaggatatgttagtaatttctgctttccagatgaactgaaaactgaaaactccctcagtcaggagacaggaacttggtgaatgagcataaaattcagtcatggttttgagaagaaaaagaagaactagcactaataccacatgggatgaatccaagtaaaagatctatgttccacatgacgactgaaagttgagaagcagcttcaaagaacagttgaaaaatcacaactttactgaagggtagaactcggcagaaatagctgtagcaattgttagatgaatatgtttcagacaaacagagc

SEQ ID NO: 210006 - DNA, 328 bp, Homo sapiens
gccatgataggtgaacttttccagtaaacaaaactgtccccacacagaggagaggctcctggaggccttcacctggcagggcctgaccgtggagtaagagcctaggaagacactgaggggcctgttcctgcagctgcagcctcagcagggcccttcatgcctgcacccccctcccctggggtgcccagtgagggctgactgctaggggaaatgtcggggtgctacagcacagccccctcccctgtgaatccagcacgtgagggccctgccctcgttcctactggggacgcagccagtaaacaaggagaccagggtgtgcccaagatga

SEQ ID NO: 210007 - DNA, 434 bp, Homo sapiens
ggtacctgtcccttggacattggttatttattgctaaaacccgcatgggtacggagccaatgtaggtgataaatactgccttagaggaattgagctttcactcggcacgtgctgggggtcacagcccgtgtttctcaaactggcccttgggccacagtccgaatgcagctcctggaactgcccttagctggggtctgactgcataattccaatctttgatgatgagaatctgcaacttttacaagctctcagatgattctgatggcctgtagtttgaggacccctgatgtattaggaagcctaatgtgaagggatcacagctaaatatagttgcattaagagcctttaaaaaatccagaactggattccatgaaaatttacttcggggttaattgatgtttttgcctgctatctctgggcaaggaagactactg

SEQ ID NO: 210008 - DNA, 475 bp, Homo sapiens
ctgttgccttgtgaagaaggctcctgcttccccttcaccttctgcgcgattgtcctgagctgaaaagaatatgagaaatcggattttacgacatggttataggcggaagggatttgccttgtctcagatgagactttggactgtggacttttgagtcttattgcccagaggaaaccatatttacagtatgtccataggaactttcttcatatatcttctttttctgtcatgtagatactaattttaaaaacaacaaataccagattatatttgtttgacaaaaatacttctgaaaattatgcaattatgtgagtgaattacttaaactctttaagccttagtgtcctcgactataaggtgaggatgttaattcctatttcaaaaaatatgatgaggaatagatgagttaaaagcaaagtgcttagtaaagtgactgaaatatggaaaaggttcaataaatgctgcatgttagtta

SEQ ID NO: 210009 - DNA, 613 bp, Homo sapiens
actgacgtgggtataatgtgtgtgcctaattctgtgttgttttatcacatgcaaatttgtgtaactactacctcttcaagtaaaatgcagaactgctcccccaccaaacagatctctctggtgagacctctgtgtagccatacccactctctccccatcaacaactaatgtgtctccatcgctatcattttgaggaggctgagttttaaatcaacttccgaccctctcagcagtgtgaccttggataagtcatttgtccttttctggatgttgatcttctcagctaaagtaagacaaggttggctcacatcaacattcctcttgaatttccacaggctgatatgatctgaaaatgctacggagattatgagaaagaaaatggggttttatggtgaaataaactagggaaatgatgctttccataaatacataatgcttctttaccgtgaattctcagccctttaatacactaaggtgaactgtgaatcttctagtgtgggaggtatacgcagcattttccaaatttatctgaacacagaatgctccccccacccttaaaaaaatcctctagaaaaaaaatcacttggaatagctgccgggaatatgcttagag

SEQ ID NO: 210010 - DNA, 390 bp, Homo sapiens
cagccttcagaaattttttcttttctaacctgcctcagcttcagagcttctccctgtgtctcgcaggagttttgtgggtcacaggcagtgccggttgtaaagaacacagcccatggggtgaggagatgacacagcctttgggaggaagacagggctcgtgaaagagagagacgtgaaacagcagagttttcttggcctgaggcctgagacgctgcagtgagtttatagaatgctagccagttatgattgtttgttaagggacatttacatatcattcaatgttggccaggatcttttacaatcttttaatcaaatttgcaaagaacattacaaacttttaaaaaaatttactattagttattaaactggcaggagtgtacctgcatcaaa

SEQ ID NO: 210011 - DNA, 624 bp, Homo sapiens
taccccctaatggaatcagatagtcatttttctgaatgattcatgcatatgcttatttacaactatttcattttttcctgaatgcacgtaaaagatcactgcagcttaacagtatgcaaatctattcctactgtgaaatcataacagcagcaccagcctgctgagaactaagaggaaatgccacatatgaccaaagactaaattacctaccaaatcaagcctctgaaaagcacagacacatttactatggaacaagaatatgcaagaataagaaaaagttctagcagagggattagttagaataatacatgccgaaaagtgctttaagaagcagagacatcttttggacagacagaagttcattcaataacttaaacaatatttattaagcacctattatatgccaggtaccatgctaggatctaggaggttaaaaataaaaaagaagacttagtccttcccaaccctctcccagaacctcagtgtctaccatggggaaaaataagcaacaaattcaataagatgtgataaatgctgtgatagataatgtacaagatgctatgaaagcaatagcattataggatagcatggagggatcaaggaaagtttgctgaaggagaggag

SEQ ID NO: 210012 - DNA, 4317 bp, Homo sapiens
tgaaggctgagttctagagatcgggtcggctttctacgcggctctcgtggaacctagcaaagaaagacagtgaagactgcaggaccttccttcgcgcttttgttacaatccacacacgtcctcttgtccttgtctcccccagaagcagccgccttagtcttgtgagcgtttttacaccgggtagattgagacttggagtgctacactcagcccgagggcgtccagcgcggtggaggcgtggggtttcggctgagcccacagggcacagactgttcatccgcttctcatggcagcggcggtgctgatggaccgggttcagagttgtgtgaccttcgaggatgtgttcgtgtacttctctcgggaggagtgggaactccttgaggaggcacagagattcctgtaccgtgatgtgatgctggagaactttgcacttgtggctacactaggtttttggtgtgaagcagaacatgaggcaccttctgagcagagcgtttctgtagaaggagtgtcacaggtcaggactgctgagtcaggtcttttccagaaagcacacccatgtgagatgtgtgacccactcttgaaagacattttgcacctggctgaacaccagggatcacaccttacacagaaactgtgcacacgtgggctgtgtaggagaagattctcgttcagtgcaaacttttaccagcaccagaagcaacataatggagagaattgcttcagaggggatgatggaggggcctcatttgtgaagagctgtacagtccacatgttagggagatcctttacgtgcagggaggaagggatggacttaccagatagctctggccttttccagcaccagaccacttacaatagggtgagtccatgcagaaggactgaatgcatggagtctttcccacacagctccagtctcaggcaacaccaaggagactatgatggacagatgcttttcagttgcggtgatgaagggaaagccttcctggacacctttactcttcttgacagccagatgactcatgctgaggtgagacccttcagatgcctaccatgtggaaatgtgttcaaggagaaatcagctcttattaatcacagaaaaatccacagtggagaaatatctcatgtgtgtaaggagtgtggaaaagccttcattcacttgcaccacctaaaaatgcaccagaaatttcacactggaaaaagacactatacatgcagtgaatgtgggaaggccttcagccgcaaggacacacttgctcagcatcagagagttcacactggagaaagaccttatgactgcagtgaatgtggaaaagcctacagcagaagctcccaccttgttcagcaccagagaattcacacaggagaaaggccttataagtgcaacgaatgtgggaaagcctttagccgtaaagacacacttgttcagcaccagagatttcatactggagaaaggccttatgagtgcagtgaatgtggaaaattctttagccaaagctcccaccttattgagcactggagaattcataccggggcaaggccctatgaatgcatagaatgtggaaaattctttagccataactctagcctcattaaacatcggagagtccacacaggagcaagctcctacgtgtgcagcaaatgtgggaaggcctttggctgcaaagacacacttgttcagcaccagataattcacactggagcaaggccttatgagtgcagtgaatgtgggaaggccttcagccgtaaagacacacttgtgcaacaccaaaaaatccacactggagaaaggccttatgagtgtggtgaatgtggtaaattcttcagccatagctccaaccttattgtacaccagagaattcacactggagcaaagccttatgagtgcaatgaatgtgggaaatgctttagccacaactccagcctcattttgcaccagagagttcacacaggagcaaggccttatgtgtgcagtgaatgtgggaaggcttacattagtagctcccaccttgttcaacacaagaaagttcacactggagcaagaccttatgagtgcagtgaatgtgggaaattctttagccgcaactctggcctcattctgcaccagagggttcacactggagaaaagccttacgtatgcagcgaatgtgggaaagcctatagcagaagctcccatcttgttcgtcaccagaaagctcacactggagaaagagctcacgagtgcaacagttttggtggccctttagctgcatctcttaaacttgtttaacaccagaaaattcacacaagagaaaggccttatgaatgcagaaaatatgtcatcttgttcatcctcataggactcacaccagagcaatgctctgtgagtaccctttgtgagggaaccatcagctagcagatgagcaccgtatattcattccaccctggggagattcctgataagcaccacatatgtgggaggctttcatgaggtgtgttgcactttgtaactgtctagagctcttgatggaattatatcactgccagtgcctgtggcggaagccatcttattgctaccagctgtgtgtgtcaatcactccattttgctcagggaaggcagacttctgtgctttctttcctgttccctacaggtaatcatgaatattttcaaggacttccccccccccccacttcaccccctaccattgagggtcctcatcttttccctcatgattaggttctgagcaaacatgatctagctctcaccaaaaggacctgagctagggtctgctgggatttcctgacacgattttccatcttcatggacaatgttaactgtaaacgtgatagctgtgacttacttgtcttactgccaaatcgcccaaatttggaactgcttgtcccatgctgctctgatttatacagtgataagggcctattgtggcagtctttactcttggggattttgttactgtgtagagtggattgagaaaagaattgggttctgtcatgaagggagtagcaccttttgtgggcaccacctttatgtgcctcagaggggaccaaaggatggcagaaaactgttctcagtctagtttgacctaatttacactattgccctaggcttgctaggaaagactgaaaaaaatttttgtgcctaactttgtggcctggctgccaggatttcctgtgagcccagtgaggagggcatagttggtgcgaaaatctcctgtgcttgtggaagcaacataagttgggtcccttaactgtcacgtactccccagcactgttgagggattgctgtcttctgtacctgtacaggatcaagtccctgatatccagaaccccataggcaagtaacattgactgtaagacctctgtagggcaatgtgaaaatcatgattgctacagaagcactgagataatggagtggggatgactgtggcaaacaaaaggagattcgaacattctagaggggacatccacaagtctcggtgcagttatgatggtgtgggatgggagtgcatagaaattctcaggaccttcagacatctgtatctcctgtggccaaggccactgtcagaggaaataatctaaatgtttgtggattcctgtgtctccctgggcagttgacctgcacagacaggaacctcagcagtgacagaagagagatccagggatgggtcttctctgacccagccagcattccgagtgactgaggtggatgtggacatcattgcttaccaatttttaccaacattgaggcagggctcactctcctaaattgtagggagaggaatatggtaaagccaaaatagttgacagatctaactttcctagtggaacagtatatatagattttaatgaggaacatttatttaatagctttatggaggtatgattaacatgcaataaactgcaaatatgtaaagtgtaaaatgtgctgtttcagcatgtgtgtacacctatgaaaccaccacagtcaagatatccaacacaacaaaagattgtccctttataatcctcaatttttccttatcttgttttccacaattcacaagcaacagcaagcattttctataattttataaatgaaaccatatggtgtgtactttttagggggtggggctctggctttttcagtaaacataactattttaaggttaatccattatcttgttgcatgaatcaattgtttgctcatttgtattgctgcgtagtatttcagtatttcattgtataccacaatttttcttctttgtcaacttaattgttatggatgtttgggtaactttcagtttttggctattacaaataaacctctgaagatttgtgtgcaaa

SEQ ID NO: 210013 - DNA, 403 bp, Homo sapiens
gggctcaagtgatcctctcgtttcagcctccccaagtgctggaattataggtgtcagccactgtgccaggcaggtttggtttttaaaaatttctctttgggttactaaaagtgtttggcattacatgatttttgtagttatttgtgcacagttgtagactcaagtgaattttaaaatgaaattgcctttaaatattagtatggcaaaaatgaaaacagcattgcatagtattgtttatttatatgggtgacgtagataggtattttatttcatgggaacaatctaagatttatgatatggatcaaggattctagaaactattctcgtaaccagttttaaacaaggtcatttataacacctctgccctcccttcattgtactttatcattaaaaatcaacttcc

SEQ ID NO: 210014 - DNA, 950 bp, Homo sapiens
catgggcgaagcccggttctactaagaatacagaaactagctgagcatgatggagggcgctgtggtcccagctgcttgggaggctgaggcgggagtaatcgcttgagcccgagaggcagaggttgccgtgaaccgagatcgtgcaggcaaaggttgcagtgagtcgagatggtccctccagcctgggcgacaacagcaagacttcgtttaaaaaaaaaaaaggaaaaaaatactgtaacagctcatctaaccagaaaccagcaacctggaacattaaactaactatatacttcctaatctggtcaagaattcaggagtcaaaagagaaaaatccctgtgtaggtgctgggggttggcagtaattcttctcagtatctaaggcttaataatgccctccagtgagcagtgacatacacaacaacgaccgcctcactcgaagagtcttgaactccacattaaaaaaattatggtgcattaaacaagggcgaaaacaaaaattttctggtaataattagatagcatgactaaacagaccacaacatcccctgaaaattcaggctattcatgatttcactgttccatgaaacgcaggttctgaagtttaaatccaagtttcccttgagagttttaattcatgacttgaactaaaaaataaaactataaatttcaatgatctgggggtttatccttctagctactagacaggcaaaataatcttaatatgtggtaagttttactcattaactaaaatatggaaaagctaagatataaagatctgactaaaaccacaagattttatgacaaaagggcaactagtgtactcaaaattctttcacactttacatgaaatggcttattataaaaaataaaatcttgtgtaaactgattaatcagtttacacaatgatcgctctctttttttttttttttttttttttgggcaaaaaaagg

SEQ ID NO: 210015 - DNA, 214 bp, Homo sapiens
gaatgacagagccttgggagaagccttgggagaattaaaaactaaaaactttaaaaaaaaaaaaggaaaaaaatactgtaacagctcatctaaccagaaaccagcaacctggaacattaaactaactatatacttcctaatctggtcaagaattcaggagtcaaaagagaaaaatccctgtgtaggtgctgggggttggcagtaattcttctca

SEQ ID NO: 210016 - DNA, 175 bp, Homo sapiens
catatacaagtaacccattttaatcctcagactactgcaaaagttgagtattatccaacaggtatcactataaccattagacataactagtagaagtattggaaattcctaattagaccatcaagaacaaaccctaaggaaataatgtcaataaatacatcaataggccgggcgc

SEQ ID NO: 210017 - DNA, 353 bp, Homo sapiens
caagacggctcactcatatggatgctagctctttgtatgaggcctgttctttcccacttgcacttctccataggcctgcttactgtatggtagctggcttttcccggagtgagtgatccaagagacagggacagaccaagcaggaagatgcagtaactttttatgatgtgtattctattggctggccacacataccaagcagatagggaagggattacacaaaggcatgaataccatcaggctgggataattgggggccagcttggaatctggctaccatatccaaccaaataagaaattaatagttttaattaaaggaaaaggattatattaaatagacattcgttagtttt

SEQ ID NO: 210018 - DNA, 522 bp, Homo sapiens
ccagcctggaaacccctgtggcctcacccctctccagatggatcagtggtggagaccaggtacaggtgaatcaatccacagcggacccagagcttgagctggcccaaccagctgcttctgagacttggatgctcagaaactcaaaagcagcccaagggcaggtcctgcaaagggctgctgcgcattgactggcagccactcctgggccaggtatgtgctggtggtgagcagcagaggccgcgtgacagagccagctgcacaggtgagaggaaagtctaatttttgatgaccaattcatttctcaaagtttgagaagattcactgtgctctctttctggatcattccaataatcctgccctgttttcttcttgagcaagtctgagggtgtcttagattcctttttagtctttgagaaccttcagagacccaggttccatctttaccaaggagaaaactgaggcccaaggaaattgatttatgtaacatgctattgtgccaataattgaaatctgtctatgctt

SEQ ID NO: 210019 - DNA, 446 bp, Homo sapiens
ctgagacattgtcacaacccacaggaacctcagaagacatgacaactcggtgtaacgtgggatcctggaacaacaataacaaaaaaggagcttagggaaaaactactgaaatctgaataaaataggaagtttagttaatattgtattggtttcagtgtattagttgtgacatatataatgttaagatattaacaataagaataaacatggggccaggcacagtggttcaggcctgtaatcccagcacttgggaggctgactcaggcagatcacttgggtccaggagttggagaccagcttgggcaatggagtgcaatcctgactctacaaaaaaatacaaaaattatttgggagtggtggtgtagaccacaaccgtagttccagctatttgggaggctgagataggaggatcaattgagcccaggaggttgaagttgcagtgagcc

SEQ ID NO: 210020 - DNA, 354 bp, Homo sapiens
gaaacacaggaaggctggggaaaagtacatcagggaaacctaatctagcttcagggaggtggggctgtggggaagaagagtgttaggaaagagaagcacatttttaaaagatcgtcaattacagaagaaaacaaatgaatttcactggcctatcctaagaccattctagccaatcagatttttgcagcttggtttctgcccattggcttgtaatcagtatttccaagtgtaaaacaccagccattctttccttgaatcattttaagtctaaggggacagcatcagtaattagcagctcaggctggagttaatccctaaggaactctcatttcctgcctctatgtcagttttcgt

SEQ ID NO: 210021 - DNA, 348 bp, Homo sapiens
catgttgtgctcagtattacatgcgttaaaatgttcttagttgtgaaatttgacatgaccgctagttaaagttacaatggaagttttaaatcccgctttccgaaaactttgcagctatagcatgaagttaaatttttgtcttattttctggataagtttactatactggaacatagtaaagctctttttataaagagctttgaataaaatacctaatgatgtggttgaaacgaacacctattttcaaaactaatcttaagtggtatttcagtgcatatgttatgtaaaagcaatttataaactaaattttaagagccttcaaaatacaaggtactcgtatttaatgac

SEQ ID NO: 210022 - DNA, 386 bp, Homo sapiens
ggttacctggggctgggagtaagggggacagttgggagatgttggtcgaaggacataaaatttcggtgaggcataagaaataagttcaagtcatctactgtgcatcactatgagtacaattaataataatatattgtatacttgaaaattgctaagacagatttaagcgttcacaccacaaagaatgacatatatgtgaggtattacctatgttaattagcttgatttagtcagtctacaatgtataaaaatatcaaaacatcattataagcaccataaatatacacaattttctgtcaatttaaaaaactaaatttaaaaattagtaaaataacactagcctaaccagtttacagaggtggaatccgcgtattttctaattttag

SEQ ID NO: 210023 - DNA, 731 bp, Homo sapiens
ctaaatgttagttttcctgttactgtagagcaggagaactgatcctcttcacaaaagagggctccttgtgaggatgttaacagtctagctcaaagaaccaaagtgcctcagaatcacccaggtgcatgttaaaatccagattcatgggccccacctcaggcccacttagctgcaatctcaggaatctgcattataacaggctcctcaggtggttcttccatagcacttatttgcatgctactctcttaaggtgaggggaagcataagatccacaggtccctctaatgccataatttttttttctctccgtttgttattcactcctgttctctccactaatgttcacaaattttgtggaacttttaaagtcatgagaacctttcaagatagtaagatgaatcttgattcaaaattgtaaacaagaaaaaaagacatgccacaaatattctgcctgttgaaattagaaaaccagttaagcaatatggaaacctaattatctcaaatttctgtacaattcttcatctttacttaattgagggatagccattatcttttcttggatggaatcggttcattgggtcctgatacctctgcaaaacctgtaaaatgggcttcagatccagggacctctaccattggtgataagtgactcccaaacattttcatcctcagagaaggcacaggtgtgagccaaacccgcaaatagacggccggcatactggggggttctc

SEQ ID NO: 210024 - DNA, 346 bp, Homo sapiens
ggtgatagattaggcaaaccttctctgctaagtgcatgtgtgcatttcagctcaggaacaaaaataagaccctgttctacggaggctcttaaaaaactgacctgtgctggccccacacgctaaggtttatttgaggcgcccgaaggtgattagatccaggaggaggcgtttttctgcaatttagcttaggaactcagagccagccaaatgcttactgcagctgcttgttggctggttcaaaggtatagagctgctttaattaaaatcggcaggcgcgttttgattttggtcaaaatagattttgttatttttaaacttcctgtggaattaaaaaaaaagtattttt

SEQ ID NO: 210025 - DNA, 478 bp, Homo sapiens
catcacagagcgaataagcactgtgaagaaaatgggacgggggctatggtagtgatgggaatttagatcagatggggaggggcctaaggagacctttctgaggagtgacaaattggatcaaaggtaagcgacaagaaagggccacctgtgtgaatgggggaagggacacagaagagatgttagtgcaaggaggctgacacgcttgaagggagagtggcgtaagccgactattgatggagcctcctctgcactaggcactgcctttaatgctgagatgaggggtacccggctggggcctgtcagttgaggccagagaaattgcagggttagatcacatagggcctaggagtttattctgttctccaagcccctggaggttggcaactggaggctgacgtgacctgatgaatgtgtgcaaagattaccctggctgctgggcagggaatagactctgaggagcatgagtgaaaatggagac

SEQ ID NO: 210026 - DNA, 745 bp, Homo sapiens
ttgtgaaatgggcctgggtagataaggaaaagaacctccaagaggttaagtgatttgcggatttgcctaaattatacagaagagtcagaaccagtgcccaggccttctgattcttagtgcagtaaacactaagcaccatcattccatttcaccacactcctgtcttgctgttgtcctcagctaagaaagcctacccctgagttaccctcttccatcttagagccttcctgctcgctgtctgcccccctgcgatggggacttctttggcccttctcacccagcccagcctctgcccgtttccttctcctttccactgcgctgagctcttttctcctccgagaagccttcccttcatctctcctggccccattgtctcccgacctctttgggccattattagtgttcccgtgtggtttttgccaaccacgtaggaattccctgccttaagaaagtccactctcgggccgtgcgtggtggctcacgcctgtaatcccagcactttaggaggccaaggtgggtggatcacctgaggtcaggagttcaagaccagcctgaccaacaaggtaaaccctgtctctactaaaaatacaaaaattagccgggtgtggtggcttgtgcctgtaatcccaactacttgggaggctgggacaggagaatcacttgaatcggggaggcagaggatgcggtgagctgagatcaccccactgcactccagcctgggcaacagagtgagactctgtctcaa

SEQ ID NO: 210027 - DNA, 806 bp, Homo sapiens
aagagcaaagagttgcgttacaaagaacttgggggcccagacctgagccaggggagcctcatggctgcagcccccctgcacctggcaggagaggcccaggaggcacagccagctgctgcttgaggttgtgaccctgaaacctgtcccaacagtggacgtcaatgggcctgagagtcccccgaggcatcccattcctccaggtctttgctgaaacatcgccttctcagtgagtccttcgctgaccactggagataaaattacaggcaccttgggcccttgtgatccagggtagggtcctgagagcccagccaagtggggttagggttacctgggcaggagttccagagttctgggtattctgagcttggtccagaggggcaggaattgtgagctccaggtgggcacctccacgtagaaccctggaactctttatcccaagaggagggccagggcaggagcagggacttttaaaacacagggcccggggcagtgccctcttgtccaggtctaacggtgataatgaatggtggactgagggctggagtccagccttcagcctcagcatcctcccacccatgcctggttttgaggctcactgaccctccctcctgggatagccaaagctcccagaagggaagaaggtaaattgtctttgtatcccagtatctgacaccaagaaagtggccaccaaagaagcccactttgtgagaaccaatgggaaggagcctgagctgctggaacctattccctatgaattcatggcataataggtgttaaaaaaaaaaataaaggacctctgggctcca

SEQ ID NO: 210028 - DNA, 368 bp, Homo sapiens
ttcttaggaagtagaaaatgaaaccagatagaaatattgatctgctcacacaaaaaagaagagtacttgaaatggtaactacatatatattaaataaatgcattttaatttttttcttattgtttaaatctctttaaaagataagtgacaatgtgggctttatatgcatacatagtatgacaacaattgtacgaagtcctagaggggagaaatgaaagtatattattgcagggtttttatgctatgtatgaaatggtataattgcacttaatgtaggctactatatgttaatgatgtagactataagccctgggaaactactaaaataacaaaataaagagttatagctaataagccaacaaagaagt

SEQ ID NO: 210029 - DNA, 162 bp, Homo sapiens
tccatcaccctgggctatactgagatgaatggttgccgagcattatcacttcctagtatcttgcgtgctccttagggaacagaggggctgcttgtattcatctttcatttgggaagttcacacttctccagaacaaagtgagtttctagtagcagggaggga

SEQ ID NO: 210030 - DNA, 248 bp, Homo sapiens
tcgtctacaggatctcttatttctgttaatagttactctgctgagtatacaaatagtgtctactatctcaacccaccatgttggccaggctgttctcaaactcctgacctcaggtaatccacccgcctcagcctcccaaagtgctgggattacaggtgtgagccaccgagcccagcctttgtgatcatttttcttttcattttcaagtaaatcaacttaatataaaagtgcagaaaagtaggaaaaaa

SEQ ID NO: 210031 - DNA, 337 bp, Homo sapiens
ttccagttttggtatatgtgctgccgaagagagcactggactctcaggtccattctattggtctgcatgtctggcataaggatgtcattaccacactgtgctgactactgtagctttgtagaaggttttgaaattgagagtacaagtcagtcctccaactttgttctttttcatgattgttttggctcctcagagccccttgcaatttcatatgaatttgaggattggctttccatttctgcaaaaaaacttgttggacatttggcaagagctgcactgaatctgtagattgctttgggaagtattgacatcttaacaatatcaaatctccgtatcc

SEQ ID NO: 210032 - DNA, 1305 bp, Homo sapiens
gtctcctagcaacaagttgtaccatatgaggacggccgctgagccataatggagatatcaatgcctccacctcagatatatgtagaaaaaactctggccattatcaaaccagatattgttgacaaagaggaggagatacaagatattattcttagatccggattcaccattgttcagagaagaaaactacgcctcagccctgagcaatgtagtaacttttatgtggaaaagtatggaaaaatgtttttccccaacttaacagcttacatgagttctggaccacttgtcgccatgatattagctagacataaagccatctcttattggttagaacttttgggaccaaataatagcttagtagcgaaggagacacatccagacagtctgagggcaatttatggcacagatgacctaaggaatgcacttcatgggagtaatgactttgctgctgcggaaagagaaatacgttttatgtttcctgaagtgattgttgagcccattccaattggacaagctgctaaggactatttaaatttacatataatgccaactctgcttgaaggactcacagagctttgtaagcaaaaaccagcagatcctttgatttggctagctgattggctgctgaaaaataatcctaacaaacccaaactttgtcaccatccaattgtagaagaaccttattaaaaaaaaaatcctcgaaagaacaaatcatgaactatcttattataaaaggctgtacttctactgtttgaaaaaattatttctagggtttaagtaactacaagtaaaataaatttatttcttaaaaataaaaaaaaaaaaaaaaaaaaaaaaaaaaaaaaaaaaaaaaaaaaaaaaaaaaaaaaaaaaaaaaaaaaaaaaaaaaaaaaaaaaaaaaaaaaaaaaaaaaaaaaaaaaaaaaaaaaaaaaaacctttttggcgccccttggccccatttttttttaaatttaaaaaattttttttgtggggcccaaattagacctttttgggaaaattccccttaaaggggggtttaaaaaaaaaaaggggcggggtttaaaaaacgggggaggggaaaaaacctgggggtccccaaaaaaaaacccttggaaaaaaaaccccttttggcaagtggggaaaaaaaaaaaaaggccccaccatatcctcttttcaaaaatttcgcccccttaaaaggaaaaagaaaattgcaccccttaattttttgaaaaaaaccccggaaaaattttgtgaaacaaacccttttttttaaccaaaagggcccaaaatggaaaaatcctttt

SEQ ID NO: 210033 - DNA, 1182 bp, Homo sapiens
ggatctattcttgacaatcttgcataatgtaaatccaaatgtttccatttttaatggtcattttcttaaagtgattttgaaaactgtttaagtttccaattgatatagtatatattgaaaggaaatatgtaactgtttcttaacttaggttgtttttttttttcccatagatttggctagctgattggctgctgaaaaataatcctaacaaacccaaactttgtcaccatccaattgtagaagaaccttattaaaaaaaaaatcctcgaaagaacaaatcatgaactatcttattataaaaggctgtacttctactgtttgaaaaaattatttctagggtttaagtaactacaagtaaaataaatttatttcttaaaaataagtgttaaaggaataactattctatgaagcagataacattaaggtaaaatataggcttagagtatgattttaacaatgatgtaacactaggtaatggaaaactcatgtaagatgttgctagatgtttttgtttttcttaagtttgagaagtaagacataaagtttagttatacattttcccaagcacatatcctatatctaaatacataattaatgcacagttgagacagtctagtttaaaaggcttaggtccttttgtagtccataagcatggtgatttggtttcatgctcatgtgtcagatatgcttccctcaaaccttgttacagcatcatcacattacctgtttgatgtaaaaaataaaaaatagaaaggtgtaagtatataagtaattttttggtacaatgaaaatggccagaaccaggggatgatcttaaactaatcacttggataactattaggctggtgcaaaagcaattatggtttttgtcattaaaaaacaatggcaaaaaccacaatcacggccggtcttggtggctcacgcctctaatcccagcactttgggaggccgaggcgggtggatcacgaggtcaggagatcgagaccatcctggctaacacggtgaaaccccgtctctactaaatatacaaacaattagccgggcgtagtggcggcgcctgtattcccagctactcgggaggctgaggcaggagaatggcgtgaacccagggggcggagcttgcagtgagccgagatcgcaccactgccctccagcctgggtgacagagcgagactctgtctc

SEQ ID NO: 210034 - DNA, 743 bp, Homo sapiens
gtctcctagcaacaagttgtaccatatgaggacggccgctgagccataatggagatatcaatgcctccacctcagatatatgtagaaaaaactctggccattatcaaaccagatattgttgacaaagaggaggagatacaagatattattcttagatccggattcaccattgttcagagaagaaaactacgcctcagccctgagcaatgtagtaacttttatgtggaaaagtatggaaaaatgtttttccccaacttaacagcttacatgagttctggaccacttgtcgccatgatattagctagacataaagccatctcttattggttagaacttttgggaccaaataatagcttagtagcgaaggagacacatccagacagtctgagggcaatttatggcacagatgacctaaggaatgcacttcatgggagtaatgactttgctgctgcggaaagagaaatacgttttatgtttcctgaagagaagttgtaaacctttgagaagtggacatacgaggaagaacactgaagtttttggtttgtttttaatatttttagagcagaaataaaatttggtgatttttgttataaggaaaaaaatgcaaagcattgagcaaaattttggatttttttagtatgttatttttcctgttatgacttatttttccctaagtcatttagatctgttcctcagtattttccactggatattcattcaaataaaacagaaaactgtcttgg

SEQ ID NO: 210035 - DNA, 1615 bp, Homo sapiens
gtctcctagcaacaagttgtaccatatgaggacggccgctgagccataatggagatatcaatgcctccacctcagatatatgtagaaaaaactctggccattatcaaaccagatattgttgacaaagaggaggagatacaagatattattcttagatccggattcaccattgttcagagaagaaaactacgcctcagccctgagcaatgtagtaacttttatgtggaaaagtatggaaaaatgtttttccccaacttaacagcttacatgagttctggaccacttgtcgccatgatattagctagacataaagccatctcttattggttagaacttttgggaccaaataatagcttagtagcgaaggagacacatccagacagtctgagggcaatttatggcacagatgacctaaggaatgcacttcatgggagtaatgactttgctgctgcggaaagagaaatacgttttatgtttcctgaagtgattgttgagcccattccaattggacaagctgctaaggactatttaaatttacatataatgccaactctgcttgaaggactcacagagctttgtaagcaaaaaccagcagatcctttgatttggctagctgattggctgctgaaaaataatcctaacaaacccaaactttgtcaccatccaattgtagaagaaccttattaaaaaaaaaatcctcgaaagaacaaatcatgaactatcttattataaaaggctgtacttctactgtttgaaaaaattatttctagggtttaagtaactacaagtaaaataaatttatttcttaaaaataagtgttaaaggaataactattctatgaagcagataacattaaggtaaaatataggcttagagtatgattttaacaatgatgtaacactaggtaatggaaaactcatgtaagatgttgctagatgtttttgtttttcttaagtttgagaagtaagacataaagtttagttatacattttcccaagcacatatcctatatctaaatacataattaatgcacagttgagacagtctagtttaaaaggcttaggtccttttgtagtccataagcatggtgatttggtttcatgctcatgtgtcagatatgcttccctcaaaccttgttacagcatcatcacattacctgtttgatgtaaaaaataaaaaatagaaaggtgtaagtatataagtaattttttggtacaatgaaaatggccagaaccaggggatgatcttaaactaatcacttggataactattaggctggtgcaaaagcaattatggtttttgtcattaaaaaacaatggcaaaaaccacaatcacggccggtcttggtggctcacgcctctaatcccagcactttgggaggccgaggcgggtggatcacgaggtcaggagatcgagaccatcctggctaacacggtgaaaccccgtctctactaaatatacaaacaattagccgggcgtagtggcggcgcctgtattcccagctactcgggaggctgaggcaggagaatggcgtgaacccagggggcggagcttgcagtgagccgagatcgcaccactgccctccagcctgggtgacagagcgagactctgtctc

SEQ ID NO: 210036 - DNA, 1561 bp, Homo sapiens
gtctcctagcaacaagttgtaccatatgaggacggccgctgagccataatggagatatcaatgcctccacctcagatatatgtagaaaaaactctggccattatcaaaccagatattgttgacaaagaggaggagatacaagatattattcttagatccggattcaccattgttcagagaagaaaactacgcctcagccctgagcaatgtagtaacttttatgtggaaaagtatggaatgatattagctagacataaagccatctcttattggttagaacttttgggaccaaataatagcttagtagcgaaggagacacatccagacagtctgagggcaatttatggcacagatgacctaaggaatgcacttcatgggagtaatgactttgctgctgcggaaagagaaatacgttttatgtttcctgaagtgattgttgagcccattccaattggacaagctgctaaggactatttaaatttacatataatgccaactctgcttgaaggactcacagagctttgtaagcaaaaaccagcagatcctttgatttggctagctgattggctgctgaaaaataatcctaacaaacccaaactttgtcaccatccaattgtagaagaaccttattaaaaaaaaaatcctcgaaagaacaaatcatgaactatcttattataaaaggctgtacttctactgtttgaaaaaattatttctagggtttaagtaactacaagtaaaataaatttatttcttaaaaataagtgttaaaggaataactattctatgaagcagataacattaaggtaaaatataggcttagagtatgattttaacaatgatgtaacactaggtaatggaaaactcatgtaagatgttgctagatgtttttgtttttcttaagtttgagaagtaagacataaagtttagttatacattttcccaagcacatatcctatatctaaatacataattaatgcacagttgagacagtctagtttaaaaggcttaggtccttttgtagtccataagcatggtgatttggtttcatgctcatgtgtcagatatgcttccctcaaaccttgttacagcatcatcacattacctgtttgatgtaaaaaataaaaaatagaaaggtgtaagtatataagtaattttttggtacaatgaaaatggccagaaccaggggatgatcttaaactaatcacttggataactattaggctggtgcaaaagcaattatggtttttgtcattaaaaaacaatggcaaaaaccacaatcacggccggtcttggtggctcacgcctctaatcccagcactttgggaggccgaggcgggtggatcacgaggtcaggagatcgagaccatcctggctaacacggtgaaaccccgtctctactaaatatacaaacaattagccgggcgtagtggcggcgcctgtattcccagctactcgggaggctgaggcaggagaatggcgtgaacccagggggcggagcttgcagtgagccgagatcgcaccactgccctccagcctgggtgacagagcgagactctgtctc

SEQ ID NO: 210037 - DNA, 557 bp, Homo sapiens
gacctactttctggatccagtggtctaagagacaaataaataagcttcctagccatggagttaaaggcttttgcttagtctggctctgcaagtggggtttctacaaaatagaaattgacaaaagtggcttaggtatatgttttagttctagcacctagcacacagcaggggctcaataacgttcattgagtgaatggagctgcctgcattgctcatggctgattcactcactgcagcagcctgtgctttcatggatggataaatgatgaatggagggagaaaacaggatgctatgttgatgatatatgaaggcaaagaaagatcctattttttttctagatgactgtttcacatgctaaacaaattctggttaggactagtcaaaaatctttaacaaataattgatcaaattatattgagcatctaccttgtgctacccctttagaaacaaaattgctcgagatgatccacagaaagcacttattattgaatatgaattaaaatatttacggttattttcaacactgggaagcctagcacttgtccactgcactgag

SEQ ID NO: 210038 - DNA, 538 bp, Homo sapiens
gccatccagcaagcctcttgcacagccagacaatctgccactctgccagtttcctcgccagcctcttggttagcctcccatgcagccagcttctaggccagcctcctaacaagccagacttgcattccgactcttagccagattcagcctgccaggatctcagcaggccttttagcaagcgtttatggcagcctctcagacagaaagcctctcccacaggctctaggccagcctcccagtgagccagcctctcagcaagcctctatgctacttttcaagagagtccttcagtacaccagcctcccatgcagcccgcgccttggccagccttccagccagcctctagcataaaaaccacttaagaaggccctgttgcttcccttcaccctaaaacactgcagagagtgccctgaaatatttgaaatgttgaaaagctgaacctacaaatgtcaaaacacaaatgtatatttgttattgggaatgtttttctcaacaaaaattgaaacattaaaaataataaaatctaattacttataaa

SEQ ID NO: 210039 - DNA, 535 bp, Homo sapiens
ggtccccaactgtaacacagcgttgctgaggggatgatgtgggcacacgtctggctggggctgcagagcacacggtgcctccctgatgctccacggtgactgtgggcagagtcccctcctcggagccgggagcactgcttcctgcctggtaactgcagggcaccgcggacctggagttcggccccgtgtggccctgctcacctctgcctggggatctgagagctgccctaggcctcctgctcccatccccgctaaagccaacttcttcctgggcctcacctgccccagccatccaggcccagtctggagctgaccagtgggcagcccaagaaggtccccatgggtccctgggccctctgtcgtggcagcaggggagcagccctggctgccccaagccctccgtggggatgcaaggggagcgcccacccctcctgtttttctgtgctcagataccccccccaaccaactgtcattaaaataacaagtttctgttacaatctaaacattcccacatcgcataaagggttatattaca

SEQ ID NO: 210040 - DNA, 356 bp, Homo sapiens
ttattgatactgctgccacttcccgtaagtgactgcaaactccaatacgaaaccttggaaacttgtggctgcggagatgctgatgcaggtacccccaacgcattctaacatgaagtgttccttggggaaacagttgggcatttctgagcatgtcagcagggctctctgctttggccatctcatagcattttgtttcccctgactatcccgaagttacggatccggcttgctgattgctcttagctatatagtgcgcagatatgctagaggctgtctagctgggtgaactgttgcggttatcgttgtcgtacgtggcgacgagtgtgaccctgtctcccggaatttcaagggccagc

SEQ ID NO: 210041 - DNA, 786 bp, Homo sapiens
tgttcttctccttcaatattctgttgtatattctgggtcttttgcctttatataaactttagaatcagttttgatattaacaaaataatttgatggataattggataatttgattccacttgttcattgctgttacacaggaagacatctaactttttatacttattaattctatattctgcaatcttgctataattgctttttctaggagggtgtttttttgttttgtttgtcaattcttttggattttctatatggaaacaataatattatctgcagccaaagacagttttatttcttctttcccaacacgtgtagcttttctttctttttcttgtcttatttcattagctaggacttcaggtataactatggtgaataggagcgaaaggggatatccttgtcatgttctcaaacttaggggataagcatctagtttcttactattaagtatgatgttagctgtaggttatttggtagatgttctttaccagttaaggaagttcccctcttttcctagttagctgaaagtttttatcatgaatcgtagttggattttgtcacatgctttttctgcatctatcaatatgtatgatcataccattttttcttccttagcctgttgatgtgatgaattacattaactgctctttgaatgttgaaccaaccttgcctacccgggataaattacatgttgccatgttgtgtaattattcttatacattgttggatttgatttgctaatattttgtagtgtctttggtttttgtgttagggtgatgctgg

SEQ ID NO: 210042 - DNA, 443 bp, Homo sapiens
tggttcagctactactttagatgtagatcttgaacaagtttcaaaaatgaatgaaagtagctttttatgaatctgggcccgatctcccgattgcccctccagagcagctccctgcccttccctgcccctgaaggctgacctgtgagcccctttgggctgctgatggacctgtgctcccctatcctatacccatataaaccctgaaccccaggctccagctcagaccagcagaggaggagacgagacaagcagacaatgcagaacagtgcagcagagagaactcgagaggaattcagccagggtggtcagagaggagtttggctgctggacagcccactccaagggaagatcatcttcctactccatctcccctccttccagctccctatccatcctgccgagagccacctccaccgtgcattaaaacctcgcattcatccttc

SEQ ID NO: 210043 - DNA, 243 bp, Homo sapiens
ttggtcacacagaagaccaggacacagacaggacacctcttgagctttgctgccaaaagttcattctgctggatacacccgaaacatcaccctcaagttcaaagtttcacagatctccaggttaggggcatcatgcagtgacattctttgctaaagcaaaacaaatgtaaccttggctcctgttcccagtaaactcgtcattttcatctgagaccttctaagcctggcctttactgtccatcc

SEQ ID NO: 210044 - DNA, 563 bp, Homo sapiens
aatgtgtattgttagtatatctattctaatcattttatcttaaatgctgctcttgggagtgaatattcaagtgtgcatcaattttttgaatacttaccctggaagatataaactgggcaagtattttgtgctctgtgtatttttttactgcattagacattgaatagtaatttgcgttaagatacgcttaaaggctctttgtgaccatgtttccctttgtagcaataaaatgttttttacgaaaactttctccctggattagcagtttaaatgaaacagagttcatcaatgaaatgagtatttaaaataaaaatttgccttaatgtatcagttcagctcacaagtattttaagatgattgagaagacttgaattaaagaaaaaaaaaattctcaatcatatttttaaaatataagactaaaattgtttttaaaacacatttcaaatagaagtgagtttgaactgaccttatttatactctttttaagtttgttccttttccctgtgcctgtgtcaaatcttcaagtcttgctgaaaatacatttgatacaaagtttaaaaaaa

SEQ ID NO: 210045 - DNA, 852 bp, Homo sapiens
tattcagccttaaaaagtaaattctgacacaactacaacatggatgaaccttgaatacattgtgataagtgaaataagccagtcacgaaaggacaaagattgtgattacacttacatgaagttcctagaagaggtgaaatcatagaaaatagaatggtggctgccaagggctgagggatgggaaaaggggagctactgtttaatgggtacagagtctcaggaaggatgaaaaagctctggagatggatggtggtgatggttgcataacaatgtgaatgtacttaatgccattgaactgtacagcttaaaaggttaaagtggtaaattttatgttatgtatatttttacctcaattttattccaaaagtatatctgtgtttatgcccttcgttacccagagaggcatttagaggctggttcccaggactcccaggggctgtgttcactgtttggcaaacctttccctagaatcctcttcgaccagcagccccttggaggccccaacaatagctgaccccttgcatggccctcatcctgactcttcatctttctatgcagcatagcagtgggaccccattaaggacacttcctttatctagcgtctactatgtggccaagaaagagcaacccgggatgcatgacttttctttgtaagtttggcataaaattaaatatagattcactattgccctttttcttaaccgagcttctctgtcaaaaaagctaaacaaggcaagtaacaaaacagtcttaagcacagtgccatttttgttcttatatatgcacagagaaatttatggatatgtacaaagtgttaataacacctacctctgacggggaaaatgagcattt

SEQ ID NO: 210046 - DNA, 267 bp, Homo sapiens
gctgccttttgtggtcgactgggtttctgggcatgcatgggtgtcaagtttctggaaaagcaagcttctctaaattcattcccatttttctggcctggttaaaaaaaatcgtcttcataaactacagtgtatggggaaccagctggagatagaaagtggaggcacaacataatatgaactggaaaacagagaagctgctgaccgtcctgcacagggtgtggggagtttttcctgatctatttggttacttttacaggtggacaatta

SEQ ID NO: 210047 - DNA, 152 bp, Homo sapiens
atcgtacccagccaagaagtgctttctgtgggtgatgatatcttggctagatgtaaagggtgtgttggagttggccaggtgaaaacaaggggagaaaagtgttccgggcagaggaaggagcccttggagggaatggggaacccagagcttag

SEQ ID NO: 210048 - DNA, 577 bp, Homo sapiens
taagaactgagaaataggataaaggtaaaagtgttcattaggttttagaaagagtacttatagaatattttggaaaaaaatgacataggaaagcattacttttttcccttcaatttgattccaaaattttgggtgtctgttgagatctccatgtttttttttttttcattttatatgacaaaactagaaatattgtagttctgccttatcctcaggtgatgcctgaaatctaagatagtaccaaagtttatatacactatattccttcaatccgataacctagagggctactaagtggtcagtgtgtgggtaatgtagacagaatgaataagttgattcacatccagggcagaacagagtaggatggtgcaagatttcatcatgctacttagaatggcctgcaaatttatgaattgtgtatttccagatcacagaaaacaaaattgtggatgcgggggtactaaggtaacaaaactgtcatcttggttgttcctaaggtttcctgcattttagaaaattagagttaattataacaaaacaaagcactgagtgataacataaaggtcttatacattgc

SEQ ID NO: 210049 - DNA, 411 bp, Homo sapiens
tgtaaatgctacaccattttatatatgggacttgagcatccatggattttgtatatggaaggggtggtcctggaaccaatcccgcaagataccaagggatgactatatttttattatattacagcaaggaaaccagagtctttgaatctgctaactgtgcagaaaagatcctgagacatggctgggcacggtggctcatgcctgtaatcccagcactttgggaggccaagacgggcagatcactggaggtcaggagttcgagaccagcctggccaacatggtgaaaccccgtctctactaaaaaaatacaaaaattagccaggtgtggtggtgggcacctgtagtcccagctactcaggatgctgaggcagaggttgcagtgagctgagattgtgccaccgcactccagcc

SEQ ID NO: 210050 - DNA, 374 bp, Homo sapiens
atctcataaattcaatttctccatctagtggccttcccctcacccaggccctccccacctccctcctggaccacaacagcagctctaaaaggcttcccagctctggctatttcacagtccagaggcacccacatgctgatccccgcaaggcctcttcaggatggggactctagccactcaaattcttccattgctccccagtaacttaagtttaaatcatttagtcacatgccattcaaggccctctgggttctggcctccaaggacctttgctacctgatcttctccttagtggtttacacacatcattgcccagcaactacaaatcgattcctgcccactctgcaccccggcatttcccatccctacctatg

SEQ ID NO: 210051 - DNA, 304 bp, Homo sapiens
gagcagaaatgggcatgattgtgttgcagttcagtaaaaattaacaagttaaacggcttactggcctgtgtttacctcctgtgctgacttagctaatttggtgacattgcctcaatttttataactctgtgttgaaaaacatcaagtgcgatgctagaaatatactctgcctcttttctcttgtgtgtgtctacacacgtgtgcaggaagaaaataatgcagggagaatggtcagagtggcaggaactgccttagagcatgtgagtgcatttccaataaagataaaagtgagtgtctaacccaa

SEQ ID NO: 210052 - DNA, 488 bp, Homo sapiens
  misc_feature (448)..(448): n is a, c, g, or t
  misc_feature (467)..(467): n is a, c, g, or t
tcttcagtaggatgcaaattgaccaatcttttactcaacacccattaggtaagaatttcagcaatgtactgatccacttatctgctcatatttctccagtttatctacaaggatatcataggattttacattctttgcagaagtcacttgcatataacccagcttaagcggaggcttcactttgacctattcctctaggtccttgcaaatttttggtgttggtttttgcttgtggtattgcttgcatcatttatgcattttaaaaatcctgagcttgttacaattcttcctgtgtaactgctgatttcttggttttgtttttattgttgttttattatttttaggtacctctgcctttttattctgtatgtatgttatacttcaattaaaatatttttaaaaatatccctgatgccatggaaccaaaggacgagggatcctttaaagncgacttgagcttcaagctngactggccgcgttacaacgtc

SEQ ID NO: 210053 - DNA, 450 bp, Homo sapiens
gaaagagtattcctgacttacagactggggtagggggtggggaaaggagcaaacaaagcaagtggcttcatcaacatcccagagggaaaggcaggctttggaaaagaaccaagtgtttggaagttgacgaggagggtccacagccagggaccgcgcagtagagacgacagaggaacgcgacctttttttctaagtgcatctgaacttgcctttacttcggggctcccagtccccatcctctgggtcaacctagcagatcttcttgaaggctgacacccttcacatacctgtaggtagttctcctccccaccctgacccctgacccctagttccagtgggactgtcctccactgtagtcatacaaggagtctgcctcatctgcccctgtgcctcagccacagcccactgtgaatcactcggctccaaattaaaactccttccctctccgga

SEQ ID NO: 210054 - DNA, 175 bp, Homo sapiens
tggacaggcaaataattaattataaaagagggtattcaaaaagcctataaataagtgttcagcctcattagttatcaggaaaatacaaatttaaaataagatagtgctacacatctaccagaaaggctaaaatttaaacgactgacaataataagtgttgatgaggaggctgagc

SEQ ID NO: 210055 - DNA, 513 bp, Homo sapiens
atgatgtttttaactttcagattgggtcttaaagttgctagtaaattcaggtagcaattaagatgccaatatgagaatgtctttagcataccagtacgaaaatgattagaaagaggaatacttgggaggtggaaatgtatgtcaaatgtacataacagaaaggtggcatctgcatgaagtacaacagctactgacttctttaacagaggactatcaaaagatagacattgccaggcgccatggctcacgcctgtaatcccaatactttgggaaactgaagcaggaggatcgtttgtggccaagagtttgagaccagcctgggcaacacagcaagaccttatctctacaggatacttaaaaattagctgggcatggcggcttgtgcctgtagtcccagctactccagctgaggctgaggtaggaggatcagttgagcccaggagttcaaggctgcagtgagctatgatcatgccactgtcctccatcctggatgacagggcaataaccagtctc

SEQ ID NO: 210056 - DNA, 737 bp, Homo sapiens
attgttgcaattcttactatttttatttttcactcagttctcttaataactagcatgcctctatttcttttgtatgactttttgcagaaaaataattacatgtaaattctcgtttaggaaaggcctttatatttggggatcaagatctagttattaatgtatggtatttttatggaaatagctttattgaaatatagaacatataccaatagttattatatttatatttaatatatataatgttctaatatttaatatatataatgcactgatttttggtatatatacagttatgtaaccaccaccaaagtcaattttggatcctgtcatcaccccggccacattaattaaattaattaattaatgtatttatttattttcgagacagagtctcgctctgtcaccccggctagagtgcaatggtgcaatctcggctcactgcaacctctgcctcttgggttctagcgattctcctgcctcagcctccggagtagctggctttacaggtacgcgccaccacacccggctaattttgtatttttattagagacagggtttcaccatgttagccaggctggtctcaaactcctgaactcacgtgatccaaccacgggggcttccaaagtgctgggattacggtgtgaagcactgcacccagcacatttattttttattgattaatggtgggaacaatcttgaatgggcggcctgggttgagcttggggggtttgttttgg

SEQ ID NO: 210057 - DNA, 259 bp, Homo sapiens
caagtgcactttgctctccctcccccattcccctggtgtaagcataccacacagtctttgagttcacattattatttgtgtcatatagatactgttcacatgagccaggaagagtacaacttttttcttaaattatcacctctcaaaaaataactttgttgtctacatacgtgtcttccaatgagccagaagactccctatgtcagcaaatccactggtgccatgacttcccactgagccccctgacttcctgttctgc

SEQ ID NO: 210058 - DNA, 292 bp, Homo sapiens
gtgaaattttaggtatcaaccaaaaagttgaggcttttcttttgtgtaagaaatttccagctactaatcaaatgactatatataagtagcaaactatccccactattattaataaattacatatttttctttatcctatacaatttcataaatgtactcacattttataataactataatttgaatagtcatagtatattcatgtctccaaagtgctgggtcatgagttagatgagttaggcagatcatgggttccaagtctacctccctgggtttacacctgcaccattga

SEQ ID NO: 210059 - DNA, 466 bp, Homo sapiens
cagaactgggatggtgccactgtgtggtggacttgaccaatgcattcttctcaatcagcattgctccagagagccaggaacagtttgccttcatgggagggcgacaatggactttcatagtgttgctgcagggctatatgtatagccccattatatatcattttcttattaatgatgttatgttaacctctagttcttttgctggtttggaggccacaacacccctcttgcctgggattgggatgatgaggctgaaacagcccttctgatgacataagccctctgggtggttaaccagggtgcccatttaaactagatgtgcatgtaaccaccaatagagttggctagggcctatggcagtatatggagtgcttggaagcgccagtcagcttttagtcccagctatggaagggagctgagccccagtgttcattaataaagaagcagttagtaaccatatatgctg

SEQ ID NO: 210060 - DNA, 399 bp, Homo sapiens
tgctcacaaaaggaacttccagagaaagaacaggataccaagtctaaataaatttggaagacaaggagaatatcatagtttagttcaatcttttagacaaattgccacaatttatacgttgggataagagaaccatgagaaaaggtatattctaagtcctgaacatctttctataccctgaagatgtttttatagctcttctgctgactccctggcaaaaaaactatttacggtttggggtagggggcgtgtcatgccatacagctaaatacacttttttcctaatctaggaggcatgtctacttacaaataaattgcttaaactagttaggcttgtgtaaatgtaactgacatttccttgagatcagaaaaagttttgctgattaactatatttgtgt

SEQ ID NO: 210061 - DNA, 556 bp, Homo sapiens
ctctccggaataattgtcttcccccatccccacctggacatatcctattttttcccctcactgagcattctgtctacataaaccaaccactgtgcagtactttacataccttaacccagttaattattgaaataattgtatgagacatctgttactatgatactccttaaagatgaagacagtaaataatttgcccacagttacagtcagtgggtgatggaatcagagttcagatttaaatccagattttttaatgctaatgattatgtttttaacctataccctacatagccatcaatttaaaaaaactgacttgtaatcaaaatttattaagtagaggctggcacagtggtgcatgcctgtaatcccagcactttgggaggctgaggcgggtggatcgcttgagctcagaagtcttgaaactagccggggcaacatagtgaggcctcgtctctacaaaaaacacaaaaattagctgagtgtgacagaaaaaataaagattataaaatgtattaagtagaagtataatgctggatgagaaattaagtgagaattg

SEQ ID NO: 210062 - DNA, 335 bp, Homo sapiens
cgccaacggggaaagggaagcccccgtctctctaactgcatgttatcaggggtgagcctgcctttcctatcttgggacctgtgggctcatgttcacacctatctttctcaccttttttttgagatggagtctcgctctgttgcccaggctggagtgcagtggcacgatctcagctcactgcaacctccgcctcctgggttcaaacgattctcctgcatcagcctcccgagtagctgggactataggtgtgcgccaccacacccagctaatttttgtattttcagtagagatggggtttcaccatgttgcccaggctgctcttgaaatcctggcct

SEQ ID NO: 210063 - DNA, 827 bp, Homo sapiens
cccaagttcttaatcaaataaatgacttgaaaatatactcagtctttttattctctcactagagtcttttacagaatagacatttttcattttaattaagtctatttatcaatttattattttatggatcatttggtattgcatttggaaaaatctttgcctaaccgaaggtcaaaattcttctcttacattttcttctagaatttttaaagttttaagatttgaatttaggtttctaatccattttgaattggcgtttttgtactacattttttttccttcacctctatatgtagaatcaattaaggtaataatagtttctatctgaaatgtcctgctaacacacttacctatttcaatactcattctaccttcccgtctccctgcattttgttttttttttttacatcctttcacccaggctttagctcccatctccttctaagtcctcacgcccttgctgtgtctatgatactaatgtgattcagaccatttctctcccagtttctttccttcatatatatgcaattttaagtctttcttatttaaaataataataataataataataatgctttttgaagctgcatagctttctaactacataacattaacttgctttgttcttttcctataaaactattctcttgaaagaattatatattctctcatttctctctcttccaaccaacactgccaggtttctggcccagtcatcgcactgacactattcttaccatcaacacttgtgatttccctttgccacttatacagatcccatttcagcattcatcacacaggtctccctgggaggcatttacactgtg

SEQ ID NO: 210064 - DNA, 367 bp, Homo sapiens
ggatttgtctcattgatcatgtaggttgtacacgctgagtcttaataaaattcagttctgtgcagacatgtctgctcccctaaaactatataagcaagcacattatttggcacatgtctaatagaacaaaatgtcaggcaaagttcaagcatgtccacttagcctgtgctcttaatacagtctgccttattcagttggttacacaataaacatgtaatatattcaactatgataatattgtgctatgatcattttaatgattactaggaattaaccagtgtttcttgtctgtttttttagtaaactgaatgaatgagttcaacgtatacattttgggtcaaaatttaccatacctaaaactgcagaa

SEQ ID NO: 210065 - DNA, 863 bp, Homo sapiens
gagagagcctgttgtttttgtgctcatggctgtgatgtagtctgcctgaaaccatggttacggtttcacagggaagctccaacaagccacatgcgtagaactctagatttgtggtttgcactttggaaagcaggcaaacctttatggaatcccagagaactccatgccattctattctacttcacagatgtccctcatctctgcttccttcagcccccacaacagagctcccactcattccccatttcttttccatgcatggcctttgggccctttcctcatgaatgcagtgcatatgagagggggagtggaagggataactaatttcagaggtagaccttgactctgaaaacctgtgattttggagttgttgtttttggacaggaagggggtggaaaaaacttgacgctggtagctaggagatgggagccttttgcagtgtatgcagatgaggggcttggacagtggggcagagagcagggatgaggagcagcaggtctgcatttatccatagaacagatgttggttggagggagagtgtctttgtatctctggtgatgcttcactggggcacaccccaaactctgggagcttcaggacactgtccccaccttcatccctcctagtgaagcatgcagtgggaacttgtttggttatcatcctctaaggttctcaaattcatgttggatttggccctaggccagatcatctagtgcacaggcaagttttacagatgaggacattgagttccagagaagctagttggggaccgagggtcacatgacaagcaaaggtgggttggaagtagggccctcaccgcctgttgcccatggcttgtctgatggggagccgagcctgcccat

SEQ ID NO: 210066 - DNA, 490 bp, Homo sapiens
tgggctaaaaaataagtctttacacttggataagaaaagattttgtgagatatttgctgtggaggtgatgatcagtgcaagagtggaaagtttaagaggtgaatgaccactggtgtatttggctgatggtatgtcgaaccttagtatagcccgcccttaattaaaccttccactttaagattaaacttaatgtggttttaagactttgacatgtgtatcagttagtgttcattgtttctgaaacatagcagagaaaaactctgaataatacgaccaaggaaaagaagaatttatttgaaggatatgagatagctcactgaatcaaacaaaaactgtgtactacattgacatgtgacattcatccctgaaaggcctgagccaaattttttttaaaaaaagaccaaaaggatatattaatatgtgacacgtttatttttaaattttagcctttattaaaaaattaacgtaataaaaaagaaacctatgtata

SEQ ID NO: 210067 - DNA, 548 bp, Homo sapiens
aagacaggagaggagcaccacctgatgagcacacactccagccagttgttgctgggcgtgagcacatgtccagggttgccaaagcgcagtgctgaggaaagccacacacctgacagctacccacaaattgtttgaaatgctgggaggatcacacaagacacgtcttgtaagcctgtctgggtcagggactgcccgtttatcctgggcagtgcattgaaggtccagaatgtgccatccacagccaggctctattttcacctcctcccaccagtctgtcctctagtacaaactgcgtgctgttctccagcatgccatagtttcacaccctcatgcccttccacaactctattcagccttcagaaccaacctccaatgtcacctaaagggggctttcctgccatccctgctctcggacaagtaaccacatcgccacactgccgtgttgctctagacccatatctggaggcctccctgggttcctcccttggcctcagtgctggacaccttctccacccaggtgtcctgacagcttcattctctacatgtat

SEQ ID NO: 210068 - DNA, 592 bp, Homo sapiens
tactaaatatcattttaatctgctttctcttctaattctgatgccacctaaacctaacctacccatcacctcttaaaccaagtagagtctcatttttcaaataataaagcacaggtacatcttaaaaatcacttttatttgaattttagttggtgtggcatcacagggttagtatgagcagctgcactgtggatggaaacagattgagaaagtgttttccaggtgaaccctaaataaacaaaactaaatgcttgtctagcaaaacaagaaacaagatgtaaaaacacgcaaagctgttttcccaagttcaagggaacagacagcccctctagctgctactagatttcctcagtcagtattttttttgacttttgtggcttaaaaatacagtttttcatctgtattatcctatcacaaaatagttcgaaaataatgccaggtatatttaactgatggatataggtaactataatataaagtgtggggatggtgtccataaagtctagaaacagggaaatgtacatcatgatgtcaatggcatcttcaaggtgtaaaaaatttgtttattatttatgtgtttttgattttatga

SEQ ID NO: 210069 - DNA, 533 bp, Homo sapiens
aggcaaaggcgcagagggtaggggcaagcaacaggaagttgggctggcaggcaaacagcaggcctcacgtggcagattccatacctctcctgccatggctggccccagcttttcctccagaaagatccctgccaagaattagccaaggagaaaaaagaaaaacacacaaacaacacacacacacacacacaaagaaaaaagattacacattctgtacacagctaacaacaacaaaaaagggtcaaaacctcacatgctaaaattacaatggaagtgtgagcttcactctttcttaacaggtgaacagtggggcttgttttaactaaccttgtacggacttacggactggtagtcctatccagaaagcaaacatcaagtattcattagcataaccatcacaaactctcactacatccctattacataatactgcctaaagtttttccctcagaaaactgctccttcaattcttctctggtgtgtgttctcttgcctggcaaatcaataaactctgtgctcactttgatgatcac

SEQ ID NO: 210070 - DNA, 321 bp, Homo sapiens
acccaacaaggtaaaattcccaatatttagcatccaatcaaaaattaccaggcacataaagaagcagggaaatatgactcatggtaaggagatcctgacccagagctgtcacaaagattagaattagcaggcaaggatattaaaaacagttataattatattccgtatgttcgaaaagttaagtagagatacggagatatttttaaagacccaaataacacttctagagctgaaaactacaaagtctgaaattaaaaatatatccttggatgagattaatactgtagacattgccaaagaagagattactaaatgtgggcc

SEQ ID NO: 210071 - DNA, 545 bp, Homo sapiens
tagcgggaatggtggcgcgtccttgtagttcctaatcgggaggctgaagcgggatcccttgagcccagtaggtcaagggtgtagtgagcagtgatcaccacactgtacttcagcctgggtgacagagcgagaacctgtctcaaaaaaagaaaagaaaaaatatggctgggagagaaggggatgtgtccagtaaagaaagaagtgttgcctgtttcagtggggtgggtacctgtccaagaccttagaaattggacaaggcggccaggcgcggtggctcacgcctgtaatcccagcactttgggaggctaggcgggcggatcacccgagatcaggagtttgtgaccagcctggccaacatggcgaaaccccatctctactaaaaatacaaaaattagcggggcatggtggcgggtgcctgtaatcccagctactcgggtagctgaggcaggagaatcgtttgaacccaggaggcacaggtttcaatgagccaagattgcaccactgcactccagcctgggcgacaaaacaagcctatatctccaggg

SEQ ID NO: 210072 - DNA, 724 bp, Homo sapiens
gcagatatcttagtttgaagtaaaataaaaattgtagtctgatgtcactaattaaaactgtttacttttctttttttttgagacagaatctagctctgtcacccaggctggagtgccatgctgtgatcttggctcactgcagtctctgcctcccaggctcaagggattctcctgcttcagcctcctgagtaactggggttacaggtgtgtgccaccacgcctggctatttttgtatttttagtagacacggggtttcaccatgttggtgtggtggtctcaaacttctgacctcaagtgatctgccctcctcggcttcccaaagtgctgggattacaggcgtgagccaccttgcccagccaaaaccattttcattaggcacagagtattgcaaagattgtaattatcttgtattttcttttttttttttttttgagacgagtctcgccctgtcacccaggctgaagtgcaatggtgcgatttcggctcactgcaacctccgcctgccaggttcaagcaattctcctgcctcagcctctggagtagcacgcaccattattcctggctaagtttttatatctttagtagggacggggtttcaccatgttggccaggctggtcttgaagtcctgaccttgtgatctgcctgcctcagattcccaaagtgttgggattacaggcttgagccaccacgcccagctagcttgtatttaaaaaaaaaaaaaa

SEQ ID NO: 210073 - DNA, 332 bp, Homo sapiens
aagagagagggttgtagattacatgatgttctaatagaaggtaacagcataaggtcctggaaggcaaaggtattgtagattacctgatgtccaaataggaggaaatagcataaagtcatggaagagagagggttgtagattacctgatgtccaaataggagataatagcataaagtccttgaacacaaaggtgttgtagattacctgatgtccaaataggaggtaatagcataaagtcctggaagacaaaggtgttgtagattacctgatgtccaaataggaggcaacagcataaggtcctcaaagacaaacttgttgtagattacctgatg

SEQ ID NO: 210074 - DNA, 329 bp, Homo sapiens
tacagacatgagtctaccatgcccagcctggtcactactttctgagaatattttttagtctctgtaaggagaggtaggaaacatgtcagtcctcttagcagtgagcttgcaagttgttgttagaatatgttattgctctacgtgcttcattttcttggttaactatggagccactttgtctgatgactgtatagtcagttttccagagaaacagaaccaataggatatatagagatatagaagaggagatttattatgagaattggtttaggcaattatggaggccagaagtcccatgatctgccatctgcaagatggtagaaccgact

SEQ ID NO: 210075 - DNA, 131 bp, Homo sapiens
gagttagtattctcatgttccagcagagcaagtaatttatagtcatgttgatgatcctgtgtcaccaaacaaagattaatcatattctggattctctgaagaaggcattaccttttagaaaaaaaaattaa

SEQ ID NO: 210076 - DNA, 577 bp, Homo sapiens
gatagatagctagcaaaaaacattcgactgagcttcagaaacaagttctctggaaactgaaggacaaaacactggctggacattcctggcagtgagctacggatggcataacatagcacctacatctccttagccatttgttctagtttgctctacattaacaattcacaacaagaagagtggaaagtgttaaggagctaccatttagtgcctctgacacctcagctactatgcaagttgtttcctgtagcctacttcatttgatcctcagactgacttgctatcttctttgtaaaaatgaggaaacgagagctcagagattcaataatttgcccagcttcatatatttattgagtggcatgtgctctcatctatgcttaaatgtaattatgtgtacttaaaggcaaatatcgttctccattttccacatatccaagattttagggatgatagggtttctctgagttatggttggtaataaaaaagaaactttttcgtattagagtagtttgaggatagagcaattatcatgtaaggtatactgctcagagtctatgcccacctcattcaggccact

SEQ ID NO: 210077 - DNA, 282 bp, Homo sapiens
aacccaaaatgaagatccacttgtgtacaacttagtaagaaattaaccttttgccatatttacttcatctctttttgcagaagtttgttagcattgacatccactgtgtaccattcttcccattttcaatcccttttccttcctcctctctccagagataggcactcccttggtttttaatgcagtctgtagacatgcatattgctttgcatgtttttaaacattaacaaatggcatcatagtgtacaaatcattctgcaacttgctttttcactaaacatt

SEQ ID NO: 210078 - DNA, 241 bp, Homo sapiens
ttcatattataagacgttttaggaatattggatctggtagcctattgcctcaggtagggtcaaataccccatttaatattatataatgtttattaattattagtgtgaagtatagaaagctctcactttcttctgttgacaagtgtgacatggaattttacttggaattcagagttgggagaattctgagaacttagggactgatttgagtaataataaaactccagtctcccgtttaaaa

SEQ ID NO: 210079 - DNA, 859 bp, Homo sapiens
gtcgggagttggagaccagcttgaccaacatggagaaacccatctctactaaaaatacaaaattagccgggagtggttgtgcatgcctgtaatcccagctactcgggaggctgaggcaggagaattgcttgaatctagtaggcggaggttgctgtgagccgagacaccagcctgggccacaagagccaaactctgtctcagaaaaaaaaaaaaaaaaaaagaatctgttagacatggagatgtgtacatgcgtgattgacaaagctacagagcaagagagaggataatagtggtaatgagaaggatgagctcttggatgacttctagttttctgggttccatgctaaggtggatagtgacttccatttataaattagggaatataggaagatgcacgtttgggaacaaaagatgagatgtttggtttttgaatggttgaatttgaggtacctgtggaaccatatggaaatgcctgctaggtagttggatataccagtccagagtcagagaagttgggactggagagagatttgggagtcagcagtatagtagtatatacgttgtagttgaagtgatggtttgggtcagctaagaggcatgttgagactgaagagctgcaggctgaggagaggacttagagaacactggtagttaaaggtgtgactggtggaagtggagccccagaagaaatctgaggaggcctaaagatagatggaaaactagtaaagcctgggcgcagtggctcacgcccgtaatcccaatactatgggcctaggcgagaggattacttgaggccaggaatttgagaccagcctgggcaatataatgagacctcatctctattaaaaaaaaaaaaaaa

SEQ ID NO: 210080 - DNA, 424 bp, Homo sapiens
ctcccttccaccagtcacacctttaactaccagtgttctctaagtcccttccccagcctcccttcccctcagagaagttgggactggagagagatttgggagtcagcagtatagtagtatatacgttgtagttgaagtgatggtttgggtcagctaagaggcatgttgagactgaagagctgcaggctgaggagaggacttagagaacactggtagttaaaggtgtgactggtggaagtggagccccagaagaaatctgaggaggcctaaagatagatggaaaactagtaaagcctgggcgcagtggctcacgcccgtaatcccaatactatgggcctaggcgagaggattacttgaggccaggaatttgagaccagcctgggcaatataatgagacctcatctctattaaaaaaaaaaaaaaa

SEQ ID NO: 210081 - DNA, 671 bp, Homo sapiens
agggagtgctcgtcttttggaacaaaagacgagaatctgttagacatggagatgtgtacatgcgtgattgacaaagctacagagcaagagagaggataatagtggtaatgagaaggatgagctcttggatgacttctagttttctgggttccatgctaaggtggatagtgacttccatttataaattagggaatataggaagatgcacgtttgggaacaaaagatgagatgtttggtttttgaatggttgaatttgaggtacctgtggaaccatatggaaatgcctgctaggtagttggatataccagtccagagtcagagaagttgggactggagagagatttgggagtcagcagtatagtagtatatacgttgtagttgaagtgatggtttgggtcagctaagaggcatgttgagactgaagagctgcaggctgaggagaggacttagagaacactggtagttaaaggtgtgactggtggaagtggagccccagaagaaatctgaggaggcctaaagatagatggaaaactagtaaagcctgggcgcagtggctcacgcccgtaatcccaatactatgggcctaggcgagaggattacttgaggccaggaatttgagaccagcctgggcaatataatgagacctcatctctattaaaaaaaaaaaaaaa

SEQ ID NO: 210082 - DNA, 381 bp, Homo sapiens
acaaatgctgcttctgtggaattttgtgtttcattgcgctaagcatatatgagagatagacaatggattcttgctggaataagcccaacccagagaatgtctgctggggttccctgggccatgtgctcaactagagcaggagagtttgtacccacaagcctctgcccttgtcagtgtgcaggttctttcatatggtttttcatccctgatgtattcatgtaggcaggtcctgtgtgactgtcacgatatcaggtcaaagtctcatcttacagggaatgaaatacactggagagagacttcgctgaattcgctgttgtgaaaaacacctgtgaacactgtggctgaggatgccaaagaagaaataaacttttaaaaactatt

SEQ ID NO: 210083 - DNA, 285 bp, Homo sapiens
ccatctctcccatcagcttttgatcacactatttactctatttcaatactctacagcaatcttatccatgaaatatttttgaatcaattatctgaatgaatatgcacattttactccagggaaaaaatagagctcatctccactaaaatcctaatcattttatctttctaaaacaactgcagaaacattaaaatatcaatagatatctagctaaaagaagtacattattcctaagtcatgcaatcaaactgttaattttattttccatcattttaatataattgc

SEQ ID NO: 210084 - DNA, 1557 bp, Homo sapiens
ttttgtttttttatatagttatttgagagaataaaaactgaggacgagaagccttggaaatgaaagtagaaagtccgctcctatactcaccgctccgatgagtgttgtaccttggatttccagccaatgcaccaaaatgatatggctccaatgactggagaaacaccagggtccttcgtctcctgccaattagacaaatgacatggacacacgtggagtagttttaaggagtggaaagtttaattaagaaagaagaagaaaagctccccctgtacagaggaaaggggtacccgaatggagaaaacgccatgtgcagtggaaaagcagttggatatattgggaggctgaaggaggtggtgtctgatttgcatagggtccagggaattggtgtgaccagatgtgtcattcatgtagcccatgaaaaacctggccctctcaccctagtcttttaatatgctaatgatgggcgccatgatgtcctgcacacgtggtgttatctggagatggccatgacacctggcacaagttgtgacaaggacaagagagcgggaacggccctgttgggtggacctggtttctaatcaccagtatttgcatatcaatgcttgctggtctggtttttcaagctgctttctgttagaaaagaaatgttttgggggttgctttttattaaaccaaaattccactgagaaccattaccctttctagctgcctaaaaattatttcttagtaactcctgtattaacaacactatttacagttgcaaagtcacgaaacaaacaaaggtgtttatcaatctttgactgaataatgtactaataggtaatttgtgcatatacctgcaatactacatagctttaaaaaacaatgaagacaggcaatttgcagcaacatggatggagctgaagtccattatcctaggtgaagtaactgaaaggtgaaataactgaaaatcaaataccacatatttccacttgcatgtaggaaataaacatttagtatacatggaaataaagatgaaaataatagacactggggactccaaaatggggaagggtgagagaggttgaggtttgagaaactacctattcctatttggttaatgggtacactacaagcccaatcccacacagtatgcaatatatccatgtaacaaacatgcatatgtaccctttgaatcttaaaaatcactaaattgaaaaatatttaaaaagtacatttataaatattttattcatttaacttctataaaccagaaagcaagacctcaccagatattgaatctgccgccactttgaccttaaacaccctggcctccagacttgggagaaataatgtatttctgtcattataagctacccagtttgtggtattttgttatagctgcccaaatagacagactgacacaatccattattttttattgtatttttcagatccaagatttcttttttttttttatactttaagttctaggatacatgagcacaacgtgcaggtttgttacacatgtatacatgtgccatgttggtgtgttgcacccattaactagtcatt

SEQ ID NO: 210085 - DNA, 904 bp, Homo sapiens
aagcattttggcaacatttacaagaaatcaacaaaaacagttaacacatttttgacccagttaattttactttggagaagtaatggaataggaattccgaagaagcatgagctcatcattatagcattgtttacatccaccaggagatgaatgtttaagtaaattatggctgggcatttaatggaatttttatccttcaacagtgcttttcatacagttaatggaaaagaacagagtatgaaatatatgacaactcttcttaaaaatatgtaaggatataggcgaggtgcagtggctcatgcctgtaatcccagcatgttgggaggccgaggtgggcggatcacctgaggccaggagttcgagaccagcctggccaacatagtgaaaacctgtctctactaaaaataaaaaattagccaagtgtggcggcacgtgcctgtagtcccaactactcaggaggctgaggcaggagaatcacttgaatccagcagccggaggttacagggagctgagattgcaccactgcattccagcctgggcgacagagcaagactgtgtctcagaaaaaaaaaagtaagcatataaacttttcaggtacagttccctgctttttaaaataacatttcaagtcagcatagtgtggtggttaagataagccaggggcttcggaatcgttgatccttggcttcatattctggttctgtcacttcctattaatagctgtgtgcccttggatgagtcacttcacctctccaagcctttgtctgtttatctctaaaacaggactagtaatttctatattgtagggttattttaatcagaatgagctatgtgcatactcaaactacagttgtgggcaaactgtaactttaaaatgattcaggatcataacttcagttatttt

SEQ ID NO: 210086 - DNA, 357 bp, Homo sapiens
gatcaacacaaatttagtaatttggttatgacctcacaacgacaagtgttgggcattattgtaaacaactttttttaagaacagttaaagcagcaccacaagtgcccttgctatggggatcacaacccctgcaggatctatgacaaactgtcctgctatttagcaaattggtacttgtgataactgtgccatacatgaattttaaaaagtgctatacctcaaacaatctggaagggaagcaatatagggaagtaagatcaggagtttggttttagctgtagtttgagatgccttttaagacatcaagtgggaaagttaggtagctgttatataaaagttggctgttaaagggagaga

SEQ ID NO: 210087 - DNA, 433 bp, Homo sapiens
cagcctctgctcttgtatctgttaagagcagaacagccgtcccacaggaggctcagggcaccaaatatgctatgcagatgtatgctactattgattcactataattgcaaacacaaaaatacatttttcaagaatttactaaataattttgaaatgcactggagcaaatgaagcacaaactgcttttaggtaaagtccttcaggtgaaatagtacataatatgctacaataacttcagtatcgaatcactttaatgctgagctgtgctttctgagaactttttcttccttgaagtataacactgacagacttttagaaagcataaggcacagaaactgtcagagacatataagaagtaattctgagtttatgtctaaagccttagtttttgttactggaagttaggagttttctcaaagaatactttctggca

SEQ ID NO: 210088 - DNA, 193 bp, Homo sapiens
ccacagtccccagatatgtggtcaaacatgtcttgggtatcaatgggaaagtgtttttcagttgagattagcatttaaatctgtagactttaaaatcctacataatgtcagcggggctcatccaatcagttgaaggcatttaagagaaaaaagacctacaaagaaaagggaattctgcctcaagactgtcctc

SEQ ID NO: 210089 - DNA, 605 bp, Homo sapiens
atgactctagcacgatccccctttccggacagcgagcatcaattattcctgacaacagtccctctacaagactaactcattgcttcactgttcgtgcccataagcgtagatccgctttatgcgatttggggagaaagaccacaaagctgaagtgccaaatttatgatgtcctacgagaggtacccggtatcaacatcacatcactgaggatggtactttcatcacctgtggcatactgttcaccaggtttgtccactccaaactcccttttccaaccttttccatgctctcatctttagaagtaggtcattaagtgcagccattccaggagtggagagttccgtcccacctctttcagtggagaaagagctacatcaagcatttggaaccctctgaatgggaattgtgtctcttctctcatttatttgtttgtttatttattcaatcatttatttctatcagtctggactcataggtatttattttatatttccagttataatccaacactatgttatttattttgctgctcatcaccgtcccagctttggctactaggagcaacttcaggcgaatccctttgacacccctgccccccaccccac

SEQ ID NO: 210090 - DNA, 410 bp, Homo sapiens
acagggagtaaaaatcctttcaaatggcaactccatgcttgacgaatctatctcacaaaaatataagctcacatgcacagtattttttgtaatagctaaatattgaaataacttctaatcatctgtagtagaatagttaaataaatcgttacacctgtaccgtagaattctctgcagccataaaatgaatgtcatatattaattcatgtcttgatgtagaaagactcctagatgcaatgttaagaaaaagaaggcgaggggcggtggctcactcctctaatcccaacagtttggaaggccaaggaaggcggatcgcttgagctcaggaattcaagaccagcctgggcaacgtcatgggatagaacagaatagaatactaccaaactattaactatggtacctttggagaa

SEQ ID NO: 210091 - DNA, 134 bp, Homo sapiens
tacagtctaagccagaatctcagaacaggaaatccaaaacaaatttcataatgaaatatctgatataatgggatcagcatggaaataaggggctgtggtagttttatatggccacaaattccttggccaggtgt

SEQ ID NO: 210092 - DNA, 178 bp, Homo sapiens
aggtagtaggaagtgcggtttgttttttgctggtggggaaatggcagaatagaaaggtgcaatgacttgcctgaggttatacagagtttagtgacactcttgcatgcccatactagatgatttctcatttccaaggtcaagtcttttggttagggactgtcattcagttcgtgtaaag

SEQ ID NO: 210093 - DNA, 281 bp, Homo sapiens
gggaaatggaaagtaacttatgaatacataaaggtttggccctatatagatttctagaaataattaattccagcctaaggctcttgcattagtttcttaaatgaatcagatccttttcatccacagcaaacataggtagcatggaaatagaagggttgcagtgtatacacattgcacttccgtctaaatgtacacatcgacatagcctgccatatcccaccatcactcagaggactggagagaaggtaaaatccaaatagtctccaggattaagaagccac

SEQ ID NO: 210094 - DNA, 683 bp, Homo sapiens
  misc_feature (47)..(47): n is a, c, g, or t
  misc_feature (72)..(72): n is a, c, g, or t
  misc_feature (84)..(84): n is a, c, g, or t
  misc_feature (147)..(147): n is a, c, g, or t
  misc_feature (204)..(204): n is a, c, g, or t
gcttacgccatgtagagtgtgtttactgaaatgatcatgtgattttngtttttaattctgtttatgtggttnatcacatttgtngacttgcatatgttaaaccatccctggtatgtaacccacttgatcatggtggattatcttttngatacgttgctggattcagttagctagtattctgtgaaggattttggcatgtatgtncattaaggatactggtctgtagttttcttcttccctcttattacaattaaagaaggtttatggtgactgacttctatatccacctatgatccattcaacaccctggtctctcatttccttggcctttatatagttacctctttttctccccactacagccgcataatcacctggtcatacagttgatcttgctatcaccactaacagcacttatttaatcagaattttgacagtgacatccttccttctaactcacttaacttgggtacttctcattataattctccaatctcatcacgatgtccccacatcttaacacttactcactagccatcaccactttcatgccccctctttcctcattattcaacatagattctatagtctagcactctacttgctaactaaaatccttatctatctccttttgcctgtctttccttctgttctagatatctattacaacctcaactcaggtt

SEQ ID NO: 210095 - DNA, 461 bp, Homo sapiens
ggatgattacaggcgtgagccactgcacccggccatgaagaagtctttcttcacatgaatctgtcagaaacaattcccactgcggaggcctagagaaatcaaatattccctcttccaccctctggcagccaaggtgttagtgcatgactcagccttgaccagtcagatgctctagccagagactagactattgagtgacacaaagatgacacaatttataattcagccatgccagaggcagcagtatccaatgacagtagcagcagtgctcggcaacagcagtgtctggtggtggcaatgtctaatgccagcattgccctaaccagacttttcctgtgctctccctggctatggttcctgatggctggcttctcttgatttctgtctgtttataagactagttctctttctgagagctatctgacctctttacaataaatatattttctgtttaacggaga

SEQ ID NO: 210096 - DNA, 1463 bp, Homo sapiens
gactttagcctttcctgagtccaagaaaccatgaagctcacaattcagcatgtcaattctctacatcaactgaaataactggtgatgttggtactaatttaattggtgcctgcaccagcccagcgacccttgaacactcagaatttccaaacagagaattccaacattatcaggcatttcttcttgctgccaccacgttgcttccccttccaccatgattgtaagtttcctgaggcctccccagtcctgcagaactagacgggggtctcacgatgttgcccaggctgatctcgaactcctggcctcaagcaatcctcccacctcagacttccaaagcactgggattatagtcatgagccatcgcaggaggatcagggtgtaagtcagccagagagacaaggaaaattttggatctataggagaaagaactttcaaacagcaaaagtcacccaaaaatggaataccaacttctagatataaagggcaatgaacaaattgaaaaatattcttggagagaagcttgtgatactggcagctcaagaatggacagaaagcatggaaaatacatattgaacgttgagcactctgaaaaccagccggtaaaagaatattgccgcaatgactggtctatgtggaaagtcttcctggcttgtctcttagcctgtgtgataatgacagcaattggagtacttataatatgcttggtgaataacaaaggatcggccaattcctccattgttatccagctatccacaaatgatggagagtgtgtgactgtcaaacctggaacaccctctcctgcttgtccacctacaatgaccaccacttcaactgtacctgcaagtacagccactgaatctacaacttcaacagctacagctgccaccacttccacagaacctataactgttgcacctaccgatcatttataatttgaacagccatagccatcacttcaactgaaacttcaacctctaccacttcaactcagtttgcaactataatagctactcctatcacttcaagtggaatcatggctgcagtcactttaacagactctataaccgttacaacttcaacaaaatcaagtcctacttcaacttaaacttacttgacaactcaaataatcaccacttcgaccatctctttgactgaatcaacaactacattcccttcaactgaatctgcaaccacttccacttaacctataactactgtaacttctacttagcctacagtaacaatgctcatcactcttttccaacaatgtataatctccacctattcatctgaggactaagctctgatttttcatcttgcccaaattcctttctaaggggtatggggagtcatgccctacaaaccataaattctcatcagatgggttttatttaaccctgtatattgtgacttactttctaatctgactctggcataacaagggaaaaaaatcaaaatgtttt

SEQ ID NO: 210097 - DNA, 769 bp, Homo sapiens
aattaagtgaggacaggtatgtgaagaggctcaaaggatttctgaagtgtggcaggttccttggccttcacaagaagcgttggaggagctgcccctgcccaccagttcagcctcatctccgacctcatctctgagatgagaatcttcttctcagagctacaaccacacaaaactgcttgccaccctccagcacacaactccaggcgttcacacctgccatcccctcttccaccttggcctgaaaggtgccttttcattctcaatgccctgctctacatgctgctcctccatgaagtcttccttgcaccccctcttcccccagctcagtgcttccttaatgaaggccccacagacattagtgctgccttctgatatagtactgatcacaccccagggctcccctgcaccccgtgttcaccatcccagaacttgccttcagacaatagttttagtgtctgcctttccaaccagaacagtttcctgaagagcagtgattgtctgactcctttgagtaaccccaggctcagcacatagtaggtgtacctatgtgtttaatagaaactggtggaggtggagatggtggggcttgtagattagctgtagtagcaacggtgacgcttgcatactgacggaggtagtgatgatagcgcataaatactttcactgcaaaggcagtgcttgctccaggatcctgtgggaggagtactgcccactgccaagaacacaggacaggctaggctaggactggtgggaagaagtaggtggtatg

SEQ ID NO: 210098 - DNA, 496 bp, Homo sapiens
gtcctcgtcctcgtcctcctcctcctcctcttcgtcctcctcgtcgtcatcttcgtcctcttcctcttcccaagccaagaagcccgatccgcccctgccgcccgccttcggggcgccccctcctcccctctttgacgctgctttccccactccgcagtggggcatcgtggacctctcggggcaccagcacttgtttgggaacctgaagcgaggagggcccgcgtccgggccgggggtgacgcctgggctgggcgctcccgcgggggccccagggccgcttcctgccccctcgcagaccccgccaggaccccccgcggcggcggcctgcgaccccaccaaggacgacaagggctacttccggagactgaagtacctgatggagcggcgcttcccctgcggcgtgtgccagaagtccttcaagcagtcctcgcacctggtccagcacatgctggtgcactcgggggagaggccctacgaatgcggcgtctgcggccgc

SEQ ID NO: 210099 - DNA, 246 bp, Homo sapiens
gtctcccagtgttaaacaccatattctagaatacatgttacttatcactctagatgagctgtctaagtccaaaacagttacccaactattcttaatttttagtcctttcgtctctcatcccacctccttgcattgcatttttcaggcatcaagggtatatgacctttttattgattgattgattgattgattgagacggagtcttgctctgtcaccccggctagagtgcagtggcatgatcgtggc

SEQ ID NO: 210100 - DNA, 715 bp, Homo sapiens
gaccactggatcactaactcattctgcaggctcccttcagcagccaggccagagcctgacatgctccaccctgggtgaagttgtactgaatcacagaacagccttcctccatctcccacgacaaacagacaaaaaccaaagagtggggaaagcaccttattgtcctcattgtattgggaagggctctcaggacatatgaaacctgtatcaagaagatctggtaagaatcaacaatcttgtagctgctgtgaatgcaacagctgtcatgccccaaccagggcatgctttgatgctaagactggatgtttcacaggcaaaggatttggctacttgttagctattaacccagcttggagtgcaacagtctaataaccttcattccccaaatcagaacaagaaactgcatcctctagggcccaccatgaacggctgtggccacttcccactgcggccttgaatggatgggcccagggatgggcaggagacagagcatcgggtcttaatacatttttaaaacctacctagcaatggcaaggtaaataaattaagtggacagaaattgttttcgtgggggaaaaatactcttcaatttcccaaagtcttgagtccttccaagagttgagagtagggagttgacatgcaagcctctgagctggaggtgggcttgcagagtgagcttaaaggaaagagatccagttccccctctccagtgagg

SEQ ID NO: 210101 - DNA, 521 bp, Homo sapiens
agaacaagagagggtgggaaaataagaaaggaaaatagaacattttagggaaagggaatagtgtgtgcaaagatgaagaagtataaaagaaaatgtagcttattccagaaactgctaaaaggatcaatatgctgtcgtgtcatgagagagccacaattcttcaaacatatttaactgctggagagaatggctcagaatcccaggtatcagcttcagcacacagataaaatataagaaagaatttgaggttgatgtcagaagcatttccaacagggctaaggaagtatttttttggaagatctcttcttggcccttgacagaagaagcagagtaacttttcttaggtggcataattcttcaaaatgtgttcattttgaagaacaggggtgatggatggtaatacacaggcagggatcaacagtcccagaactgaaggaagagttgacaaatgtatcaaagatgcctaatcaaaatgtgtccacattctgctaaataaattctggttgagcagaactaacaaa

SEQ ID NO: 210102 - DNA, 428 bp, Homo sapiens
ggagctgtgatgacgctcactttacaggggagcaaataaagcagagaggttgagtgatttgcgccagtatacacagggctggaggcaaagccaggctgtctgaaccactgtgggttactgaacgatagtgatactgaagcactgttgattcctggccaggtgggggccagttccccgacagctcacagccctcccaacccagacaatgacagagagaaaggaaagaaccctcaggggaggcgttggtcctagcagcatgttctggagaaagaactggagaaggaattggtgatttactgtcctgccagtatctgagctgctgggagggcaccctgggatgctctgagaagattttgccaggagatcctgctctgtatcaaaaaatttgaaattggaaatggtggaccaaatgctgggctgggtaatgc

SEQ ID NO: 210103 - DNA, 585 bp, Homo sapiens
aacatcctattaaaataattacattaagcacaagataaatttgttacattttgtccttataaaagaattaggaatgcccctttagaagaaatagctcttcttttttacatcaccttgaaatagtttcctcttgagttaatcctttattagatttatgctgttcatgtcttcttttgattgcagtaccagtgtattttgtgagagttgcagaattaattgttgaaaaattcatgtaagtgcttttttattagtcacatgagactgactatagcacattgttaccctaagtttttttctgaactcttaaatgtaagtaaaatttttaatatttgaaagtatttttaaaacaagaactcaatatttgatatgcattaatgtaaggtctacataaaatgtagcactttaatttacaataaaaaggaaaaaatggctgagtacaaataatattagcagtgtccagacaggcgcggtagctcacgcctgtaatcccagcactttgggaagccgaggcgggtcgatcacgaggtcaggagattgagaccatcctggctaacacagtgaaaccccgtctctactaaaaataca

SEQ ID NO: 210104 - DNA, 251 bp, Homo sapiens
gtgatgtgctcggggggcccgatttcctcaggcttaagattccttcttgagtgaggcaagcggcttgcagggcgagcctgcaggtgagccgcatgtgtcggccgacgaatgaggtgatgacgctgtacattaggccaagcaataagcgacgggccggggcgaaaccccacatgcgccgcagactcctttttccctcctctgtcagcctctctgagcccgggcctgggaggctttagtagggttaattgggg

SEQ ID NO: 210105 - DNA, 584 bp, Homo sapiens
acgttcagctacccacctgcgtttcctctctcaggaaaagcctcaccatccacccaggtgccaagccaggacactgggagccacttttgcctccctgtccctctcccctcatccaataagtcaccaagtcctgtcaattctcccttcaacagacctttcctttccttcctgggcacacccttgagtggtgctcaccagggaacagatgtggcaaatgttccaggctggcctcacccgggtctctagacacttggctcagaggcagaacatggctaaccctagataagccttgtgtgaattcctggcaagaaagtcccctgctgtcttagtctgtgcattctctgactagcacagtatgtggcgagagcaggtgttgaggaaatgtttgtctaattctaaggggcctgccaggccttgatacaaatggcgtcacatttacatgaataacccagagtttctctaattatcctcacctgcctgcccaggaccttcaacctcatctgctaagtcggcctcaggcgtttctagacatcttaagggaccgcatggcatccaaggccactggcatctactgtactcccctc

SEQ ID NO: 210106 - DNA, 393 bp, Homo sapiens
tgtactgtttaagaactcataggagactaataattaatttactataattttaaaggcaaagagttttatattaattttactgttgcacaagcagttattggaagtgggggaaaaaaagaaaactggtgagagaaattacatggaaattataggaaaaaggaacttgaattggtaatttggcaaagatttgggaacaaatagtttgaacatagatttctttcaccttatatgatagaaacacaaggcacacgtgagctgtatagtgtgctgagcacacccccagaaaacaaaaaatatcacattgatgaagtccgagactgtatctagatcttagcataactagtgaattcagggagcacatcctgctgctgaaattgagaagtcagtaagaag

SEQ ID NO: 210107 - DNA, 415 bp, Homo sapiens
cttgatgatatttccactggaggcagcctcttcatggtaaagaaagctgccagaaggctctggcctgaactggtctttagaaacagacagagtaccctgaagacacagctggcattgccaggaaagtagtccactgatgggaaagcagcccaccaatgctgctctgagagcatgcctgagggtgtaggtggaactaccagtggaagtcatttcctggagttgcttggaagctgctaggtggagaatgtgagcagatagtgggtaggacactgtctgaggattactggaatcccatgacaaaaataaaaaataataaaaggaggattgaaacttggaagagaggcatacttctgagggttttgcttggtactgtaactccagaactctctattcacaaagcctagaactatatcac

SEQ ID NO: 210108 - DNA, 322 bp, Homo sapiens
agaacatggatgaagggtatctcccttcctctctttcttcctatcacaatttataatggttctttttcattttttttattattttaaaatgtattttaagtataaattaatagttacaaatcatagtactgaatttttctctcagtacattcttcaagaaaatcaattgttgggactgcttaggagggagagcctgtggtgagtttacattgcaagttccattggttgtcatgcagtgaggccatggagagcattcgttttgctgctcttaacttcatcagtgcttttatgctgacagtttttgctggtgcaacacattgaa

SEQ ID NO: 210109 - DNA, 321 bp, Homo sapiens
aatcttaggcaagtgacttacactctgagcttcaatgtccttgtctttgaaatggggtgatcatatgctagttgttatttatatgtaaagcattgctgtagcctgcacaaattaagcatcgtgacttgtcctgcctgctgtgccttagagagcctgggtcccgggaggtcttggggtctttgcagttgagagcattgaattgtgcagtgtctcagtgactgaaaccaccatagaaggtaagccagtgtgtgacacctggaggaacagctggttagtttatgaattatctggaggcattggctttgctttcattcagccaca

SEQ ID NO: 210110 - DNA, 566 bp, Homo sapiens
  misc_feature (538)..(538): n is a, c, g, or t
  misc_feature (542)..(542): n is a, c, g, or t
cccctttgttttggcctagttcttcctttgggaacagtagtacccaatgcctgtaacgtcattatatcttggaagtaactaacttgtatttgattttacagacccataggcagaagggacttgccttgtctcagaaaagattttggacttggacttttgagttaatgctgaaatgagttaagacttttgggggactgttgagaaggaatgattatattttacaatctgagaaggacatgagatttgggaggagccaggggtggacttataaagcttggatctgtattaccacccaaatctaatgtaagactgtcatcctcaatatcagaggagggcctggtgggaggtaatgagatcatgggggaggatttcccctttgctgttcttgtgatagtagtactcaataagatctgtttgttcaaaattgtgtgacacctcgcccctctttcttttcctccaatttcagccatataagatatgcctgcttcccttcttcatttcttctttagtagctattaccttcttaataatttgactnttgncctcctttttacccctacccatgg

SEQ ID NO: 210111 - DNA, 379 bp, Homo sapiens
agtggcacttgcaagagagcatcagctatgggagtatggggggggaacatttggtaggtggggccccataactcccaagagtatatgcccattgtcttcagttaccagggtggtaggaaaggaccattagatggtggcagggctaggcatgcctgggcttggactctacttgggcaggtcttgctgcaactgctgtgggagatgggggtgaggttcccacgtcagtggaattatgttcctaggaggattatggctgcctctgttgtgtcatgcaggttgccaggaaactgggggaaagacaggagtcacaggcctcactcagctcccgtctaacccaaatggctggtctcactcccactgtgcccccccgccaagagca

SEQ ID NO: 210112 - DNA, 449 bp, Homo sapiens
cctcaactagccttgtttccagccttatatctaggacttgactcagtttatgtacctccagtggctgaggagacccattattttctccttctctgccctgctaagccccttcccaggtgtcaggagatgaggctttgctctcccacagctctctccatggcagttaattccagctccctccttttgatgctcagaccaaaaaccttggtgctttcttgactgctattcttctctcacacttatatccaatctgatagcaaatcctgttgacttaaatatcaaaatattaatatatacagaactcaactacttcttatcctccctgtaattatctccgagtccaagccaccatcatctctcttgttataacagcctcttaatgggcctcctgcttctagccgcactccctacagcctattctcagtacttttaaaaacagaataaacctt

SEQ ID NO: 210113 - DNA, 122 bp, Homo sapiens
tgagcctgggaggtggaggttgcagtgagccaagattgcaccattgtgctctagcttggacaacaagagcgagactccatctcaaataaataaataagtaaatattgtctgtagatcttttt

SEQ ID NO: 210114 - DNA, 327 bp, Homo sapiens
aaggtgagagtctaaagttaattttctttgcgtgtgaatatctagttgttccatcagtatttgctaaaaaaaattattctttctttattgaattgcctttgctcctctgtcaaaaacgaatggctatttttggtggctattgttgtgtgggcttatttctgggctctaaattctgttccactgatctatttgtctgtacttttgccagtactacactgtcttgattactgtatgtttatattatagccttgaagtagtagtagtgtcagtcctgtaaatttgttcttcttcaataccatactggctatttggttttgcctttccatg

SEQ ID NO: 210115 - DNA, 758 bp, Homo sapiens
caggaggaatgttattgttgctagctttatcctttttctcccctgcattacttgaggtatttcccatcttgaaaagggattggggtgaggctcaatttcccctactagaaatttcttcccagttacgagaggtttgtataaggctcaacctctcctactggagatttctcacctttcctttcctttccctttccctttcctttccctttcctttccgaggctcaacccccctgctggaggtttcttgcacttttctcctttcgcttcatccttctctggctgcttccctcacgggaacgttggtttcctcttagcaatggctgtttcagtagaaacccctgacccagactcctttacagaagggctaccttaagctgtataaggtgaccacagaactgcagatctggactgaacacttgctttgcactcaattgtgagtctcaacacacactttcaatctccaagatatcccaaccaccaagaaaatactttgtcgctcttgtgatgtttcttacgttggtctgtgcacatagttacctggtcaccatggtatgtgaggatccttttctcttaagttgttggtctgttcctttccagactgctgagagtccgggtttattcatcacactgggtgggtcctgatccctcaccatgaggccacctcaatgaggcagtgggatgcttctcctcactattggtgactggagacccttttctcagaggagaatgggaattccggacgagcccccagattgtta

SEQ ID NO: 210116 - DNA, 615 bp, Homo sapiens
ccctttcctttcctttcctttccctttcctttcctttccctttccctttccctttcctttccctttcctttccgaggctcaacccccctgctggaggtttcttgcacttttctcctttcgcttcatccttctctggctgcttccctcacgggaacgttggtttcctcttagcaatggctgtttcagtagaaacccctgacccagactcctttacagaagggctaccttaagctgtataaggtgaccacagaactgcagatctggactgaacacttgctttgcactcaattgtgagtctcaacacacactttcaatctccaagatatcccaaccaccaagaaaatactttgtcgctcttgtgatgtttcttacgttggtctgtgcacatagttacctggtcaccatggtatgtgaggatccttttctcttaagttgttggtctgttcctttccagactgctgagagtccgggtttattcatcacactgggtgggtcctgatccctcaccatgaggccacctcaatgaggcagtgggatgcttctcctcactattggtgactggagacccttttctcagaggagaatgggaattccggacgagcccccagattgtta

SEQ ID NO: 210117 - DNA, 508 bp, Homo sapiens
attgatttattttcatctttgaatgctggctgatccataacgtcttcaatttgaagttcctctacgaaattcaataatagtcaatataaaaatagttcaaacattgccacattaaccaagtcagtgcttcaaaggtactgtcctatccatttcattagtaaacttgactgaacaagaataagactaacattgattaccaaaatgtgaccccaaagagaagccagtttccaggaaaatataatccaatagaacacaagaagtaaaatacactgagagcattaatagttttctgttctgaaaaataaatgctattgcttatacaagacttgctatagccatctgaaagctccaattctcttcttttaccttgggttttctttctcattattgtgtatgggagagtttactctcaaagtctttatccttgcaacggagatgatgatactaccttagagggctttgtaagaactagagatgatatacgtaggtgtcttgcaaatggtggtta

SEQ ID NO: 210118 - DNA, 653 bp, Homo sapiens
atgactgtacgaagaattacaaaactagtaattacacatagatgatcaactatatcttaggggagagctttcacatttatttttaagcgccaaaatggtatctagaacattttatagaatctagaataatatttgagggaattttgacactaaatcaacctgaagatgaatttaagattacaactgatactataacaatatgaatttgaactgtgcaggtcaacctatacatagattttcttctgcctctgccaacctctgagacatgaaggccaaccactcctcctcttcttcccctcctcagccctctcaatatgaagacctctcaatatgaaaaaggtatttgcctcatatatgtccaacgtatactgataatacagggatgggataagtgcttgggatattcccactcaaagagtggataaacagctatacgccaggcattaccatagcaagcctgaaatccacatgctgccagttccttggctggagggccgagtcctgctctctggaatgattctctgcggctcttggatccaccctccagactcttgttgcaccttctgagttgtcccctttccataagaaatagcactttcagctgaataatcttctcagcttatgtctcacccataaaagtctgggggctctaa

SEQ ID NO: 210119 - DNA, 569 bp, Homo sapiens
ctttaccattcttccatggaagaagacaaaattcatctgagtgtagaaactaactatgctatggctcaggccctctgggtatttctcctcaggaactgctcacctgtggggagagtgacttgtggtctgcttaccccaaaataattcaatactcaaggctgggtggactctacagggcaatggtgtgactgaccagctctttcattgaagacatagaaagtacaagcagacccttctggcaggagctctaacatcagcttccaatctagatttcatcagtaataaacattttggtttctatctcagactcccaaatcgttcaattggacttgaactcagaagggaaactggatgttacttattgaactccaggtacacattatgtttcattaaaaaatatctatacaattatgacatcaagtagatgtcattggctactagaattatgtgggaaaacccttgtttgagtaagaggacttactatgtaaatatttttgaaaaagtggagttctggccgggcgcagtggctcatgcctataatcccagcactttgggaggccgaggtgggt

SEQ ID NO: 210120 - DNA, 241 bp, Homo sapiens
attgcttgaagccgggaggtggaggttgcagtgagccgacagcacacccctgcactccagcctggtgagagcgagactctgtctcaaaaaaaaaaaagaaggttgggaggacagatccagtttgtcagaggaattacttgaactagctgagtccttcactatataaaaatgttttacttaatataactatttcaaaattaacaggcaaaaccccaccagaatggtctttcaacaaactgaa

SEQ ID NO: 210121 - DNA, 392 bp, Homo sapiens
tgattctgatactatttcaagcaggagttatcgccacccctacttaaccgctagtaacacggtccctattggcatcaggctggagagaaacgcaactccaaaatcttatcctgaggcatctgctttcaaaggttttccctaattccagctgtcttggcctgagttctccagagtacagagcctaaggcaaacacatttatgtcttgctactttagctgagagttcaagcccaagaaagcaggagtgaaggaatgaggggaaagaggcgggaaaatagggggagccaacacaaggtatattactgagactgctacaacctgctaccaagcataattcatggcttgatctggcaggattctaagagcctatgaactattgcatttcaggatagt

SEQ ID NO: 210122 - DNA, 509 bp, Homo sapiens
ccttgactctagttcacatgagggtaatagagggaggtaaatgaaccagatcactgaagtctgaatttcaagctaaagagtgtggtttcattttcctcatctataaaatgaagataatatctctgtctcttgcaagaattaaagtgaggccaggcacagtgcatagccctcttcacccatctctccagctcttcgtgttgggctcagcccttcttctggtagtcttctggttccagataatggctatgattccggcactttgggatgctaaggtgggagaatcacctgagccaggagtttgagacgagtctgggcaacatggcaagaccccaatctctacaaaaattctaaaacttagctgggagtggtggcgtgcacctgtggccctagctgcttaggaggctgaggtgggaggatcgcttgagcccaggagaacaaggctgtggtgagctgtgattacaccactgtgctccagcctgggcaacagaaggagaccatctcaaaaaaaa

SEQ ID NO: 210123 - DNA, 375 bp, Homo sapiens
aggaagcggaacagaaaagacgatgtgttacatcttagtgcctaagctataagtttggagttttactataaaacattcaccatgtgatgttcaaaataaaatagaatatttaataattattgggttaaaaaaatggttcaattctctccaatggcaaagaagctgtgattcactgtatgagcacagtgataaccattctcacctaaaacacagttcacaggggttcctccaggaatacaacatctctgttctggtctgtctgaaaatagtttaatgtatctcctgctgtttgacatttatgttgacttcatatattaaaatgtgaggaatgaaaaaatcctatcactgatgtttccatctaaactttccattcca

SEQ ID NO: 210124 - DNA, 208 bp, Homo sapiens
gtggggggaaaatgagttaatttattgaatattttaactagttgtaataggttctaattttacctacagtggaaacaattgaaagtttttatgttaacattattctggcaagttaatatgaactaaagaacattaaacaaatatttcagtgcagagcatgaaacaaatacagcaaaagatattagcacttccagttctgaactgattt

SEQ ID NO: 210125 - DNA, 523 bp, Homo sapiens
tggaaacgactttatcatgatgcaagaacttgatacttgttttcaggcttttcttcctgtaatatagatatggatagtacgtaaagacatttttatgtagggctgcaaaaagatcttcctcctttttgttacattatacacacacacgcgtgcatgcgtgcgcgcacacactcgcatgttctggggaaaatgtatgggagaaatacaagcacggtagttaaaaaacaggtttgaaagtattctagacccaataggaaagagacacattttagcttgagagaagctttcaaagaagcattaattcctttactctgatagcttaggctgctcattgacatttaccttaggtttttttgttttgttttgtttttttctctatttaaccatcaacagtctactttttgccacttgaaaggcatagggattcaaacaggttttaggtagggaaaaagggaagccatatttctgattctgtgaaatttttcccagtggcattttccagtcatttatgtttggagtatgc

SEQ ID NO: 210126 - DNA, 155 bp, Homo sapiens
gaattagagtggaaggagggaagggaatgagaggaaaaaagtaaataagtgaaaaatgaaagcaagtgtccatgataagaaccgcatgggtgctcctatctcatttatgggaaatcatgtgtgtggaggtgacataaacacatggtggtgagatg

SEQ ID NO: 210127 - DNA, 297 bp, Homo sapiens
tgtgtagattttgaaaatatttgattagacttatacttaagtcatttttggagggtgctaatgaaaatggtattatgttttaatttcaaattcagattgtttattactggtatataggaaagtgattgacttttatatattaaccttgtgtcctgtaaccttgctataattgcttattaattctggaagttttttcattgattctttcaggttttctacatgggaagtcttgtcatttgtgaacaaaaacagttttctttctaactttccagtctaagttttatttcctttttttgt

SEQ ID NO: 210128 - DNA, 434 bp, Homo sapiens
caaaggacagtccacaaaggacagtgcagggggtcacctggatatgtttgggctacagtgccacagacacatcccatgatatgaatcattaagataataacaataagctacagtttaatgagtactcactctgtacctgccagagtgctaaattcattatatggactgagtcctcacaacaaccctaaggattaggaactgttttatattctctctatttaacagatgacaaaactatgtggctcagagacggtaagcaacttgcccaaaattgcatagccaggaagtgacagaaccaggtctaaaagccaggtctgtcctgtcaaacttcagagccttaactactatcctacacttatccatctgaaaggcacagtccctacctgcttcccttaaaccccatggcaccctcacacctcactccctcacccaaa

SEQ ID NO: 210129 - DNA, 524 bp, Homo sapiens
gtgatgttgcaaatttcttttaaatgtgagaatttcaagcagtaaaattactcaaaaggctactggatttaacttacaagttcttcagtggtaatctgttcaaaagaattattttagttgttaggtatactgttgatgtggttgataattctggtatccaagaagaaatctcccaagatcctacctaactttttgtaactaaagcggcatacatacacaggtagtgggaaaatgtctagactggtgagtacacataccaacatttttccagaattttctgcctccttattataccacttgagtaaggggtttagaaattttaggctctacttgggaatttgtctatttcttttgcagttctatcaatttttgtatcatgtattttgaagcatttatgttattatatacataaatatttaggactgttatgttttcttgattaattgaaccatttgtcactatgaaatgaccttgtttattgctggtaatatttttgctatgaaatgtactttggtattaataca

SEQ ID NO: 210130 - DNA, 347 bp, Homo sapiens
tgcataaaggggaggcaatgggggcaaggacacaggagtaaagggtcaaacagcccgggaggactgatcctacccagctgtccacattgcaggtacttcccactagtgagctcatttggaatatcacgttgtttgcttttactttcttgttcaaatgtctgttttatgtttttagagttggggtctcgctgtgttgtccaggctgatctagaactcctggcctgtgatggttaatactgagtgtcagcttgactggattgaagaatgcaaagtattgatcctgggtgtgtctgtgaaggtgctgccaaaggagattaacatttgagtcagtgggctgggtcttggtg

SEQ ID NO: 210131 - DNA, 606 bp, Homo sapiens
ggctgttataagcaattaaattacgtactagttagttgtctctccaaacaaggttatgattaataatatttagctttccatttttatataggatataaaaaagatgaattgttctaggccatgcagtatgtattttatagcatactcttgatcttagatctgtcactaaaaaaacaaatgaatatatgtataaattaatatgagtgttaggtccttgaataagaatgagatatatattttctccccttttggcaatctctatcacagaaatgggccaagttgtcaccacatttagttcatgggaaatttgttttcttttgaaagtgctactctagttttgtcgtatgaaataacaacaatttgtatttaattagtctagtacttcagaataggccttcaactgtttcaactatttggaaaagtcactctaatttttgttatcccagaaaatctttgtattctattaagaactaaaatataatttgccagtccttttattattactattgtttttttaaaactgcaagatatggtcatgagtatctggaaatggctcagaaaattaaaaattatagctaataatattgcattatttctcacatggtt

SEQ ID NO: 210132 - DNA, 118 bp, Homo sapiens
agtgctgggattacaggcatgagccaccacaccaggcctgctaaagattcttacaaacaaaaaatactgtatgtaagagctcagttactatgttactatgtcaaccagcccccagccc

SEQ ID NO: 210133 - DNA, 292 bp, Homo sapiens
  misc_feature (17)..(17): n is a, c, g, or t
cgaattcgagctcggtnccccattggataagcggatgagggggttggaagagggagaaatagttacacctgttgactttacaagtgcccatctatctgccttccctgcctttcccctttctttcccctgacctctctcccttctcccacaaacatttgtacctctgatgtttcaggtactgattcccattctgggagtgagatagttcctataacgcagagcttgcctttagtgagggaagacagaaaacaaatatatcaacaagaaaatatcacataatgctgggtgctgt

SEQ ID NO: 210134 - DNA, 397 bp, Homo sapiens
agaactgtgcttctctgctgcgtagcgccctctgtggctccccagggtggagttctcactgctgccttgcccacggacgccccttcatccttcaggaaccaggcaggccccaccaccataccccttagcaaccagcttcccactctgaccggtgtctgtctgtgtgctgccttccgtaggagactttctgagcttaggttccctcgacgctctatgggcactgggcttcctgtcccaacacactggtggtagtgatgggacgcagcctctgtgcgggccctgtgcctggtgtggacccagcagagttgggcagcggatgtagagttggggaggggagcagtgacaaccattcagagtggctctgcctcctgcacccctgggccgtgtgcctggggac

SEQ ID NO: 210135 - DNA, 974 bp, Homo sapiens
atggggatgatactccagaaagatttagtgcatattgtgatgaacattaattatgggctgaattctcctatatagaataactttaatgttagtgctttaaaactattaaatggactttcataattatactccaataagttttgtatgtcaggaagtttttagtaccattaccaacctgaaatataggccatagaggctgatattgagcacactgatgttactctattttatctcctttctagtagaggaaaagctgacatatccatcatgctatcaaccagagagatttgctaatttcatttttttgcattttcacttacccataataattaatatgcctaatgacaaaaggcattttaatcacttaaagtgccttatgattcatcaaaaatgtaatattctgtttgggataaatgttattgtatagtattataaaactttaactcatcagtaatttgagcacagtttaattttgttctcccccaagataaaacccctcccctcccaaagccttgatggccttgaggggtaatcagcctggctgggagaaagagaagtgggttaaatcaaatggcagcacaccctagtttcctctgcaatctcatataggaagatgagcttggggttgcggggcatgaaaaggtgggactcagactgggcatgagaaggtgggactcagacttggatcaaagagtggggacacagcagagaagagcagaaaccttttgcagagagaaaggagcttacctggatagagctgaagatgatggatgaggggaatgtcaaaggtccccggatgctgtgatccagcatggaggatctggatccctggactttctgctgagcagcaatggagacaggattgagaaaaccagtgagctagagaatccaggttgtatttatgcagatagaaggtcagttccaggaaactaaggggaagtatgggtgtttgagatcagggaaatcctgctgaa

SEQ ID NO: 210136 - DNA, 105 bp, Homo sapiens
cagctgccacaggctcctccctataaattaagttcctgcagccacagctgtgggagaagcatacttgtagaagcaaggccagtccagcatcagaaggcagaggca

SEQ ID NO: 210137 - DNA, 401 bp, Homo sapiens
tctcatgagctttagtaagttgtttattctccactggactgtaaaccctgggagggcagggactgtacctgctctgttttagctccaacacccaacacagtgggctagtacttagtaggcactcaaataccagctgaataaataaatgcttaaaaattattacatctggcctaggatctattatatctatctgggatctggtgctcatgatgcatgtcaatttagatgagtaatcactcttcaaaatactgtcagaatggtcttttcccgggaaaatgctgcatgattttgaaacatgtggtacacgatgaattgaatatggcaagttgctaaactgacacgcagaagcacacacctgaaatgatttaatggcactttcaaattaaatggtactcagactc

SEQ ID NO: 210138 - DNA, 315 bp, Homo sapiens
atgtgggtcactgtcagcgtctgaagccagccaggcatgagacacccacacagccaggctgcctgatggtcaagaagcttttgtattgtaataaaaaatgttttagcaatatggtccatgcactgaaaccttcctgaggcttggtttcaaacataacactgaattccacatgcatctcagttcaaacgtgggcaagaagggatattacaggagtcatctcatttaataatcctacagtcccccaacaaccactgagggacaaccccactaaggaagagggcgggccccactgaggctgcgcacaagctggcaggc

SEQ ID NO: 210139 - DNA, 490 bp, Homo sapiens
gcgccactgcttgacccaccctgatccacgttgtctgcttcccacttcttacttcttgttgtgtgggaatctctcttccttggcccctgctgccctcaagctgagaaaggctattgagaggagtggcacgtagcccatgggcatgttctgtttgaggattctgacctgactgaacccacgaagaggatagcctctcaccaaccatctttcaaccttccgcttcccttgctgtcttgctcttcccttcccttctctggtcttcttttcctccttgcttcttgcctcctttagaaggctaaaatttaatagactgacaataccaagtgtgaatcagctgaaacttttgtggagtgtaaaatgattgagcaactttggaaaacagtttggcaatttcttatgaagttaaacatgcacttatcaaatgatgcagcaattccactcctgggtatttgctcaaaagaaataaaagcagatctatacagagacttgt

SEQ ID NO: 210140 - DNA, 347 bp, Homo sapiens
aacagaatcctagtacattaattcagaaagtcctattaaatacaagtatttttaaaaataaaaaagtcaataataaactatgagccagcttagtttttatacttttcagtattttctcgtgacttttttgtgtatgccttacctattaaatatgaaatatataaattttcttatcagtgctattgatttgtaagtatttattttcaataaaaaccagcctattactgtttctcataggtaaagctaggaagaataactgaccctgtcatctccaaaatacaagaaaaacagacatctcaagtcctcaacaaggacgcatcctctcagcaggatgctagcacggttcc

SEQ ID NO: 210141 - DNA, 562 bp, Homo sapiens
gggctaaggttgcagtgagctgagattgcgccactgcactccagactgggtaacagtgagactctgtctcaaaaaaagaaaaggaagttaatagtaattatagttaccctttactgagctacctggcaggcctagaacagagacacgcaggtgctgaaggcacaggttctgtcctcaggcagacttgggcttgaacatcagcttcatcattaactaaagcgctaagtgaccttgggcaaatgccttaagcattctagtctcttctaggaggcagggagtgttcccagccacacatctaagggagattagggggattaaagatacacacaaatatagtcaagaagattatcctaataaatcacctaacacatacgtgttatatattattacacagaacaaatcacctaacagcccaggcgatgtcctagcaccaagccccacaaggctcttgcttaagacacacacacacacacacccacacacacacacccacacccacacacacacacacacacacacgagccccatacttaccagagaatagaaagtaggtctttttttt

SEQ ID NO: 210142 - DNA, 936 bp, Homo sapiens
gtagagggagtgggggaagtagaggaagtagaggaattagaggaagagacagcaaaggaagaacctgctgacttccctgttgagcaacctgaagaaaattaaatataaggtattagatttaaaaggagctttacatttcggttctaatgtaaaaaagggtaagaaatttaatagcttaaaatatgaattaacacccatgttgcatgcattccacatattaaaatttgttttatataatttctaaatgtttaacatttgtttaataaaatgaaggcaaaactattttagtttagtttttatagctaccagacttagatccgataaattgtttgtataatttttaagcttaatttttattactttattggtgttaaggataacaaatgtgtattgttagtatatctattctaatcattttatcttaaatgctgctcttgggagtgaatattcaagtgtgcatcaattttttgaatacttaccctggaagatataaactgggcaagtattttgtgctctgtgtatttttttactgcattagacattgaatagtaatttgcgttaagatacgcttaaaggctctttgtgaccatgtttccctttgtagcaataaaatgttttttacgaaaactttctccctggattagcagtttaaatgaaacagagttcatcaatgaaatgagtatttaaaataaaaatttgccttaatgtatcagttcagctcacaagtattttaagatgattgagaagacttgaattaaagaaaaaaaaattctcaatcatatttttaaaatataagactaaaattgtttttaaaacacatttcaaatagaagtgagtttgaactgaccttatttatactctttttaagtttgttccttttccctgtgcctgtgtcaaatcttcaagtcttgctgaaaatacatttgatacaaagtt

SEQ ID NO: 210143 - DNA, 961 bp, Homo sapiens
  misc_feature (219)..(219): n is a, c, g, or t
  misc_feature (221)..(221): n is a, c, g, or t
  misc_feature (225)..(228): n is a, c, g, or t
  misc_feature (230)..(230): n is a, c, g, or t
  misc_feature (236)..(237): n is a, c, g, or t
  misc_feature (240)..(241): n is a, c, g, or t
  misc_feature (244)..(246): n is a, c, g, or t
  misc_feature (544)..(544): n is a, c, g, or t
acctggagccgacagacgtctaggggcttcgctgcggctgagactcggtcgccgccacgccttagcgtgaaggattccgggaagcctgcgggactgcgagtggagaggttttgcccaacgggacggtctccttccttctgtccaaattctacctgtccttcgaggcgtggtgcgggccccactgcttaggggagacttccttttcgcctgaccgcggangngctnnnngncctggnnccnncannngggtctgggtctgccgcccaggatggagtacaatggtgtgatcttggctctttgcaacctctgcctcctgggctcaagccttcctcccacctgaacctcccaagtagcgggactgcagggtgaaggccatgccgcctcctgggaaagttccccgaaaggagaatctgtggctacagtgtgagtgggggtcctgctcctttgtgtgctcaaccatggaaaagttctttgagcatgtcactcagcacctgcagcagcacctgcatggctctggggaggaggaggaagaggaagaggaggntgacccacttgaggaagaattctcctgcttgtggcaggaatgtggcttttgttctctggacagttctgctgacctcatccgccatgtctacttccactgctaccacaccaagctgaaacagtgggggctgcaggccttgcaaagccaggctgaccttggcccctgcatcctggacttccagagccggaacgtcatccctgatatccctgaccacttcctgtgtctgtgggagcactgtgagaattccttcgacaatcctgagtggttttatcggcatgtggaagcacacagtctgtgctgtgaatacgaagcagtcggcaaggacaacccggtggtgctgtgtggctggaaaggctgtacctgcaccttcaaggaccgcagtaaacttcgagagcacctccgcagccatacccagga

SEQ ID NO: 210144 - DNA, 1023 bp, Homo sapiens
aggttgcagtgagccaagatcacaccattgcattccagcccgggtgacagtgcgagactccgtctagaaaaaaaaaaaattgtggctccagccattatgaactgtgtggggacaaatcagcatcttaggagcttgatgacttgaaacgtgacatgcagtgaaggcaaacttcttcctcctcctgagagatgtcagggctagggagctgtgaaacgaatggaacagagccagtgcccagccagccccagttccctctctccttctggggacttgttgacagtatctcgttactattgcaggcaatgtccccttctgctgaatgatccaaggacaccaaactttgcctgatcgacaggggaggctgctaagctgcacctgctccctgtaagagtggagtcaggccaaggcatagaggcacacaaatactagctttcagacttgctaggactacgtccagtctcatcacagctgtccacgtggaagtctctttgaggtcaagcaaacaaattcaacacagtcaaactttaaaccattctgtgggtgaaaggtttctgaagaatagacagatcttattctgcagtttaatgtttctggctaatctatgtaattgtgttatatagcgcattcacctcaactatgccacacttcagcaggctactcactccctctctcatatcacatttagaaatgggtccagagaggcctggacaacaccctgagaatgcaaagttttccactcaagttccaaccactgggatgggcgatagccctctgctagggctggtctaggtgctccctccctgggtatcagctgaattctacctggtgttggcagtgcggtgttccaaagcaaagtcccacagatactgtactttcccaagcacacagattctctctgaaccacagggcagctgccaggggataggggaagagcggtgtagacaattcaaagctgtctttcctacttttttaccaatataaacttaaaaccaggtattgtgaatactcacctgattttcggtt

SEQ ID NO: 210145 - DNA, 963 bp, Homo sapiens
  misc_feature (919)..(919): n is a, c, g, or t
gagtccactgcaggcttggagagggtggggtggagagccatgacatgcacagttactgaaggtcctcagtggccagagttgagggagtgccgcggcgtagggtgcgggctgcaggagggagtctggggcccattctgacttggttgacttaggccaggctccgagcctttctgggcttcaaatacccctctttggggtaagggggaagagactctgagctcttagaggtcctgtttctcgtttgctcgtggggatccagggaaagggagcgactctctccaggccccccggtctctgcctttccgtactggcctcatcccttccctgaggctcctgctccgtgtttctggtgggtccggattgggaccacacagttctgggaaaggcacctgtccccgctcctgagagccgggtggggaaggggaggtggggtctagatgggatgggcagagctgggcgagctcttctttctggaagggaacccaggcactcctcagagttgggaccgttgaacttcaagccaagccaggcaggtgagcctggcccatggacagatcctgggggccaaggtcctcatctcctagatgggtgcccaggcaggcccgtgtctgctggagggttactgagaggcgatccttggctcctcagcggaacagggggttctcctttgttccactggtgcctgggtaggaatgcaaggttttgtcacctgctccccaccctggagcatgtggattgggtgctgtcttcacaatattggatgtagctagaggtttgcagtaagtactttatttgttgccttttttgttgagcctgggcaagatagaaggtggtgggtagagctgctggtgaggacgccaccctgggtgcagccgaatgtctctgggaatgaacgggggagggagtgtgattctgctgntcctccaatcccacggaattttctaacatgcttattcaccgagc

SEQ ID NO: 210146 - DNA, 394 bp, Homo sapiens
tatagggtgttatgctctgaatgtgtccccctaaaattaatcaccaatgtcataagattaggaagtagggctttaaggtagtgattcagtcatgaagggagagtgttcacgaatgagtttaggatccttacacaaggactggatggagtgggcttcccctgttttgcccttccaccttctgccatgtgaggacacagtgcatctcctcctgaagacacagtgcacaagataccatcttggatgcagagaccagaccctcaccagacaccaatcctgctggcaccttgatcttggacttctagcctatggaactgtgagaaatacatttctgttcttcagaaattacccagcctagtgtattttctatatagtagtacaaactcattaaggcaca

SEQ ID NO: 210147 - DNA, 559 bp, Homo sapiens
aacaggtctccatttggagcctgtcagtggggtcagagactaagattcaggctcagggtctaaattccatatcctttcttccataccctggtgtttcctatgaacagatagatactttagggctgcaaggtttggattgcatggcactgctcagaagataagttacaggtctgggctaggctgtagctgcccctccaggtggctagacctttcctttctgtgtcaccagttaacactggccaacagttccttccattaactgttcactgctttctcctgtgtctaactgatgcagtttatgacccataactaagagcagtaccaggtatggctctgtttcctgttcatgtcccctgtcctctgggctgcatgcattccgttcttacagaaagaatacctttaacctagtacatcctgccacacatctgcttctactgtgaaattgatgagggggtattaccgattcttccctcacccatcatttactgagatgctggtgattgcattataatcctctaaagcttacattgtctttctgattcttggtcttatctgagca

SEQ ID NO: 210148 - DNA, 569 bp, Homo sapiens
gaaaaagctgtaatgatcagacagccttgagggggtcttcagagaaacagaagctgcagcttgtcaatcaggcatcaggcatgcgtttatgtgaaaacgacccagaggccgtctgcaaagggaaagcctcatctctactacaaaagatggagaacatatacacctttacatacttttagcaaaaacgaaatgtctattccatgttttaattttctcctttaatggactcctttgggttcaccactcagtcactggttctaataaccaaagactgaccttattctgttcagctgccacatcacattccataaaatggtcgtgccccaccctgggtcgatggatgtgaaggccctttctcgcttttcactcttaaacacagcccaggaacaagctgtcttacctgggactctcagtagatgctgagaggcagacttgctgggtgtggcattccaaattttaaaagcagcaggagttggttgattttgaagttgaagactcctaggcggggagctctgtgaaaatgggagccaagtcttttaccagtgtgagagagaattaaaatgggggcc

SEQ ID NO: 210149 - DNA, 649 bp, Homo sapiens
atcacaggtttaggcaatagataagtcagaaactacagttaacttgtctaggacccaagacaattaataaaacttacttggagaagcagcatagcctctagtcacctgaagacaagttttaaagatctctaacacactggtaacacttgggcacaccaaaatggctgtaatctgaaaaacagccacatgccacttctaatggtgtcattatactaaaagtgaccttcccccctgaaagtttttaaagtaagctaaatcttgaacaatgactcctactcttctctaaaataggagctatgacagctaccttaatgggatgcccgataaactcagggcaaggggctcactgtgctgacattctcacctcacctaggacttccgctgattcatcctgatggactgacaagtcactgacttgccaaagaatcttgtttatttcacatataaaaacactgtctactccagtgtggcgattcctcagggatctagaactagaaataccatttgacccagccatcccattactgggtatatacccaaaggattataaatcatgctgctataaagacacatggacatgtatgtttattgtggcaccattcacaatagcaaagacttggaaccaacccaaatgtccaacaatcataga

SEQ ID NO: 210150 - DNA, 346 bp, Homo sapiens
gcaattaaagaggaaaaaaagctatctaacttggagggcatgtgttcctggtttgtgaccccacctaccctactcctgctcattaaccctgttgtagccaggtgccaatgctctgcctgaggaatttatcactgaagttaacatttcagctttaagacataacagcttaaagaaggggcctggtatatcctcacttccagagatgtatatgtttaattatttagatcattcattcaaggggtttcaatgtatttctttgtaagccaactatttttttttcactaatccatctgtttttattattacatttgattacaaataaacttaatttgtcatactgctataa

SEQ ID NO: 210151 - DNA, 221 bp, Homo sapiens
ccggagtatacctgcagctgtcctgatgttcctcatcttcactaatagaatccatctcaagaaaccactttcttcacctgcattcatggatttaaaaaaattaagataaaacaacaacaactaaaaaaaaacactttctttgctcatccacaagaagccactcctcatccattcaagttttatcaagagactgcagcaattcaatcatatcttcaggctcc

SEQ ID NO: 210152 - DNA, 300 bp, Homo sapiens
gtttaatttatttttaagacatcatgttcacacatataagtgggagccaaacattgagtacacatggacacaaaggaacagcagacactggggcgtgcttgaggatagagggagggaagaggatgaggatccaaaaattacctatcagtttctatgcttattatgtgggtggcaaaataatctgtacaccaaacttctgtgacatgcaatttatttatataacaaacctacatatgttcaccgaacctaaaagttaaaaaaataaaaatttctaccaacatctaatgtgaaaaacaaaac

SEQ ID NO: 210153 - DNA, 227 bp, Homo sapiens
ctgctacctgtgagcttcctctcaattgttttattataatttttgttattacaggattaatttgttttaatggggacgtttgtcttctcgctgtttgtgtacgtcataaatctgaaggggaaaatacagaaacagaagggcgtgtgtctttacaagtgtgtttggaggcaaaccaaatggtacatttcttttcagatgctttctgctttgctttctgatttttggtc

SEQ ID NO: 210154 - DNA, 409 bp, Homo sapiens
ctttcccattatttttcccttctgctcttggaaaactaatgaaagacatgtcactttctcattttatgtaatatgtgtatgtgtgtgtttataaatatatatcttaccctctttctttttgcccatttccttctctgtgatacattctggataatttcttcactcatatatctaggtcattgtgtatctctttctttagttgtatccaatctgctgttaactacacccaactttttcattataattattactgcatttttcacttgtagaggcttcattgcttaggtctttttcaaatgtgttaagtttcttgttcccagcagatatttttccatcaataaatacagttgttttataatctctgtctgatatttccaatatccaaagtttttaagggtctatttctgtc

SEQ ID NO: 210155 - DNA, 611 bp, Homo sapiens
tgcacgaaaggaagaatattcatacttgatcagctcttagcttttgttaactattttattaaagaaaaaactctcttttggctgggcatggtggttcatgcctataatcccaacattctgtaaggctgaggcaggaaaactgcttgagcccaagagtacaagaccagcctgggcaacacagttgagactgtcgtcttacagaaaacattttataactagcctgcacacctgtgctcccagctacttgggaggctgaggcgggagaatcacttgaacccagaaggcagaggtttcagtgagacaagatcgtgccactgcactccagactgggcgacagagggagacctcatctcataaaaagaagcagccgcaacactgtgtggaatgtcatggtggtagattgggcacttatatataagttcatgggtggtggaactgccaaaaacattataggcagagaaggcaaaatctgtatccagaatacatgtctattctagtgaggacaaatctcttccctcacccctgcccttattcccataatagaagtccagcgtaatcaacttgccaccaggtggtagctagtttttgggaaatggtgcatattcagggct

SEQ ID NO: 210156 - DNA, 237 bp, Homo sapiens
ttctgagacatgcacctaggcggactcaacaaatattaaacatctgctcggtcagaccctctgctcaactctgcacacacaaaagacaatgagatgcagaatggtgggtgccaggggctggaaggtggagggttcagagagtcagtgtttaatgggtacagagcttcatttggggaggatgaagaagttctggagatggatagtggttacagttgcacaacaatgtgaatgcactta

SEQ ID NO: 210157 - DNA, 399 bp, Homo sapiens
ggttaatcccaaccacgcttagaggccccacctctcagtactgccacattggagattaagtttgaacatgagtttcattgaggataaacatccaaaacagctcatcccaaatctaaatgtttcttaaatcaactaatcaattaaaaaaagaaaacctctctgggctgaacaaggcgtatcagtgagctaaagccagcctacatgcctggcagtgccaatctacctcaaggtcctcagaactctccagtcccctcacctttccctaagaccaggtgacttgtggctccctgaacacagcaagcaggtcctcacatctgagcatttgggcctgagcgccctttctgcctaagtcacaggcccaacacatcctgctcggcagcctcagcaacaacttcctcc

SEQ ID NO: 210158 - DNA, 500 bp, Homo sapiens
ttctaattaccacaggcagattggctaaagaagaacaactttggaggtgccatggtctgggccattgacctggatgatttcacaggcactttctgcaaccaaggaaaattccctctgatcaccaccctgaaggatgctctgggcctgcagagtacaagttgcaaagctccagcccaacccattgctcccattgccgaggcaaacatcacatgcggtgtcagccacagtcgtagctctgggggccgctctggcaggagctctgggggcagccccagaggtagtggattctgtgctgacagggccagtggcctgtaccctgaccccactgacaagaatgcctcctacagttgtgtgaatggaaagactttcactcagcactgccagcctggtggtgtctttgataccttctgctcctgctgcagctggtgataacatttttcagatatcacctcacccagcctcagaagttgttgtgcaataaaaggttgagcattactgta

SEQ ID NO: 210159 - DNA, 454 bp, Homo sapiens
tctttttatatttttaaagaatattatatattgtcattatctatagtcaccttgctgtacagagatctgaaatgtattacttctgtctaactgtacctatgtattccatgaccaatatctccctatctcatttcctctaaaaaccccagcctctgggaaccatcattttcctctctacttcaatgaaatgaactttttttcaatttcatgtatcagtgaaagatcatgtggtatttgtatttctttgcttgtcttattttccgtaacataatgtcttccaggttcatctatgtgtttacaaatggtagaattgcattttctttcaggctgaataatatgccattgtgtatatattatatattttctttatccgtcacccactgatggacctttaggttaattccatatctcagctactgtgaatagtattacaataaacatgagaaagcagtta

SEQ ID NO: 210160 - DNA, 168 bp, Homo sapiens
tcaaaagccaaagggctttttttttttaagttactagggctcaaaattagattataaaaaatcgactagacatttcattcattttctatacaatacatatgtataagttaggacttttctctccttaataataggtgtgaatgaaacattgattgtgggcaatgttgc

SEQ ID NO: 210161 - DNA, 288 bp, Homo sapiens
ggtccactgcaaactgtaagctcatgctattccacttcaattaattcgttatcaaacattatgcacagagtatgcatcatccttttaaacaagtggatgacttccaataaggctgcagccttaccacagtcacaggggcaaacactggagatacacggattgaatcctgattccacctatctggttacacatatccttcagcaagttatttaacatcagtgatgatcagctcctcctatatgaaaggaggataatggctcctatatcgtggtagaattgttttttaag

SEQ ID NO: 210162 - DNA, 541 bp, Homo sapiens
gcacacgctaccacacctggctaatttttgtattttttgtaggggggttttgctatgttagccaggctggtcttgatctcctaggctccaagcgatccttctgccttggcctcccaaagtgaaccactgcacctggccaaacttttctattttgatgtaaaatttaaacagcctttttctttatacattatttattttttttctttttgttatggccaagagtttaaggtgcagttatactttatttttgattttgtctgaagaagctgtcctatcctggttgtaaaggtagtctctagtttagtcttctttttcacgtctaggtctctgcgtggtctggaagtgtgattttctgctgtgtggtagccagccaaggcttccttaccccgcctttgtacccccacctctctagggagcccaggcactacgtgtttccgggctctgctgtgtctctccttgtttcagcactatggttttacctctgggaaagcctttctaaatgttcctccactcctccccgactctccaggttgtcttgatt

SEQ ID NO: 210163 - DNA, 899 bp, Homo sapiens
aggggcagacacttaacctgtgtctaaagcactgctggccgccgattctacgccgcccggtcgccagggagagtgaatacagctagggacgtgaaaggcaggtctgggctgggcattgaggagggtattaagctaggaagtatgccttacctttatctaaatcgggcgggtcgtcctcccctcattggccttgtgcagctcggattcctctctcacccgcacccaggggtcttcccagagcattgcgtcgtctccagcccagggagccgccttctttcctaaactgctatagacactgtcctgatgtctaagacaatgtactttgtgccgcaggcctctgccttccctagccagagcgcgagctcagccgcttttgagagaaatctgccacctggcctacctgtgcacaacttcagagctttgcagggggtgacaagggctgtggcttcagggaaatgtcacgcgcactggcacctttttcgcgaatgtgaaaattgagaaatcaagaaggttaattatagggttgcccaggatctgccaagagcaaagaagaaaaccccatttcccaggcatgtgtcttgtgagccattttttatcaacccacttaagtggacaagctccaaaacacaacatgaagctgatgataatttaggcaatttacgtttgaaatcatcggcctcatctcaaggcagtgtcttagagacacaggtgggacctgatccctcaggaacagatagcgtccagctttgtggggattgacttttgagatattggagcacttcggggtcaattgaaacccgtcaggtttcacatctctgctttggatagaaagcccatcacccacagctgtcagagatgttccttgactcactggggctcatctgttgaatttttctatc

SEQ ID NO: 210164 - DNA, 395 bp, Homo sapiens
tggataataattacaattacttggggtcttttataaaatacagatgcttgggatttaccataaaccatttagataaggatcactgtgctgggacccaggcaccagtatattttttaaaagctcccagtgcttctaaagtttagtgaattttgagatccactgacctctcacagccagcagtgagaggacgaatgctttagtttgtaagcatgcatttctgttggatgttttaaatgaaagtcattaaccaaaaagcattgccagagttcagggtcatttagtttaaaatgaaacaaaatgcatttctgggacagaacagtaaggacatgaagagaaccagggtggtgtacacaggtgtaggtactatctctgatacagcacagatactgacccaa

SEQ ID NO: 210165 - DNA, 781 bp, Homo sapiens
ttgatagctttgatatcagattctgaaatgaaataaattttgtctcaatttgagagaaaatagtgataatacaggtcctttctgccaaccaactcaggcatatgggccttttatttttttgatcttttttcattcactacaattctaaattgaaaaatctcacattttcttctaaagttgatttaacaatatagttaacacttaaaaatatctaaaataaagaatataacacattctactgaaataggcagccagcagtttatacatatttggtctaatacattcctcaccttacataaatctccagaaaagctataggaaggaaacacattcccctgacacgacaggatgtaaaatggatataaaccaattactttttgcagttcccagagtctcaggaatactgacccttctgacttcattttcaagcaagaactctccacccccatcttgtaaggaaaaataattgagctgaatttctagcaagaagcgaatcaagattttcaaagaataatttcgctaggacctatggagcaaatcacctttcaaacatgccaaaggtagttatttgaatacatttaagcccctaatcacagaagtcttttgatgaacttttcccactttaaatacatcaaacgaagcaaagagagtagagaaagccattagaaaatcattataataaataccaacattgatctacttcttccctctcctttggaacctcccctttccttgtttttaaaccttttagttgggctttatatagcaaagacctcaaact

SEQ ID NO: 210166 - DNA, 620 bp, Homo sapiens
tccctaatcggaatcacataaagttacaaactaatctcccctcgagttctttgaaccttccttctctaccatagcaccttgcactttctaataaactatgaaacttctttcttttatagtaggtccacctctgcaataggaaaacagatttttgatacttggtctattatggaattatcagtgcagggaacagtgtcagggcacatggtaatcattcactgagtatttattgtatgaatgcatttccttacaatatgcactattgtgcactcatctatttattaggattgaatccctagattcaaaagatatgcacaaattgcccagaaaggtgtttttttttttttttttgggttcctttttatcccccctttctctgagtctacttgctagggaaccagaaaggttttaacaatttgttcttccaccaagggtctacgagaatgtcattttcctgccaccctcactaacacgatgccctagtcacattggtctttccattccttgatcttaccatgtttgtcctctcttgatgcatatcattgactatttcctcttcctgaatactctcctgccacacctttatctggtttaattcttcttatttaggattcacttga

SEQ ID NO: 210167 - DNA, 287 bp, Homo sapiens
tcctgagattgttgtgaagttaattgagactatacatgaagtctctgggccataactgatctcattacaccttaattcttgtttctattacttattttacttctgtctctgggaagttcagagtttaaaaattcaacttgaccacagcatctttacttggtcatttctgcaaccaccatgttccatttcttttgtgtttctatttagatcttttgttttaagctacccaatcctttttggaataatatggggtattattaaagtaagactaaccagcaaaattctgt

SEQ ID NO: 210168 - DNA, 456 bp, Homo sapiens
aggtccggagtttgagaccagcctgtcccacacggagaaaccccatctctactaaaaatacaaaattagccaggcttggtggcacatgcctattatcccagctacttgggaaggctgaggcaggagaatcgcttgaacctgggaggtggaggttgcggtgagccgagatcatgccattgcactccagcctgggcaacaagagcaaaactccgtctcaaaaaaacaaaacaaacaaaaaaaagaacacgactaattctaagaaatcaggcctttcaaactcacttgttctttccgtgattcaagattagtaataaccaatgataaagaccccttcctaaattcatctccagtttaaactgttacttttacatggcctaaaagtttactttagacaaagctatgcctagagaggctgtgaaccaaaaataaaattttaagcctcccaactaactgaat

SEQ ID NO: 210169 - DNA, 522 bp, Homo sapiens
gacttcggaatgatgtatttatttaatgtatttatttaaattatcgacatgaggtacatagattatatgatacatttattcttggaagtattattttataacattgaaactgattaatttacaacatgtatgttgttaccataaacacattctttggttcaaataaagtcttaaaataacagctctttaaaaaaaatttattgcttatttttggaagttggagaataacaagttctatagaattttccctggaaaacctgtcagtacagcttaaatattaattatggttctgattgcctttcctttttgtaaagcattaaaaaactcaggttatactttagcttggaaaccaaggtaaaattttgccattgccctccctcctttcatttgctcattcattcacatccttatgctggcgttatgctgggtgtttttatagtatcattaatgataagctagaagaaagttgatagcaattgctataataaggtaggtacagggttatccataactatgctaagt

SEQ ID NO: 210170 - DNA, 313 bp, Homo sapiens
tctcagacttggggcagccacggaagtcacccctgacaggcactgataagaagtacccgctgatgaagcagcgtgggttctactccgacatcctcagccctggaaccttagatcaacttggggaggtatgtcgtggcccccgaatgagccagaacctcctgcggcaggctgaccttgacaagttcaccccaagagtcggaagctttgaggttcctgaagacttccaggagcgcatggagcagcagtgcatcgggtccaccacccggctgctcgcccagactgacttcccactgcaggcctacgagcccaagat

SEQ ID NO: 210171 - DNA, 471 bp, Homo sapiens
  misc_feature (327)..(327): n is a, c, g, or t
agcacctgtcctcacattacgtattctcaatttcagcagcagtgtctcagattacactgagaaaacaacaggcatcactcttccatttcattttacatttaggtcctgcatggccttcccaccagaggaacatgccctaactttatagcgtttcagctgtttccagcattttcctattataaactctagcttaaagatccctacagataaatctgtacgttgctgtggtttcatttttttttttttaagacaaagttttactcttgttgcccaggctggagtgcaatggtgtgatcttgactaccacaacctttgcctcctgggttnaagcgattctcctgcctcagcctcccaagtagctgggattacaggcagccgccaccacgcctggctcttagttttgcatttttagtagagaggggttttaccatgttggccagggtgatctcgaactcctgacctcagatgatg

SEQ ID NO: 210172 - DNA, 358 bp, Homo sapiens
atgactgggtctcttgcatggtcacctagatagaagtgggaaccatcactaagacagataaagaagagtagtaaccatgggtgtgtgggggtaggatgaaacgggtgtccagctgttggcacagtctttaaatggggaatgttaagagattcattcagaggcaaagcagtaatggaggtcaaataacaccaaggtcagggctggtgcttttcctcccttttgctggctcagacttttgttggtaactcttggtagggcctaagtagtttcagacggtgtgacagattaggttaaaagcaaatgagattgactgggagagtcattcagcctgtggtgggagcagctgggggccaagctt

SEQ ID NO: 210173 - DNA, 469 bp, Homo sapiens
agaaaccaccacagacagcaaggagaatggatgatccacagctcctcacaacaacatgaatgaatcgcacaagatgagaaaaccaaggctctggacggagacttgcccaaggttaccaacaggaagttgcagagcagaaacctgaccacagggctcctgattccagaattagcaatcaggttaccatcagtcaccccctccagagggagggatttctgttgcccccaagtgtaaaatgagtgttctgacgtttgacacatggatagatttatgtaaccaccaccgccaccgtcaggacccagaacagctctgccaccccaaaaatctctcttgcgttctttatagttacacaatccccccatccctaaacctggcgatccctgatctgtcctccaccactgtgtttttgataggtatggtattaaatccacagatcaatgtgggagggtttacgtctataccacatgga

SEQ ID NO: 210174 - DNA, 193 bp, Homo sapiens
cctccgggtgtggtggggaaatgagggccagagacaagatcatggaggttaagagcacgaactttggagttaggcagagcctgggtttaactcacagcaccaccactcattcactgccacagaacttctctgagcttgtttcctcatctgtaaagtggggaaaatgtgaaaagttacatatggtgtttggcac

SEQ ID NO: 210175 - DNA, 628 bp, Homo sapiens
tggatacttgcctcccagatttaatattttgccatacttgcttcagaccttttcctccagagatgaccagtatcctaagttgatgtgcatcattccaaccatttctgtttttggatacttaaacctgtattcctaagaaatacagaatattgttttatgtgtttaaaaatgtgcagtgcatttggtgttcctgcttcaacagtgtttggatggaacagatccagggactctcttgggaaaatttggctatgttagtacatttcttttacctgcagtatagcattccattgtgttaatataagtgtatattacatattgtaacataatttataattatatataattatataaatatatatttataattattgattacaaactatagttgtaaattatatgttgcaattatttgcagtgatgatatgtaacagtataattgtattaataacaaaatatttataaccattctctcactgatggatctatgggcgactccagttgttcactgttaaaaacaatgctgcggctgggcatgatggctcacacctgtaatcccagcactttgagaggccgaggtgggcagatcgcttgagcccaggagtttgagaccagcctggccaacatgatg

SEQ ID NO: 210176 - DNA, 844 bp, Homo sapiens
gtggtctttccttcattgtccagtcccacgatgatgaccgtgtgctctggaagcgtcggaggaagggcagcgtcagggccaaacccgaagaccaagggactgtgtgcccccaccagacctcccaggaaggagatagcgctccccgcaggctggggacctctgcccaccgtaccgcgtctgcttcccacccagctccgacacctgccccactccgggacggtggaaaagacagctgagcccccacctcccttcacattccagaaaagtgtctgaaaggcccggggcgcttcggggcttgccaagagacggtgtttagagaaagagcataacgcgaagtcacaatcgcaggaaactcgcagcagccccccatccccgccgctggctccgtttagcggggagaaaggagggtcgcccagctttgcgtcctggggcgcaccgaagcgccgggacccaagaggagcaggcagggacgggggcaggggaggccgcggggcagtcgaggagcgcccatatacgaccctcggagcccgaggtccccccgtgcgtccgaccacagatcagaggagtcccagaagagggcgagatcaaagcgctcgcttggatgccctgtgcgccccttaccctggttcccgaagatgctcattaacttggcgatcagctgtcccatggcacttcccgggccggacaggtgcaggagggctcagcggcctcaggagcggagtcggccctggtattcggagctccgctcccccgggagggtctggcagattttgcctacgaagttagggaagccccacacgtcaccaacctgacctgggaaccctctgggacgctggcccttcgt

SEQ ID NO: 210177 - DNA, 651 bp, Homo sapiens
caaggaaatgtttgctattctcaccaacctagaaagctaacaccccagctatgaatgtcacccagcccagctggagttagtccttacagcttcctactgtcacctgagcatgcggctttggtcctcagattggtaggatagccaccgaacccccaagcatctcatccatgttccaagtaggatgcaggcaggagggtgaaaggacaagaatcaaaaggtcaagtttgaccctttttaaaaaactctccttaagctacaggaattttctgctggcatttcattggccagaactgaacctcctgaccatctttggttacaagggaggtgagtaaggaaggggaccactttatcaggcactttgctgcttagtacatcagttggaattctatcctcaaaaagaagggaacaacagatgtttgggatgccaaccaacagagtctgccatagttttaaagctcccaagccagggttgacagccaaagagatgaaatctttaaggcatgcttggtgttaggtcctgtttccccacttgacagcttccaggcggtgtagaccatagtggtacgtgccatggttgctacttgccagcatataggcagtgtagactgtaaatctctaagtgtaccctccgggccagactctgtcaattgg

SEQ ID NO: 210178 - DNA, 648 bp, Homo sapiens
caacaagtgaaggaggaagttttatttttcccattttgtagatgagaaaactgagcctcagagagattaagtagtttacccaaggtaatgtgatttgtgagtgggttagctgggaaatgaacacagatttgattgattccgaagctgacatgcactcctaccctctcaacctttaatgaatttttttcaagccacatagatggaaacataaaatcagttcaggacatatcgagtcatcaacatagaagttttgatctaatgtgataagctctgaataaataaaacgaaaagagaaggcctcagattgaattctggagaatgtttgtagttaatagatcttaatcacgaaagttttaagaataatggcatggaatatataaaagattttccccttttgttgtgtttggatacttgacatgcttattgatgcagttaataatgcacattaaaaaagaattagaataaaacaaatttgatgcatttttctttacatcaaaaatcataggtctgattttgtcattttaacttagagaacatctgttgagtgctcactgtgtgcaaagcatatcgatgccacagtcttgcctactttaagtttttatgtgtctgaaatttccatggagctaggaagaactaagatctaaaaaa

SEQ ID NO: 210179 - DNA, 402 bp, Homo sapiens
ggtgggggctggttaggagtcaaggagacaggtcgaggacccaggacccagagctgccccgcctcaagggcaccgggagacacggctgggagcacccgcggcacagcccagacacacctgagtccttgcctgagtcctcgcccatccttcacctggctgggccttggcttcttcatctctaacgtgagggtcaaccgcacccctcaaaggactggcgtgggtcagacggggaagtgcggctgctgcattggcaaggctggcgtggaccaagggcttggctgcatgaatcttactaccccactaggattactctttaggggcttggaagcaaaaagccatcgggggctggggagccgagccctgtcttcctgagaccctgtgacctctgtccactcgagaagg

SEQ ID NO: 210180 - DNA, 482 bp, Homo sapiens
accatcacagtgaaatggtggaggagagaagagacaaatatggagatcttggactcagaagatgatcttgggaagctatacagtgtagtgggggaggcctgggcttctgagtcaggcaaactgcatgggaacactggtgtggacactcacttcatggccttggacaagaaatatgcaaatctgttttctcatttgtcaaatggggataattatccctgtcttgtagagttataagtactatgtgaaataattgtttaaaaagttaatgccagctgagtgtgatagctcatgcctgtaatcacagcactttgggaggctgagacttgagaattgcttgagcccaggagtttgagaccagcctgggcaacatagcaagatcctgtctctataaataaatagtgccttgcataaagaagatacttaagaaatggaaattattagatatttgggacatggaataaaaggattattccaaagagaag

SEQ ID NO: 210181 - DNA, 394 bp, Homo sapiens
ttattctaaaaagcaaccaaagtattagaaatttaaagttattccagtctagaaagacatagttcagatcacacagggatgatagccccaggactggaataaaacctgcagatgatgaaaagacgttgttcccctccccacagaaaatgctgaaattccaggaacaaggtactatatacttgggatgattaagagcaaaatgcttttaaaaatcctctcagactaggattctgctagtagcagaaatctgttcaaattattactctcttctctttcaaagagggtgtatgtacaacaaattacacaaacgatgttagattttccccagaaaagcaaataaaactaaagacaggagcactattggggtcacagtaaaggtctgaggtcctgtcct

SEQ ID NO: 210182 - DNA, 891 bp, Homo sapiens
  misc_feature (340)..(340): n is a, c, g, or t
  misc_feature (343)..(343): n is a, c, g, or t
  misc_feature (564)..(564): n is a, c, g, or t
  misc_feature (885)..(885): n is a, c, g, or t
attaaaatgaaaaaaaaaagagagttcacaaagcataatacatgagactccataatggataaaactatacactttggtggtgttaggagctggattatgtcttccctcagaattcatgtgttgaaatctaacccacagtgcctcagtatgtgactatatttggagatagtctttaaagatgtttctaaggtaaaatggaggtgattcatgtaggccctaatccaatatggctggtgtatttataagaagtgattaggacacagacacacacagcaaaaagacaacgtgaagacacagaatgaaaatggccatctataaactaaggagagagacttcaganganaccaaccctgatgccgccttgatctcagacttacagcctccagaattgtgataaatagatagatagataatcataatcaatatgtagatacacagattctttttaacaattcactactgaatgtcattaggagatatggcaaattgcagactgaagcaataaattatgatgtattctcttacagaagccaaaaactgaaataaggagaatactaatttaanattcaaattaagtttgggggatggtgtgtgccctgatggggtgcgctgagcgagccaggaggcacggagtcactgcagagcgcagggtttcttgaccacgtggacaatgtaaatttgaattctagatccaagtaagaataaggaagtggcacccaatcctctgagttctgatctcccaggcttggcctacaagtttttttgtttgctttcctgttgcatctttgataccatttcctagaggctgctccatgatttaacttgaaattctgaaacaaagatagaggaggcagtgggaaaactcgaataactcattgagtctgnagtccc

SEQ ID NO: 210183 - DNA, 734 bp, Homo sapiens
aaattaggctagtacgaggctggttggaatcggctgatgaaaacacttgaaaggaggaagtgccgtcttgctaaggctggtgtgttcagaagaggacaccgtgaatgattctcctgactaagatggtccactaaaaggaaccagggctccgtggagaaatggcgacttctgggattaaggctggagaggaataagatgaacccagaatatattattctggcagacagtgaggaagtacccagagaatggtaggaactcatccaaaggacaaaagcttgaaggggctctcattgggcaaatctggaatcttttgagtaacaatcatgttagtattgaattgtaactcttttttttttctttttgtagctgggattacagatgcctgccactatgcctggctgatttttgtatttttaatagagatggggttttgccatgtcggccaggctggtcttgaactcctggtctcaagtgattggctcacctcggcttcccaaagtgctgagattaccggtgtgagctaccacacccggcctataactcttcttactttattataagcacagtctaagaatccactagtacctacaggtacagtaatataaatgaaaaagtaaagagggagaagaaaactctttcttatcaactaataaacgcagaaagataatggaataagaaaataccgcttggaactaccatagtaatgattatgtcagggagaatcatcagtgaat

SEQ ID NO: 210184 - DNA, 304 bp, Homo sapiens
ctgatgagagcttcagggtgcttccactcatggcagaagcggaaagggagcagatatcacatgccaagagaggagggaaggccgggcgtggtggctcacgcctgtaattccagcactttgggaggctaaggtgggcggatcacttgaggtcaggagttcgagaccagcctggccaatggtgaaactccgtctctactaaaaatacaaaacttagccaggcgtggtgttgcatgcttgtaatcccagctactcgggaggctgaggcaggagaatctattgaacccgggaggcggaggttgcagtg

SEQ ID NO: 210185 - DNA, 239 bp, Homo sapiens
cccttgaatgttgtatctcttatacataaaaatgataagtataatgataatttggggggaatattccttccttgtttttttccttttgcttccacctttttaattattttaaatacacatatttattaccattgattttctgtcattaatgttgtaaaacttggacagatacagtccttccaatatgatcctattggatgacttggtaacatgatgtgtgttaacagccaaattctgaa

SEQ ID NO: 210186 - DNA, 289 bp, Homo sapiens
tgctgattttcagatatgtgtttgttgttactgggaaagtagaactcgtagagccagaaagtcattatactcaagttttgtcttttgtaagtcttcatccttaagttcctggatgctcctttccatcagtttttttttttttttttggaaacaaattttggcagtgacccgagatgtgacccactgtcccccagccggggtaacagacgagactccatctcaaaaattgttggtattatttatttacagaattttataacatttagtgttaggctgtgcagttcaccaa

SEQ ID NO: 210187 - DNA, 559 bp, Homo sapiens
gctgagggagttcattaccatcagacctgtcttaaaaagaatgctaaaagggagttcttcaggctgaaagaaaaggacagtaagtactaacatgaaaacgtgaaagtataaaactcactggtgaaagtaagtatacagtcaaattcagaatactctaattctgtaatggtggtatataaatcacttatagctttggtatgaaggataaaagacagaactattaaaataataatagctacaataattttagggatacacaatataaaaagatgtaaattatgacaccagaaatttaaaatgtgaggagggtagagtaaaagtgtagtttttttttttatgtgaataaagtttttatcagcttaaaatagcctgttatgagcataggacatagtgaagaaatgtacaaaataaaataaaaattttaaaaaccctattataattatattttacgtaaatctcatggtaaccacaaagcaaaaaactttagtaaatacacgaaagataaaaattaaggaataaagcctaccactagagaaaatcacctaatcacaaaggaaga

SEQ ID NO: 210188 - DNA, 545 bp, Homo sapiens
cagtcctaaccagttactgcattcctagcaaatactgaaaaccttctcattaacttgttattttcttaagttttagtctattgtcaaggaaataattctacaatatatgtatgaaaaagagaaactatatgttcacttctttaaatgtgcctaaatgtcaccaaattgaaatatacaggagaatccaagtattcccatgttatctgctttccaagtttgctattcagggaattatagtaaaaacctaacattacaatgaggacaaaatcatctctccactttttctgtagtaaagtttgaccacttggtaatttcccaggccacatagagcagctcccctttgactggagggtgaaaagtattagagggaaaaataatcttttagaatataagctagactttaaaaaaatcataccatcccatttccttcccattatgatttgaatatttatcagaaaccttgggattttgaagagcatggtttaaccctatccttatttttcctcttttttttttttgaagtgtctttgcattatgtgggtttt

SEQ ID NO: 210189 - DNA, 424 bp, Homo sapiens
acaggattgagatcagtttgtcatcagggctatcattttttctggaggctctaggagagaatcgattatttgcctgtcacacctgctagagatcacctgcactccttggcattggcatcctcattccaacctctactttaatcatcacatctccttctctaattctgactcttctttcttttattaagatctttgtgattactttggatttaactaaataatcaagaatagcctcttcatctcaagatccttaacttaattacatctgaaaagtcctttgtcatttaaggtaatgtattcacaggtgttggagattaggtcacgtacatcttcagggaaatattctacctgccacatcatccatgataataatactttaatggttttgatttaccttttcactcatgcttatatgcttaatatt

SEQ ID NO: 210190 - DNA, 185 bp, Homo sapiens
acttgaccttgggtccatctgctgccagtgttcttgcttaaactaagctgtgctgtgtcggagcccatcatcagaaattacttgccttgtgggtgtgagctactttgaagctgtgtaatgctccaggtgcatattggattaaagatgtgtgtttgattacaggtaatgtcatttgaggactagaa

SEQ ID NO: 210191 - DNA, 136 bp, Homo sapiens
gagccctgcgggatgtcctctgcccatgtggctgctgtccctctgtccagcgctcagggcaatgcctctgggcaagcaggtgctgacaccatccgtctcacacccctcccaggtccccagggccagttgagtcctg

SEQ ID NO: 210192 - DNA, 114 bp, Homo sapiens
tgctatttgcccccatcagaacaagtggattatattggatcctctgtgtttctacttgatgttgttagcattgtcttagatccatagattactagttatctgtcagatgggaaa

SEQ ID NO: 210193 - DNA, 1097 bp, Homo sapiens
aagctaggtgatcatacagtcatttcaatggccaaccagttcttgctctacagagcttttacacctttttgggaaacctgatatcaaacacatttatgttatatatttgctcccttgcattaattctagatttttttttaatttcttttagaaagggcaggggggaagtgggtcagagcaaggttcaagaatcacattcatccttgctctaaagtgtttacttgccagcaaagaaaggcaaacacatttttatattcagaaagcagaccggtcattttcaaagaaaaatgactgcaaccatgcctgtagaatgtttctgtgcaagcgcactaattttctatcacctgcatgctgtatataatacatttgcctgtatactaggaagaaaaaccaggctgttttccctgagtacaatgcagcttggatggctgggagcgtaagccttccgtgcatttttatagtgtacatatttgtatatactaactatatcgccatgtatgaacacagattttgttatatttgcttgtttctgtttcctaccaaactggcccacaatggggattcttttgtatagaaaaaatatgcttgtaattttttcctggtcattctctttcaatagcttatgaaagaattagatctgagtttacaaagaaactataagaaccaagtttgtctgtctgcatgagtcccgtccaattgctggatctagggaggaaccaacttcctaattcagagttttccttttaaaggcatgctttacccccatgggaaaactgcacactcatccatgtagaattattctctttgtattttatctaatagtgcctgaaaatttttttaatgtcttcttagaagaagaattcataattgtcaaaatttgaaacattagcttaattttgtttttatgacctcaagattcttctccttatttattcggttgctgttgtaatggggccccaggccattcctgacatcggcgtgttcttcttctgcattaaggatgtttttgaaattacagagattattgagccaacaggctgttttaatcaaaaccatgtttcacttctttttgatgattataaattgtccttgcaatg

SEQ ID NO: 210194 - DNA, 157 bp, Homo sapiens
gaatggagcactcccaagtatttgacgggcttcttattctctccttttgggcatttaatacatctttaacacaaatcaggattgtagaagattagggcttattttcaaagtgtcttctcagcataaagtcagatgatgatgatgatgatggtggtgg

SEQ ID NO: 210195 - DNA, 744 bp, Homo sapiens
atcaaaacaataaagaccaaagtttggcaagaggccatggcctccatcttgaaagacaccggagggtcattaaatgtccctaatccacagaaagctctcacctaacagacaaaatccagatcgaacacttcctgaggaaactgtacttaaatgggacaaacattgccaggttggctttatcacactttgtagaaacaccctatggtggtgaagacttttaaaataatttcctcaactgtgacaactacatttattgtctccactcaatctccatttcttacccatgatttggaacttgaatgttgggaggccgagagggaaagcagcctgagtctgtggtggagagggagggaggagagtgcctggaatttcgccagaaagtaagcatgtggaagcactttgcctgtcttctcgaggacacctgtggacagcctacacacgaggcacgcggtgaggtccatgagatcttactcttgagtgacgcattcagctcatcttcagagacaagttggatttgccctttctcaagcctaaagcttggaaattttgttatcttaggctctttaatactctcgatgaataaaagaagaaacattgaatatgactgcttttttccccccaactctaaatggccttgtcttacttcgccagtctcattttctcctttcctcccccatttccttcagacacttgtaccctcagacatgtgaaattaattttggatcgatcactttcgacactggt

SEQ ID NO: 210196 - DNA, 262 bp, Homo sapiens
tgcactccagcctgggcaacaagagtgaaactccatctcaaaaaaataaaaaaaaaatgaagagattattccagtgtcggcaacatggcaaactttgcctatacaaaaaattacctcgtcattgtgatgtgtgcctgtcgtcccagctactcaggaggctgaggtagaaggatctgttgagcctaagagttcgaggctgcagtgagctatgattgcaacactacactccagcctgggcaacagaatgataccctgtttcaaa

SEQ ID NO: 210197 - DNA, 427 bp, Homo sapiens
agttatttcattatgtatatgcaaatactacaaaatacaaaaaaatcaaaaattggaaacacttctagtctcaggcattttggataagggatactcagctttagctcatttcaccttgaaatgcatttgtcagcggggtacggtagcacatgcctgtaatcccagaactttggggtgccagggcaggaggatggcctaaatccagaaacttgaaccagcttggacagcatagcgagactgtgtctctacagaaaattaaaaaattagtaggcatggtagtgtgcacctactgaaacaagtagtttcagctatttgggaaactgaggcagtaagatcacttgagcccaggagtttgagactgcagtgagctatgactgtactactgcactccagcctgagtgacagaatgagatcctgtctcaaaaag

SEQ ID NO: 210198 - DNA, 350 bp, Homo sapiens
aggcaagaaattgtttttttttttaatttttagaataccattttatagttaattaaatacaacagtctagaagaactttggagaacccaaatcttaggcattttccatttttttctcctctacttaaaaagctctactaaaacttgatttctttttacattcttgtttcaagaattttctacattcttgtttcaatagtgtagaattatctccatagactttattgtgtcatagcattagataattagtcctactgcctttaggtggagtagttagcattcacagaaatttaaggaatggcttacaacttgtcaatacaatgattgatggagcagagatatttattttta

SEQ ID NO: 210199 - DNA, 555 bp, Homo sapiens
cccgatctacaggaagaaaactggaaataagactgaggacttagtttaagatgttcctactcagcctctagcttttgtgctacagttccgggaacagactcctctctcctgaaaaccatttccctctgcagcattaaatttcaccaagatgtcttgcttgtgggaaagacttccaaggatgcctggagagaggaggatggaaatgtcctgctctctaaacagatagacagatgcagccagacagaaaatagtttatcttgctgaggtttctaatgtatttgaaagaggcctgggtctagaagtctacccagagggctctgtgttgtgcacgcaaagataagaaccttccctgtgggagttccagagccagttttcataaacacccatcggtgactgtgttcagagtgagttcacaccatcctgacctgccctgagttagaccttacatggtcttcctcctctaggaagcctctgcagcccaggaacctccccttatctgaaatgaacagcatttgaagcttcaccagacagaccagacagcttagccctcgtgtt

SEQ ID NO: 210200 - DNA, 532 bp, Homo sapiens
ggacaaaagctgtaagaaaaggtatggaaatgacatggaaaatttctccccaacctccacccttggctgccccaggtgcctccaacctgacaaagccaccagcaatcaaaaccctcctggcattgtggctaagtggttttccttgtgtatccttgagatgtttcttatgtgaatagtttaaagtgtaagggggagccaaaaagtattttaggatggagcgttcaatttaaatgatgccgagcctcagacctttgattttacaaggaacataaagcactggtctttgaacattatttgcaaaccatgttttatcttagttacacagagaagagaaggaaggctacgaatgaaggaaggctgataacttaagctttacactggattgtgaaagtgtaggggaataacaaagggtcatagtcctgggccatgagagttttgtacatatcgtgtagatgaatccatggctgaagtctggagacttcttatgaagaagtttattttaatcaataaatgtttttctatcttcaaaaaa

SEQ ID NO: 210201 - DNA, 444 bp, Homo sapiens
caatgtacaatggtggaatagaggcagaattaccacattaacttccgtttgagagagaattattggagacccatagctgtcacagttccacagcaattatgaaatgaaatcccactgggcaaatgttgccattcttccttactttgtgatagagtctgttccttgattaggctgtggttctgttcactgggagtggctctggtgtccttgtcctccacagctcttggttccaccctttgggagagtcttcattttccatcctcctcagccccttctgaagagaactttagagaataaaccattttggtctgctgagtaactttctcggccagcttcatggcattcaaaattgggagtccaaacaatctcagtctcttctaatgtaggctgactttgtcaatacagttttctcaaggctttgtgagttttctttgtatttgattt

SEQ ID NO: 210202 - DNA, 407 bp, Homo sapiens
cattttggacatttgatatgttagtgaatacccattaatagccaggctaagtcattaacattaggtaggtctagactggtgataactgttgaagctgtggaggggcgtattttctcaacccaagtcattgcatacttctcctagttaaagcctgatataaatgagcttatattctgaatttatacaatttaggattagattccctccctctaaaattttaggtaataggaatgtcagagtattaacaattatgagaatcataagaaaacaagacactatcaaacataaggagagatggggggaacagaacttacagaaatttaaaaatcatcaaagtggataacttattcagcaaattagaaataggtggattggaaggtgaatttgaataaatcactcaggatgcg

SEQ ID NO: 210203 - DNA, 161 bp, Homo sapiens
cctggacaggaacaggggcacatttaacaggaagaaccaaatttatctagatagttatgatatagacaatatgggaaatcaaaaaatgtttttctttctcatgcttaaggaaagtgttagtagcaatgaaaataatcacaccaccaaataggaatgtatga

SEQ ID NO: 210204 - DNA, 162 bp, Homo sapiens
actcagatgatccgcccaccttggcctcccaaagtactgggattacaggtgtgagccaccgtgcctggtctgaggagccactttcaatttcagttcaaacaagggcagggcagggttgctgcccaacacagaaggagaaagctttaggcctcagagatggat

SEQ ID NO: 210205 - DNA, 682 bp, Homo sapiens
gtgacaagagtgaaactctgtcacacacacacacacacaaacaaattaaatttattaaaagcacacactatagaacaattaaaggcactagcctaagtgctttgaatgtatgatgtcacttaacattcacaatagtcttacatggtgggtactaatgttatgtccattttgaagataacggataaaaattactgagacgttacataagtttttaaggtggtccagctaaaaaactgtaacattgaaactgggttgttttactctggaatatctgaaaccatgcttggaggatttggattggtattgtagttcaaataactttgcataaaatttgtcttatttgcaggtagtaagttttgcttcttattgatcattatttacaaatctcatcaaagttatatttggcccaagtaaagtagactgttttcttgctctttagatgatttttccccgtttactctagaataagatcaatattatcctgctggatttaagttcatactattgtgattctaaggatatactaaactactcagcaaagttcaccaaatcacttcatccatgaacacatcgagttaacgtccggtcctgtgttgccacgttggcccggttcccacccttctctggactctcgcctccctatatcccctctgtctcgcagggccccggggctgaccggggc

SEQ ID NO: 210206 - DNA, 709 bp, Homo sapiens
ggaatatccatgaagatttctggaaaagggtgacaatttctcagaactgtggtgccatccatttttccatgaaatatgggtgttctcggaactgtcatggtgttggtggatgtctgatttgtatgttaataagtgtataataaggtcccaggtgaaagctaggtcaaatccagtgccatgttgggtcaagtaggacttagccagcttggcaaacatttcggttttcagggtctctttggctcctagtttgtgcagctatttcaacagtttcctttttgctagtcatgtgaaactactgcatggaatcttctattctcttgtgaccaccctatattatttctctctcagaagggccaaataattgacgtttttatgccattctgagactacagaaagaaaaaaggtcttgagacttctgggggtttggaggaggtggtgacacatgttgtaggagggtgaaggaggaagggcaaaggcaccaggggaggaaaggcaaaggttttcttgttatgtagataaagtctctcaggtaatcgcagaatagctgacagcctgtgacaaagtagttttctctcctttgagtcagtcttagattcctctttaggcaggaaagggagcctcagagaaagccagtacttgcatccactgtttactaatgtagatttccttgataggtatacaattcttttacaaaaaagagcttttcaga

SEQ ID NO: 210207 - DNA, 579 bp, Homo sapiens
tctgccatccatgcaccacggtagtctagagcaactgagaaaaccagatgcctccatagaacccacaggtgtagacattaacaataggacactgtggatctttgtgttgatttcagccacccacccaagtcattaatttatagtttatgcccttcacaaaggaaatgtttttgctaacaaatctcttatgatttcatctatttgtcttttcctctttgtgttttgtctcatacaaataatagttaacatagtgacacaaacaccactaaaatacttcagtatttttctcaggacttattcattttacctggaaggaaattgccgtataacccatgccattagaaaattaaaaatgcaaccatttctgcagctcgtacgtcatatgctatgtaatgaaaacgtgcctagcctcctactcccttgtatttgccaacagaacttaagcaagttctgtctgggctgcactcacactttcttagtgccagggagatgattggatataaattacatagcttatatttcctaatatactaaaaagaaagggaaaaacagaaaaggaaggaagtaaaggaaggaaaa

SEQ ID NO: 210208 - DNA, 397 bp, Homo sapiens
  misc_feature (25)..(25): n is a, c, g, or t
  misc_feature (358)..(358): n is a, c, g, or t
gactctagaggatcccctgtgccgntcccaacgcatgtccctccccgaggggcaccagggcaccctgtctctatcctggcgaatatgctgcgcaagtcgcccggcatctgccttctccttgccagtaaaaaagcaacactgcgggcctccggggatggcagggagctggaacggggacacactgacttctgcaactcagcaagtatcacctctgtcacctccgcctccccgttggattctgcccagcccctgggttctaagattgctgtcccattccacaggcaagccatgagactggggccatgcccagctgggcatgcagaagatcatagaccccctggcccgtggccgtgccttncgtgtggcaagatgacactgcggaaggcctgattgcccc

SEQ ID NO: 210209 - DNA, 206 bp, Homo sapiens
ctgcctgcgtctctcccgcgcagtcttccctcttccttctcctctgcgaccgggacacgaaacaaaggggaccggcgcactgagggcccagagtagttttcttgcagcccggcagctcttctggaatggaggcgcctttgttttgctgcccaagctggtgtttggccccaggcggtactaaatcccgtcgtctaggagaaagcgga

SEQ ID NO: 210210 - DNA, 132 bp, Homo sapiens
aaactttgtgatgcggcaaaccaaaccttactaatttaaaaaggaaaacaaaaggctaatgtgtcagaaatgaatatataaactgaaacagctatagggaaataagactttcatttttaagtcatcgcttta

SEQ ID NO: 210211 - DNA, 454 bp, Homo sapiens
ttttttctaagctttcccaccaatgtggagaagtacaactccaagcaaactcagtgtgcaaaaaaacatgggctatcaaaggagaaaacatgttaggaaaattgagaaagtttgccatgagttaaatcacccatctcctaatctgggctcctatcagattgcaaaatgggtgatttaattcatgggaaactttctcagttttcccaacaataatctggaaggaacagcagcagagggcaaaccttttctctagagggccagatggtaaatattttttacattgtgggccatagggtctctgttgcagctactcacctctgccatggccatgtaaaagtagccatagacaatctgtaaaggaagatgcatgtgcagggtgcatgccagtccccatctatggtgtcccttacagggtagcctgccctgagattgttcttaaaatctatgtacattg

SEQ ID NO: 210212 - DNA, 534 bp, Homo sapiens
gtaaatggaatcatttgaacgtactttgtctgacttttttcacgtagaacattttttgtgagatttatctatgccattgcttatattagtagttcattttttaaaaattagcaaaacttcaggctttatttgaatttcacaagttttccattaaaatcagctgatcaccaccatagtggtcaattgggaagaaaaatacaaagcactgatttggtaaagagtgtagctatagagttagacaagtataatttggactggcattaatttttattttaattcatactggccatgtatgacttcagggaatgtattgacttccacgaacttcagattcctcatttgtgaaataagaatggcaatccacaatgcagagttggttttcagattaatgagataatatatgtgcctgtttaacttagcataagaacttaataaaagtttgctaaataaaagtataaaataaataaggagaaaatacagcagaccaacttaacatgagatactaagaattcacagaagataaaaccaacataa

SEQ ID NO: 210213 - DNA, 236 bp, Homo sapiens
taaaaaacgacttccttagtttgatgtagtctgcagacatctcatcatcacaaaaacttgaaagcacttacagcactaagaaactacctttgcagattgtaaaaaaagatagaatcctacttagtgttttgatcacacctgcctatttccccaaggttttactgcagggttaaagaatgaataagcatctagttatatttaataaactccatgccttatggctgattctaaaggca

SEQ ID NO: 210214 - DNA, 324 bp, Homo sapiens
tggtaaatataaaaggtagactagtcagaatcccatactctaaatgtctgtcaaattcgtgtggctccttagtagagcagcgttggccatctgctgccttgttgttctggctgggcagctctgtgccagcccaggggaggctgagcaatccaggagatggtttaaagtgactgtgggctctggctctatcaccccacgtgcagtgggcagaagtactgcctcagctgcagcagagattggtagagcaggtgccgcaagtcttcacagatgacagtggaagacttattctctaagccatctgaagctctgaccagtggccatgac

SEQ ID NO: 210215 - DNA, 299 bp, Homo sapiens
ttacatatgaaatttggataataaagcacatatttcatagggttgttgtgaagatcaaatgagtaaatgtgtaataagcacttagaagaaaaccgtgcacatagttaactactatataagtgatagccagtgttgtttattagtttgattatcattaccatcaatgctgcacgatttcaattcaaaattttctcgagtgcccacaatatgaaagacactataataaatatttgtgtaactcaaagtactttctttagttgaaaacaacaaaaaccaactctgggtaaaatttgacaaaa

SEQ ID NO: 210216 - DNA, 417 bp, Homo sapiens
atttggtgactgaggtaatcaaccttcactagtgatattatgataatatattttgtcaatagaatgctgttttgtatttagttttataaaataggtcatttaaaaaaaagaaattcaggccagctgggcatggtggcgcatgcctgtaatctcagcactgtgggaggcagaggcaggtgtatcacttgaggtcaggagttcaagaccggcctggccaacatggtgaaactttgtctgtatttaaaaaaaaaaaaaaaaatacaaaacttagccaggtgtggtggcagacgcctgtactcccagctacttgggaggccgaggcaggagaatcgcttaagcccaggaggtggaggttgcagtgagcccagatcgtgcgccactgcactccagcctgggtaacagagcaagactccgtct

SEQ ID NO: 210217 - DNA, 529 bp, Homo sapiens
ggtacccaccgcaggaccattggcggcagcatggtttggagggccacaagagggccatttagtggagccaaggatatacagatgtgttcatggtttagcctgaggttatggagggcccgggggaaggaggccacagaacagacttttttcttttttttttttttttttttttttgagacggaattttgctcttgtcgcccaggctggagtgcaatgatgcgatctctgctcactgcaacctctgcctcccaggttcaagcgattctcctgcctcagctgggattacaggcatgcaccaccacacctggctaattttgtatttttagtagagatagggtttctccatgttgctcaggctggtctcggactcccgacctcaggtgatccgcccgcctcggccacccaaaatgctgtgattacaggcgtgagccactgcacctggccttgcatttctgattaatgagagaaaacatattttcagagtttgctgggcactagtttccttttctctgaaatgactgttcatttt

SEQ ID NO: 210218 - DNA, 189 bp, Homo sapiens
atttttttaatgtgtcttataaagtcagtcttagaaaacattcctaaataatctcactattacgtggctaaattgtactctactagagaacacagaggatgctaaatctctgattataagaatataccgcctgtaatcccagaactttgggagaccaaggcgggcggatcacaaggtcaggagatccag

SEQ ID NO: 210219 - DNA, 243 bp, Homo sapiens
tgcacagagagataaggttagaaggagacaggagaaaacagagcaggaggcagcagaaccaactgtggcttggaccagggtcacaatcttacaagcctgccacgttggctagttgccagaggtccagcgtgtgacctgggagcacgggccttgaccccaaaggggcagctgcttctgtgccagctgacccccccaactgcaggactgtgggccttgactagccaaatctacatcttcaaggtg

SEQ ID NO: 210220 - DNA, 217 bp, Homo sapiens
agggagcagtaattccaaggtctggctttctgcaggaggctcagttctagcttcccaccttatttaagcccaaggccacatctactgtctcactatagatgttacaatcctgaggcccccatctataattttatgtgtctgtgcacacatgcacacatattaaccctctggttcctgtatacatttaggctagatagctcatcccccaataaacaca

SEQ ID NO: 210221 - DNA, 588 bp, Homo sapiens
ggggtcaccgtctgtctgctgtgcctgcctgcatcataattggaacctgtgctgtgttgtactcaatctcgttttctcacaccactaattgtgtgtagcacttcctgtgtgtaacatttctcctactaacctggcagtttttctcctcctcctgtcttttacagggctgtcatgtccgcttcttaaaggtagttcttcctctgctctttcctcatccactttccttccacaaaacacttgccttggtttttgtggctcccgggcctcagcctgcagccatgctctccacccttaaggatgcaccgcgtgttctggtagcttgaatctcacacctacttgtgtcttagtctgtgtgctcccttccaagcagccacggccctcccatgaaaaaaaatgccatgtcttaatcacccagagaatagaccagtctcccctcctcttcagattaggttagtttaaaattttacctgctgggcacggtggctcacacctgtaatcccagcactttgggaggccgaggcaggtggatcacccgaggtcaggagttcaagaccagcctgcccaacatggtgaaaccccgtctctacc

SEQ ID NO: 210222 - DNA, 1924 bp, Homo sapiens
agtgtaataaggtcccggagaagtgtcactggccctgagtgggacccggtagcccgttcgctccgcgccggcggcctgtccccgcggcttggcgggctagggcaggggaaatgttgcaggaggagtcggacctctctctcattattgcccagatagtccaaaagctcaagggctccaatttgtactctcagctggaacggcaggcctgggccagtcttcagagacctgagattaaacttgaatcactgaaagaagatattaaggaattctttaaaatatcaggttgggagaagaaacttcagaatgctgtttatagtgaactgagtgtgtttcctttacctagtcatcctgctgcacctcctgaacatcttaaagaacctttggtatacatgaggaaagcacagggaagttgggaaaaaagaattttgaagagtttaaatagtatgtgcactgaactgagtatcccactggcacgaaagaggccagttggagaacagaaagaacttcttaataaatggaatgaaatgggaactgatgaaccagatttaagccttttcagacctgtttatgcacctaaggattttcttgaggtattaattaatcttcgcaacccaaattatgaaaacggtgattctcttagtttcaggactcatttgggtttaattcaagttccactgaaagtaaaagacatccctgaattgaaagaatgctttgtggaacttggcttaaatataggacaactgggtatagatgattctacacaagtgcctcctgaactttttgaaaatgagcatgtacgtattgggcaaaaagttctagcagaacaagatagtgctgctgctcaacagtacatcagacaaggaagtcccacggcactgagagctgaattgtgggctctcattttgaatatttccagccaacctgaggatgtcttgtattatgagcagcttaagaccaatgtgatacaacatgaccttttggtggacagtctaatctataaagatgtgaagttgacagcaagcaatgatgattattattttgtatttgaagattatttatatcaggtattactttgtttttcccgggatacatctgtgttgagtcactttgcattcaacagtgcctcgccaccaaaatcatacataagaggaaaactaggactggaagaatatgctgtcttttacccaccaaatggtgttatcccttttcatggattttcaatgtatgttgcaccactttgttttctataccatgaaccttccaaattgtatcagatattccgtgagatgtatgtgcgttttttcttcagactccattccatctcttctcatccttctggtattgtgtcactctgtctgctgtttgaaactcttcttcaaacttatcttccccaactcttttatcatctacgagaaattggggctcaaccacttcgcatatcatttaagtggatggttcgagctttctctggatacttagctacagatcagctcttgcttttatgggatagaatcctaggatacaactctctggaaattcttgctgtgctggcagctgccgtgtttgctttccgagcagtgaacctgatggaggtgacatcactggctgcagctgaagcagttcttgctgacctttctactttaaaagttatgcctcttcttcagatttttctgtttgctactgtcacctgatcttcttcacagtcactggcaacacatctagtttttcattagaaacaaatcatgaactatgcaaactctgcataaaaccaaaatgaaactttgcatataagccaataaagatcatgttccctcttcagttaaacctaagtagtttctcactttttgaaacaataactctgcaccaaatattgcatcgcatgctgctgattttcaagagagaagcaataaacacaacttctgct

SEQ ID NO: 210223 - DNA, 1832 bp, Homo sapiens
cagcagagaattcacggacagaagaacaacacagcagggcagagagccacagagccactagcagatgtcagggagatgaagagaggggccacagtaaaataagactctgggatgaaggccagtcttcagagacctgagattaaacttgaatcactgaaagaagatattaaggaattctttaaaatatcaggttgggagaagaaacttcagaatgctgtttatagtgaactgagtgtgtttcctttacctagtcatcctgctgcacctcctgaacatcttaaagaacctttggtatacatgaggaaagcacagggaagttgggaaaaaagaattttgaagagtttaaatagtatgtgcactgaactgagtatcccactggcacgaaagaggccagttggagaacagaaagaacttcttaataaatggaatgaaatgggaactgatgaaccagatttaagccttttcagacctgtttatgcacctaaggattttcttgaggtattaattaatcttcgcaacccaaattatgaaaacggtgattctcttagtttcaggactcatttgggtttaattcaagttccactgaaagtaaaagacatccctgaattgaaagaatgctttgtggaacttggcttaaatataggacaactgggtatagatgattctacacaagtgcctcctgaactttttgaaaatgagcatgtacgtattgggcaaaaagttctagcagaacaagatagtgctgctgctcaacagtacatcagacaaggaagtcccacggcactgagagctgaattgtgggctctcattttgaatatttccagccaacctgaggatgtcttgtattatgagcagcttaagaccaatgtgatacaacatgaccttttggtggacagtctaatctataaagatgtgaagttgacagcaagcaatgatgattattattttgtatttgaagattatttatatcaggtattactttgtttttcccgggatacatctgtgttgagtcactttgcattcaacagtgcctcgccaccaaaatcatacataagaggaaaactaggactggaagaatatgctgtcttttacccaccaaatggtgttatcccttttcatggattttcaatgtatgttgcaccactttgttttctataccatgaaccttccaaattgtatcagatattccgtgagatgtatgtgcgttttttcttcagactccattccatctcttctcatccttctggtattgtgtcactctgtctgctgtttgaaactcttcttcaaacttatcttccccaactcttttatcatctacgagaaattggggctcaaccacttcgcatatcatttaagtggatggttcgagctttctctggatacttagctacagatcagctcttgcttttatgggatagaatcctaggatacaactctctggaaattcttgctgtgctggcagctgccgtgtttgctttccgagcagtgaacctgatggaggtgacatcactggctgcagctgaagcagttcttgctgacctttctactttaaaagttatgcctcttcttcagatttttctgtttgctactgtcacctgatcttcttcacagtcactggcaacacatctagtttttcattagaaacaaatcatgaactatgcaaactctgcataaaaccaaaatgaaactttgcatataagccaataaagatcatgttccctcttcagttaaacctaagtagtttctcactttttgaaacaataactctgcaccaaatattgcatcgcatgctgctgattttcaagagagaagcaataaacacaacttctgct

SEQ ID NO: 210224 - DNA, 850 bp, Homo sapiens
  misc_feature (759)..(759): n is a, c, g, or t
  misc_feature (782)..(782): n is a, c, g, or t
  misc_feature (793)..(793): n is a, c, g, or t
  misc_feature (813)..(813): n is a, c, g, or t
  misc_feature (825)..(825): n is a, c, g, or t
agtgtaataaggtcccggagaagtgtcactggccctgagtgggacccggtagcccgttcgctccgcgccggcggcctgtccccgcggcttggcgggctagggcaggggaaatgttgcaggaggagtcggacctctctctcattattgcccagatagtccaaaagctcaagggctccaatttgtactctcagctggaacggcaggcctgggccagtcttcagagacctgagattaaacttgaatcactgaaagaagatattaaggaattctttaaaatatcaggttgggagaagaaacttcagaatgctgtttatagtgaactgagtgtgtttcctttacctagtcatcctgctgcacctcctgaacatcttaaagaacctttggtatacatgaggaaagcacagggaagttgggaaaaaagaattttgaagagtttaaatagtatgtgcactgaactgagtatcccactggcacgaaagaggccagttggagaacagaaagaacttcttaataaatggaatgaaatgggaactgatgaaccagatttaagccttttcagacctgtttatgcacctaaggattttcttgaggtattaattaatcttcgcaacccaaattatgaaaacggtgattctcttagtttcaggactcatttgggtttaattcaagttccactgaaagtaaaagacatccctgaattgaaaagaatgcctttgtgggaacttgggcttaaaattattagggacaaactggggtatnagaatgaattcctacacaaagtngccctcctggnaaacttttttgaaaaattgngcaatgttacgntttttggggccaaaaaaaggttcct

SEQ ID NO: 210225 - DNA, 424 bp, Homo sapiens
agtgtaataaggtcccggagaagtgtcactggccctgagtgggacccggtagcccgttcgctccgcgccggcggcctgtccccgcggcttggcgggctagggcaggggaaatgttgcaggaggagtcggacctctctctcattattgcccagatagtccaaaagctcaagggctccaatttgtactctcagctggaacggcaggcctgggccagtcttcagagacctgagattaaacttgaatcactgaaagaagatattaaggaattctttaaaatatcaggttgggagaagaaacttcagaatgctgtttatagtgaactgagtgtgtgagttttcccacctattttacaatagtattttgtttagctatatttactttgtgagtaataaaaccagtattgttatatatacttgttgtatta

SEQ ID NO: 210226 - DNA, 1729 bp, Homo sapiens
agtgtaataaggtcccggagaagtgtcactggccctgagtgggacccggtagcccgttcgctccgcgccggcggcctgtccccgcggcttggcgggctagggcaggggaaatgttgcaggaggagtcggacctctctctcattattgcccagatagtccaaaagctcaagggctccaatttgtactctcagctggaacggcaggcctggggaagttgggaaaaaagaattttgaagagtttaaatagtatgtgcactgaactgagtatcccactggcacgaaagaggccagttggagaacagaaagaacttcttaataaatggaatgaaatgggaactgatgaaccagatttaagccttttcagacctgtttatgcacctaaggattttcttgaggtattaattaatcttcgcaacccaaattatgaaaacggtgattctcttagtttcaggactcatttgggtttaattcaagttccactgaaagtaaaagacatccctgaattgaaagaatgctttgtggaacttggcttaaatataggacaactgggtatagatgattctacacaagtgcctcctgaactttttgaaaatgagcatgtacgtattgggcaaaaagttctagcagaacaagatagtgctgctgctcaacagtacatcagacaaggaagtcccacggcactgagagctgaattgtgggctctcattttgaatatttccagccaacctgaggatgtcttgtattatgagcagcttaagaccaatgtgatacaacatgaccttttggtggacagtctaatctataaagatgtgaagttgacagcaagcaatgatgattattattttgtatttgaagattatttatatcaggtattactttgtttttcccgggatacatctgtgttgagtcactttgcattcaacagtgcctcgccaccaaaatcatacataagaggaaaactaggactggaagaatatgctgtcttttacccaccaaatggtgttatcccttttcatggattttcaatgtatgttgcaccactttgttttctataccatgaaccttccaaattgtatcagatattccgtgagatgtatgtgcgttttttcttcagactccattccatctcttctcatccttctggtattgtgtcactctgtctgctgtttgaaactcttcttcaaacttatcttccccaactcttttatcatctacgagaaattggggctcaaccacttcgcatatcatttaagtggatggttcgagctttctctggatacttagctacagatcagctcttgcttttatgggatagaatcctaggatacaactctctggaaattcttgctgtgctggcagctgccgtgtttgctttccgagcagtgaacctgatggaggtgacatcactggctgcagctgaagcagttcttgctgacctttctactttaaaagttatgcctcttcttcagatttttctgtttgctactgtcacctgatcttcttcacagtcactggcaacacatctagtttttcattagaaacaaatcatgaactatgcaaactctgcataaaaccaaaatgaaactttgcatataagccaataaagatcatgttccctcttcagttaaacctaagtagtttctcactttttgaaacaataactctgcaccaaatattgcatcgcatgctgctgattttcaagagagaagcaataaacacaacttctgct

SEQ ID NO: 210227 - DNA, 1383 bp, Homo sapiens
aaggctggtaccggccgcgatgtatggatcacctaaggattttcttgaggtattaattaatcttcgcaacccaaattatgaaaacggtgattctcttagtttcaggactcatttgggtttaattcaagttccactgaaagtaaaagacatccctgaattgaaagaatgctttgtggaacttggcttaaatataggacaactgggtatagatgattctacacaagtgcctcctgaactttttgaaaatgagcatgtacgtattgggcaaaaagttctagcagaacaagatagtgctgctgctcaacagtacatcagacaaggaagtcccacggcactgagagctgaattgtgggctctcattttgaatatttccagccaacctgaggatgtcttgtattatgagcagcttaagaccaatgtgatacaacatgaccttttggtggacagtctaatctataaagatgtgaagttgacagcaagcaatgatgattattattttgtatttgaagattatttatatcaggtattactttgtttttcccgggatacatctgtgttgagtcactttgcattcaacagtgcctcgccaccaaaatcatacataagaggaaaactaggactggaagaatatgctgtcttttacccaccaaatggtgttatcccttttcatggattttcaatgtatgttgcaccactttgttttctataccatgaaccttccaaattgtatcagatattccgtgagatgtatgtgcgttttttcttcagactccattccatctcttctcatccttctggtattgtgtcactctgtctgctgtttgaaactcttcttcaaacttatcttccccaactcttttatcatctacgagaaattggggctcaaccacttcgcatatcatttaagtggatggttcgagctttctctggatacttagctacagatcagctcttgcttttatgggatagaatcctaggatacaactctctggaaattcttgctgtgctggcagctgccgtgtttgctttccgagcagtgaacctgatggaggtgacatcactggctgcagctgaagcagttcttgctgacctttctactttaaaagttatgcctcttcttcagatttttctgtttgctactgtcacctgatcttcttcacagtcactggcaacacatctagtttttcattagaaacaaatcatgaactatgcaaactctgcataaaaccaaaatgaaactttgcatataagccaataaagatcatgttccctcttcagttaaacctaagtagtttctcactttttgaaacaataactctgcaccaaatattgcatcgcatgctgctgattttcaagagagaagcaataaacacaacttctgct

SEQ ID NO: 210228 - DNA, 1854 bp, Homo sapiens
cagcagagaattcacggacagaagaacaacacagcagggcagagagccacagagccactagcagatgtcagggagatgaagagaggggccacagtaaaataagactctgggatgaaggtatgaccaggacaagggccaggccagtcttcagagacctgagattaaacttgaatcactgaaagaagatattaaggaattctttaaaatatcaggttgggagaagaaacttcagaatgctgtttatagtgaactgagtgtgtttcctttacctagtcatcctgctgcacctcctgaacatcttaaagaacctttggtatacatgaggaaagcacagggaagttgggaaaaaagaattttgaagagtttaaatagtatgtgcactgaactgagtatcccactggcacgaaagaggccagttggagaacagaaagaacttcttaataaatggaatgaaatgggaactgatgaaccagatttaagccttttcagacctgtttatgcacctaaggattttcttgaggtattaattaatcttcgcaacccaaattatgaaaacggtgattctcttagtttcaggactcatttgggtttaattcaagttccactgaaagtaaaagacatccctgaattgaaagaatgctttgtggaacttggcttaaatataggacaactgggtatagatgattctacacaagtgcctcctgaactttttgaaaatgagcatgtacgtattgggcaaaaagttctagcagaacaagatagtgctgctgctcaacagtacatcagacaaggaagtcccacggcactgagagctgaattgtgggctctcattttgaatatttccagccaacctgaggatgtcttgtattatgagcagcttaagaccaatgtgatacaacatgaccttttggtggacagtctaatctataaagatgtgaagttgacagcaagcaatgatgattattattttgtatttgaagattatttatatcaggtattactttgtttttcccgggatacatctgtgttgagtcactttgcattcaacagtgcctcgccaccaaaatcatacataagaggaaaactaggactggaagaatatgctgtcttttacccaccaaatggtgttatcccttttcatggattttcaatgtatgttgcaccactttgttttctataccatgaaccttccaaattgtatcagatattccgtgagatgtatgtgcgttttttcttcagactccattccatctcttctcatccttctggtattgtgtcactctgtctgctgtttgaaactcttcttcaaacttatcttccccaactcttttatcatctacgagaaattggggctcaaccacttcgcatatcatttaagtggatggttcgagctttctctggatacttagctacagatcagctcttgcttttatgggatagaatcctaggatacaactctctggaaattcttgctgtgctggcagctgccgtgtttgctttccgagcagtgaacctgatggaggtgacatcactggctgcagctgaagcagttcttgctgacctttctactttaaaagttatgcctcttcttcagatttttctgtttgctactgtcacctgatcttcttcacagtcactggcaacacatctagtttttcattagaaacaaatcatgaactatgcaaactctgcataaaaccaaaatgaaactttgcatataagccaataaagatcatgttccctcttcagttaaacctaagtagtttctcactttttgaaacaataactctgcaccaaatattgcatcgcatgctgctgattttcaagagagaagcaataaacacaacttctgct

SEQ ID NO: 210229 - DNA, 1280 bp, Homo sapiens
aggtttccctgacttcttaaaccccttccaatctgttacttcttagtatatgaatgttggacaaaaaccagcccaataaaatgtaataggaatacatttaagtatcaacaaattgtatttaagctccaaaaagtcaataatatagaatgaagcatacctgatttgacagcaattccaatgaaaaagagttaatacaggccaagaatgtctctactgcttccctccaagtgctctgggctgtgacccagtgaacatttccagatcacagcccatgtttctttctggttgctcactctctgctgagaccctgctccacctcagatcttcacttttgaggcagttgctcgtcatttccagcccaaccctaatgccaccagctttgtggggccatctataagactatcagctggctttgctctcccctccttttgaaacaaccacatttcaccttacctaggaattactgaagttatcaaattgctatgcaaactccttgagtcagggaccagccattccttatattcatggtttctggatccacattagttccttttgtgttgcaggtttttaacaaacattgattgaataaataattggataatatgaggttagcactgcttagaacagatatctttgaccaaatttatgaaaacacatgcatgaaggacttctccctgttttcttcagtccagtgctggctgacttagagtcttaggttccaccatgaccaccatatttgatgagaaacatcagcagactctagggtacaggtgaaagtgacagtgatgcgggagacacctggaaatggtgggaaacaattggacatgtttatcttggaggaggaaaaaacaagggtaatcaggtagctggcttcctcatatctttgaagggctgacttatgaggaaggaagtagactgtttttgttgattgtaagggaaaaactaggtctaattggagagtgtatgtggaactctttagcagaggaagtggctggggcctaggactgtcaactcccagatgctggtgtgacttggatgttccattaccactaattaggagtgatgttttaggcaggaaggactagcgcagtggttcccaaaccttgctagtcctcagaatcacctgaggacttattaaaaattcacattctggctggctggcttatgcctgtaatcccagctctttgggaggctgaagtgggaggactgtttaagcccaggagttcaaaaccagcctgggcaacatagtgagaccttgtctctctacattaaaaaaaaaa

SEQ ID NO: 210230 - DNA, 532 bp, Homo sapiens
ttatccacatattatacattttttattttagttgtttaatgaaaataattgtaattcttttcagttctgccaaactgtttcctatccatgtgtcttatgcaagtacctgcaagaaaaagatgagggtttatctgttctacacccagagtacccaatagaacatcttggatgcatgttattgaaggcttaataattctaaatattcttcatatataacaaatgcttttgtaaatgaaaaatgcatcacgcaattttgatgatcaaagattaatcaggctgggtgttgggggctcacgcctgcaatcccaacactttgggaagcaaaggcgggtggatcatgaggtcaagagatcaataccatcttggccaacatggtgaaaccctgtctctactaaaaatacaaaagtaagctgggtgtggtggcacacacctgtagtcccagctactcggaaggctgaggaaaaggaactgcttgaacccaggaggtggaagttgcagtgagccgagatcatgccactgtactccagcctgg

SEQ ID NO: 210231 - DNA, 282 bp, Homo sapiens
tggtaggggaaggtagttgctagccaatgaatttcagatgatttcctacaatgctgagcaaaagttaaatgtttacacactgaagtgtgcctgcaaggccacaggtaacacatttactagattagtgaattgtgtctgtgtttttcttagaatactggaatgaaaaactgtatccaacttgtccctctttttgcaagcaataactgttaagaattagtcagcagtaagtatggtcatagactaaaataatgttccaagtgagtaaagagggcaagatattga

SEQ ID NO: 210232 - DNA, 155 bp, Homo sapiens
ccatgtttacgcctccctatacaaggtcagccctttgcctaacctctgagacacttgaggatcacatcgtcagactgtctccttattgtaatagtccccccccaacccccacaacaatccttttgaataaattctctttttatggaatccagatt

SEQ ID NO: 210233 - DNA, 500 bp, Homo sapiens
attgtagataattgctaagatttctttcttaaatctttgacagaagtgacagtaacccctatatctatagccaactgatttttgacaaagttccaagaacatacattggggaaaggacagtcttttcaataaatggtgttgtgaaaagctagatatccacatgcaaaagaatgaaactagacccccacgtcccaccctttacgaaaatcaacgcaaagtggatcaaagacctaaatataagacacaaaactgctagaggaaaacataggggaaacatcaggacataggtctgggaaaagattttttgaataagatttcaaaaccacaggcaacaaaagcaaaaataaatgagattatatcaaactgaagagtttctgtgcagcaatggaaacaacagagtagaaagaacctactggataggagaaaatatccgtattcatccaacagggggttaatatatatctagaatatacaaggaattcaaacatctcaacagcaaa

SEQ ID NO: 210234 - DNA, 522 bp, Homo sapiens
agtttcagattttgtctgaccgtatgattttcgtagaggtagacagaattacagatacctatttaggaatgtctctgaaatccaaaaaacatggttagaccttataggattgtataatgagtttcatcacgaagatctgtccttgacttggggccagaacaaaaatgttgcccaatcaaacggacaaaactaagccgacagcttcatattgggaacatttataagtctttaaaaattaagacaaaaattatttgtataagtatctatgcattaggtggctttatctgatttccatttagtttttagtctgatttctagttagttgtcttgctaacttttccaggagctttctcctatccaagtactaaccaggcctgatcctgcttagcttctgagaacagatgagctccaatctgaaatataacagcacttgtattcccatgagtttctcatatttgaaacatctgcattattttgactcctactttgtatagttttaaaagaagtcatgtaagtctcaaa

SEQ ID NO: 210235 - DNA, 407 bp, Homo sapiens
tgggcaatcctctgctcagttttaacgaggaacctcatgagcagagacttagaatggggctttagtctagagctccttagcacatgttattagaccctataaaccatctcattaatttttacatctctaagctaactggatcagatgtcctgcttcttcctgggcacataaatacaatattctctcccaaagtcaccatacccaaataagttcttccataaggttgcttagagattgtaaataattcatgtaaagtattaaacatggtttcttacatgtagtgagcagccaggaaatggtagctgctattttattattgctgctatcattattgcaatgtgtacctactgtgaacaaagcagcattataaatggaaagtaaagctggttggtggcacattcaaaact

SEQ ID NO: 210236 - DNA, 328 bp, Homo sapiens
acagattccttcattatacattcttttaataaggaatgagtgattaattacccaggaatgccaatgttttcaatgagtctgcaacacacatttattttttctgaagagagaaacagtatctgctccacctgcatgccagggctgtcaactaataaaacatcagaagtgacatgcaaaaacgaaagcagaaacagtgaacctaaaactgtctgacaagagttttcagaaaaatcaattatagagaatcaacagcaatttgattaaaggtttaagatcttttcatatttaaagtcctacaactggggagctcaatttcaacctcaattaa

SEQ ID NO: 210237 - DNA, 341 bp, Homo sapiens
cataaaaaggattgaaaagggagaaattaaggtaaccagtttttcaaggattcaggcttgccttttagccagattgtaaatacgatctggcagcaaatcttcttagggtttatattgagcttttgcataattaaccatatgtcttacagttaaaggaaaccattttaaatcttatctgaagtgagatgaagtataaactatattacttcctattattttaaaattgttattttaaaattttatatatagtaaaaatgaaccttttgaatatacagttctaatacatgtacggtttcatgtaaccatcaccatagtcaggatacagaacagttctaccaccc

SEQ ID NO: 210238 - DNA, 126 bp, Homo sapiens
tcccggggcagggtggctggagctgagtgagcaaggatgaagagggggagattaattcaggaagatcccgtgagcactgaaggccatgctaaagatgtgttcttttattttttttttttttgagat

SEQ ID NO: 210239 - DNA, 199 bp, Homo sapiens
ggttttctctcttcgacagagtcagatttcctacgcacatcgcagactttctgttcgtactgtgagcttcttccatgagctattttggggccgtaactgagttgcaaaaatctgtttcctggtttttgtattgaggttttatgttttgttttaaaacacacacacacacacacacacacacacacacacaccacaaaac

SEQ ID NO: 210240 - DNA, 374 bp, Homo sapiens
gaggttagagtatgctttggtcagcctggttgttatgttattttttattttatgacggagtctctgtctctcaccgagactggagttcactggcacgatcccagctcactgcaacctctgcctcccaggttcaagcgatcctcccatcctggcctcctaaatagctgagactacaggctcagcctcccaagtaactgcgactacaggtgcacgccaccacacccagctaatttttgtatttttagtagagacagggtttcaccatgttggccaggctggtcccaaactcctgacctcaagtgatccacccgccttggcctcccaaattgctgggattacaggcatgagccgccgcatctggccatcctggttat

SEQ ID NO: 210241 - DNA, 378 bp, Homo sapiens
cagaatcactaaacattgtggattttcagccatttgacattttaaggtacaaatagactttccctgcgttattaattccacatgtcattgctgaatactctttggttattcttcctttgaaatgtcaactttttgttcatagagttctactaacataggcctcctcctgaagatgattcgtctaggtttattcaatgtgtattctgtcacatcctaccttatcttcaaaaagggtgcattcattctctctttcccaaattgcaattttttgagtctgctggacattcttacagcttaatattcttttcaacaaactgaaacgttggtggaaggatggtggttctcaatgtaatattttgtgtgtaacgctagcaaatc

SEQ ID NO: 210242 - DNA, 115 bp, Homo sapiens
aaggtgatattaggttaagtttcaaatatgtggaagcagtagggtataccgaaatctagatgtcctttaagaatggatgtacagatttggatttaaagttggtggtagtcactgt

SEQ ID NO: 210243 - DNA, 351 bp, Homo sapiens
acagaggtgaaaggggactggggcaggtatgttggggctcgtgatacatgctcccaagcctgctttaatcagtcatatgcatcagggtaaggttgagctctgctgctttaaggaaagtctagaacccagggatctagtccagttagggtagggggaccttacagtgtcgcaggtgagaagggtgtggaggggaagcacctggaaactgctcatgtctccctgatctgcttccttagtctcgtttatttatttatttatttttgagacagagtcttgctctgtcgcccaggctggagtgcagtggcgtgatctcggctcactgcaagctccgcctcctgggttcacactatt

SEQ ID NO: 210244 - DNA, 319 bp, Homo sapiens
gatccctactaaatggctgtgtgacctggggaagtacttctgctttttgggtttcttcatttgaacaatgaatggaggactaggtaattggaatgctgttaaaccattcatgagaaatgcacccccatgatccagtcacctcccactaggccccacctccaagattggggattacatttcaatatgagatttgggtggggacacacatccaaactatatcagcagtactggacatttttcatgagagagaaggggcacaagaggatgtctggagctagcctctagaatgttggtgtggaaaatctctccaatgtttgaa

SEQ ID NO: 210245 - DNA, 188 bp, Homo sapiens
ttatcacttcaaacttctaaatgcccatgttgataattggtcccaaaaagacattatcagttggtgcagaagtatattcctgtgagctttccataggtttctccaaaaaaggattgggtattttggatttccagctatcttggtattatctgctattctaatccagccatcacgaaataccaaaggag

SEQ ID NO: 210246 - DNA, 603 bp, Homo sapiens
gggagctcagcgaggaggagaggagcctgggcagctgtctctgtcctccaccccttttcctaaatttaggggaagctgagtcaccatgccagctgcagggagggaaggaaacaccctccctggagatggaccgtgggtttagggaagcagcttggggcaggccagctggctcaggacctggtgtggggacacaggctccctgctcctatacttcagagcagagcagagtccccagctccactattggtataatagcttgaaattggccattgcaggagtatttacaccatggaaattggcaatcagcctcacctcccatagagagctggcctagcagtaacaattccttttacctgagcatcggaacaaaggatgggcagttcttaacctcggatgaaacgctccatgggtggtccatatgggctttgacttctgccttctcccacatctgggcccctgagataaagatacccccctggctttgtcagcagagatccttttcttcttggtttttttgaggtgagagggatggggctttctgaattccctgggaatttaattcctctcccaatattttgcaaggttggagtggtggcctaaaga

SEQ ID NO: 210247 - DNA, 428 bp, Homo sapiens
cggcccactgcaacctaagcctcccaagttctagccattctcctgcctcagcctcctgagtagctgggactacaggcgcccgccaccacgcctggctaattttttgtatttttagtagagacagggtttcaccgtgttagccaggatggtctcaatctcctgacctcaggtgatccgccagcctcggcctctcaaagtgctgtgattacaagcgtgagccactgcacccagccaaaggcagtcttttagaaggactgagacttacaagaggctaaaaaggaaatctcaaaattttcgactcatcattcatatatatatatagatagatagatagatagatagatagatacacatataaataatgagtttctaggtcccttggttcacctccattgtaagtgaatttagttttcttttggctgcagtat

SEQ ID NO: 210248 - DNA, 392 bp, Homo sapiens
gaggaacacatgctgtgattcagcttgcctctgtcaaggctgatcagaccagttagttgtttcttactgtttttcctaaaacagatgtcaagagacagatatgggaattctgggacagtagaataggtaggtaccctgattacacgtaactgggtctgttttagccaagtctgttttctacaaatggatcactcatgggagccatttattttcccttaaaaattatttgggtgtgtttttatgctgtacatgaaagcagtggcctctgtctcttgggatgactggcacagaaatatccttatccctgggataaggctatttgactccttggatcatctcctagagataggaagatacttagactgaaagacataatttacttggcctggaga

SEQ ID NO: 210249 - DNA, 168 bp, Homo sapiens
attcctatcagcaaagtatgagagtacctattttacccatagccttgccaaaagattatgcaaacctttggacatttatctactgatgggacgcaccagtcttgctcccatcagccagtcttctatgtaggcagagctttgtcttttcaaagggggtggggtagggtc

SEQ ID NO: 210250 - DNA, 369 bp, Homo sapiens
attacaggtgtgagccaccacacccggcctagaagaagatgaggattttgaataggactcctaagagatcacttgtagtgtcttaaatatgccatttaagaaagaaaagttgcatatagaggtttaggttaactctgagaaaagccaggcctgccattcaaaatacagcactttccagagcatactgctttaaaaagttgaataatacttggtttcaaaaaccttgtgtaaatgcattatattttatttatgatatgtgcttcctaacaaatttgaaagaaagagatcttagtgtagcttccatctagtgataatgccagctgccctttattttggattttcccgtgctatttataaaaccaatctctt

SEQ ID NO: 210251 - DNA, 771 bp, Homo sapiens
ttgagaagagttcagaggagcctgactagagttagggtaaggaagaggggctttgtcacaagtgaagaaactaactgtaaatcaataagatttagaaggaaaaacgaactataaataaattacagaaaaatgtaatgaccacatagcatatctgtctgtgtatatctttaggtcttttttgttgataacacatcagtttataatattaaaatgttcaaagataaaaatgaacgttcacgtcacccctttcacctgcttgttccctgggaaaagatgttagatcctctgtaaagtctggagaatgtctttataataacacatcttgacatgtgcatagatgttttgttaacaaaaagtagactcgtagcatttcaaaacgttttcttctgtgtgcagtgtgatttctgctccttggatggatttcattacttttctataatcagcatccttctgtgtctttctataaagtttgtacagatagggagacacataaaagtgttaatgtattgatagttttgaccttataaatgtttaagactactgaatggcacaaaaccaacattgtaacatgtataatgtgcaacatactactgaagagatcagattttaaaatggacaaatgtataaagaaaaaaataggcagctcataaaagaagaaatgtaaatggccgatggaatgtatcttaaaatagtcaaccgttttgtaaacaaggaacttcaaattaaaatgatattggctactgtcaaatatttaaaagatgaacaatgttt

SEQ ID NO: 210252 - DNA, 457 bp, Homo sapiens
tcatttttccccatcaggcttctccacactacatctgactaaagtaacagcctcctaactagggttcctgacccaagaacctctaatttcagctttatcctccctgctatcagcagttccacctaaaactcagctctcacacctcccctggggagaacacaatggcatggcacatgtgaatgtttagcagtgcttttattgtttaattgttctgatgggagcaagacatcttgctccccatcagggacattgattttctcaaagaggaggaacatgactgtttcttggaagagataatgacaaagagggaagacttggtggtagcccctgcaggcatcacactgatgggacgaagatgcgccaactaaaaatattaaacacaaactaccacctacctccctcaccaaagcccataaaaataaaaaattataacaaaccctgatgggagcaagatgcg

SEQ ID NO: 210253 - DNA, 220 bp, Homo sapiens
tagcaggagcacttcaacagaacagaggtgagattagtgtcagatcactaaatcctaagtctcttctgtgcatctctacctgctctatttcatcatgctcccttccctgcacacctccagccgtctgtctactaacaagagacccgtacctcagtcccactgagccaggtgggactgggccaaacctccctatttgattcttgcctcatcttccctggga

SEQ ID NO: 210254 - DNA, 390 bp, Homo sapiens
ggaccattgctatacatctattaaatacactctgggtttaaaatgttttatcactgctcaaagtgcattccacattcaagctatgctcaattaattggaaattctcaagtgtgctgtatacagttctctttaatttctgcatccttgcatcatattcctatcactgattagaatgttctttcccatgtccatctcctttttattgctggctaacttttccttattgtttaaacctctattcaattgtcacttcctccagaacaactcttcaaatttccaggatgatacggtgttttgggtcatcagagtcccttgatcttaattgtagccttattgtctaactttcgtattagaatttacatccttgaggttagggataaggtatgtgtg

SEQ ID NO: 210255 - DNA, 487 bp, Homo sapiens
aaatctgtacctaagactggtgcgtgagagactcacgttcctccatttcgaatctggttaacttgctatgattgagaagctcgctcacaaatcctcaccctctcattcctatcctttctggattgagtgaaagattttcaggttgtgaaggctgaagaaaatggctgctgacttcacaacctgtttcagccaaattgcaaagccccaaagggtcagtaaaattcttgctgggcttcatcagacattacatttcataggggcacgggaggagtgtgctcttctgtctaatgaaatgtgggccttcagcctcacttccactgtgattcttgaaaaacatttatttcctcactaacggttcagtgttcagcaacctgggaggtttgccctagtactattctacaaggtcacaggtatactttgcaaggttctgcctctctttctctcggagagcttattctctcttgtggcctaaacctcacctctgtct

SEQ ID NO: 210256 - DNA, 418 bp, Homo sapiens
tgcatcttgatttgataaaatccactattaaactgggaaagacttctggagggacaccggtaccaccacccagaccacttagccatgggcttggtctctaactaaggcaggtgtgtgctgtagcaaacatctaacgttttagataaggccatacagttttacacacacgtgcacacacgcacacacacacacacaccaggtttacaatggaaaaactttaaaaccaacaagaaatttaaagaacagggtggtatcaatttctgatacaccaagtaccagaaaatactggagcaccatctatcgcagtgctactcaaagtgtggtctggtccagcattgctttttactggtttgcaagtgagaaacaattgagtgaaaccttttagaaacttgtatagcaatttaacattgccatgaca

SEQ ID NO: 210257 - DNA, 350 bp, Homo sapiens
tcctaattccaatggggaatacattatacaaacaaagaaaaataaacaaaaataatgatttcaggttgtagtcagtactcttaagaacaataggctgggagcagtggctcacacctgtaatctcagtactttgggaggctgaggcaggtagatcatgaggtcaggagtttgagaccagcctgaccaacatagagaaaccctatctcttctaaaaatacaaaaattagccagacgtgattgtatgctcttgtaatcccaactactcaggaggctgaggcaggagaattgcttgaacctgggaggcggaggttgcagtgagctgagatcacaataatgcactccagcctggg

SEQ ID NO: 210258 - DNA, 351 bp, Homo sapiens
gcatttgtgctagtttcttatcttaggtgatcagaaaggaagtgacagaggcaaccacttttagtgaagatacatgtagaatcttcagcaagtgatattgctacaaatcagatggcaccacccagatggtaagttcactgtgtttattccaactctgcattccactgtcagtaggatggttatctatgcattcagcactgcacaaattgtacaagccagtgagccttctgcccagaatcataaaatgaaagcaagaatattggaagccaaaaagacttcttcatatgtttgaaagttcagcttttccttttcattaaaaattcacttccccccactccccatgcaagaatt

SEQ ID NO: 210259 - DNA, 384 bp, Homo sapiens
cacagtgggatccacggcctcactcaaaagagagctatggttcccagatccctgacaagagggccacaatctgaaaaggggttcctggttagctcttttaggcttagcctgagaacagaattagcctcatatttttaggccatttgccatacacattttctctcattctcaactgatacgggtggggggagattttcgcagtgatgttggtaatttatagttagtaaataaaccatgtttccatatgcaaggattcacaccaggggatcctgcccacaggtatctggaggtcaaattcgtatgtgctttctgccaatctgagccactgcctctgtgtctctgagaataatatactctgcaagaagggacgcacaagcaatagtg

SEQ ID NO: 210260 - DNA, 369 bp, Homo sapiens
ttttttctcactggggcaccatctttgcttttcattacactctagaccagtttgacatccctatgtccagagctcttcctctatgtgggttgatttggtttttgatgtcactgagcgctacattttatacttgtcacttatggatgtcattctagtgtcacaagagctcttttcaaggtatcaagtgatcaaaatcatttatatagagatctcctgaaaacatgtgtgaccatctatcttgggaagtttcataaacctgatgctattttgttgtttccattttgttttcccatatactgaaaagaacagggccatgagcggttcttatgcaatatggtttgatatatattttgttgagatgacctaaca

SEQ ID NO: 210261 - DNA, 1499 bp, Homo sapiens
  misc_feature (1243)..(1243): n is a, c, g, or t
  misc_feature (1247)..(1247): n is a, c, g, or t
cgcgagtaggaagtggtgagttcggagtagagatggccgcgcttgcaccgctgcccccgctccccgcacagttcaagagcatacagcatcatctgaggacggctcaggagcatgacaagcgagaccctgtggtggcttattactgtcgtttatacgcaatgcagactggaatgaagatcgatagtaaaactcctgaatgtcgcaaatttttatcaaagttaatggatcagttagaagctctaaagaagcagttgggtgataatgaagctattactcaagaaatagtgggctgtgcccatttggagaattatgctttgaaaatgtttttgtatgcagacaatgaagatcgtgctggacgatttcacaaaaacatgatcaagtccttctatactgcaagtcttttgatagatgtcataacagtatttggagaactcactgatgaaaatgtgaaacacaggaagtatgccagatggaaggcaacatacatccataattgtttaaagaatggggagactcctcaagcaggccctgttggaattgaagaagataatgatattgaagaaaatgaagatgctggagcagcctctctgcccactcagccaactcagccatcatcatcttcaacttatgacccaagcaacatgccatcaggcaactatactggaatacagattcctccgggtgcacacgctccagctaatacaccagcagaagtgcctcacagcacaggtgtagcaagtaatactatccaacctactccacagactatacctgccattgatcccgcacttttcaatacaatttcccagggggatgttcgtctaaccccagaagactttgctagagctcagaagtactgcaaatatgctggcagtgctttgcagtatgaagatgtaagcactgctgtccagaatctacaaaaggctctcaagttactgacgacaggcagagaatgaagcctttgtatgacagacccatgtatttttggcatgaggaactaacagtccattactctatcttcagcctatcaggatcacagttttaaggaagacttggtttgttgaatatgacaatgaaatctgtgtgtatcagatttttattgaagcattcatcagcagcctcaaccagttttcattgtccatttactagattcaatcgtctctgagtatatagggctgatgttagcaagaccctaaaaatgtccattgaaccctgtttcaaaaatgaaaaacacacctctatnaaantgtgtactgggaataagctttgtatttacatacacttaggggaattgttaacaactctgtaatgtttggaccaaaccagatgatattacttttgctataaaacttattacactgtaccttttaatacaagatagcccagaatatttctacagttagaaattacgtttttgtttacctcacgacatagaagaatataacattcttaaactgctggatgatctgaaagacattagtcaatttcatgatctcata

SEQ ID NO: 210262 - DNA, 551 bp, Homo sapiens
  misc_feature (372)..(372): n is a, c, g, or t
  misc_feature (390)..(390): n is a, c, g, or t
  misc_feature (416)..(416): n is a, c, g, or t
  misc_feature (424)..(424): n is a, c, g, or t
  misc_feature (550)..(550): n is a, c, g, or t
cgcgagtaggaagtggtgagttcggagtagagatggccgcgcttgcaccgctgcccccgctccccgcacagttcaagagcatacagcatcatctgaggacggctcaggagcatgacaagcgagaccctgtggtggcttattactgtcgtttatacgcaatgcagactggaatgaagatcgatagtaaaactcctgaatgtcgcaaatttttatcaaagttaatggatcagttagaagctctaaagaagcagttgggtgataatgaagctattactcaagaaatagtgggctgtgcccatttggagaattatgctttgaaaatgtttttgtatgcagacaatgaagatcgtgctggacgatttcacaaaaacngatcaagtcctctataangcagtctttgatagagtcataacgtnttggagantcctgatgtgtgaacacaggagtatgccgtggaaggcacatacatccataattgtttaagaatgggagactcctcagcaggccgttggattgaagagattgatatgagtgagagcggagccctctng

SEQ ID NO: 210263 - DNA, 449 bp, Homo sapiens
actatccagatgccatggttcaatccagactccctaggaaagaagactctaagtcatccattttatttcatttcccgttttgtgtggttcctggggagaatgcattgttatgggggtggccattgttttaatgggcttgggcatttttaccacactcagtagggactttctgtcccccaagggatctgatctcaaggagacaattctcagaaaagctctcataaataacagtgagtcagaaccacaaaattaagatgtttttagtttcagagtaggcacctaaatgtactctacttggtttatgacaagttaagtataatctgaaactaacacaatctaaaatgtaatggcacaacaggagaactgaacatgtttgtgtttttctaaaaagaaaattaaatctttttttttcattggttcaacccaataaacaaccattaaaatgtaaa

SEQ ID NO: 210264 - DNA, 506 bp, Homo sapiens
atgatagactggattaagaaaatgtggcacatatacaccatggaatactatgcagccataaaaatgatgagttcatgtcctttttagggacatggatgaggctggaaaccatcattctcagcaaactatcgcaaggacaaaaaaccaaacaccgcatgttctcactcataggtgggaattgaacagtgagaacacatggacacaggaaggagaacatcacacaccggggcctgttgtggggtgggggtaggggggaaggatagcattaggagatatacctaatgttaaatgacgagttaatgggtgcagcacaccaacatggcacatgtatacatatgtaacatgcacgttgtgcacatgtcccctaaaacttaaagtataaaacaaaacaaaaacaggcgtgggggtggggtgtggacctgtggtctcagctacttgtggggctcgggatcacttcagctttggaggtcaaggctgcattacgccatggtcgtgccactgtattt

SEQ ID NO: 210265 - DNA, 388 bp, Homo sapiens
atgtactctgtggatttatagttgaagactgtagggagtgttattgccccgtttgtcttcaccactgatgagatgcggagggaaatgcaatcttcccatagctgagcttatgtcaaaaagaaataaaaagtgagatgtgtctgaaatcacataactcatgaagagtaaatagagttgcaaaatatgccatattctctgtttatttatctggcaagagcacctgtaagatcaggactggcagtcaaatcacacggctgtcatctcttcccatggaggggttcagaaccactgattctgccaggtctctgcaattgcactgcatggaactgggactggtcagaggatttactatttactcaaagaatctgcagttgttctactgactaca

SEQ ID NO: 210266 - DNA, 482 bp, Homo sapiens
tttgatgctggtatccatatccctccttctcatcaacaacaaaaaggatgactacttaagattctgttgtcttaaaggctttattaagttattgcccaaggattatccatctgcaaaataaaagcaattgcaatttctgcatgactgcaagaaaaatagatactattccttagtatgctattttacaagtttcttaaaggttatttgaaatttcagatggtaacaagcttggaattgtctttttcttcagctatggactgtatcaaagtttatgggctataattgtattttggtttctgccaggcatcaggatagctcatttgcatgactggtacaaaatttacttattcagtgaatcatgctcagctgctgtactgttcaatctgtaataataactgcagggtgactgactaacgataactaatcttctctcaactacaaaagcatgtaaattagtaaaataaatgtttagttgtgtatgt

SEQ ID NO: 210267 - DNA, 1549 bp, Homo sapiens
ggagcgtctctgcccggccgcccatcgtctgagatgtggggagagcctctgccccgccgccccgcctgggatgtgaggagcgcctctacccggccgcgaccccgtctgggaggtgaggagcgtctctgcccggccgccccgtctgagaagtgaggagaccctccgcctcgcagccgccccgtctgaaaaggtggctgtcaatagattggcccaaaaggaagaacaaggaaaagggcaccaaagaagataaatgaaaatacaagggtataagctgaactgtggacatcctgccactgggaattaagttaaagtagaaaaaagcagaatgtaatggggagtcccctcacaagaagaatttggatcaaagcatggcagtgaggggaagcattgagcagtgccgatttcaaatgaagactgacttgatcctgaacataacctacaagaagaaagggaccacaggctatacacaaagcatggtgccggcatctgcttctggtgagggcctcaggaagcttacaatcatcttggaaggtgaagaggaagccagcgcatcacatggcaagagagggagcaagagagaaggggacagtgccgcacactttaaaaaaaaaccttatctcacgaggcagaactaactgagtgagagttcactcatcaccaagggaatggtgctgagtcattcatgagggatccccctgccgcccccgtgatccaatcacctcccaccagaccccacctccaacactggggattacatttcaacatgagacttgggggggacaaacatccaaaccatgtcagtcttcaacccctcttcctgacatacaactcctaaaactcttagaatctccaaagtgctgtctttttatgtgttagtaattggctagtggctcacagccccttggtagcttcaggatggggcctggtcactggaaagaccaagtcataattagagggttgagactttcagcccacccccaacatctggggagaagagaagggccgaagctcaaattgatcaccaatggccagtgttttaattaatcatgtggccaggcgtggtggctcacgcctgtaatcctagcactttgggaggctgaggcaggtggatcacgaggtcaggagatggagaccatcctggctaacacggtgaaactccatctctactaaaaatacaaaaaattagctggatgcggtggcatgcgcctgtagtcccagctactcaggaggctgaagcaggagaatcacttgaacccgggaggcagaggttacagtgagccgagattacaccactgcactccagcctgggtgacagagccagactccatctcaaaaaaacaacaacaaaaaaagacaaataaaataaataaaaataatgaatcatgcctatgtaatgaagcctccataaaaacacaaaagaatagggttcagggagcctctggatagctgaatatctggaggctcctagagagtggcatgtccagagggcatggaagctctgtgcccctttttcaccctatacacctcatcatctgtatgcttggtaata

SEQ ID NO: 210268 - DNA, 1627 bp, Homo sapiens
ggagcgtctctgcccggccgcccatcgtctgagatgtggggagagcctctgccccgccgccccgcctgggatgtgaggagcgcctctacccggccgcgaccccgtctgggaggtgaggagcgtctctgcccggccgccccgtctgagaagtgaggagaccctccgcctcgcagccgccccgtctgaaaaggtggctgtcaatagattggcccaaaaggaagaacaaggaaaagggcaccaaagaagataaatgaaaatacaagggtataagctgaactgtggacatcctgccactgggaattaagttaaagtagaaaaaagcagaatgtaatggggagtcccctcacaagaagaatttggatcaaagcatggcagtgaggggaagcattgagcaggaaaccatgagaccaaaatttaaaagccagagcttcctgactccaaaatcctctttctttcctgttatcctgctgaagtgccgatttcaaatgaagactgacttgatcctgaacataacctacaagaagaaagggaccacaggctatacacaaagcatggtgccggcatctgcttctggtgagggcctcaggaagcttacaatcatcttggaaggtgaagaggaagccagcgcatcacatggcaagagagggagcaagagagaaggggacagtgccgcacactttaaaaaaaaaccttatctcacgaggcagaactaactgagtgagagttcactcatcaccaagggaatggtgctgagtcattcatgagggatccccctgccgcccccgtgatccaatcacctcccaccagaccccacctccaacactggggattacatttcaacatgagacttgggggggacaaacatccaaaccatgtcagtcttcaacccctcttcctgacatacaactcctaaaactcttagaatctccaaagtgctgtctttttatgtgttagtaattggctagtggctcacagccccttggtagcttcaggatggggcctggtcactggaaagaccaagtcataattagagggttgagactttcagcccacccccaacatctggggagaagagaagggccgaagctcaaattgatcaccaatggccagtgttttaattaatcatgtggccaggcgtggtggctcacgcctgtaatcctagcactttgggaggctgaggcaggtggatcacgaggtcaggagatggagaccatcctggctaacacggtgaaactccatctctactaaaaatacaaaaaattagctggatgcggtggcatgcgcctgtagtcccagctactcaggaggctgaagcaggagaatcacttgaacccgggaggcagaggttacagtgagccgagattacaccactgcactccagcctgggtgacagagccagactccatctcaaaaaaacaacaacaaaaaaagacaaataaaataaataaaaataatgaatcatgcctatgtaatgaagcctccataaaaacacaaaagaatagggttcagggagcctctggatagctgaatatctggaggctcctagagagtggcatgtccagagggcatggaagctctgtgcccctttttcaccctatacacctcatcatctgtatgcttggtaata

SEQ ID NO: 210269 - DNA, 2104 bp, Homo sapiens
gatgaactgccggtcttaaagggaaaggctgcaggctgcctctgacttgctcctgacctcttcacccctttcccaaccccagctgcctgtggaggaaccgattgtgtccacagatgaggtcatcttcccactcaccgtttcactggatagactgcccccagggacacctaaggccaagattgtagtgactgtgtggaagcgggagattgaggcaccagaggtcagagatcaaggctacctgcgattgctgcagacccgatctcctggggagacattccggggcgagcagagcgctttcaaggcccaagtgagcacgctgctgactctgctgccccctccggttctgagatgccggcagttcactgtggctggaaaacacttgaccgtgctcaaggtgctgaacagctcctctcaggaggaaatctccatctgggatatccgaatcctccccaacttcaacgccagttatctacctgtcatgcccgatggctctgtgctgctggtggacaatgtctgtcaccagtctggggaagtctccatgggctccttctgccgcctacccgggacctctggctgcttcccctgcccgctgaatgccctggaggaacacaacttcctgtttcagctgagagggggtgagcagccccctccaggggccaaggagggcctggaagttcccctgattgctgtggttcagtggtctaccccaaagctgcccttcactcagagcatctacacccactaccgcctgcccagtgtccgcttggaccgcccgtgttttgtgatgaccgcttcttgtaagtcccctgttcggacctacgagcgtttcactgtcacctacacgctgcttaacaatctccaagacttccttgctgtgaggctcgtgtggaccccagagcatgcacaggctgagtggctttgagaatcagatgagactgtgctggcgaaggccctgtgggaatgaggaacgctgtagtgtttgctggtccctgtttctgcccccaggaaagcagctgtgtgaggaggagcgccgggccatgcaggctgccctggactccgtcgtctgccacacgcccctcaacaaccttggcttttcccggaagggcagcgcgctcaccttcagtgtggccttccaggctctgaggacggggctcttcgagctaagccagcacatgaaactgaagctgcagttcaccgccagcgtgtcccaccctccacccgaggcccggcccctctcccgcaagagcagccccagcagccctgctgtccgggacttggtggagaggcatcaggctagcctgggccgctcccagtccttctcccaccagcagccttcccgaagccacctcatgaggtcgggcagtgtgatggagcgcagagccatcacgccccctgtggcctctcctgttggccgccccctctacctgcccccggacaaggctgtgttgtctctggacaagattgccaagcgcgagtgcaaggtcctggtggtggaacccgtcaagtagcaccgtgccagctctgttccctcttacactccagagacccaacgcccccagaggggatccctgctcccgggctgtgcctcccctgggatgcctcccagacgggggtgaagaggcctggcagagctgcctgtcttgtgtctgctgatgagggatgggggaagaagctgtgaagtgggcgggcatggctgggactaagccaccagtattccccgagttcctgtggggggggctggccccacccctaggccagggcaagggttcccagagctcccttgtccccggccctttaccctggttctgagtttacaaagtctcttcctcattcccgttgagttctttcccacctctgacattccctccctccctcccgcagggctgagattagagggtggtgatggctaagggcccctgacagtgaccttcctgtctcaggggttggggacagggccaggtagcctcctgccccttatgtttacgtttgcagcctgaagcactttaatttttttttttttggtctgttcctgtaacttattttccaactattgcttccaactgaaataagactattaaatgcctgttcaggagggaaaaaatga

SEQ ID NO: 210270 - DNA, 2143 bp, Homo sapiens
tccagtcattcggctcagtaccccggatccggcgctgccgggtctcggttcgggttcgttgccccggtgccgggaccgggccggtctctccggccgccccagccgggctcagcatccggagctgcctgtggaggaaccgattgtgtccacagatgaggtcatcttcccactcaccgtttcactggatagactgcccccagggacacctaaggccaagattgtagtgactgtgtggaagcgggagattgaggcaccagaggtcagagatcaaggctacctgcgattgctgcagacccgatctcctggggagacattccggggcgagcagagcgctttcaaggcccaagtgagcacgctgctgactctgctgccccctccggttctgagatgccggcagttcactgtggctggaaaacacttgaccgtgctcaaggtgctgaacagctcctctcaggaggaaatctccatctgggatatccgaatcctccccaacttcaacgccagttatctacctgtcatgcccgatggctctgtgctgctggtggacaatgtctgtcaccagtctggggaagtctccatgggctccttctgccgcctacccgggacctctggctgcttcccctgcccgctgaatgccctggaggaacacaacttcctgtttcagctgagagggggtgagcagccccctccaggggccaaggagggcctggaagttcccctgattgctgtggttcagtggtctaccccaaagctgcccttcactcagagcatctacacccactaccgcctgcccagtgtccgcttggaccgcccgtgttttgtgatgaccgcttcttgtaagtcccctgttcggacctacgagcgtttcactgtcacctacacgctgcttaacaatctccaagacttccttgctgtgaggctcgtgtggaccccagagcatgcacaggctgagtggctttgagaatcagatgagactgtgctggcgaaggccctgtgggaatgaggaacgctgtagtgtttgctggtccctgtttctgcccccaggaaagcagctgtgtgaggaggagcgccgggccatgcaggctgccctggactccgtcgtctgccacacgcccctcaacaaccttggcttttcccggaagggcagcgcgctcaccttcagtgtggccttccaggctctgaggacggggctcttcgagctaagccagcacatgaaactgaagctgcagttcaccgccagcgtgtcccaccctccacccgaggcccggcccctctcccgcaagagcagccccagcagccctgctgtccgggacttggtggagaggcatcaggctagcctgggccgctcccagtccttctcccaccagcagccttcccgaagccacctcatgaggtcgggcagtgtgatggagcgcagagccatcacgccccctgtggcctctcctgttggccgccccctctacctgcccccggacaaggctgtgttgtctctggacaagattgccaagcgcgagtgcaaggtcctggtggtggaacccgtcaagtagcaccgtgccagctctgttccctcttacactccagagacccaacgcccccagaggggatccctgctcccgggctgtgcctcccctgggatgcctcccagacgggggtgaagaggcctggcagagctgcctgtcttgtgtctgctgatgagggatgggggaagaagctgtgaagtgggcgggcatggctgggactaagccaccagtattccccgagttcctgtggggggggctggccccacccctaggccagggcaagggttcccagagctcccttgtccccggccctttaccctggttctgagtttacaaagtctcttcctcattcccgttgagttctttcccacctctgacattccctccctccctcccgcagggctgagattagagggtggtgatggctaagggcccctgacagtgaccttcctgtctcaggggttggggacagggccaggtagcctcctgccccttatgtttacgtttgcagcctgaagcactttaatttttttttttttggtctgttcctgtaacttattttccaactattgcttccaactgaaataagactattaaatgcctgttcaggagggaaaaaatga

SEQ ID NO: 210271 - DNA, 2223 bp, Homo sapiens
tccagtcattcggctcagtaccccggatccggcgctgccgggtctcggttcgggttcgttgccccggtgccgggaccgggccggtctctccggccgccccagccgggctcagcatccggagctgcctgtggaggaaccgattgtgtccacagatgaggtcatcttcccactcaccgtttcactggatagactgcccccagggacacctaaggccaagattgtagtgactgtgtggaagcgggagattgaggcaccagaggtcagagatcaaggctacctgcgattgctgcagacccgatctcctggggagacattccggggcgagcagagcgctttcaaggcccaagtgagcacgctgctgactctgctgccccctccggttctgagatgccggcagttcactgtggctggaaaacacttgaccgtgctcaagggtaagcagggctgccggctccagcctccgggagcaacaagggaactgattggatgcagttcctctgggcaggctggtgggtgctgaacagctcctctcaggaggaaatctccatctgggatatccgaatcctccccaacttcaacgccagttatctacctgtcatgcccgatggctctgtgctgctggtggacaatgtctgtcaccagtctggggaagtctccatgggctccttctgccgcctacccgggacctctggctgcttcccctgcccgctgaatgccctggaggaacacaacttcctgtttcagctgagagggggtgagcagccccctccaggggccaaggagggcctggaagttcccctgattgctgtggttcagtggtctaccccaaagctgcccttcactcagagcatctacacccactaccgcctgcccagtgtccgcttggaccgcccgtgttttgtgatgaccgcttcttgtaagtcccctgttcggacctacgagcgtttcactgtcacctacacgctgcttaacaatctccaagacttccttgctgtgaggctcgtgtggaccccagagcatgcacaggctgagtggctttgagaatcagatgagactgtgctggcgaaggccctgtgggaatgaggaacgctgtagtgtttgctggtccctgtttctgcccccaggaaagcagctgtgtgaggaggagcgccgggccatgcaggctgccctggactccgtcgtctgccacacgcccctcaacaaccttggcttttcccggaagggcagcgcgctcaccttcagtgtggccttccaggctctgaggacggggctcttcgagctaagccagcacatgaaactgaagctgcagttcaccgccagcgtgtcccaccctccacccgaggcccggcccctctcccgcaagagcagccccagcagccctgctgtccgggacttggtggagaggcatcaggctagcctgggccgctcccagtccttctcccaccagcagccttcccgaagccacctcatgaggtcgggcagtgtgatggagcgcagagccatcacgccccctgtggcctctcctgttggccgccccctctacctgcccccggacaaggctgtgttgtctctggacaagattgccaagcgcgagtgcaaggtcctggtggtggaacccgtcaagtagcaccgtgccagctctgttccctcttacactccagagacccaacgcccccagaggggatccctgctcccgggctgtgcctcccctgggatgcctcccagacgggggtgaagaggcctggcagagctgcctgtcttgtgtctgctgatgagggatgggggaagaagctgtgaagtgggcgggcatggctgggactaagccaccagtattccccgagttcctgtggggggggctggccccacccctaggccagggcaagggttcccagagctcccttgtccccggccctttaccctggttctgagtttacaaagtctcttcctcattcccgttgagttctttcccacctctgacattccctccctccctcccgcagggctgagattagagggtggtgatggctaagggcccctgacagtgaccttcctgtctcaggggttggggacagggccaggtagcctcctgccccttatgtttacgtttgcagcctgaagcactttaatttttttttttttggtctgttcctgtaacttattttccaactattgcttccaactgaaataagactattaaatgcctgttcaggagggaaaaaatga

SEQ ID NO: 210272 - DNA, 2570 bp, Homo sapiens
gatgaactgccggtcttaaagggaaaggctgcaggctgcctctgacttgctcctgacctcttcacccctttcccaaccccagctgcctgtggaggaaccgattgtgtccacagatgaggtcatcttcccactcaccgtttcactggatagactgcccccagggacacctaaggccaagattgtagtgactgtgtggaagcgggagattgaggcaccagaggtcagagatcaaggctacctgcgattgctgcagacccgatctcctggggagacattccggggcgagcagagcgctttcaaggcccaagtgagcacgctgctgactctgctgccccctccggttctgagatgccggcagttcactgtggctggaaaacacttgaccgtgctcaaggtgctgaacagctcctctcaggaggaaatctccatctgggatatccgaatcctccccaacttcaacgccagttatctacctgtcatgcccgatggctctgtgctgctggtggacaatgtctgtcaccagtctggggaagtctccatgggctccttctgccgcctacccgggacctctggctgcttcccctgcccgctgaatgccctggaggaacacaacttcctgtttcagctgagagggggtgagcagccccctccaggggccaaggagggcctggaagttcccctgattgctgtggttcagtggtctaccccaaagctgcccttcactcagagcatctacacccactaccgcctgcccagtgtccgcttggaccgcccgtgttttgtgatgaccgcttcttgtaagtcccctgttcggacctacgagcgtttcactgtcacctacacgctgcttaacaatctccaagacttccttgctgtgaggctcgtgtggaccccagagcatgcacaggctggtaggtcagctgccaggtaggaatttgttccccagggaggggaagagaaaggaaaaagtcagggaggcaggacagtgaaaacagccaaatttggtgccagccccatcacaggaggcgacttgtggcaggtggcttccgccctgtacctgggtggtctccccagtgtcctagatggagagtttagagaggcagtggggcagagtgactttcagggcatagacactggagctgcactcgctggtgtgaactctacttctctcctttactagctgtgtgaccttgaataagttacttaacctctctgggcctcagagtcctcacctttaaaatagagcaactcatatctgatggggctgtcatgcagatactgagttaatatacgtgacgtgccttgcacacagtacgtattagctgttgttatctacaacatgcacaaaagataacgtttgctcagtttactccacagagtggctttgagaatcagatgagactgtgctggcgaaggccctgtgggaatgaggaacgctgtagtgtttgctggtccctgtttctgcccccaggaaagcagctgtgtgaggaggagcgccgggccatgcaggctgccctggactccgtcgtctgccacacgcccctcaacaaccttggcttttcccggaagggcagcgcgctcaccttcagtgtggccttccaggctctgaggacggggctcttcgagctaagccagcacatgaaactgaagctgcagttcaccgccagcgtgtcccaccctccacccgaggcccggcccctctcccgcaagagcagccccagcagccctgctgtccgggacttggtggagaggcatcaggctagcctgggccgctcccagtccttctcccaccagcagccttcccgaagccacctcatgaggtcgggcagtgtgatggagcgcagagccatcacgccccctgtggcctctcctgttggccgccccctctacctgcccccggacaaggctgtgttgtctctggacaagattgccaagcgcgagtgcaaggtcctggtggtggaacccgtcaagtagcaccgtgccagctctgttccctcttacactccagagacccaacgcccccagaggggatccctgctcccgggctgtgcctcccctgggatgcctcccagacgggggtgaagaggcctggcagagctgcctgtcttgtgtctgctgatgagggatgggggaagaagctgtgaagtgggcgggcatggctgggactaagccaccagtattccccgagttcctgtggggggggctggccccacccctaggccagggcaagggttcccagagctcccttgtccccggccctttaccctggttctgagtttacaaagtctcttcctcattcccgttgagttctttcccacctctgacattccctccctccctcccgcagggctgagattagagggtggtgatggctaagggcccctgacagtgaccttcctgtctcaggggttggggacagggccaggtagcctcctgccccttatgtttacgtttgcagcctgaagcactttaatttttttttttttggtctgttcctgtaacttattttccaactattgcttccaactgaaataagactattaaatgcctgttcaggagggaaaaaatga

SEQ ID NO: 210273 - DNA, 1753 bp, Homo sapiens
gatgaactgccggtcttaaagggaaaggctgcaggctgcctctgacttgctcctgacctcttcacccctttcccaaccccagctgcctgtggaggaaccgattgtgtccacagatgaggtcatcttcccactcaccgtttcactggatagactgcccccagggacacctaaggccaagattgtagtgactgtgtggaagcgggagattgaggcaccagaggtcagagatcaaggctacctgcgattgctgcagacccgatctcctggggagacattccggggcgagcagagcgctttcaaggcccaagtgagcacgctgctgactctgctgccccctccggttctgagatgccggcagttcactgtggctggaaaacacttgaccgtgctcaaggtgctgaacagctcctctcaggaggaaatctccatctgggatatccgaatcctccccaacttcaacgccagttatctacctgtcatgcccgatggctctgtgctgctggtggacaatgtctgtcaccagtctggggaagtctccatgggctccttctgccgcctacccgggacctctggctgcttcccctgcccgctgaatgccctggaggaacacaacttcctgtttcagctgagagggggtgagcagccccctccaggggccaaggagggcctggaagttcccctgattgctgtggttcagtggtctaccccaaagctgcccttcactcagagcatctacacccactaccgcctgcccagtgtccgcttggaccgcccgtgttttgtgatgaccgcttcttgtaagtcccctgttcggacctacgagcgtttcactgtcacctacacgctgcttaacaatctccaagacttccttgctgtgaggctcgtgtggaccccagagcatgcacaggctggtaggtcagctgccaggtaggaatttgttccccagggaggggaagagaaaggaaaaagtcagggaggcaggacagtgaaaacagccaaatttggtgccagccccatcacaggaggcgacttgtggcaggtggcttccgccctgtacctgggtggtctccccagtgtcctagatggagagtttagagaggcagtggggcagagtgactttcagggcatagacactggagctgcactcgctggtgtgaactctacttctctcctttactagctgtgtgaccttgaataagttacttaacctctctgggcctcagagtcctcacctttaaaatagagcaactcatatctgatggggctgtcatgcagatactgagttaatatacgtgacgtgccttgcacacagtacgtattagctgttgttatctacaacatgcacaaaagataacgtttgctcagtttactccacagagtggctttgagaatcagatgagactgtgctggcgaaggccctgtgggaatgaggaacgctgtagtgtttgctggtccctgtttctgcccccaggaaagcagctgtgtgaggaggagcgccgggccatgcaggctgccctggactccgtcgtctgccacacgcccctcaacaaccttggcttttcccggaagggcagcgcgctcaccttcagtgtggccttccaggctctgaggacggggctcttcgaggtgggctggggagggtctgggctgagtgctgagtgatgcagaatgctggggtggacggaggcaggacccttagattttggggatgaaataaaaagcagacaggcgcttgaagggcacattcatgccg

SEQ ID NO: 210274 - DNA, 1973 bp, Homo sapiens
  misc_feature (1)..(2): n is a, c, g, or t
nncacgggccgggccctgctacctcagggggagcgaccacgctgcctgtggaggaaccgattgtgtccacagatgaggtcatcttcccactcaccgtttcactggatagactgcccccagggacacctaaggccaagattgtagtgactgtgtggaagcgggagattgaggcaccagaggtcagagatcaaggctacctgcgattgctgcagacccgatctcctggggagacattccggggcgagcagagcgctttcaaggcccaagtgagcacgctgctgactctgctgccccctccggttctgagatgccggcagttcactgtggctggaaaacacttgaccgtgctcaaggtgctgaacagctcctctcaggaggaaatctccatctgggatatccgaatcctccccaacttcaacgccagttatctacctgtcatgcccgatggctctgtgctgctggtggacaatgtctgtcaccagtctggggaagtctccatgggctccttctgccgcctacccgggacctctggctgcttcccctgcccgctgaatgccctggaggaacacaacttcctgtttcagctgagagggggtgagcagccccctccaggggccaaggagggcctggaagttcccctgattgctgtggttcagtggtctaccccaaagctgcccttcactcagagcatctacacccactaccgcctgcccagtgtccgcttggaccgcccgtgttttgtgatgaccgcttcttgtaagtcccctgttcggacctacgagcgtttcactgtcacctacacgctgcttaacaatctccaagacttccttgctgtgaggctcgtgtggaccccagagcatgcacaggctgccaggaaagcagctgtgtgaggaggagcgccgggccatgcaggctgccctggactccgtcgtctgccacacgcccctcaacaaccttggcttttcccggaagggcagcgcgctcaccttcagtgtggccttccaggctctgaggacggggctcttcgagctaagccagcacatgaaactgaagctgcagttcaccgccagcgtgtcccaccctccacccgaggcccggcccctctcccgcaagagcagccccagcagccctgctgtccgggacttggtggagaggcatcaggctagcctgggccgctcccagtccttctcccaccagcagccttcccgaagccacctcatgaggtcgggcagtgtgatggagcgcagagccatcacgccccctgtggcctctcctgttggccgccccctctacctgcccccggacaaggctgtgttgtctctggacaagattgccaagcgcgagtgcaaggtcctggtggtggaacccgtcaagtagcaccgtgccagctctgttccctcttacactccagagacccaacgcccccagaggggatccctgctcccgggctgtgcctcccctgggatgcctcccagacgggggtgaagaggcctggcagagctgcctgtcttgtgtctgctgatgagggatgggggaagaagctgtgaagtgggcgggcatggctgggactaagccaccagtattccccgagttcctgtggggggggctggccccacccctaggccagggcaagggttcccagagctcccttgtccccggccctttaccctggttctgagtttacaaagtctcttcctcattcccgttgagttctttcccacctctgacattccctccctccctcccgcagggctgagattagagggtggtgatggctaagggcccctgacagtgaccttcctgtctcaggggttggggacagggccaggtagcctcctgccccttatgtttacgtttgcagcctgaagcactttaatttttttttttttggtctgttcctgtaacttattttccaactattgcttccaactgaaataagactattaaatgcctgttcaggagggaaaaaatga

SEQ ID NO: 210275 - DNA, 2063 bp, Homo sapiens
  misc_feature (1)..(2): n is a, c, g, or t
nncacgggccgggccctgctacctcagggggagcgaccacgctgcctgtggaggaaccgattgtgtccacagatgaggtcatcttcccactcaccgtttcactggatagactgcccccagggacacctaaggccaagattgtagtgactgtgtggaagcgggagattgaggcaccagaggtcagagatcaaggctacctgcgattgctgcagacccgatctcctggggagacattccggggcgagcagagcgctttcaaggcccaagtgagcacgctgctgactctgctgccccctccggttctgagatgccggcagttcactgtggctggaaaacacttgaccgtgctcaaggtgctgaacagctcctctcaggaggaaatctccatctgggatatccgaatcctccccaacttcaacgccagttatctacctgtcatgcccgatggctctgtgctgctggtggacaatgtctgtcaccagtctggggaagtctccatgggctccttctgccgcctacccgggacctctggctgcttcccctgcccgctgaatgccctggaggaacacaacttcctgtttcagctgagagggggtgagcagccccctccaggggccaaggagggcctggaagttcccctgattgctgtggttcagtggtctaccccaaagctgcccttcactcagagcatctacacccactaccgcctgcccagtgtccgcttggaccgcccgtgttttgtgatgaccgcttcttgtaagtcccctgttcggacctacgagcgtttcactgtcacctacacgctgcttaacaatctccaagacttccttgctgtgaggctcgtgtggaccccagagcatgcacaggctgagtggctttgagaatcagatgagactgtgctggcgaaggccctgtgggaatgaggaacgctgtagtgtttgctggtccctgtttctgcccccaggaaagcagctgtgtgaggaggagcgccgggccatgcaggctgccctggactccgtcgtctgccacacgcccctcaacaaccttggcttttcccggaagggcagcgcgctcaccttcagtgtggccttccaggctctgaggacggggctcttcgagctaagccagcacatgaaactgaagctgcagttcaccgccagcgtgtcccaccctccacccgaggcccggcccctctcccgcaagagcagccccagcagccctgctgtccgggacttggtggagaggcatcaggctagcctgggccgctcccagtccttctcccaccagcagccttcccgaagccacctcatgaggtcgggcagtgtgatggagcgcagagccatcacgccccctgtggcctctcctgttggccgccccctctacctgcccccggacaaggctgtgttgtctctggacaagattgccaagcgcgagtgcaaggtcctggtggtggaacccgtcaagtagcaccgtgccagctctgttccctcttacactccagagacccaacgcccccagaggggatccctgctcccgggctgtgcctcccctgggatgcctcccagacgggggtgaagaggcctggcagagctgcctgtcttgtgtctgctgatgagggatgggggaagaagctgtgaagtgggcgggcatggctgggactaagccaccagtattccccgagttcctgtggggggggctggccccacccctaggccagggcaagggttcccagagctcccttgtccccggccctttaccctggttctgagtttacaaagtctcttcctcattcccgttgagttctttcccacctctgacattccctccctccctcccgcagggctgagattagagggtggtgatggctaagggcccctgacagtgaccttcctgtctcaggggttggggacagggccaggtagcctcctgccccttatgtttacgtttgcagcctgaagcactttaatttttttttttttggtctgttcctgtaacttattttccaactattgcttccaactgaaataagactattaaatgcctgttcaggagggaaaaaatga

SEQ ID NO: 210276 - DNA, 2244 bp, Homo sapiens
tccagtcattcggctcagtaccccggatccggcgctgccgggtctcggttcgggttcgttgccccggtgccgggaccgggccggtctctccggccgccccagccgggctcagcatccggagctgcctgtggaggaaccgattgtgtccacagatgaggtcatcttcccactcaccgtttcactggatagactgcccccagggacacctaaggccaagattgtagtgactgtgtggaagcgggagattgaggcaccagaggtcagagatcaaggctacctgcgattgctgcagacccgatctcctggggagacattccggggcgagcagagcgctttcaaggcccaagtgagcacgctgctgactctgctgccccctccggttctgagatgccggcagttcactgtggctggaaaacacttgaccgtgctcaaggtgctgaacagctcctctcaggaggaaatctccatctgggatatccgaatcctccccaacttcaacgccagttatctacctgtcatgcccgatggctctgtgctgctggtggacaatgtctggtgaggtcctgggaggggcgaggctgtgaagtggtggggatggcttcaggggctgagctctggcatggggagaccatgccttgtcctcttttctgagctagtcaccagtctggggaagtctccatgggctccttctgccgcctacccgggacctctggctgcttcccctgcccgctgaatgccctggaggaacacaacttcctgtttcagctgagagggggtgagcagccccctccaggggccaaggagggcctggaagttcccctgattgctgtggttcagtggtctaccccaaagctgcccttcactcagagcatctacacccactaccgcctgcccagtgtccgcttggaccgcccgtgttttgtgatgaccgcttcttgtaagtcccctgttcggacctacgagcgtttcactgtcacctacacgctgcttaacaatctccaagacttccttgctgtgaggctcgtgtggaccccagagcatgcacaggctgagtggctttgagaatcagatgagactgtgctggcgaaggccctgtgggaatgaggaacgctgtagtgtttgctggtccctgtttctgcccccaggaaagcagctgtgtgaggaggagcgccgggccatgcaggctgccctggactccgtcgtctgccacacgcccctcaacaaccttggcttttcccggaagggcagcgcgctcaccttcagtgtggccttccaggctctgaggacggggctcttcgagctaagccagcacatgaaactgaagctgcagttcaccgccagcgtgtcccaccctccacccgaggcccggcccctctcccgcaagagcagccccagcagccctgctgtccgggacttggtggagaggcatcaggctagcctgggccgctcccagtccttctcccaccagcagccttcccgaagccacctcatgaggtcgggcagtgtgatggagcgcagagccatcacgccccctgtggcctctcctgttggccgccccctctacctgcccccggacaaggctgtgttgtctctggacaagattgccaagcgcgagtgcaaggtcctggtggtggaacccgtcaagtagcaccgtgccagctctgttccctcttacactccagagacccaacgcccccagaggggatccctgctcccgggctgtgcctcccctgggatgcctcccagacgggggtgaagaggcctggcagagctgcctgtcttgtgtctgctgatgagggatgggggaagaagctgtgaagtgggcgggcatggctgggactaagccaccagtattccccgagttcctgtggggggggctggccccacccctaggccagggcaagggttcccagagctcccttgtccccggccctttaccctggttctgagtttacaaagtctcttcctcattcccgttgagttctttcccacctctgacattccctccctccctcccgcagggctgagattagagggtggtgatggctaagggcccctgacagtgaccttcctgtctcaggggttggggacagggccaggtagcctcctgccccttatgtttacgtttgcagcctgaagcactttaatttttttttttttggtctgttcctgtaacttattttccaactattgcttccaactgaaataagactattaaatgcctgttcaggagggaaaaaatga

SEQ ID NO: 210277 - DNA, 1604 bp, Homo sapiens
gatgaactgccggtcttaaagggaaaggctgcaggctgcctctgacttgctcctgacctcttcacccctttcccaaccccagctgcctgtggaggaaccgattgtgtccacagatgaggtcatcttcccactcaccgtttcactggatagactgcccccagggacacctaaggccaagattgtagtgactgtgtggaagcgggagattgaggcaccagaggtcagagatcaaggctacctgcgattgctgcagacccgatctcctggggagacattccggggcgagcagagcgctttcaaggcccaagtgagcacgctgctgactctgctgccccctccggttctgagatgccggcagttcactgtggctggaaaacacttgaccgtgctcaaggtgctgaacagctcctctcaggaggaaatctccatctgggatatccgaatcctccccaacttcaacgccagttatctacctgtcatgcccgatggctctgtgctgctggtggacaatgtctgtcaccagtctggggaagtctccatgggctccttctgccgcctacccgggacctctggctgcttcccctgcccgctgaatgccctggaggaacacaacttcctgtttcagctgagagggggtgagcagccccctccaggggccaaggagggcctggaagttcccctgattgctgtggttcagtggtctaccccaaagctgcccttcactcagagcatctacacccactaccgcctgcccagtgtccgcttggaccgcccgtgttttgtgatgaccgcttcttgtaagtcccctgttcggacctacgagcgtttcactgtcacctacacgctgcttaacaatctccaagacttccttgctgtgaggctcgtgtggaccccagagcatgcacaggctggtaggtcagctgccaggtaggaatttgttccccagggaggggaagagaaaggaaaaagtcagggaggcaggacagtgaaaacagccaaatttggtgccagccccatcacaggaggcgacttgtggcaggtggcttccgccctgtacctgggtggtctccccagtgtcctagatggagagtttagagaggcagtggggcagagtgactttcagggcatagacactggagctgcactcgctggtgtgaactctacttctctcctttactagctgtgtgaccttgaataagttacttaacctctctgggcctcagagtcctcacctttaaaatagagcaactcatatctgatggggctgtcatgcagatactgagttaatatacgtgacgtgccttgcacacagtacgtattagctgttgttatctacaacatgcacaaaagataacgtttgctcagtttactccacagagtggctttgagaatcagatgagactgtgctggcgaaggccctgtgggaatgaggaacgctgtagtgtttgctggtccctgtttctgcccctgccccttatgtttacgtttgcagcctgaagcactttaatttttttttttttggtctgttcctgtaacttattttccaactattgcttccaactgaaataagactattaaatgcctgttcaggagggaaaaaatga

SEQ ID NO: 210278 - DNA, 153 bp, Homo sapiens
atggttgcgtagcaatgtgaacgtactgaatgccactgcacacttgaaagtggctaatatagtcaagtttacatgtattttaccataataaaaatggtgaactgtcattatcttgcattgttgatgcttttgttcaaatcctgggaaatatga

SEQ ID NO: 210279 - DNA, 417 bp, Homo sapiens
tgggccaggctcgtctcaaattcttgacctcaggtgatcctcctgcctcggccccccgaacatgctgggattacaggcatgagccaccacacctagccgagtttgtgtgttttttaaagaaagacaggattttaaatttttattggaaacctcctggggcacctcatctttgggaatttttgcttcaaataataaagattatatatcgtttcttacttggttttaattgggttgttaattgtagccttgagttttgctgttttgggtacttttgcaccctctgcagtggtcttgtgttttgttattagtatgtctttttggaagaaattgagaagccttatttattagagtcttttaatcttagttctctcagttgtttccccaaagctcaaaggagatgaggaagtgctactatca

SEQ ID NO: 210280 - DNA, 722 bp, Homo sapiens
cagcgcataaatattttgtccatgtactaaacacgcgtactacaaacaccattagcctgcgccaccgtacttcacgcacgaaattacggggatctcgacaggtgtttgactgtctgggatttatgcctcaagctaaggatatacctagcggagtcctctgacatcgaccacatgactccactgcactctgctgcgtacatacttaccctcccgtgatccctggtcattatgcgtttaagtggctattaggcccctgtggggaagaaatgagagaagagaatgaatctgaccaatgtgtggggacccgtggaaggtctgtgttgagaaggacacccaagagcatcttaccctagccctgcatgtcgtgggaggaggcccacatacggcaggtgacatgcctggcaccacacggcacattaggggcagtgccagcaaaacaaaatggtccagattattggtagtagctgtagtttgagatggtctcactctgtcatccaggctggagtgcagtggcacgatcatagttcactgcagcctccacctcccgggctcaggcgatcatcttgccttagccttctgagtagctgggactacaggcacgcaccacatccacctaattttttaattatatttttcttagagacagggtcttgctatgttgcccaggctagccttgaactcctggcctcaagcaatcctcccgtcttgacctcccaaagtgc

SEQ ID NO: 210281 - DNA, 524 bp, Homo sapiens
gactgtaagcttccatttctggtgagttagttctgtttgggcttgcatgtgattttctcacaattctatgagctgagcgcctatttttcactatgtgagtctcaaacttttcctctttcctgcaattagggcatcaccatatcctctccagaaaaaggccttctcacacaaattttgtgtgtagcaaatttctctgaatcattggagctagggaggaaggtgctggaaggaaagagaaggatacatatcagagcacagcattaagtaataattgttcttagaaatcctttggcatcttcatctccaagactttcttcactagctattttttttataatccaaaattatgtctaactttttttctcttcctcagaccaacttcttccatccccttacgagatatgcacacgttgtttacattgtagacatatagcatttatctcttctttctcttgtgtcattagttttcttccttcaatgaattattctcatcagtacactaatattctgtgatttttccagtt

SEQ ID NO: 210282 - DNA, 237 bp, Homo sapiens
ctcttcagagaaaagttattcagagtccatcaggaaaatctgacactgcctagctcttaagggatctcacaggggaagtcacaccgtctgttagcactaagtgttcaagtaaaggtgtgtaaaagaggtgccgctgatgggagaagatgcgcgcatcttctcacatcagaatatacaacaggtagtgataagtgctatgaaaataatgcacttataaaaagaatacagacatgacag

SEQ ID NO: 210283 - DNA, 519 bp, Homo sapiens
tgcactgttctcatctcctcttcctctcccctttgacaagcctgagagcaatcactgcatccgattgagcactttgaacagccaggttcaaagtcctgggggagactcagtagggatactttcaaaccacccactagaatggattcattactctttttacttagcctatagattttctttgattttctgtccataatgaaatgtatgtcctctttccagaatcctagggaatgccaaagtctttgaaataaaaagccttctctgttggctagcttcagagggaggcatacaatgcctctctaagcaatttgttgccaaaagtttcttatctatgaagcaactatgagtcaggagagctgggctcagggttagtttagccttcagatgactgcaggaatctaggagaatggcatgaccctttgggacctcatctgtaaaccaactgtttttaacatttaatggacctcacactactttgaaaatttgatgaaaggtataataaacctttatctccccaga

SEQ ID NO: 210284 - DNA, 277 bp, Homo sapiens
taatcctctcagctttcactggcacttcctttttttcttgtgacagagaaaaaaaaaaacctgtcccatctgatccaataccgtcttacgcagcccctccaaaaaagcagcactccacctgttactgcgtttctcctgcgtgttcagcgttctcctcctcactttccctttttaaatgttgtctttaaaaaacaaaataacaaccttttcttgacaaaaacaactcacttaaactaccacccaacctacaacctttcttttataactaagcttcttg

SEQ ID NO: 210285 - DNA, 230 bp, Homo sapiens
agaggaggagggagagagggatagggagagagagatcgagggagggagagagagaaacaagtaaaagaggaaagaaaagagagaaaacaagaaaaggatagagaataaaggaagaaaagtaaagagaagcggaacttggaagggaaggagacagagagaagagaaggggagggagagcagcttgacaggtcagctcctgcagagtttctctggctgtcctccaaaagatg

SEQ ID NO: 210286 - DNA, 714 bp, Homo sapiens
aaaatctgtggataatgtataataagctgatgtacatcctactagaactgaggtatttcagtttgtgacaaattatgtcttaacatgttacctcgttaatagtcattggttcataaatgctggggattttaaatttaactctttttatacctaatattaaaaattaacccaatttaacattatttcatctaccacattactggccttgttttgattctaaatctcatgtcctaatttacaaattaccaaattaattcaaatgtataacctctttatgatttgaggcccactctggaaaagaaaaatactagacatttctattaaagtcatgagtgatttttatgtgtcttgtggatccatcccccagagtcttgtcttatatctttatgttctaacaatgaagtttttttaacgtacttttagcaaaatatacatatatttacacaagtattttagagttacctacagtaggatttagaggtcttttattcccatgattatataacattaaacaatatgtagcccccaaataaatttttctgtgggaacttcttcacgttgtctgcacatgacagttgatcttgggttgtttcagtactttccttggttttcctcctgtgtctttagccattccctagaagtcccctttttctctcccttacaactgatggtctctatgagtccacttttagctcccttctcttcttctatact

SEQ ID NO: 210287 - DNA, 584 bp, Homo sapiens
caggatgtgttcgctgtctcatttaatgtctttccaggcctgatactttaaaaggactcaccttcttccgataaaagttcttttcttttctcatagatgtaaagccactagttttgcagagttcacgaggattagaagtagtataagtaagatagaccaatgctcagcagacggaaggtgtgagaaatactagatgttatattagaggatgaatatcctcaacagtgcacacctcaacattcagtacacagccagcattatttgtatgtattcttggtaccaagaagagccaaagaataatatgtaggaggacaagggtcctccttgccaagctttttacatgcgctgcttagaaaagccagattttgataatggggaaagggagagagtcagcggctctgtcacaataactcagtctgataggcagtcttgcctaagtgaaaaaccaaactgcttctttgcttatagtacaagaaaattttggccaagggcattctactgcatgggatctggccaaaattgttctttgtaaatgctgtactcaaacaatggcataagtaaatctcatcaaattgtttttaaaa

SEQ ID NO: 210288 - DNA, 195 bp, Homo sapiens
tgttcccagcaggtgtttcctgccaggacaagatgagctgagtggcagagctaaccctgacactgagttgagggttcgctggtcccatctgacattgaaattgatgggactagccatcaaaaaactccaggggccacgggacctcttcctatatcatgaccgcagacctaacatatttaaccattaagtaagaga

SEQ ID NO: 210289 - DNA, 667 bp, Homo sapiens
gggtgatgctgggcaatcacttcctaaggtccctagcctcagtttcctcatctgtaacacggggtggtatgtcacaacattgtcagggtattgtgacagtcccatccacgaagctgtagtggggcctggctcgacactcggcacattccaaatggcatcggagatctggcagaggcccctcctggctgaagccaaatgtgggtcgcaggagccccaccgttcagggagtcagaccagtcaggacgccatcccagctctgcccaactctcagcctgacctctcgcaagcctttccctttcctggccctccaccttcccttcttgaaaatgggcacagtggcccctaaggaccggtccagcttggacattcccactggggcgaggtgggccacagggagttcatagcccttgtttttgtagttctatttcctacctgtgggacctcctgaggggggatgggctaatcaaaacttctctacactggcagggcgtggtggctcactcctgtaatcccagcactttgggaggccatggcaggtggatcacctgaggtcaggagttcaagaccagcctggccaacatggtgaaagcctgtctctaatacaaaaattagctgggcatggtggtgggtgcctgtaatcccacctactcctgaggctgaggcagga

SEQ ID NO: 210290 - DNA, 506 bp, Homo sapiens
ttgtaggtacagattgccttgtttaaataaaggaatcattttttctttaatagaacctaattttttaaaagcacatttaagttgtgcagttgtgatttgaaataataacaaaaagtgattacacctaaaagttctaaactggtacaatattatcatgccattagctgtgatggagctgaaagctgatagaacttacacttgtatctcatgactctgtttcctttgaagtaagcactggtggctgaccgagtttaatgtcccagctttttggatctctaagaggattacagtgtaattttataacctgccacaaattcctctctatgcaacttactatgtgctatgtatgtgtttttaaaaaaatcaactggagcatgtgcctgtagtcccacctacttgggaggctgactcaggagaatcatttgagcccaggaggcgggaggttgcagtgggctgagatcacaccactgtactccagcctatgggacagggagagattccatctt

SEQ ID NO: 210291 - DNA, 196 bp, Homo sapiens
tcagtctgattcgagtatatctgttttggcaagttgtgggcagctctcttttacttttgtcacccagaggcttccgtagacaaaaggaaaggagagaggtgtgttcaaagacccccatggcgaagagcccatcccccaagcctgacacaaccctccctcccagcggacccctcttctggactggcttcgctgttgg

SEQ ID NO: 210292 - DNA, 788 bp, Homo sapiens
ctttaggcgtgtgtgatttgcaaaacattctgtggcctattttcctacctcacacactaaaatcattcaataattaaatggaaatatcaataaggagtaggtaaatcttccaagtaaatgtatataaacctgtttataaactctttgaaatcaaatccagaccatttacatcagaaattagttttcaaactaatattcccaaattaactaacttcacctaggttgtgagtattgcagcgtcttatttctaatcccagtactactattggtgtgagtcagtaaagatgcctggtgactggggtgtgaacttataaatggcacatttggtatcacatcaataaaacattttcttgagaagaatataattttagtagaattttctccaaatggacgtatcagctgttaagcaaataaaaatgtcatacatagtaaaagctttcagttatcggcaaatgtccatgtaattctacaattcactgtcacatctaaccatatagcttttacttactgtgtttacaaacaaaaaaatgctgttttttactgataagtatttcagtaagtataagtacttattcctgattaggatgagatttacttcatgttagggttttattacttttgtgggtgggaaagactatataatctgccattccttactctgtgtcattctggtcaagatgatttatccggggatcatggaaattacttttggaaaatcatttttgggaagagttcccgttgttataaccggttagaatgacgataaggggacatattaccggacagat

SEQ ID NO: 210293 - DNA, 419 bp, Homo sapiens
aatctaaactcaatctagcctatacttgacatttgtaaattatttaaaaattaatatttttcttctttcctgttttcatggaggctgcttcttcctctttgaccatgccaaaagcaaaatagtaaaagagttcatatatcctacctctgctcagagcaagatctcatcttagtccacagtcctacctgccatcttttgggattcagttgacaagttgcttggtgttgcattcttggtgtccttgccgggtcttttgtttttgtttttgatgtgttgtgacacaagagtcctgttgttggtagaagagtggttagctgaacagattatgttgctcagaaaatcctatggttataagagagggtaaggatagatcataagtggaaacatgctgaaatctattaaaccatctttgtttgtga

SEQ ID NO: 210294 - DNA, 434 bp, Homo sapiens
tctgcaatattgaacaattatatttttaaacacttttatttcaagatttgatattaattataatttatttggcttttattttactaggcaattttgaatttattttaatatctttaaatgtgaaaaatcattttaagttttacttttatttttatttagatttttattaaaatgttgaaattctatatcctttgaataaaactattttatttctaaaaaattccttagatcaataatgtctcatccattttcatgttaggacagtcctgaaaggactccaaatccgttcttccctcctccccgaccaattcatcctccccactgctgcttcagtcattctttctttcttttttctttttctttttttttccagacggagtctcgctctttcacccaggctggagtgcagtggcgtgatcttggctcactgcaac

SEQ ID NO: 210295 - DNA, 387 bp, Homo sapiens
actcaattgtacgtccccaagctgagcagtgagattctgattcaggcattcagtattgggaccaagggagagttaagttagtcttttccaacatgcaaaagctgtagggcttgaagcagagaaagtcaattcacagagaaaatgaaacataatttctgttctttctgctagtgtggggagaggaagagggatctcagttacttcaggactttcatgattcttactctacttcttcctgaagctacaccgtgatcctgccctttgttctagaaataaccacctccgtcagctacctagagttagtttctgatactgcagttactatttttcatcaaaagatgatgtttgttttgttgttgttgttgttttgggtgagaaccattaaga

SEQ ID NO: 210296 - DNA, 237 bp, Homo sapiens
acctcgcttagtgctccttggcctcgcttaggcctcctgggcagggggagctgtcctagttcctcaaaaccaatttgcctgaaagcatattggattactcactttacagtaatccgtgcgtgagagacaggggcggtctcttttgagttgtctgtgactttttagatgcctttttcctatttgtctgcttttgggcattttgaggatttttagccaggttgtctaaagcagttcttc

SEQ ID NO: 210297 - DNA, 324 bp, Homo sapiens
gtatgatctaatggtaagaaactggaagaaacatagcaagtcatttgttcagattcttctctgtgtccctgtgtctccagagataaggatgtcctttttctccaggtatagagtgggtacctctagaaagagggtcttatgacctgcttccagggaaggtcagagaatccttcctaagttttatgacctgtttctgggaagaagtgcaggaggaaagtgagtgagactttcctgcttctgctgttttctcaaacatcaagatgccatattttggagtagcatgtcttaaacctcatcacccgtctcaggtgcagtttcatcgcc

SEQ ID NO: 210298 - DNA, 357 bp, Homo sapiens
catctttagtagagacacattgtcgccatgttggccaggctggtctcgaactcctaacctcaggtgatccacccacctcagcctcccaaagtgctgggattacaggtgtgagccactgcacctggcctaatcccttattttctaaggtgagagatattttaccaagccagtcttgtctggggagggatatttctaagggattaaaggacagccatctaagtcttggctataacaagggtcatcaagtgaggccctgtcagcaatatgaaagttaagagctgagttttgtgccctgtaattttctaatagctccacagcgtatgtgctatgtatatttggtaaagcactccttaacta

SEQ ID NO: 210299 - DNA, 532 bp, Homo sapiens
cctttgcagggacatggatggagctggaagtcattgtcctcagtaaactaacacaggaacagaaaatcaaacaccacacgttcttgtaagtgggagctaaacaatgagaacacatagacacagggaggggaacaacatacactgggtcctgttgtgggggcagaaggaggggagaatatcaggataaatagctaatgcctgtggggcttactacctaggtgatgagttgataggtgcagcaaactaccatggcacacttttacctatgtaacaaacctgcacatcctgcacatgtatcctggaacttaaaattaaattaatttataccaaaatagtaattctaaatagattctacctcccccaaagaagatttagtcttgagaatacaatgtatttatggcctaaaataaaatatttaatatttaaatatattttgtagttgcatacctatgttttcacaaagtgtaaagatatttaaatattccactcaaaaaatctaaatgtgactgtaaacgcatgtacatttcaaatt

SEQ ID NO: 210300 - DNA, 369 bp, Homo sapiens
ctcatgcctgtaattctaccactttgggaggctgaggcgagaggattatttgagctcaggagttcaagaccagccagggcaacatagcgagacactctctctataagaaacacaaacaaaaaaaatgttaaggcatagcactgtagacttgagtgtgaattagaaatatcgctgtcaagtcatgaaatgttttttaccttcaaaatatattctctagttctgtttactaaaatagcccccatatattgacaagtctaccaagtaacatagggcatccctggagcccagcttgtgataaagaaattacacttttcactaaaagaaaaccagagcttcttggataaatgactgattccaaacctgtggcaa

SEQ ID NO: 210301 - DNA, 344 bp, Homo sapiens
gcatcccaccccggcctcgccgcccgacgcgggtcccgaaaggcaggtgcgagcggcgaggccgacgcccgcggcgggtcctgcccagccgcacctgcaggcgcccaaacttgggcacagtgggtcgcaggcggcaaggtcccctccccgggcggcgcaggagccggcacttacacggagagcggtatctgctgctccgagcgcaccacgtcccccagcgcggcgtagagaagcgcggcagcgagaagcgccgaggccccccgggacgcgcggcgcggcgagcccggcccggccatgctgggctccctccgacgcgcccgctgcggcggcgacgagagcggccg

SEQ ID NO: 210302 - DNA, 270 bp, Homo sapiens
cgccttttaaataccaacagaagctaacacattctcacttatttttaaagcacacactaataatatctctggattcatttacatttgagtctccttgtaactaaactcacaaatctgttaaacagctatcaagaaaaaagagtatagtttgtgctcatggaacaaatttaagctgctaatgctcatcactttagcctgtatccaacatgtgaaaccacaggtgattccaaaaataaaatattaaaatgtaagttcagtttaacataatca

SEQ ID NO: 210303 - DNA, 341 bp, Homo sapiens
taccggagggtctctgcactgtactagaaaggcatcacctctgaaatccgacatcccagtgtccattctggggcacagcttcccctcctttcaagtctctctcttcctccctctccacaacacagaggcctttagctccccagcccttactgttcagtgcgtccacccctccttgtctagaccctgaagtatattacatcagctactctcttgtgagctcctccagtactctgccccttgtccttctattgccctagtctagggaaatcccgaacttgggatcaacccatacatcctctttttctacctttacagctgggctcctgagcactgctggaggt

SEQ ID NO: 210304 - DNA, 468 bp, Homo sapiens
ccttagtacatatttattacaattaacttatataatttctccatctatgcatatattttatttgggcaaagtggctggccctgacttttacctggtgatttcagatgggtaacatccaaatggtgaaattataaatgtaattatcacaataaatagtttcagatttccctgcacttaacatttatacattagattttgttaaagaaatcagttacttttactttatagtagtgacatctcattggtctctaactaccctccctcatacctgactagtgtcatttgtcatcgtgtcctgctcgccagtctcatcctccccactagagtgggagcttctgagtgcacagggtccaagtgctcgtcctacagccgccacagtgctcagtgaattagggaaaagttttgctcccgaaagctcataacttggtttcagttttaataaatgactatataaagttttgtgataaa

SEQ ID NO: 210305 - DNA, 505 bp, Homo sapiens
actaaactacacccccatgtctcctaaacaaagaacccatgatctaatccagaatcacatgttagtttagttgtcacaagtctctactctccttcagtgtgccatgggatctgtgtttcctggtcttttcatggtttttacatctttggcggagttaaggccagttattttgtctaatgtccctcagtttgtgtttgatactttctcatgattagactcagattagacagttttgatggcaatacagaggagatgccattttcttgctgcatcacatcaggtggtacttaatgtcagcttgtaccattactactgatgttaactgatcacttggttaagatggtatttttcaggttcgtcacctttcctcattagacttcaccccctagttttggcattgattgttgcctgagtcagtttttacaacattggttgccaaatgtgatttcctaattatagcatttgttctacagttattagtatttggccttgtagtgttaggtag

SEQ ID NO: 210306 - DNA, 353 bp, Homo sapiens
cactccagctggcttctgagtgtttgtccctcacataggattcctgaagactgctgctgtcgctatagtcgttgagagtgtctgaatgtttgaccttcaccaaacaccaaatattctggccctttagtcttgtactttccagcctccagatctgtgaacaataatctctgttgtttatgaattactcagtctgaagtattttgtaatagtagcctaaagagactaagagagcatcacctgccctgtcacctcatcacctcattactgaagctatactaacagcagtcacttttagtgggtacttcatgcatcagaataaagggaaaaaattgcaaggcatactaaaatccaaa

SEQ ID NO: 210307 - DNA, 585 bp, Homo sapiens
ccggcaaataccgaatagctgtcgttgtagatcatgtacccagcccgcccccacagcatcaccatcggcacgggtgaggcgagcatgcgtggccagaagctggtctcgaactcctggcctcaaatgatctgcctgccttggccttccaaagtgctgggattacaagcgtgagccaccacaccaggcctttacctctttttaattggctatcattgtttatagcattgtcacagaatgaactgaaaatctatccattgtagagccaaacatcagtaatatactatgattgcatttccttgttcactgcttcctgttttcacttgtgtaattttctgaacacatgtgtaccgagggtgatactttgcttaattaagcctggttcccgggaagcctctccctctgcttctccagtgagactcgctcttccccatgtctgttgctgaattctggaatctctgcttcttccttgctttagcttctgaagagacagaggagttgtctgcattctttcatgtcttaaaatggattacatacagtattactgtttgtcttgcgtgccagaaggagggatactctagatcacca

SEQ ID NO: 210308 - DNA, 476 bp, Homo sapiens
tctttggggaagtggagaaggaatgttaacatgtcgtgatttgcagtggcaaaacctgggacactgaggcctgaggggtcgcagagctcccaggggttagagcaggcaagagcccagtccctcctgagcaggaggtggaggggaagtgtgccagctcccagtcagcaggtctgggtccagtaccgcctgtctgcttgatgtctgtgggtaagtagctgtgccctgctgctatctgtagactggggatacccctgcaaccccctgaggctgtggtgaggatagatggaggtaaagcgtgggagaactgcctaggacatggccacacatggccaaataatgatgatgttcccgcataatccgacaaaccgctgcatgactctggacctcagtttccccagctataaagtgggataggttaggatcgaggggctcatttcagatgctacaactttagtgtcagagccaggagagagaat

SEQ ID NO: 210309 - DNA, 461 bp, Homo sapiens
gcagagagactagtcgggagactactgcagtaatacaggtaaaagatgatggtgtccatttccaggtagtagcagtggacacggtgaaaagtgattggatttgggatctaatagagccaataaaatctcctagttggatttagatgggaaacaagagaggaggaaacttgactccaaggttttgggccttccaagaaactagaaggatggagttgccttgagatgagaagactgtaggaggaatagttttgagtgggaagatcaggatctcggttttgggtgtgttaatgttccgatgcctatttgacatgggtctttcaaatagagcagatggatatacaaatttggagtttggggaagaagactggacttgagatacaaatttaggtcatcagatggtgtttaaactgagtgagacaggatttaaatccaatgagactgggtaagtgagtgtaactaga

SEQ ID NO: 210310 - DNA, 480 bp, Homo sapiens
aaaaaagcaaagcaggacaaccacccactcaggaacgacacagggccagaggagcctcccccacccagggaagtggtgctggaaaatccgaggtgactggggaccagagcaggcccctagtttactggagtagtcatggaaaagtggccagactgtttcttacatgggtctccactcccatatctcctcactgggcaagtcctccaggcttgggtttccagcctcccttcactgggactttggagccagtagcagctctgcagcaacctgggacagagctcccactgggagggtggtgtttccatcttttctgccttgcagccctcacctttgctgtttccaggctctggagagtccatgggactgaagcctggtctgaaccccaagcacagtacccatctcaccaaaaagtggtcagacggttctccatgtagatcctggtcctcacttctcctcactggacagggctgcctgacctgg

SEQ ID NO: 210311 - DNA, 348 bp, Homo sapiens
tgccaatatgaaaatggggaagaagtctcagagagagtattccagctaggttttgaagccaaagtagaagtttgctgagcatgacagaaagagagagaaacaggtatacatcctaatcaagaggaccaggaattgtgaggagcttaaggtacaaatgagtggctggagatgaagttgcagaggtatgctgggagctgtggatggctccactatgggttctgaactgggtaaggcactgggagccagggtccccaaaacacgcacgaaacaactggtggtggtctcccacactcagagattacttaaatattactggatacaatctgtaaaatttatgacgttccaaag

SEQ ID NO: 210312 - DNA, 605 bp, Homo sapiens
tgaaggtaagcacctctccactttctcctgaatcttgagagcttgctttgacctagggtatctgtggaatgaaacaatgactgctaaagcttttacctgtagctcaaggcagagaggccttagacaaaccactcagtgggatccaaggcatgatgatagaagaggtggccatattaccacctgccagaagcaatctgggccttttggctaagataaagtatagcagcttagtggcctagaatctcccactccatcccatgagttattcacccaggtaagacaataaggttgacagaatccttaaggttcatccttttggcctcctttgttttgcattatttcattggccaagcccatcacctggagctttgcagtggctccacagttgtttgtttaatggatacataagtgcatgaacaagtgaacacaattgtcacttgggagaagaggtttcttagcagccagtaaacgattagcttggacttttatgacttattatcctggggtatctcagctatcaccagcaggtttaacaaaaaacttataagcaggaaagctggcaacaatagcagttaccacgcggtgctgagagtgacacaagcatt

SEQ ID NO: 210313 - DNA, 201 bp, Homo sapiens
cacgctgctcacactgacaaacaataccaagtactatttaattattatgcagtattgctatctatatagcaatatatatatgctatatatatatttgttaaattgctcatagattatatcctcctacagctattcttctgcaacttacagcttttcaagtctgttttgcaaacatgtccatgttgatacatgtagatctag

SEQ ID NO: 210314 - DNA, 468 bp, Homo sapiens
ccctaccacatgctcaacatggtattgagtcctcaagaatataaaaagaaaatacaacaggaaccagtagtcattaactgtttgttctggactttaataaaagtacagagggtcttggagtacaaaggcaaagacatttagctgtgtatagaatgggtgggggaatgtgttccatggtttggcattcagttcagcaacattcctgagagaaatcaactagcccccttatagagaagaggaaactgagatttaaaaagtggtcctggccgggtgtagtggctcacgcctgtaatcccagcactttgggaggccaagacaggtgaatcacgaggtcaggagttcaagaccagcctgaccaacatggtgaaaccccatctctactatacaagtgtccaggcatggtggcgagtgcctgtaatcccagctactcaggacactgaggcaagagaaccacttgaacctggcagg

SEQ ID NO: 210315 - DNA, 212 bp, Homo sapiens
ggctgggggatcatctcagaccacatagtgtctggcctggtacacctctgataatcaggaagtgagagcctgctttgggttggattcttcttccttgctgtcctgtgagtactctggttggagatgggtttgtgtacatcttgtcaacaggttccacccactgtggaccttgacctccagctggtctctgctaacagaatgagaaacctgtg

SEQ ID NO: 210316 - DNA, 884 bp, Homo sapiens
gtaactattcatctactcgtgagttaggtatatctacctacttaaactaagaatagatagataatagataatgtacagctgtatattggaatgacttggatttaaatcttagctggaaaatcagttcattaatttgagcttctgattttctttgatgtatgggaaatgctttataaattaaaaagtatacaggtagatttgattattattaataatttggagcctgtgagctttcaattttttttagaacttctgaggcaaagagcttttctttatgatagttgctagtcacactacatgtgaatacacagttgaacagtggtctttgtctatgacatcctgttagcagtagttcttacccagattcccatataccacaggaccagttatatctttttcccccagttacaactgtattgaggacaaatcagttatgatttagttatttctagaagcaaacgttgctttagacaaaaaaggagttatttagcatcgtatgagagagaattatgtttcaactttggcagatgagactctaggcctttatttcagtatctgagatgcaaaaaatattgagtacgtgacataaaatttgacaaaactagatattagcatgtgaaataacaatatgtggatctgtttgcaaataaatgacctaatggaaatgaaaagagaaaacattaagtaactaaagagcagtgaccatggtgtctactgattctttaggtattctatgtgttgggccactatatagtcttgttgagaaggcaggtttggttccttaattaacagagagggaaaaatcacttttctagcgtactttgtttttattaagaggttttttttttttaaaggtaataaactaagaatggacaaagcagaga

SEQ ID NO: 210317 - DNA, 353 bp, Homo sapiens
ttcaacacccaaataagagaaagagaaaagggaggcccaggtagaatctgtggttaaggttaaacctgcaaaaggtaagcctgcaaagaccgccctgttccaggctgcctttttttttttttttttttttttttttttttttgggggccccccccccccccccggggggggggggggggaataaccccgggggccccccccctttgggggtttttgggggcaaaaatttcccccccccctttttttttggggggggggggcttttttggttgccccccagggggggggttttttggggtttttttttttttttttttttttaaggggcccccccccattttttttgggggtgg

SEQ ID NO: 210318 - DNA, 422 bp, Homo sapiens
aagaggtgccctcagattcccctatttagattctgtgaaccagtgataagtctcctcttctgtgtgattggtgttgcccttttgggatgtagacattttggactaaggatttagagatttttttaccgagacaggattgtatgcgtactaagatgtccttaaagctggtactttccccttttatcactaatggctgctatttccagagctgtgggctttatctgaccatcttgcaggtatgttgaaagatttgactagcacttaaaaggtatgttcagaaaatgctattttaagtgtttcttctttaccctatttcccccttgttgaacagtgcaaaactaccaggttttatgttccactgggcagctgctgctggtctgatgtatttctctctgtccctcctcctccttctgtctcccctc

SEQ ID NO: 210319 - DNA, 455 bp, Homo sapiens
ccgctgctttaatacttttagaggccctcaaaataagtagaggcctttcctacagggcctgagaaggccaccgcagtcatttcttccgttctgtcagacataattcctcagtttagccttcccacctcaatacagtctgataactgtatttattagtcaaatcagccaagcagtttttcaggctcttagtattcagtgaaacctttatatcccttacggtcctccatcttcaagaaaagtagaatggactaaaggtcttttaaaaacatatctcaccaagctcagccaccaacttaaaaaggactggacaatacttttaccactttcccttctcagaattcaggcctgtccttggaatgctacagggtacagcccatttaaggtcctgtatagacgctcctttttattaggccccagtctcattccagacaccagaccaacttagactgcgcctc

SEQ ID NO: 210320 - DNA, 428 bp, Homo sapiens
tccattgtctgtgtagtgacctctgctcaaaatttccctgtgtcctgggccctcttcgtcctctgttagcctctttcagtccccttttagcaaatgcttctgagccactgttaggactcagacacgcacaggctgggtattcaggtttctgtgattgccctcaggcttatctacctagattttccttagctgttgccagtttccacccaggcatctcattgctccagcccctgattgagctgcagtcttgtgatgttttgcctgggaagtaacaaaagccctctttcccctaaaggtagttggatggcatgctttctaaaccctatagttcagtcagtaaatgctacgttctaggcctccatgacttgttttgtgatttttccaaaccagtgctttttggaacttaaaaagataaacaatttctttca

SEQ ID NO: 210321 - DNA, 1240 bp, Homo sapiens
cacttattgtgcactttattcctattattattacattgtaatatataatgaaataattacatgactcaccataatgtatggtgaaggaagccctgagcttgttttcctgcaactagatggtcccatctgggggtgatgggagacagtgacagatcatcagacgttagattctcataaggaatgtacagcctagatcacttgcttgcacagctcacaatagggttcatactcctggaatcctagaatcctagaatccctactcctagaatcctagaattagagaatctaatgccactgttgatctgacaggagatggagctcaggtggtaatgcaagcaatagtgagcggctgtaaatacagatgaagcttcactcgcttgcaagccactcacctcctgctgtgcaacccaatttctagcaggccatggtctatggcctggggattgaagacccctgctccaagacttacctcccactgagaactcaggcaggatgcttggaggagtgattcgggaaagttacctcaaaggccacgaccagctggttcccgtcaccctcttggccattgcagtcatcctggctttcgtcatgggggccgtcttctcgggcatcaccgtctactgcgtctgtgatcatcggcgcaaagacgtggctgtggtgcagcgcaaggagaaggagctcacccactcgcgccggggctccatgagcagcgtcaccaagctcagcggcctctttggggacactcaatccaaagacccaaagccggaggccatcctcacgccactcatgcacaacggcaagctcgccactcccggcaacacggccaagatgctcattaaagcagaccagcaccacctggacctgacggccctccccagcccagagtcaaccccaacgctgcagcagaagcggaagcccagccgcggcagccgcgagtgggagaggaaccagaacctcatcaatgcctgcacagaaggacatgccccccatgggggtcccctgtgattcccaaggaacttgcccctgcggggcctccccaggcacatccccagcgtggtggtccctgcccatcacgccagacaggattaccaggctggagtaccgttggaacaaggccaaaagagcgagggggggccaaaatgggctgaaggacaggccggcacacggatataaaacctcaaggaactttaagcacaaaaggccaaccagggggaaacttggggaaactgaacagtggcca

SEQ ID NO: 210322 - DNA, 389 bp, Homo sapiens
gcaggagaagaccctgcctgaacccagctatgtggagaggcccacgggatggaggttgaggtggagcatgagctgcccctgagcagacagaacaacacaaaggggctgggaattgagagtggcggtgcccacagggagcccacaggcaggaagacccaggctggaggatcagggcccccacggaggaagactttggactaaaagtcacaagaccttgcttttagtgccagctttgtcactaactggcaatttaccgtaatgaaatcaccgatactggcccaaccttcatttcttcatctgtaaaacatattgccagggacgaagtttgcaatttcgttgacttcaaaaggtggctgtgggaataaactaagatactggaagagaaatgg

SEQ ID NO: 210323 - DNA, 563 bp, Homo sapiens
caggaaaatgtgactaacaatgaagataaaatatatatcaatcaaagctgacctagaactaattcagatgttggatttggcagacgtattattataggtgtattccatatgttcaaaaagttaagtagagacatggaagatattaaaaaaaaacacaaatcaagcttctggagatgaaaactacaatgtgtgagatgaaaaatacactcaatggaattatcagcagattagacatcgcagaagaaaaggttggtgaacttgaagacatagcaatagaaactatccaaaatgaaacacagagagaaagagaatttttaaaaattaacagagcatcagtgagttcttggacaatttcaagcagcataatatatgtgtgctttcagtttctgaaagaaggaggcagaaaaacaaattgaagaaataatggccaacatttccccaaatttcattaaaactataaagctacagatccaggaagctcaatgaacccaagcacaagaaacgaagataatcacaccaaggcacatcattgacaaattgctcaaaaccagtgataatgagaa

SEQ ID NO: 210324 - DNA, 460 bp, Homo sapiens
agaagaaaatccatcttttccattcttcctgccttaaaaaagacctgatatgtcaagtgaacagtacttctacacccttctcctctccagcctcaggttaatttaaaaagtcactcaagtttgaaaaggacacaaaaactataaccaaaggcaaactcatgattctttcaacaagtacttattgagggcttctaatatgccaggcactgttctaggtgctatagatacagcagggaataaaacaaagacctctgccctcaaggagttcatatgcagccaacagctcatcaggcagtgaaaggtgctgctgagcccaagggtgcagggatgggagggggtgatgtacctgaagtggtcagggaaagtctccctaacagggccatctgagcagaggcccgaggaatggggagcaaagcacaccatatctgcggggggagagcatcctctaaagagaaaggag

SEQ ID NO: 210325 - DNA, 298 bp, Homo sapiens
aaatataatactgtataagcactaaccaaaagaaagctggaatgacttgattaatatctgataaaatagacttaacaaagattataaacaggcattaaaaaggtgtatttcataatgatcatggggttatttcaccatggaagcacaacattgttcttaaatattcatgtacttaacaacagagcagtaaaacataaaacaaaaacagaattgaaaagagaaatagattcacaattttagttgacggtttcaacactcctctctcagtaatttatagaaaaagtagacagaaaatcca

SEQ ID NO: 210326 - DNA, 239 bp, Homo sapiens
catgtaaaagatcaggcgttttcttttcaaccttggtaaaggtcagtaaacacaacagtcagaaggcagaaaatggagtggatcaaaatgatgatcatgaaatagcttagaaacaagctggtcaggacttcagacagccagtgataaggcaggagaccatggaaagtgtattagtacattttcaccctgctgataaagacatacctgagactgggaagaaaaagaggtttaactggact

SEQ ID NO: 210327 - DNA, 225 bp, Homo sapiens
cacgctgtttacatggggcatagactgcttcatgaacgcttgactgcagctttgccttcctcatgccctcaaaaaggaaggagctgaccaaagcttactataccatagctggggtctgggacccccagccaggtctcacagatgatctgggaatggcctccctgttgctctcaggggtccggcagtcacacagaagagtcaggttgaaatcttggcaagactttg

SEQ ID NO: 210328 - DNA, 449 bp, Homo sapiens
acctccaacaccggggattaccaatttggcatgagatttgggtgaggacagatccaaaccttatcagtcactaatccagaaatttttttagcatttaattgatcaagcttttcgtagtgatcagtgataattgatttttgtaacataaaaccctagtatgagtacaaaatcctaattgctttcaaagttaattttttaaatgtacaaagatataagctaaatcatcaaaagctaaattatgttttaatagttacaagtataattttctagttcatacaaaattagcattttctaaatgctaatagggttttattaatgttcagggtaactttatattcctttgttgtccactgggtgtcaatatgataaaatgacattgaataaatagcaataaattaaatatatttacagaaacattttatcaaattaagattaaaatctttattatg

SEQ ID NO: 210329 - DNA, 429 bp, Homo sapiens
gctgcaacctctgcctcccaggttcaagcgattctcctgcctcagcctcccaagtagctgcatgcgccaccatgcctggctattttttttttttgtctttttagtagagatggggttttaccatgtaggccaggttggtctcgaactcctgacctcaggtgatccacccacctcggcttcccaaagtgctgagattacaggcatgagccatcgtgtccagccagtattacttcttgatagaaaggtgatgagaagtagggaacacacttgaggcatgcttaggagtcatgcttgatgaggcttggtggttggttaaaggtagaagatgaaggagatggaggaggcaaagatgattttctaatttctagcctgcatgtctgagtggatggcagtgtacccacagctgagaaagactacaaaggcaagagc

SEQ ID NO: 210330 - DNA, 575 bp, Homo sapiens
aagaatttgacaaaatccaacaccatttcatgatttcaaaaacattcaacaaactaggaatagaaggaaacttcctcaacctgatgaagggcatctgtgaaaaatccacagctaatatcatgcttagtggtgaaatattggatagtttcctcctaagttcgggaactagacaacaatttctgctcttgccacatctagtaacattgtattgaagtttccagtcaggacaattaggcaaaaaatgaaataaaaagcatcctggttggaaaggaaaaactaaaactatattcacagaggacatcatcttgtatgtagaaaatcctaaggaaccccttaaatactattagaattaataaatactgatgattgtaagataaatcatcactacacaaaatcaattatattttcatatactgacaatgaaagacctaaaaatgaaattaagaacaactccatttaaaacagcatcaaaaagaacaaaatactgaagaaaaacttcacaaaagaagtaaaaaatatatactcttaaaattacaaaatattgttgaaataaattaaagaagatataaataaat

SEQ ID NO: 210331 - DNA, 232 bp, Homo sapiens
agaggctcccggtgtctagtttaacagtctctaccactcccagtgttttattaacccaacctgatttactgattttattgacctccttagtttgtttttatgggctttgagtttgctacttctgtttggttcacattagaagcaacccatataataaagcaaaggctttccttcttatgtaatttataaggcttttttgtcaagaatttgaaatatttgtgagcagcgttgg

SEQ ID NO: 210332 - DNA, 426 bp, Homo sapiens
ctcccaggaccaggagacaggggatgtggtattagaggattttctatgttggtatgaaaggaaatgttccctcaactttctcattcatatataaaatgaattttaaaaaataaatgaatcccaggcaagaaagactatgtgtgttcactccctggttttcttcaaaatgcaagatgcgtggtatttacatacacttacagctatgcataatgaatgtgatggaatttattagcacagccacaaatacagggctttgaaaggaaaccaagagtaggacatgaattgttcctgtaatataatatggcgctcctttcaatttttccccacctagagcttcacacatagtttacaacgattctggcaaaggtagggtatttcaacacaatgaaacataactaaataacttggaaccaaatgctgtcattc

SEQ ID NO: 210333 - DNA, 180 bp, Homo sapiens
acttgggggcagcaattataatcataatgttcaatttctcaagctaaaggttgtatattatattattctactttttatagacatgacatacttcacaatttaaaaataaaagatttttgtccttgtatgtctgattgaacataatgtaatttccttataaaggaccactccacctccacc

SEQ ID NO: 210334 - DNA, 741 bp, Homo sapiens
gtgtggcctgcaggcttccagaaaaaaacaggagatcagtgagctagcagcagagaagccttcctggaaaagtcttcaaagctacatctatacctgttcctgtattattgaaaaataataacaagataaacctggccagctatacaaatgctctgagggttgagataacatgcaaatgtagcctcacatatcaatgtgtgaaagctggacagaccacacagctcagaaaaggaagtacactctgcatagctaacttgcacattcactatccaagctgcaccatcttcggggtcattgtgtgccaggcatatcaactcttttcaataaaaatgcccccagaagactggaaactggttattccttctcttattacggagaggatacctgccttttgtcagcccccagtgagaagacaggagttgagacgatgactcctgtgcttgctcaattggagattgtgcattgcagacattggaacagggagaataaagggatcattcaatgatgtgtgatgtgactgtgtattgtctgaaagcaccttgagttaggatagggaaagagtagaggtgagagagggtaatcttcccatgggggagagaggaagaaggaagagtgatagcgtgcaagtcactgagtcttgagaaggggagtacacggtagaggaaatgttagtgcatgaccctgcctgcggcaacacctgtagaagacagtctcaggctcaggtgggagtgagacttataa

SEQ ID NO: 210335 - DNA, 282 bp, Homo sapiens
aaatatctccataatctctgtcttatctttcaccctcttaatgttgtctctgatgacagtgatcttaattcaaagaagtctaattattaagagggtgaaaagataagacagagattatgagaagatatttgcaaaatatatatccaccaaggactcacttcccatgtatctgctacaaatcagcagggaaaaaacctcccaatttaaaaatgggctaaagagttaaataggcactttacacacagcaaaaaaggatattcagtagtccaataagcatatgaa

SEQ ID NO: 210336 - DNA, 764 bp, Homo sapiens
cccgcgccgctgcgggcgcacacatgcacccaacagacggtgaagactctccacctggcaagaaatcctcctctcctctcagctgtcaccatgtccgacaactttaatcttccagaagtgatggcttaatggatgggactccggaagaacaaggagggctcgctcttctccagcacatttcactttctcctcctcctcccccctccctagagcagcttccaccaaggaaaaaaaaaagaaaaaagttaatatctccacccaaaagttctctggagaaaaaaaccaagcaaggaattgagaatcacagtggacaggaacttttcgtggccagagcgccctcgacgttggggagcgaggctgactctcctgggagtgctggtacggagggcggcgggatcggccgtctgtcctgcggtccccacacctggaaagaactgcgaagtggacgcttcgcgtctggctctgatcagacagataaactgccgtagtggaccggcctcctgatcaccttctccactttcccagggctattttccccagtcctttcctaggcgtttgccaatctccccgacactcaccaggcggcgaagtgaggaagaagccgtttcctgatctccctccacctccgcagaaactccgggcagcaattccttttccccgctgctagggagcctgaaggccaaagccgggtccctagccccgcgggcggtccgcgcggagcccgcttggtctttgcgtagttggcgcacccggcgcaggcgctg

SEQ ID NO: 210337 - DNA, 616 bp, Homo sapiens
ttatatatgatggatatatgtatggcatactataaataaaataactgaagacagaggagagaaaaaccatttgctagattcttaaaagattcccagtttggtgggcctcagaaatttaaacagacctaccataagacccaacaattccactcctacccaaatgaatgaaaatccaggctcaaatagatacttgtacaccaatgttcattgcggcattattcacaatagccaaaaggtggaaacgatccaagtatccatcaagagatgaacagataaaatgtggtatatacataccacatttatttatatgtgtaatatggaatattattcagccacaaaaaggaatgaagttctgaaacatgctacaacatggatgtactttgaaaagagtatgccaaagtgaaataagtcagacacaaatggacaaatagtacaggattccacatatacgaactatctggaatagccaaaattcatagagccagaaggtagattagaggttaccaagtgcctgggggagggagaaatgaggagtcactgcttattgaatacaaactgtcagtttggagtaaggaaaaagttttggaaatagtggtgatggttgcacaacattatg

SEQ ID NO: 210338 - DNA, 406 bp, Homo sapiens
tccttaattcttccactataacttgtgtgtatttctttataattctatcttaaacaacatatttcttgattttgcctgtttataaactttacataaattgaacaatgctgtgtgtattctcctgtgacttgccttttcttttcaacgttctattcacatttatccatattgatgtgtgagctgtagcttatttgtattcactgctgtatggcattccattgtgtggatattccacaaattacctcttttacttgtgatggacatttgggttgttcatattttcacatgtctctgggtatacatgtgcaagagtttctgtaggctatgtagctaagggtaaaatttgtgaactttagggtatatacaatttcagtttcctaggtaatgacaaattatttctcaaaat

SEQ ID NO: 210339 - DNA, 521 bp, Homo sapiens
gcaggctaggaatggccaggctctggtctctcctcatccagcaggctagccttgcttgcatcctcagggttccaaagacagaacaaaaaaaaggcttcttgaggcctaagcccaggactgacccagaatcaggttttcagtcctggttcaccagttacatggccttgggcaagaaacctctgcatgcctcagactcctcatttgtaaaacgaagattaagtgagttaacatgtgtggaaagagctcagagctgcgccaaacacctcataagtgctatacgaatgtttgttactatcagtgaactaataaggaaaatgatatggtccatgttcctcatagtgttgaaatgtaccgggctggtcatttaggtatcattcactcattcacagaatatcggatgtttgctaggagccaggcactgtgctgggtggtggggataacacattgaataagataagtttgctcttagatggctcagatagttgggaaaactgaatgtagcttccgtgatttgatttgct

SEQ ID NO: 210340 - DNA, 754 bp, Homo sapiens
cccaaagtgctgggattacaggcatgagccaccacgcccggcctcctcttccatatttgtagctcctttctccaacagggagaagcctggccccatgatccttactgtattcactgatgtggtcaatcctcctggatgtaacctgtctcccacttttactgccttggctgccccctactcccagcataccttaggtttcaattgttctgcgaggggagatgggagtgtggaagggaggcagggaaagaggatgctttatacttcttagcactgactatgggatagacactgttctgtgttgtcttagaatcctgacaaccctacgaggtaggaactatgattgtgcccattgtacagatgaggaaactgagaggtgcaaggtcattgcatagtcacccagctgttgcggcaaacggtagctcttgcttcaaagccaccgttctgaaccacaaggcacccatccctcctactcccctaccctgggaaaccgaaagagtttctaaaagtcactttggagaacagcatgattcagtatttggtgagccctaattaagttttatgatcacaagtgacaaatataaaaccaaaaccaaaatcttattttaagaatttatcaacaacaacaggccaggcctagtggctcatggctgtgatcccagcactttgggaggccgatgcaggcggatcacttgaggccaggagttcgagaccagcttaaccagtgtggagagagggagagagccagtgtggagag

SEQ ID NO: 210341 - DNA, 769 bp, Homo sapiens
ctagaaatggatttcagattgttgaaaccatagatgagatcacccagagggaatatagggtgaggtgacagccaagagtggaaccttgaaggacatcaacattggagtagagtcattgaattaaatgcagaaaggaaaataaataaataaatagatgcaggaaaggaaagggcattgggagagagaagaaaacaactagcggagagcagtgcatgaatgcgaaagggggaagctaaatgtccatgcggattcagcttgcagtgttgtaactgttcattttatatgaaagtaatatgttaacagccccccacataccaccactttgggattcaagtatacaccaataattaccatcagaaggaagcctgtccccatagcaggtacggattgccacaacccactttagaatcctgtcactgtctggctttgtcccagtcacattaatacttttggcttagcccaaggaatcctgctgaggtttattataaaccattttttggccagacgtggtggctcacacctgtaatcccagcactttgggaggctgaggtgggtagatcacgaggtcaggagttcaagaccagcctggccaacatggtgaaaccccgtctctacaacaaaaattagccaggcatggtggtacgtgcctctagtcccagctactggggaggctgaggcagaattgcttgaacccaggaggtggaggttatagcaagctgagatcgcaccactgcactccatcctgagtgacagagcaagactccatctc

SEQ ID NO: 210342 - DNA, 449 bp, Homo sapiens
ctctagcaggctccccgtatacgtgtggaattatttttttttttgagacagagtcttgctctattgcccaggctggagagcagtggtgtgattagagatcactgcagcctcaaactcctgggttcaagcaatcctcctgctttggcctcccatatgttgggattataggcgtgagccaccatgcccagcccttccctgttttctttttccttggccaccttcccctgctcatctctctgctctgacagctcctaccatctttccttccaacttctaggaatgtgctggctgactgtgagctctctttcttggaaatgcctttccagctcctgtcccaggctcacaggcatctcagtggcttactgtgtcacctgcgccctaggttggttgtctagaccccacacctctgttgtcctaaggctggggaccctcacggtcccagtgctgcc

SEQ ID NO: 210343 - DNA, 293 bp, Homo sapiens
tcagggagaagttggcagtggccagactacagcgagaagttgcccaaagaacaagtgagggggccatgcatgagaagctgatacatgaacctggaagaggagagacacttacggtcttcaaagccgagaagcgattgcaggaggtgacccgtagagtctgaacgcaacagaattcagatgcgtcttgcagcagcagttctccaggatggaagaaacagtacgaaatctattgcagagtcaaggatctccagagcagaaaaaagaagaaactgttaatataatggtctatcagg

SEQ ID NO: 210344 - DNA, 577 bp, Homo sapiens
  misc_feature (461)..(461): n is a, c, g, or t
  misc_feature (525)..(526): n is a, c, g, or t
caagcgaattaaccctcactaaagaaaaatgtcttcaccccaaaatacaagcaagtgttgatttttcacactaatgggaaacaagaatagactggaaaaagttccctaaaaacccatttagtctgtatctttttatcttttgtcagttactaatgtgtaaccagatgacccaagctgagtttcaccacctctcctttctttattcttaccaatccattccaagtgctaatgaatggtgaggtctgggaacccaaagatacaagaaagaaggcatatggatgatagaaaaaaggtaagtcgagagagagagagagctgcaatttggtgatgaaggtagcaggcggcttggcttggcaaccacacggaggaggcgagcaggcgttgtgcgtagaggatcctagaccagcatgccagtgtgccaaggccacagggaaagcgagtggttggtaaaaatccgtgangtcggcaatatgttgtttttctggaacttacttatggtaaccttttatttatttctaatataannggggagtttcgtactttagtgagggttaattgggcggaattaaccctctca

SEQ ID NO: 210345 - DNA, 420 bp, Homo sapiens
tgataagattttaattattatttgttttgtaagcacaaaaagatggagtcataaaatcttaaaaatctctgcagaatttcacttctgtagaagtgaaagggaaagatagctaggatttttaaaagatgaacatagtagcattgattctgcagctgcctagagttaggcctgggacaggtggattatttggaagaggaatgtgtaggggcagatgtgaacttatttttgcttgctggcttgtttgtttggtaaaagtacaaaaatcagccaggtatagtggcgcgtgcctgtagtttcagctactcgggaggctgaggcagaagaatcacttgaactcgggtggtggaggttgcagtgagccaagattgcaccactgcactccaacactccaacctgggcgacagagtgagatgccgtctc

SEQ ID NO: 210346 - DNA, 1623 bp, Homo sapiens
tgtgacacactgggctgatttcatgacccaaaaaccatttgccacctgcaaatgatttccacaaggaaacacctggctgttgtccagcctcttgattgaaggagatacttggccatggtctaacctcttggttgaatgaaacacctggctgcagtctaacctctcggttgaaggaggcacctggccgtggtctaacctattggttgaaggaggcactggctgtggtctctcagctgaaggagacacttcgccacggtctaacctcttggttgaaggagacacctggctgcagtctaacctctgggttgaatgaaacagctggccatggtttaacctctcggtggaggagacacctggccacagtctaacctcttggttgaaggagacacctggccacagtctaacctcttggttgaagaaaacagctggcttcagtctaacctcttggttcagggtgtggtcactctgggaaacttccagagcaactattttatctacctctagcacaggttgccatcccctctcagcctcctcttggtctctttctgtgattgtgaacttccctcaaggaaacatctccgactcctcttctccctaaataggtggcacttcatgctgagcagaacactcctagtgggagctgatacatgtctctacctcctgcaaagtagccaagtggatcaaatccagtcaccagaattcctttgcgttttttcagaagagattcctggggcagaagctgagctctcagtgctctgaagatgggcggaacttctctgtgagagataagggaaggatttccaagctgcaccaggaaggagccagaaaaggaggctgtcgcgagcaagatggccgacactggagcttgcaatgtgacccctcccacaaacccccagccttcaaattcttcacaaatacttggatgtgaggagcatctggaaactttgtgcccaaactagctctggtagaatctaagcattaaatgcagatactagaagcacagagccagtgtggcataaaaactggcagaaataactaggcaggagctggactgactcccttagagctgtgaaggtgggttcagatcaagtgagacccacactctgaaggtcaggaagccctgctgggatcagagggaaatctgacataatggtgcccctgcagagctcacagcctagggaaaggcacacacacaggattctaagacaaatgctgtgtcggagaatgaaaaagaaaccatgagaacccagaagagaggacaattaaccttccgggagtcaaggagggcccaacagtagagaggctatttgatctatgccttgaaggcttttactatctggaggtagagtggtcaagagctcagagaggtagagcaaatcaagatccctggacatgtctcaggccctaggagtcagaatctcagatggagggctggggacaccttgttaaaagcttcaggtgattctgaggctcagccaggtcagggaaccaccagcctggaggacaaccacagctgcagccgagccactctcaagggcacctgcctccccctgccctgaattgtagggcaccgtgtgtgtgtgtctgcacatgtatgtatgcatgtgtatgtgtgtgtgcaca

SEQ ID NO: 210347 - DNA, 371 bp, Homo sapiens
cagctggaagggaaggcaccgatggtggcaattgcattttaaaaccaactaatatttcttagaaactctgctttgataagactggcactggctggcttttgcaaaacataaaaaagacaatgagaacaaacacacccagccagaaactgcctggccctccttaaaagtgactccatttcacgactttattgtttggtaaaaccataggcactcttctcatccatgtaaatgtcatctcaagttttctctcaataaatatctcccttcaattaaacaaagactaatacttttatttttaaaaaataaaaataaaactttcaatgagacagggaaatctgaatttttattttaacttttttttttttttttaa

SEQ ID NO: 210348 - DNA, 379 bp, Homo sapiens
tttacatccatgagcatctaatgcttacttctcacttataagtgagaacatgtggtatttggtttggtttctgcataaattcatttagaataatggccttcagctgcatccatattgctgcaaaggacataattatgttgttgttatggctgtgtgtaatattccatggcatatatgtaacatattttctttatctagtttaccattgatgacacctaggttgattccatgtctttgctattgtgaatagtgctgcaatgaacatacatgaatgcatggcttttttggtagaatgattcatttttggaagatgaaaaaaattctggagacagatggtggtgatgattgcacaacaacatgaacataatcagccgggtga

SEQ ID NO: 210349 - DNA, 364 bp, Homo sapiens
  misc_feature (234)..(237): n is a, c, g, or t
  misc_feature (327)..(327): n is a, c, g, or t
tctccactctctgtctcgctcctgctccagccatgtgaactgctgcatcccttccgccatgattttaagtttcctgaggcctccctagaagctgagcagatgccagcatcatgcttcctgtacaacctgtggaaccatgagcaaattaaaccagttaagtctcccaggaaaaaaaaaaaaaaaaaaaaaaaaaaaaaaaaaaaaaaaaaaaaaaaaaaaaaaaaaaaaaaaaannnngggggggggggggggggggggggggggggggggggggggggggggggggggggggggggggggggggggggggggggggggggggggggngtgtggggggggggggggggggggggggggggggggg

SEQ ID NO: 210350 - DNA, 986 bp, Homo sapiens
gaaaggaaggcctatgaaaatcagaccatgaagtcttatttttcattctttggtctagtaatttaatttcattttccagattattaatgctgcagtttattatatatttgatgctgaattgctgaatttgacttgtccaaatgacatcaatcctgcctttatctcattgccagaagtagtgaatatattgctttttatcctggtgaaagggaagattcaaagttgtttgaaggagaggggctgatctgtgtggtggcagtagaacatattctgattgatgtcctctaaccttgcaaacttgccagagcatccacctagttcaaccctagttcagttatcatggtggaaacccattatgggcactcttagcaactattgtgcctatatattaataagtctactgaataacaattagttcatccccttacttcttcagcccttacttccacattgaaagaagtaaaaagtagaactcaccaattgctatttaagcacatttgctagttttgtaaagtctatagacttctaagaggaatatatgaaacctcaagtaaatatattaaaacatgcacaaaataaatatatttatgatatatactttttattgtaactatcaaattttaatcaaaaaatttgtaatgctagggaaatctcaggttttactaatggaattatgaaaaaatattaatcttaatacaatttgtaaaatgccttaaaagttagatgttgaaatggacttccaggtcctgtagctacttctattgaaattatcatcataatgttttacaaaatgagaaaagtaatacagtttctctttccagttgccctgaagcagactaactgatgcttgtaaagatgtttctcagcataaatggattgttagagaatgaacttcagttaattttgaccttaaaaaaaagtcacgtagatatgtattttcatctgaaacattttcaagagtcttgcaaacaagtcactctaaaata

SEQ ID NO: 210351 - DNA, 375 bp, Homo sapiens
cagtacctgcaaaatgtctgagcattatgttgatttttttcctttattaaaatgtactgtttaatcttataagaacaatatgcctgttattttatagaatgtctctaaatttggatttgtttaaggtttctttattcaagtttgataaggttcaagttatagaagcctggtagactactgcagaagagatgttgtagtctcagtaaatcatatcaggggacacataatgtttgttccagtataggtgatgttaactttgatcacctggtcaaagtggtatctgtagttttctccattataaaattatttttccactttaaattaattagtaatttatagggaggtaattcaaaatatcctgttcattaaactgtt

SEQ ID NO: 210352 - DNA, 231 bp, Homo sapiens
tggcaacaacaacaacaaaaaagactggtccacagagagagagctgcaggaccaagtaaacgtctgatttccaagagaaaggaaatcttagcctgaaaagtgaaaagaaagcagccaacataaagactaaattagttcccagacagataaggtggaaagtgtaagggagtgcagagaactgaggaacagctggaagaaatctttctaaaggatgaattccgggccgggcac

SEQ ID NO: 210353 - DNA, 410 bp, Homo sapiens
catcacagggtcctgaggcgacattcatcctcagcttatgaagatgatgggattaagagattaaagtaaagacaggcataggaaatcacaagagtattgattggggaagtgataagtgtccatgaaatcttcacaatttatgttcagagattgcagtaaagacaggtgtaagaaactatacaagtattaatttggggaactaataaatgtccatgaaatcttcacaatttatgttcttctgccatggcttcagccggtccctctgttcagggtccctggcttcctgcaacagttgtctcatgtcccacaagcttttttttaatgtcttactgagcattcatgcaggtgaaaaatctgtttatatttatgagcccaaacccaactattttgcatataaacaaaatatgctg

SEQ ID NO: 210354 - DNA, 345 bp, Homo sapiens
aaacaaacaaaaacacaggatagtcttcttggccctacctgttggtgccaatggaaggataattcttagggccagggcacaagtgtcctgagttccccctgccagtgtggaaaaccacagatgcactggacggtgctcctcagagccagccttggatgctggctgctgctggctccccaattcctggttttagggacctctaagatggccccaatgtcctaacccgtccaccccactaaagagggacagtcccataatggtccaactctttgacaagaccatgagcaaggatgaagaacaaggggtagttgaccaacaaggccttcattcctgtccctctttatt

SEQ ID NO: 210355 - DNA, 236 bp, Homo sapiens
tggtggcacaccccgtagttccagctacccaggaggctgaggtgggaggatggcttgagactaagattgcagtaagccaagatcacaccactgcactccagtctgagcaacaaagccagaccccatttcaaagaaaaaaaacagacccaacactccacacagtatgttctttactgtaaatagaagtgcggacataaacaaaaatttacactttcacatactgcaaaacaaaaata

SEQ ID NO: 210356 - DNA, 555 bp, Homo sapiens
taggagagttatttaacatgttcgacttgcatctcccttaaatgtataaatgggataaaaacagtggcataccacgggtagggcaggaatagtttcccctggtggagttgataaaggggtgtgctgtctttagagaattttagaacaataataaaatcaactaaaagtctttttaaaaattatcaccaaatgctgacaattctaaatgaggtcagtgagtaaaactaccccctaccctgatggccatggaatcatgcatttctgaatgtacttcagtatgtacctgatagattataaaatgctacaaaatgtaatttttaaacaatttccttcaaattcatgtgacttgtgagatttggagggaaaatactggttctgtttttattttttttaaaaagtatagcaaatctgatctgcaaaaattatttggtcatattgttagtgatgtcattttttttgagataagtgacttatttaccacagaattctgtggagaatgagtgaaaaacatcctgtttttgtgtaacagagaaataaacattaacatgatagctt

SEQ ID NO: 210357 - DNA, 351 bp, Homo sapiens
gctcggtaccctactgagcaactctagtgtgccagcacaggccagacatactagtgagccaggcacatctggccttgggaaactcatcctacaggggaaggccagtttttttcccttcaattcctcaagtctgggtggtgacaaggtaggggctaggtactggactaccacaggtttttaggaactaaggtgtttctcataaacacaaaatgttgggtgaaactgggaacaactactcagaagctcatttatttgcttaaatggaaagtgtgggagccactaccctctcttttgatctgccaaggatttcctctcagagctgttgcacagacagagattgtacttggtaag

SEQ ID NO: 210358 - DNA, 470 bp, Homo sapiens
agtcattgagaggtggcaaattttagtttacctatctgtaaaataaagaatagcatatttctatgggccctgtgaaattaaagatatcaatgattctatgtcgatacaagtatgtccactcactggtgacatgtcaaagaatgccaaaatctacaacaatgtgagagtgaaaaaataatgttcataaaattataaacaagaaatttcacatagcataactacagataagaagaataaaaaatatgtaaagctcttttatatgtttgcccttgatagagtttattacaattattataaattgcacaaaattatttgttgaaataaagcatattaattacttatatattcaaaagttaaacattgataaacatcttgctatgtgtatggaactctattgacttttttgtccaactttctgaaggcaaaatacgttgaaataaacaaggaggaaataaaagtgattctactta

SEQ ID NO: 210359 - DNA, 495 bp, Homo sapiens
gtcagataaagtagggaagaaaataggagttataaggcagaatgaaatgagcactcataccagaggcccagagacagaataagtcacgtgtccaggcagatgaaaaaagtggatagctaagacacagaacagaaaatataccactagaaaataagctccttgaaggcagagatctctagtccctagaacaatgcctgacatatgagtgtttaataagtatctgttgataaaggaatgcatgaattaatacagcacagaaaaatatgcaacatgacatacttatatgcatagaagcataggcagtttttcagaaacaatacctatatcttttggccctttcagccttactccctaagaccgtcttaggggcttagggagggatagcattaggcgatatacctaatgttaaatgacgagttaatgggtgcagcacaccaacatggcacatgtatctatatgtaacaaacctgcacgttgtgcacttgtaccctaaga

SEQ ID NO: 210360 - DNA, 502 bp, Homo sapiens
gttgtgggaaagcagcaatgtggacgaatctcaaaagtatttccttaaggccaagcaaggtggttcacgcctgtaatcccagcactttgggaggccgaggggggcggatcaccaggtcaggagattgagaccatcctggccaacacggtgaaacccccctctctactaaaaatacaaaaatttagccgggcatggtggcaggcgcctgtagtcccagctacttgggaggctgaggcaggaggatcgtttgagcccgggatgtggaggttgcagtgagctgagattgcaccgttgcactctatctccagcttgggtgacagagcaagacctgtctcaaaaacaaaaccaaaaccaaatacatacacattgaaaaatgctacatatttgtcatgattatatgcaaatgtttgtaaataacttatggaagatgaattggaaagatacctgcaaggatggatgctgatgggagaagatcatcttgctcccatcagtttagcagtgg

SEQ ID NO: 210361 - DNA, 435 bp, Homo sapiens
ctcccaaagcgctggaattacaggcgtgagccgccgcgcctggccaggcctgggaatttaacctgtggagagttctgtttttatgcagtattttacttccaactcccttaggtctcagccttcaacttctatccctgggtagatattaaaacccaagtcactgccaggctcacacctgtaatcccagcactttgggaggctgaggtgggcagatcacgaggtcaagagtttgagaccagcctgaccaacatggtgaaaccccatgtctactaaaaatacaaaaaaattagctgggtgtggtggcatgcgcctgtaatcccagctactcaggaggctgcggcaggagaatcgcttgaacctgggagagggaggttgcagtgagctgagattgtgccactgcactccagcctgggtggcagagcaagactccatctc

SEQ ID NO: 210362 - DNA, 415 bp, Homo sapiens
ggtgtcagtttttattttaaagcttcattgtttagtttatttttatattttacttcagtagtaatgactattaactatgtgctagacggtgttctaaaagcattacatagattcatttagttaatttttatgaaactcttatgaagtagagaagattctttgtacatttatttataatagttgcttgaggccgggtgtggtggcttatgcttgtaatcccagcactttgggaggctgaggcaggtggatcgcctgaggtcaggagttcaagaccggcctggccaagatggtgaaaccctatctctaataaaaatacaaaaattagccgagcgtgattgtgtgtgcctggtagtctcagccacttgggagggtgtgaagcaggagaatcacttgaacccaggaggcagcagttgca

SEQ ID NO: 210363 - DNA, 540 bp, Homo sapiens
gggcagggtggtctcatttcctgacctcgtgatccacccgccttggcctcccaaagtgctgggattacaggcgtgagccaccgtgcccggccagttttgtggtttttaagccaagaaattttataatcaaatattttcaagggatattcttagatatattaagagaaatggtctcatgaataagtttggcaaacactgggctaacttagacattatttactgcaataatagagcctttaatatgctggtgtgaatttttaatctttccaagagaacaatattgtatttatccattgtatcaatcagtgtcccggaagaagacagattgttcactcacagtggataattaaacatttaatagagaaacaagaaaaaaagaatttcaggccaatatacctgacgaacattgatgtaaaaatcctcagtaaaatactggcaaactgaatccagcagcacatcaaaaagcttatcctcaaaaaaaaaaaagtttatcctccacgatctagttggctttatccctgggacacaaggctggtttaa

SEQ ID NO: 210364 - DNA, 370 bp, Homo sapiens
agataccaagtaatacagtaataattaacatattaagaagaaaattttcactaaaagattgccaacaagacttcttagaagcacatcatgacgtagaatggttgatataagtgtttattaccaggcgtggtagctcacgcctgtaatcccagcactttgggaggctgagaccattctggctaacatggtgaaaccccatctctactaaaaatacaaattacccgggcgtggtagcgggcatctgtagtcccagctactcgggaggctgaggcaggagaatggcgtgaacctgggaggcggagcttgcagtgagccgagatcacgccactgcactccagcctgggggagagagcgagactccgtctcaaaa

SEQ ID NO: 210365 - DNA, 224 bp, Homo sapiens
aattatactctgcctttttattcagtctatagtagtgcttcaaaagcaagacagttttcctaatacagggagagaggccctgtttaaaaaaaaatctatttggggtactctgtttcaatctttgtgtctttctctttgcccagctgcaccccttcatgggacagggaccccaggaaggaatgtcccacccagactctggagttgcttttccagttcattgtgtg

SEQ ID NO: 210366 - DNA, 360 bp, Homo sapiens
ctcaggtgatcagcccccgcctcggcttctcaaagtgctgggattataggcgtgagccaccgcgcctggcctacataagccatttctatgaatctgttactgtggactcacagtcattgtctgcaaaaagtatttcctgagaaccactgagagaagtatgtttggagctgcatagaagaatcacagcgcaggccgggcacagtggctcacacctgtaatcccagcactttgggaggctgaggcgggcagatcacgaggtcaggagttcgagaccagcctgaccaacatggtgaaaccccatctctactaaaaatacaaaaattagctgggcatggtggcaggtgcctgtaataccagcta

SEQ ID NO: 210367 - DNA, 176 bp, Homo sapiens
cacccatctccccccaaagaaaatcccacaagcttaatatagaaaacagaaaacactaaatggagggcttaggattccaacccaaggctatcagattcaaacaagaattgcaatctttggccaggcatgatggctcacacttgtaattccagcactttgggaggccgaggtgggtg

SEQ ID NO: 210368 - DNA, 243 bp, Homo sapiens
gcacccaacctttaacaccttttatcacctgccctgcctgatgatgatgggctttggggtccagtcacatctccattccctcacttgtggcaggcaccagggtaaccagcaagcaagccctgaaaagagagaccttgcccggaaacgttgcagcgttctcttacgtgtatgctttgccttctgagaatggcgagcattgatgcaagtgtatcccttttaagaatactcaatggggccaggcgt

SEQ ID NO: 210369 - DNA, 519 bp, Homo sapiens
ctgagattgcacaactgcactccagcctgggcgacagagggagattctgtctaaaaaaagaaacccaaaaaaacaaagaaacaaaaaacggaataatattccactgtatggatggaccacattttgcttattcattcatcatccatcaaggaacacttggttactcccaccttgtggtcattgtgaatgatgacgcaatgaacatgggtgtacaaggatctgtctgagtccctgctttcaattcttctgggtatataccctgaagtggaatggctggattacatggtaattccatttttaattttttaaggaacccgtatactggtttccacagtagccgcaccattttacactcccaccagcaatgcacaaaaatgtcaatttctccacatccttgccaacatgtgttgttttctgtgtattccacccctgccccccaccgtagccatcctaatggaggcaaagtggtatctctctgtgattttgatatttttaattcaaataaaccttagcacctgt

SEQ ID NO: 210370 - DNA, 291 bp, Homo sapiens
gaaatgagttccaagctttattcttctgcgtataggtggattagaaagcttttcaaatctgtcccggatttggactctgactagacatacttagctcaggccccgccacgcagaggccttccttcctcattaacatgcatcccaacatgggacgtgggaaatcattttgattctttgttttgcgaggggagttgctatgtcaataattaaccgggtgaccttggggaaacccaaaggcatctgtgagccttggtaacttttgcagaaaataaatgtgaagttttggctgaa

SEQ ID NO: 210371 - DNA, 515 bp, Homo sapiens
agtgttgggattacaggcatgagccaccatcaccatacctggctaatttaaaaaaaattttgttgagactgggtctcactattttgctcaaggtagtctcaaactgctatgctcaagcacccctcccaccttagtctcccagagtgttgggattttacaagcatgagccaccacacctggctaagctcagttcttaatgcttcatttttacttagcaacctctggcttattctttgaaggtacttctttatgcactctagcttaaacacccttttgagaactctatttgctaagctgtcgaatttctgtgtccagtggcttttgtgtggttggtgtaggctttcatgtaattttaaaaattcttgagtgaactagacttgttttaaaaagttagccatttttatatcatcattcagaacttttttgatttcacctccaagagttttttttatactagtacctctttgaaaaaagcagcattatgacaatattaccttttttttaaaaaaaaaaaa

SEQ ID NO: 210372 - DNA, 390 bp, Homo sapiens
cagggttaaggcacagaagaaagttcagcacatgagagacatttggaagttactaagggcatagtatatcatcatcaaatagttattatggacctattatttgctaaacatattgcttcccccatgattctcaaacatcggtgcccagaagaatcacctagagagcttgttaaaaaccagatttctgagctccaccttatgaatatgcatttgtaccagcacccaggtgaatctgaggcaagtgactaacactttgaaaacactgtgattggccgggtgcggtggctcatgcctgtaatcccagtactttgagaggttgaggtaggtgggtcactcgaggtcaggagtttgagaccagcctggctggcatggtgaaaccccgactctact

SEQ ID NO: 210373 - DNA, 461 bp, Homo sapiens
gatctacaagtgccatctattcaggggactaaatgtgatttcttttcactgcccagtggctggtaaggaaggaagcattttgcattttcagcttgtaggatggttattggtggtcctaccatcttgctcatgttcaagtttggtcgtgtagatgaagagcccagcttcccagctcttagtttttcttttccctcaggccattcataatttagctaacattctagtccattgaccagcatgcattttgaaaggtgagctggcaagcctgtaactgtgtgcaaggttgttctcatttaggctccaggaaggatatagtttccccataagaaagaaaagtgggcgagaggctgaggtgggaggtcacttgagtccaggaggcaaagattgcagtgagctgagaaccatgccactcactgccttccagcttgggtgacagagtgagaccccatctcgaaaaaaaa

SEQ ID NO: 210374 - DNA, 439 bp, Homo sapiens
aatgtgattcaagatgtaatcaacataaagcttgattgcattattttgcatgctaagttttccaaatccagcttcgtgtcacacctacagcacatctcactcaagctggccacatccctgccatccagacgtaaaacagtcacaagacagggctggcagggccgcggaggaggccggcaggggccatcacggagtgcccatcctgcactgtggtcccagcaagtttcttcctcctggcaagaagcctgtcccaggctggcaggggacagcgtgaggtgcagcctatggactgggaaaggggtgtggaagggccacacctaagtcctaaaatccaggcccagaagtggcccaactcacttctctgcctttaatctcacaggcatacccggtggcaaaggagtatgggaaatggagtcaggctgggtagccacgagcccag

SEQ ID NO: 210375 - DNA, 552 bp, Homo sapiens
tacaatccattattctgttctggatctcaaacatgctttctttactattcctttgcacccttcatcccagcctctctttgccttcacttagactgaccctgacacacattaggctcagcaaattacctgggctgtactgccgcaaggcttcacagacagcccccgttacttcagtcaagcccaaatttcatcctcatctgttacctatcttggcataattctcataaaaacacaggtgctctccctgctgatcatgtccaattaatctccaaaacctcaatcccttacaaaacaacaactcctttccttcctaggcatggttagtgtggtcagaattcttacacaagagccaggaccacaccgtgtagcctttctgtccaaacaaattgaccttactgtcttagcctagccctcatgtctgcatgcagcggctgccgctgctttaatactgttagaggccctaaaaaatcacaaactatgctcaactcactctctacatttctcgtaacttccaaaatctattttcttcctcatacctgacgcatatacttt

SEQ ID NO: 210376 - DNA, 243 bp, Homo sapiens
gatcctggaccttcagaaggtcggttggtgttatggagatgtgactggttcttgcagggatgggttcccctacaagggccggggggggactgcatacttctgacccctgggccctccttccctcccagcctgcacagccctctgcagtggagcacactgcaaagatgggatttaaaagtttcaccaagattgacaccaatcattcactcatccaataaacatattttaagtacccatggtttg

SEQ ID NO: 210377 - DNA, 601 bp, Homo sapiens
  misc_feature (401)..(401): n is a, c, g, or t
aaaactaaatgccagtttcactaggaccacccttgatgaagaaatatacattattaattttcttaaacttcaacttggccgagcacagtggctcatgcctgtaatctcaggactttgggaggccaaggcgggaggatcactttgagcccaggagttggagactagcctgggcaacaaggcaaaaaaccgtctctacaaaaaaatacaaaaaattaaggccaagcgcagtagctcatgcctgtaatcccagcactttgggaggctaaaatgggaggatcactttgggtcccagagttcaagaccagctagggcaacaaggcagtaatctcagcctcccaaagtgctgggaccacaggcgtgagccactgggcctggcctaagttgaaactcttttgtaactntgtgttgccattggaataaagcatttgagacagttcttgggagagtttcccgttgttcatgaggcattcgtagagactattctcttgttctagtctagaaatttctgaagatgggagtaggaccactgtcactaaggcttgacatagtatgcctgagaagaggataagcagactgtccacagtctggttctctatgcctt

SEQ ID NO: 210378 - DNA, 406 bp, Homo sapiens
tgtcctgagatgtaacctctctggcctggagataaagtcaactaactgcatggatggattattttatatattcattcacatgcagattctccacaccctcagaaggcaacctgacatctttattgagaaaattaagaccattttgcattaaccaccacatctttttctaacaccaaatcatttctgtctctctccactcccccaccaccttctgtttcctcttttcatcactcctgaccctcctccttgtcaaagcccctctccctgtgtcttcatcctgggcttccttctccatcttatgtttctcttgtttcttctcctggcactcatcctcctcccctttctcattcttgccacttattttctcctgcctatataacttggtaagccttctctcgtttcctta

SEQ ID NO: 210379 - DNA, 591 bp, Homo sapiens
ctttaggcacagctggatccaagggcacaaatgatgtcatcaggctccagttattctccatctcccagctcagctttttctgtctgtaagcctgattttcaggaaggctctttcctagtgatggagatgaccaccatcagctccaggcttctatcctgctaacccagtaacccagtgggaagagatttacttattccaataattccaagtggagagtgtcattgacccgtttggggtctcatctctacttctaggggaatgaaacactctgagtggccaggcctgtgtcatgtgctaattcctagagccagggaaataaggtctgaggattcaggatggggtgaaaggtggttgcttaaaggaaaatgaaatacaattagcagaataaggggaaacgagtggtctgctctgctcgggcaaaacaagagatgcccattactgtgagggacccttgaagtctggactcttaaatgggtttttgctgatttcctgggtgcatgctaggatgatggggcttgatgcagtagggaagagacgatgtaaaaataataaacaatatataccttcctagagtgtgaatgcattcgaaga

SEQ ID NO: 210380 - DNA, 1100 bp, Homo sapiens
gagagcactttatgcttttcctcgcccttgcagagtctgggtggtctcagtgggggctcaggacagtcagctcaagacagccaagtcaggtattattatgatcatttttatcatcatcatctgtataagacaaatgacacagccagttagtgagagggccaggactggaagccagggtatcggttttcccagctcccctgtcagaggccagatctggagtagtgggaagaggaggcagggggcaggtcttgccccttgccaggcctctgccccttgccaggcctctgccccctgtatctctgcttctgcctcagctgtcctgggtgaggtgggaggcacctagcatttagcaggtgattctcccaccctgccctggctctatggctcatagccagtggcttggagaggcagggccagatctcaggagtggagggcaacctcttccctggcttctaaaagaatccagagcccagtggggctcatgtcccattccaggttccagcatgccttgcctctgcttgctcgggctgcctacgcactagctacatacacctctagcttcatgtttcatgttggagtgtggggagaaaactgggttcttagcattagagagggaagtggcaggtggcagatacaagcttagctctgacctgggtgcacctcagctctgtgtccttttttttccctgacctgaagctgaccccagcagaagtcccccagccaacccctccacccaacaaccccccaccctcccatcctgcccccagccatagtgggagctgggaggattgcagcatctagtgccttccaaggctgttcctggagcgctgcttgtaaacccaagccaagctttgtcccacgtagggagaatggaaggtgactgcaatgtcccttgtcctttggctccatctccccattctgtggttctttgggggttcctgcttccctcaaactgaacactctcctgtccaacacctgatggcttaattattgcctggaattgcccggcctccgatgctggaatcaaagattgccttccgaagtatttttgttaagatggcaataaaaagaaatcaatctcactctttgaacacacccag

SEQ ID NO: 210381 - DNA, 485 bp, Homo sapiens
tgcaggccctgcgggtggacagggtgaacggaggcacaaggagggtaagtctgacaggggctggggctgggcctggagccagaaccccagccagtcctgccaccgtatcctagggcactttccgcagacagcaggccaaagcaaggttgcccagattaaaggggaaggggccctgcctctcccaccaagggcctcctggagaccccaacacagatccccagcccacagacaccaaacccagggcctttgagaagtgagaaatgtgaaaaacgcacagaacagctgcagcttagcgcttctaacacgccagactcacacaggcacacacagcgtccctgcagaggccagaaagctctgtgctgggaagtcccccgatcgggggaggccccacagcaagctcccctctctgcccatccaccaacgggcggaaggtcctaattaggaccatatgggaagggccagcgggaggggcagagagggaaaat

SEQ ID NO: 210382 - DNA, 357 bp, Homo sapiens
atcgagctcggtactcgtgactggcgattatacagatgaagaagcacacaggcaaggcctggaagggtcctgacctcaggcgcttacccttgatttgtaaccacccagctggctcaccttgcctgctgcagagacagaggagatttgcaatagagaaagtaattcatgcacagccggctgttgttactcaaatcctattattactcaaatcggtctcctcgagcactgggggatcagagtttttaaggttcatttggtgggtcgggtggtgggggcagtaagtcgggagtgctgattggtcaggtcagagatgaaattatagaaattagacgctgtccgctttcgctgagtcagttc

SEQ ID NO: 210383 - DNA, 835 bp, Homo sapiens
gtgtgagtgggatctgcctgggctctgggtgagtaattggaccacagaggtggactgttgaaatatttgctgtggagaagccacatctctcacagtgttggggcagtgtctgtaaggaggtagcccaggtccaggctacagctctccatgcatttgggattgttggctttctgctaagatagcagggccctctctttgctgaatgctgtactgaaacagtggcctaattctcttcagagatctctaccgcctctttatctaccacacattgagggagaacggggtcgtgtgtctgcctggcaggcgggcacccactctggctctgtgaagattcaatggacttgtgttcagtctcacttctcgcctcagtggctgcatagtcccaggccagtcacttgagccctctgactctgtttccccacctggaatctgtaggcccatctcttggtgttgctgtgaagaggtacatagagctcttggcagcatggccacagtcggtaagatgggtaatgctgtgcttctcgaatcttctagcactagtgttgctgaagtggctgcatcctgctcgcgggtgtgaggaggagagtttctttagaggcatagacctagcaaaatgtcccacttccctggaggtcaaagaggcggcaggaggagagcagaagttgtgagtcataaaggcactgctttcaagaggcagaattgccatcctcagggtgggggtggggttatggcaggaactacccattttgcaggcttgtaggtgaccacggaggtaccttgccatggtcaccctccatgctggctctcacccacatcacagcaggttagcattaga

SEQ ID NO: 210384 - DNA, 544 bp, Homo sapiens
tgtaagtgggtcccccgcctgcctgagactggcatagttccaggtaccagcagccccagagcaaaagttctcagcccagcagggttggctttctgtgtgccagtggcatctgaacttcctgtccgtctcacatctgggtaccctcaagatggatgtgcgggcatcagccaacagccaggtcttcccctccctactgcataggtggtacattctcctcagtttctcctccctaaagaaggctcaggctggccgggagcgatggctcacgcctataatcccagcactttgggaggccgaggcaggtggatcatgaggtcaggagatcgaaaccatcctggctaacacggtgaaaccctgtctctactacaaatacaaaaaaaaaaaaaaaaaaaaaaattagccaggcgtggtggcgggcgcctatagtcccagctactcgggaggctgaggcaggtgaatggcgtgaacctgggaggcggagcttgcagtgagccgagctcacaccactgcactccagcctgggcgacagagcaagactctgtct

SEQ ID NO: 210385 - DNA, 104 bp, Homo sapiens
gcagacctggccagatgaccagtgccctccccggggcatttcacccataaatgtgatgaggaaagcccataaatggtggtgaattttgctgagtggggttaaga

SEQ ID NO: 210386 - DNA, 390 bp, Homo sapiens
tggcaaagctaggactggcgtggcttcccatatcacattataattttgcatattttggtgaagaacttggcggtaattattttaataaatcatagatgttatcctgatgtataaagtggaaggacaactctgaagatatatggtcaagttttaatgtgaagtattggataatctattaaaagttgaattgtaaattcgtttcttatgcaatatttgtttatctggaatggatattgcagcatactctaatctccttatgcacacatacatacgaatacacaaaatccattacaaaaaaaagagtttgtgttgggaggccgaggcgggcggatccacgaggtcaggagatagagaccatcctggctaacacggtgaaaccccgtctctact

SEQ ID NO: 210387 - DNA, 523 bp, Homo sapiens
catagaagtcgtggaaagtcctctgaactgctcttggcaatcatggaaagcaaaggtctccttgcaagagcagacccctccatgtgattctgaaggaaactgtgtgagggtctctgccagccactgctccccacctcggccaccgggtggtttattatgtcacacttctcaaggcaccgtatgtgggataagcacttgcactgggtttgcttagcacactctttactttgtccttgaaaaacaggcttctctggggtgaagacaaagtggtctcctgtccccgaacttacctgacactgcagggtttggaacaaatatcccacgacagggctggacctggtgtagccaccacattctgtaagttccaggggtctttaaacataagaaagtgacgaagggtgtggtagttcctgcactttcaggatagacaaggttcccacagatctgaatggtttaacacaggggtctgcaagccccgagccacagaccggtactggtcgggctgcacagcaggaagtgagcg

SEQ ID NO: 210388 - DNA, 595 bp, Homo sapiens
  misc_feature (13)..(13): n is a, c, g, or t
tcacatggcatgnaagttgctgagctgaaggaaaagattgatcgtcgttttggtaaaaagctggaagatggttttacattcttgaagtctggtgatgctgttattgttgatatggttcctggcaagcctatgtgtgttgagagcttcttagactatccacctttgggtcgctttgctgttcgtgatatgagatagatagttgcggtgggtgttattaaagcagtggataagaaggctgctggagctggcaaggttatcaagtttgcccagaaagcttagaaggctaaatgaatattatccctaatacctgccaccccactcttaatcagtggtggaagaacggtctcagaactgtttgtttcaattggccatttaagtttagtagtaaaagactggttaatgataacaatgcattgtaaaaccttcagaaggaaaggagaatgttttgtggaccactttggttttcttttttgcgtgtggcagttttaagttattagtttttaaaatcagtactttttaatggaaacaacttgaccaaaaatttgtcacagaattttgagacccattaaaaaagttaaatgagaaaaaaaaaaaa

SEQ ID NO: 210389 - DNA, 212 bp, Homo sapiens
ttcattcatcccatgtgaatttattgacaaaaacctgtttcctgccttcaacattttcatttcagtttttacattttcaatcagagccaatgaggtttatcaccttatccactcaataaggttagtttttagaaagcctttgaattacaacatgacaagttcagcccattataaagaggaaagaggaaagaggaaaatcttttttttttttt

SEQ ID NO: 210390 - DNA, 1008 bp, Homo sapiens
cactgcggtggctcatgtctgcttaatcttacttcactcagtgaaacggggccaaaaagaattatctaggtgttttctgtcagaacggacgctaaatcacagctctggttctagtctactcatacacgtcataagctaattgtaatgacaatttcagagaaatgtgatcatggagaaactttctgggaatgataccaaggcattctatttattgcttttgataaagcaaatcagagagattcttccataacagttctggcaacgtgaaacaggttcattaatgctgaattgaaacctttggattagaagtcccaaggtaaaaagccaaaaattctacacagcatcagaggtgacagcctggcctctggaatcagatggatttgggtttgaagctcgtctctgctagttccctggctgtgtgagcttggaaaggaggggtgacgcttccttccccaaggaagtctgaagacaaggcagtggacacccatcaacaggggaaagagaaaatgaatgaatgggagctctgtaaaccacatcagcaacctcgaaaatgtccaactgcaaagacccatgtctacaaattgctgtcagccagaggaatggctgtaacttccttggtgccgagagatgggatttcactatgttggccagactggtctcgaactcctgacctcgtgatccgcccgccttggcctcctgaagtgctggaactataggcgtgagccaccgtgcccggtcaagataatttcttataggacaacaggacaggatcacccaggaaaagatggactccctgctcagttcctacttacagtatctgagtcacttaactaaatgcaatcggcccagctgcaggcaccactgctcgggccactataagaaccagcccctgagcttccggacaggaaacagcatctgcatttccagactgtagcagctcatcatgccaggctccacaggcaagaatcaagcagatggaagctacagaggaaacaaacagggttccct

SEQ ID NO: 210391 - DNA, 583 bp, Homo sapiens
aatcaacctggggaacaaaacggggaattatttcccaaaaaaaaaaaaaaaaaagaagaaaagaaaaagaaacaataggatttgatcactaattttttgtgagggatgtttgaagctcatcgacttgtggaattgtgaggttgttagtagaaatgggcaatttgggaagacagtctgggacttttttgtttgttctgggaaaaggtgatgattttggtcttggagaggtcttgggctctgctgatgaaggtgtccaacaggcagttggaaatgtagaataaagccaaggagagcatccaaagacatattagagatacgggaattatctacatagagggtgaccattaaagatgagaatgaatgggatccccaagggcgagagcagaagtgcccaggagaggagggctggtaccttggtacttacaggaagaagtaaacctagcacaagtgacaggtggaggactaataagaacacattgtttcagaggccaagggaagaaagttttagacggagggaatggttggcaatgccaacagcaagggagtgtgtggacactgagaagaggcaggcagatttggcaat

SEQ ID NO: 210392 - DNA, 488 bp, Homo sapiens
aatcaacctggggaacaaaacggggaattatttcccaaaaaaaaaaaaaaaaaagaagaaaagaaaaagaaacaataggatttgatcactaattttttgtgagggatgtttgaagctcatcgacttgtggaattgtgaggttgttagtagaaatgggcaatttgggaagacagtctgggacttttttgtttgttctgggaaaaggtgatgattttggtcttggagaggtcttgggctctgctgatgaaggtgtccaacaggcagttggaaatgtagaataaagccaaggagagcatccaaagacatattagagatacgggaattatctacatagagggtgaccattaaagatgagaatgaatgggatccccaagggcgagagcagaagtgcccaggagaggagggctggtaccttggtacttacaggaagaagtaaacctagcacaggtccagggcagaggaccaacgtcgacgcggccgcgaattta

SEQ ID NO: 210393 - DNA, 827 bp, Homo sapiens
cagcctcctgagtagctaggatcacaggcatgtaccaccaccacacccgctaatttttgcatgtttcctagagacaggatctcttccctgtgttgtgcagggtgatctcaaattcctggcctcaagcagtccctccaccttagcctcccaaagtattgggattactggcatgagccactgcacccggccttcttagactttcttaatgatgatctggttgccagtgggcggctgcaggaaaggtcctgggtcaggaggcaggagccctgactcatcacatataatttactgtgtgatcttaggtgagttgctagacctctttgggcctcagtttcctcacctgcaaaatgagggaaatgaaaagtggatcactcagcacctccctctctacattaccacgtcagttccatcacaggaggttgacagtaacccacataggcacgagcactcttgagcatgcatatgtgggatgtgggcagggggtgtgtttgataccctccaggtagaaaggatcacagagtgctgtacgagagagagacagctgttgcatacctgactgaacataggtcttccgaaggcctgtttaaattcagcctctgctagggtgagggggctgccttttttttagactcctttccttgtctggagatcacggtttaatgacacagcttatgcagagcctggcaaacagtgggtgctgagttgattctgaatatgctctggagctgtgaattgcagttcctggattctgagccacttttcaaccatataggatcaggtaaaccaagggacactgaagtgccataccattaaaacatttcttaaag

SEQ ID NO: 210394 - DNA, 684 bp, Homo sapiens
gacacacagacaagaggtgaaaactggcagaatgcctgcatcaactgcactgctcctttcgtacttttcagaaggcatgctttacaacagcaagtgcttctgtttacccactgagagaagtacacaagctgctgacagtaacggcaatcgagttttatggttatatttctgctaaatataatcttagtacatttttaaatcatccagtggccaaaaatagtgtttattatttattctagtaaattggaaattaaacgagaaaacaaaatttcttaaaccttttttaataagttttccaaacatatagaagatgcatctttagaaacaggcaactaatattctccctttctcttttttaattctaacagtgtggatagggtagatctctaaaattaactttcttgatagagctgtcttgcttgcaaaccagtctgaataccagttttcttcaaattaaaaaaaaaaaagcaatgttttttcctagatgttttcagctacccttacatgtgttcaacatttccttgaaatttaaaaatgttgaataaaatgtataccaatgctaatgattaaatgcaccttataataagttatctgtagtaaaaaatccttttagaaataccgtggcaaaccttccatggaaggtttttcatcctgtagcatggttctaatacagttcttagtaac

SEQ ID NO: 210395 - DNA, 270 bp, Homo sapiens
attgacacttaagcatattaaagaaaatcaaatagaattaagggttcattcgatagaaagaggtgagaaatatcaaatataatagatcaaatgataattagaaacatatattaaaaactaaatcttgggctgtttgataaaaatgcacaatagtggttaatataatttaagtgcttcttaaaagaaattaatccaaataagctttctatatgcatgtgaaaagaaaaaaataaaggcctaacaattactaatacaaagatgcatagcaca

SEQ ID NO: 210396 - DNA, 356 bp, Homo sapiens
cacatctgctcggcaattcatgtgctctcaagccaaggatttagaatccatgtttgtcatgatcacagaaactcgagagagggggtaatgtttaacccaagccttttcttttaccaataggtatcacttcttccccgcaaaatgaacatgaagaccatgactcggttacaaatatttcaggttacatcaaaatgcataaatgtatccaaaattccacgatctaaagtttctaataatttggaaaaaaaattctaaaataccctaaattattcctgacatcaaattgctcagagtccggcagagaagaaaaacaaaaaaacaattatgagagatgctagaaagcatgacaagagagt

SEQ ID NO: 210397 - DNA, 212 bp, Homo sapiens
aaaataaacattgtcttgaatttagtgtaagtcaaaatatgaagatcactttaaagataaatacatgtttttgattgtacaaaacagctttcttctaccaaaatgggcaagcccaaagtgtcttagaatatcagaactgggagaaacagtcaagatatttgtttggatgagggttagacctataattactttgttattctaaactgtctctt

SEQ ID NO: 210398 - DNA, 147 bp, Homo sapiens
ccacctatgtttactcagatttaatgggattttatctgggttttcaaagggctcccagatttaatctgggttttcagagggctccctagataattcttagatgcatccagattgagaagcatgaatccagagcaaaactgaaatgag

SEQ ID NO: 210399 - DNA, 1504 bp, Homo sapiens
  misc_feature (1)..(1): n is a, c, g, or t
  misc_feature (262)..(262): n is a, c, g, or t
  misc_feature (336)..(336): n is a, c, g, or t
  misc_feature (612)..(612): n is a, c, g, or t
  misc_feature (1504)..(1504): n is a, c, g, or t
ncaatatcctgccctttcctctttaaatattgaagccctcaaaatcatcttcagagaaaggcatagacctgtttcccggttgtgtgtccttaactctggcaaataaacctccaaaaatgaatgggacttgccctggtcattttccttgattgacaattggcacatccaaaagaaaaatgacagccccctgctaaaagagctaaagataaaaatggaacaaagatttatacttcaaatgtgaacataaagtaatattaggctnagcagaacttaaggcagtaagttttatggttaaaaagtcaatatgtggtcggccccatgtgtgcaagttgctanggtggaagtcaaaggggaaacaacaattcacaggaaagagtacaaaggcatcacaaaaaaataaaactgatttcataaacacggtgattctggttcttcaaagacatttccaagaaaagttgctaaggaaggtgaatctaaagccacatctaagaactttgagaaaagtgtcacaaaaccaggggaaagggtgcgaagcagttgaagaataagcaacaatgggacaaagcaccaaggaacaaattccagccagcaaataaattcaacaagaagagnaaactccagccagatggcaaaagtggtgaatcagcagccaagaaacccaaatgggatgacttcaaaaagaaaaagaaagaactgaagcaaagcaggcaactcagtgataaaagtaactatgacactgttgtgtgggcaaagcagatttggaagactttaagaagaaaagactgacaaagaaaaaagagtaaagttaatgaatgacttgcagaagttgattcaagggaaaattaaaactattgcatttattagctggacatgttggcacattcctgtaatcccagctactcaggaggctgaggcatgagactccttgagcctgggaggcagaggttgcagtgagctgagatggtgccactgcattccagcctaggggacagagcaagactctgtctcaaacaaacaaacaattgcatttgcaaatgattcaactcatgtgatccagtgttacattcagtgtggtaatgaagaacagtcaaaacaggcttttgaagaattgggagataatttggttgaattaagtaaagccaaatactccagaaatattttaaagaaatgtctcacgttgtgaacatgtaccctagaacttaaagtataataaaaaaaaaaaaaaaaggaaagtatcttgcacaagctcacgtagctggtaagttacatagttgggatctgaattcagttgtggcttcatgcctgagcttttaactactactactaaactgagaaggcacttgcttgagtaaattatgtcatcctcttaatgaagcattatgcagctgttaaagatgatagatgtaaaggttatgaggcaacatgaaaatataactcatttattcaataaatgtttgtttctaaatatattcatttgctgaatgaataaaatgttaagccaaan

SEQ ID NO: 210400 - DNA, 209 bp, Homo sapiens
aacatggggtcggagcggtgtctgctgcctgggagaccctgcctgtgatttggcagtggctggcaggagttggcgaggcggtgggtgcctccctgccctgatgacaggccctgctgtgacggctctgagtgagggcttctcatgtgtcaatcttctagactcccgagaagccacccgccctagctgcgttctgtgccaggggcctgagg

SEQ ID NO: 210401 - DNA, 512 bp, Homo sapiens
gaaaaatacaagacactgcctctacctctgcatctgtcctttgctttttgcttggaaactatcacatcaaatcacactgagatcaggagatgagatgaaggatcagctgaggaacagtcatcccaacagtagtgcctggtaagacggtgaggctattcccactcccagcatcctctgttctcttctggaccaacccagttattcaatccctgagctttctcatgtggttctggtaaatccactttttgcttagttcctactgagctctcactggcaaactatcagtagaagaagcctggcttctttctctgctagtgttggcgtctccctgctttcttcctttcaaatgatggtattagatctgtctttctctactacgagctgcaatgcccctgttacagaaaaaaaagatttgaggagacagcttgaagcaccatggttgttttcttagaagttctctgtaaaatttttcatggtatatgatcttaaaaattaaaaacaaaatttactga

SEQ ID NO: 210402 - DNA, 375 bp, Homo sapiens
gagtatgttttaaaaaagggaattaaatcttcttgattttagtagataaatggtatattttgttatacgtactttatatataaaataagagtattggctgggcgtggtggctcacacctgtaatcccagcactttgggaggctgaggtgggtggatcacaaggtcagtagatcaagatcatcctggccaacatggtgaaaccccgtctctactaaaaatacaaaaattagccgagtgtggcagtgagcacttgtagtcccagctacttgggaggctgaggcaggagaatcgcttgaacctgggaggcagaggttgaagtgagccgagatcccgccactgcactccagcctgggtgacagagcaggactccgtctc

SEQ ID NO: 210403 - DNA, 443 bp, Homo sapiens
ctgcctcaaaaaaaaaaaaaaaaaaagactaagtatatcaggcagtgattttgtcttattttgaattgtacttaccagtatttactttataaaaaaatttgcagttatataggataggtacagttattttggaaataagaggaattgtttctttatataaaaagcgtggaacaagtgtagatttgaattgaatcttcaatgggtggatgctgactggctgtgcttatttaatataccttccaaatcagactattagcagcctaggcaacataccaagaccccatctctaaaaaaaattagcctggcatggtggtacatgcctgtagtcctagctactcaagagacggaggtgggaagattgcttgagcagagaggtcaaggctgaagtgagccgtgattgcgttgctgtgcaatccagcctgggagacagagggagatcctgt

SEQ ID NO: 210404 - DNA, 602 bp, Homo sapiens
ttttgaagtggcaattttttaacagcacagcagcctaaggcaacaaggccagttagggctaaaaagaggctgataaaaaaatgtaaaggaaaacattggtaacaagatgcccatagggggctttgaaaacctccaacagagttctagggatctagaaggccatggacatgtacagggctgtatgcatgcccagaaacattggagaaggccctaatctctcccttctggctaatcttgagctctacacaagtagtaaggaaaggccaaggcagagttttaaactgagggagtgttgaagctgtgtcacaatacatgagcaccttagcaaagaatgggagaactattgattcaaggcatttgataaaatcactgtgcaatcattaactgagcactagactgaaaatagacttcaatggctttataagacaaagaatacaggcttataataattagtcaaagaaagtcactaaacaaacaccaacaaaaaacctggtgggaggggctcaaatttccagagtagccacattatgtttttaaaatgtctagttttataaaatacaaaacacgcaaaaaagcaagaaagtatggcccatatacaggaa

SEQ ID NO: 210405 - DNA, 211 bp, Homo sapiens
cctcatatactcctttagtctctccatcagcttcttctccttagccttgacaaaggctcaagttgtcctcatacaaaaattaccttcctttaaatcgtaccacatcttgagctttatcacatcttcccatcaccacaatttttttgcaatactggtctgcacaccatccatgcatctctgctgcatacaatgccacacctcccatttgtcc

SEQ ID NO: 210406 - DNA, 555 bp, Homo sapiens
tgaggttaaatagattatcaaagggactgtagataacaaaggtcccaaagggcagggaatggcttttaaaataagagaatagtatttatgaagcctaattgatgcaggtatctgtgatttgacctctacacactttcagctctccatataaggacatcctctctattatctttatcccatacattaggaatgacatcagcttttggcttcaactttactcacatactttgatggttatctgggtcttttgatgtcttattttctccacatttgctccactttccaagacaatcatatgcttcgacttattttagtttctcccagcttttctctaccccagcctctccctaagaccctatagcgtctaaggaagggctggattgaaaggatcatttgagctcaggagttcaaggtggcagtgagctgtgattgcatcactgtactacaacctgggccacaagtgaggcactgtgacttaacgaaacatcagaatgcaaggatacacatttataaagtctttgacctcatgtctgatggttctccctaagaccctat

SEQ ID NO: 210407 - DNA, 297 bp, Homo sapiens
taacatatgactttattcacctatttgcctgctttgtttaatgtctaaaagacaagtggcacataacaggccttccataaatatttgttgattgaatgaattgtctttagacagtcaattttccaacatacatgaccaagaaaaggaaaaaaataatcatcaaaccaaaggaacttcttgcaataatctcatcatattctgtatcttccccctatcaaatactggtagtacagcaatggcctcagagatttggctattccaattcccagatagaaaacagaagtccggcgaaggtta

SEQ ID NO: 210408 - DNA, 150 bp, Homo sapiens
ccaattataactcttctaatttcagtgaaagaataaaccggtcaattactttcgacttccttagtttatatttcctaatgctatctagtatcagtaaacatgaaaaaaatcatgttttttaaattatatcattatagtgacagttgatag

SEQ ID NO: 210409 - DNA, 177 bp, Homo sapiens
cttagcatgaatcaaactgtgctattggttattgtattcttcactgccatgtaatctcaagggaaaattgccagttctacttaggagtgtcctggatgacacagcaaaaattattaattgtattaaatctcaacacctgaatatatgtgtttataatttatgtgtgacaaaatggga

SEQ ID NO: 210410 - DNA, 388 bp, Homo sapiens
tttcaaactcctggcttcaagtgaccttcctgccttggcctcccagtgttgtatattattgagagcagaatattttttcagtttctttcctagaataatttcttacacaatgcaaatattcacctaaaataatttttccttcttcatgtcttatcccattcaaatggatatatcaacacagagaatgagtaagaagacagggtgggagggaggtaatgaaaaagagaaaaaaattactaaaagtggcacagacagcatttcaagttcttaggaaaaagaaaataagcaaaattcccttatcatcttaagagggctttactacagttctttttttttttttttttttttttttttttggggaaaaggttttgggctgggaccccggggg

SEQ ID NO: 210411 - DNA, 358 bp, Homo sapiens
acagaatagggagcccagaaagaaatccatccatttacggtcaatcaatttttgacaaagatgccaagaaaatacaatagggaaacaagcatcttttcaatacgtgatgctagaaaaactgacagtccacatgctgaagaatggtttttgatcctccactcatatcatatttaaaaatccacttaaaattgtttaaggtcttaaagataagacctgaaactataaaactactagaagaaaacatagggaaatgttccattatattctgggataatactcaagatgatcaaaacacaggcaacaaaagcaaaaacagacaaatgagattacatcgagctaaaaaatcttctgcacagca

SEQ ID NO: 210412 - DNA, 387 bp, Homo sapiens
cttattttattcagaaaaataataaaatgttagaatgacatttactgtaactttaaaatcagtctcaattttttcattttatttttctcttttaggctatatagatggaacagctatatatctgatatatagataagaatatgtaattagtgacacaactattttctttttatgttgtaatgctgtatcacatgatatatgacagacctggattaattcctttaatatagaaagacacttacaaattcattagataaataatagaaaaatgggcaaatattttaccaggtggtttataaacatatagatggctaatgagtaaatgaaaaaaatgcttcatttcatttgtaatttacaaaatgaaaataaaaatgacaaagaaaatga

SEQ ID NO: 210413 - DNA, 353 bp, Homo sapiens
ctgagtgttacttccaagccccaatccatccccgaggtatcctagtgtctcacctcccagctgacccctctgctcttcaatccatccccgcagtatcctagtgtctcatctcccagctgatccctctgctcttcaatccatccccgcggtatcctagtgtctcactgcccagctgactcctctgctcttcaatccatccccgcggtatcctagtgtctcactgcccagctgactgctctgctcttcaatccatccccgcggtatcctagtgtctcaccgtccaggtgactcctctgctcttcaatccatccccatggtatcgtagtgtctcgcctcccagctgattcctgtgc

SEQ ID NO: 210414 - DNA, 464 bp, Homo sapiens
ttcgctagattaagaaaaaaaagattcaaataaactaaaatcagaaataaaagacagggctgggtgtggtggctcacacccgtaatcccagcactttcggaggctgaggcgggcagatcacctgaggtcaggagttctagacagctggaccaatatggtgaaaccccatctctactaaaaatacaaaattagccgggcatggtggtggctcatgcctgtaatcccagctattcgggacgtcgaggcgggagaatcgcttgaacccgggaagcggaggttgcagtgagccgagatcgcaccactgctctcaggcctgggcgacacagtgagattccgtctcaaaacaaacaaacaataaaggtgggggggacatcatattatataaccaatgccatggaaataaaaaatattattaaaactttgaacatggccaggcacagtggctcacacctgaaatcccagca

SEQ ID NO: 210415 - DNA, 458 bp, Homo sapiens
ctaaggtatggctgcgttgggagctcggctcagccatccctagtgaaatacagtggaaagcggcagctggaatcagatccacaaggaatagcctgagttctccagaccaaagttatattttttaggtttgcctagctgtttaaaccaagtcacaggcagggctatggtagtcattcctaggtatcatcccagtgggacttgtgtacctgggatccgatggtgggactgctggctctggagggctagctggtcagaacttctgatgtctgctttgggcatcaagtgggaacatttcctgtatctcacatgggctggcagatgcttccatttaccactctgtatttttgctgaaataattatacctgacgtcacatacgaggcttccttgcctagaacagtggttagagcaggagcctgtgtagttgcctgcctgggcttagagactggttttactccct

SEQ ID NO: 210416 - DNA, 344 bp, Homo sapiens
tggggagggggagagtggttccaatttactatactactcaacaaaggaacactgctaatagcaagagatgcttaccttgaacactgtttcagataacatgagaggatttcgttaaataaccagattagagacctaagggactcgtcgtatgtttacgaagaatgctaaggatcaaggttttatttattctattcacacaaacagacttcaaacctgtaagatatcatctaataagtggacaagggggaagggaattactatgaaactatggttaagtgcctagaatgccctatatgtaaattttgttgaagtatatctaagtaactgcaacatactccccaaag

SEQ ID NO: 210417 - DNA, 247 bp, Homo sapiens
aaaaaaaaaaaaaaaaaaaaaaggttcatacatagagaactggctaaatacaagatgaaaaattcattgaggaagactactcagatgtgaaaaagaaggtgctgttggtaacaacttctggggggggcccggtgtgaggttttctttattctttttttcttcttttattatttcttttttatttttgtcttctcttatctttgctttctttaattatactttttcccttccttttctttcctctttc

SEQ ID NO: 210418 - DNA, 1020 bp, Homo sapiens
ggctggaaaggtccctgaaaaagtctgagcaaaagcttgttcctcactgtcattgcagcaggcaggacagcagacggtcacagcagcagcacaagggatggcgctggccagaagtttcaggagatttggtatctaggcctggatctgccaaaaaatcgctgggggaccttgagcctgtcactctgctcaaggttgaactacatgatctagatctcttctggctctaaaattctaaatatctaagtctcctgtggacacaggttaagttattaaccttctgccaaaggcacccctctcatcccaaccctggggccttcagaaaatgaggctgtgccagcccttccctcaccacccctgtcctgccaccataatcttcacagctcacaaggcacctcttccccactgccatccccataatcgccaggcctggctgtggactggttctctcctgagtctagagctgcctggctgcctgcagcctcctgtccaggatcagatctgcaatgcgactgctgctccatggccttcttgtagaccttgcactttccggcacctcctggcctcaggtccaaagtctccaacagctctgataccactaccttcctaccccctatcccgggctgcagtttccatctgcctcccattcctctcctaccctctccctccactccagtaaaggtaaccttataattttcctgacctccttttctgcgtttctctcctcatcatactctaagaagtttttcctaattttaagaaaaggaaggcatctatgtaagttagggtatggacccgaataatcttgctcttactatccccaaaaacaaaaagaaagtacaatctgtcaactcagctgctctatcactttaagagagtaagcatcccgaaggcaatgaccatcaacctcaaatatacatctatctgtccatcagagtgcataaacaatgctcatattcatgcaatggaatactactcagcaagaaaaaagaaacaactaaagatacacacaatggggatgga

SEQ ID NO: 210419 - DNA, 326 bp, Homo sapiens
cccttagggtaaaaggtgagaacatggctttaacttgacaggaaatcttaatgtcttagctattacctagttgtatatgaggaacacaaactgattttcaacaaggcagactggtgagttctgaaaaggaatttgaagatttttgcttggtaaatcacatctcagctggaagcatggctctccttattgaaaggaaaagaaagaatagagacaggaaacggagcccacatgagattgctccggccccaccagtgctgccagtgcttctcctgggcttcctttctcccagttctttttctccctgccttcctctctggcttccttgt

SEQ ID NO: 210420 - DNA, 370 bp, Homo sapiens
gttttgttttttcttgagacagagtcttgctctgttgcccaggctgaagtgtggtggtgagatctcggttcactgtaacctccacctcccaggttcaagtgattctcctgactcagccttgtgagtggctgggattataggcgcccaccaccatgcctggctaattttcatatttttcgtagagacagggtttcaccatattgaccaggctagactggtctcaaactcctggcctcaggtgatccgcctgccttgcctcccaaagtgctgggattacaggcgtgagccactgggcctggcctccagttatcgtgtttttgatacattttagaatgttgcagttttggcaagcactgaacagtcagcatgt

SEQ ID NO: 210421 - DNA, 225 bp, Homo sapiens
ggtgaacagacaggatttggcttcttaagttgcttgggagaagccactaaacatttctctgccttagttttcccacttgtaaaaagagggtactcaccccaaccttgtcaagttggtgtatcccttaaggagagtcatatataaaatcaaaaagacaagtcaggccaggcgcagcggctcacacctgtaatcccagcactttggcaggctgaggcaggtggatca

SEQ ID NO: 210422 - DNA, 206 bp, Homo sapiens
ctcagatatccatatggtttgtcctatacttttttcaggtttctgtccaaatgtcatcccatccaagaggccttccctgactactctatgtaaaatatacacccctccatcaatctctgttcctttatactttgctttttctttatagcagatgtcaccatctgactcattttttatatataaaaatgtttaactgtctttccttg

SEQ ID NO: 210423 - DNA, 490 bp, Homo sapiens
aaggtaaatgtttcagcaacagagagactgctgtaccacagacagaaaacaggtgtagcacgtgattattattaagaagaaacatgaataaactcctttaactaaaagagaaagacaaaatctcagacaagacacattctaagaacatgtttgagagactcccagaatctctaaccaagacgattgttcagactatgccaggacaaagctacattataaagattgtgacaggtagccttttttaatgtccaaatttcaatcaaggattacaatgtatacaaaataaggcaatatggttccataaaaatataaaattttaaaaaagaaactataaaaaagatgtatacacaccgattttaaaaattgaaaataaattgaataatactcagtgagtgaaacaggaagacagagaactatagaaaatcagaaaaatgaagataagaacataaatatttagaatatcaaaaaaacaaattgtggaggtaataaa

SEQ ID NO: 210424 - DNA, 461 bp, Homo sapiens
agagttaagagagcaaatcaagacatgaaaatgatccccccgtggaatatgcccctgctattgagagaataaactactgatctacgcaacagcatggatgaatctcagagacattttgctaactgagagaagtcagacacagaagacatagtcaatgattccatgtgtatgaaatttctagaaaaggcaaaactatagagacagaatggctgatcaatgttgtggctgatcacatcgaggcacagaatgatcaatggttgcctggagctgcgggtgggaacaggagtgacctcaaaggagcaaggggaacttttgggggtggatgggaatattgggaaactggactgtgatggttgctaagtgcgtcagttcacggaaacctatcacactgtaccctcacaatgagtgacgtttatggtttgtaagttagacctcaataaagctgtttgtaatcattttaa

SEQ ID NO: 210425 - DNA, 500 bp, Homo sapiens
agctttgtaagtcctgctgccatgtaatcctgtggcagatgtatttggtgatagaagtatggaaaatgtgagtgcttgcattttctctgacctggatgcatctgtgctaggaagtggtgttttaagtaaccaaggttgtgttaaggccttgacttaacgttattaggggatttctacatttatactgccaagcacatgggtgtttagctgttggttatgggagccacaggtgtgctggtggatggatcagtcggtgcttctctgtcactgctactgcgtaagtagtgcagaggttttgttctgattatgtatcattatatctttgtagtccatatttaaaatactgggccttgagtagaaggaactatttagaaatgtcatagctcaaaaagcaaatgcaaaacagtctttgttttagaaggatggtttatccctgttactcctgtaagtctcggtattctaaattttcatgttttcattgtagtgtcttggcggctaga

SEQ ID NO: 210426 - DNA, 405 bp, Homo sapiens
tagaggatccctaccttatggctgtagcatctgcatcattcacaatagctaagatatggaaacaattgaaatgcccatcaatggataaacagatgaaataaatatggcatatacacacaatggaatactactcagcctcaagcagaaaattatgtcatattcaacaacatggatgaacctagaggacattatgctaagtgaaataagcataagccaggcatacaaaggcaaacaccacatgatatatggaatctaaaaaagttgaactcatacacgtagagagtaccagaggctggagggagtgggttagatagagaaaggaggtgccagttaaagggtacaaggttgtggttagacaggagtagtaagttctggtgatctattgcatagcatggtgactacaat

SEQ ID NO: 210427 - DNA, 462 bp, Homo sapiens
ggcccagcttacacccattcaggcccacagcttctccatgtaccagaggcgatattcatctttattaaaattttatcaatcttttaacacagatgaaactttggatttgcttttgcttctcaggaatagagcattcattctcagttcaggcttctacagcttaaaacttgtttctgacataacttgatcagtttataaagtcccagagctttaaattacaatgcaatctgagatattcccacagcaataacagcgattacatttgttcacagcacttacctttatatttcattaagcttccaaatactgaataaaggtaagacaaaccaagaaaagagacttctattaaccctgacatcagcaaattgtctcaaattatagtgtaccttctatttgtattctagacatattgaatggtttttgtgagatacatattgtacctcacctgaggttaggagaaaa

SEQ ID NO: 210428 - DNA, 461 bp, Homo sapiens
tggctccgcagtgaaccactacataatgtatcagggccatcttcctcaatttccctcataaaaataatacctgcttgctgtaaactacaccaacgagtcacctatgtcacagcccatttcccatttctcttgccccaattccaatcctcagaggaaggtagggtaaacacataattcaccatccaaagcagttcaccaaacactgaaagagggtactattaataattataccagaacaacaggtgtaaaccagatatttcccaaacaaaccgagacatatggtcacccttctcagaggtagccacagggaacatatccttgttgttccagatctttttttatttttaaggcacacacaagcatacccaaccaggtcagcagtagctgtgatataacaatgggatcatcctatagatgctgtctcttacttttttatttaatatatcatcatctgtttacat

SEQ ID NO: 210429 - DNA, 334 bp, Homo sapiens
aaccaaaagggaaaaaaaggggtgtgtagagagaagagacaatttctaatagaatattaagagtgtaaatgagggagtatatgaaaactgacaaaaatcaagagatttttatattccatttttaagtttgacttttttttttttttttttgagacaaagtctcactctgtcacccaggctggagtgcagtggcacaatccaggttaattgaaccctttgcctctggggttaaggcgatcctcttgaataagcctcttgagaggctggaattaggggcccgtccccccacaccaagttaattttttttggtttttaaggaaaaaacgggtttttc

SEQ ID NO: 210430 - DNA, 444 bp, Homo sapiens
aaagaagggcaggcaggcctatataaactgtaatttattaagtgattcctccataattattaaatcgttaatcagcagcttggctgtgggtgcggggaaactgttctcaggacagaagggtgggagatgggattcaacccttcttaagaagggctgtgggggggtgcccactgggatttccaaagtcagccccagagttgccagcctgcagcatggcaccaaggagctggggtttgggtgtgtaaaagagatcagccccccaaagtttccagcatgatgaagccaggccacacaccattcacagccattgctgaaggaggggaaaggaaacatggggtcagcagatcagggtcatctaacatggtgctgacctgggggaaggggctatccctcccttcagggtcccaggccactcaagagaggccccatgggcctagacacttc

SEQ ID NO: 210431 - DNA, 201 bp, Homo sapiens
ctacctggggatttgcaagacagggaaacttggaaagaggggctggagatagagttaaatccagggaagactaaggaatatggtggagaataagttcctaatgcatagccttccacttgggagaatgagctaggccttcctggagacatcaacaggacaataccacattcagatgtcagcgtttgatgataccacgaaggt

SEQ ID NO: 210432 - DNA, 430 bp, Homo sapiens
ttcgttttatattcttctgcaaagccatgtcaaacaaaaagttggatggagatttggcaattccttggttattttgaaaaatggatatattgatcaaattgaatgggtaccaaattttctaattatgcaaataattgctaagtcttcaatgtagcttgcttaagaagtactgcccagagaaggggaaatgaagagtttctttctcacttgggtatacaatgagaatttgtagagagctgtaagcacctcagccgagaaatgatgcagaaggagaaaacgtgggctgggtgcggtggctcatgcctgtaatcccagcactttgggaggccgaggcgggcagatcatgaggtcaggagatcgagatcatcctggctaacacagtgaaaccccgtctctactaaaaaatacaaaaaattagccgggcatggtg

SEQ ID NO: 210433 - DNA, 458 bp, Homo sapiens
caggaaactccttagtgatattttatgtttgaacgttctttatctttgaccctgacgtatacccaccaaaatcattgtatcaggattccatcgcatgcatttcaatggattattataaggaggacattacaagaagagcattgtaaggaggacagacgtgtgttcactgacctaacaaaacaacatgggattcaagcctcagctttgtcacttatcccgagacctgtgacttagggccaatcatgggaccctctggtgactcagtttccttgaatgtgaagtggtatgatgcctgcagtacttatctcatagaattattataagacaaaaccagagaagcacatgtgaatgcatttagcaacatgtaaaatggtttgccttgggaaacattaaccacagtggccatgctgcattgcctcacttctcatcctgtagcatcacaaaagggaagttactta

SEQ ID NO: 210434 - DNA, 830 bp, Homo sapiens
ctactctctccacttcccatcctttactccctggattttaaagctagtttaagatttctgtttctatctgcaaatacttctgtatctaatctttaattttgaaaacagaaatttctgattgcagttgctattaaagccagtcagttctcagccaggtgtgccaattaaaaatgactgttagcaggagctaaaggtccacccttctaagagatctccaggtattccttaatggtttgaatcaatgccgtcggtagtagaggcaaaaagaaggcttctcttgccttttatgcaaggctacttccatttctcatctttgttctgctacaggtttttaatctggactctagaataaagtgtgcaaagacttatatttcggcttggcacacttttcttgccagccagctgggattcagtctacatatcctgccaaatattgagataactacagcataggctcttaatttgcctgactggttttgtagccaataaatttttttaatttgcttaaagctgtaatgagtatttgtgtaagttagagggatggtattgtcaggagattttgaacttggatttagaactgaaggtgattttttagaaagggaaatgttttattactgaaagtttaaagtaggacaggaacttgtgatctgagatgagattgtcattggataaagtacagatgatatgaggattattattattttttaagtcctgaaaggatagtatcagcaagagttacctgcctttatttattgaatgtatttgttgtgtagaatatatttaaatcataccgaaaatcaggctgggcaacagaacgagactctgtctca

SEQ ID NO: 210435 - DNA, 2027 bp, Homo sapiens
  misc_feature (1641)..(1641): n is a, c, g, or t
gtttgggtggtgaacagggatacagcaggcctcagtgaccaggcagagcccagtgaggtcaggcatggacaacgcacgcacattgggatgggaaggcctgctgttaactgggagagagaggaggaggaggtatggggatgactcccaaggaagggctttgcctaccttgatgggtttgctgggctgcgcctcagaaactggaggtcagtgccattcccatcagtgttcctactgccaggaaagtcttgcagtggctggctggccttcctgttcgactttctttccttgctcatcaaaacactttctctcccagcatcaactctacctgctccttctgcttaccacgcattccagtgactctgcccggttccaccggaagcggagttattttggaaggctggatggtgtacggtagggtggagggagccagaacgggaagccttggatggtggaaactcctctatcaccagggaacttggctgcagccccaagccctggcctcccaccagagcggggccgtccactttctccttctttttttagtactatcctctctgacccgcccagggctgggatgttgcagtgtgtttttccaagagacccggcaaacagcaacttgacaggttcaacggttcccattgacagcctgaatggactcctctgaaaactacgaaactggacacaaaaacagcccataaaaatcctgcctcccgcaggcgtctggacgctgccttttcccaaatgaccctccagcagcacggatgctgcatgggtggctaagcagcattttttgagtgattttcccaaaactggggtgttccaagtggtgtgggagtattattttttcccttgcagtaagagactaactcaccagataatttgagaaaacgggagactacatgagtcatgttactcccaaagctaatcacttgccactgtaccccaaagcctccatgaaccatgaggtgccccgggcctgcctgttatgaggtctggaactcactttaatataccgcagggaaggcagtgtgatgtttgtgtgtgccggtgagtttaagcttgaactcgatgagtgctctgcaaactttatagcacaaaggccactctctcaaggcagctcctacacgtccttctgccattgtgaccttgacctacaatccacacttcgctaatcagcatatcaaatgccaaaagcattttattagtgaaactggtaacttgttaattagaatgataaatagaatgctgaggaaaaagtaaacatcaattctctcatccaaaataaagtaatcacataatctagtctcggggacagctgaaaaattttatagtaaaaacagtgccggggagccaggcgcaatggctcacacctgttatcccagcactttgggaggccaaggtgggaggatcactcgagtccaggagttggagtccagcctgggcaacatagtgagaccctcccccatctcaataaaaaatacagaaattagctgggtgtgggggcatgtgccagtagccccagctacttgggaggctgagatgggaggattgcttgagtccaggaggttgaggctgcagtgaacaaagactgtgccactgcactccagcctgggcaacagagggagcccttgtctcaaaaanttaaattaaaaaaatttttaaagtgcagtgtacatataaaatggaatattttaatcatctcccaggttctcattggaaaggcagggttaaaaggaaatggaccaggccaggtgcggtggctcacgcctgtaatcccaacactttgggaggctgagtcaggcggatcacctgaggtcaggagtttgagaccagcctggccaacatggtgaaaccctgtctctaccaaaaataaaaaaattagccaggcatggtagcatgtgcctgtaatcccaggtacttgagaggctgaggcagggagaattgcttgaacccaggaggtggaggctgcagtgagccaagattgcgccactgtactccagcctgggtgacagagcgagactctatct

SEQ ID NO: 210436 - DNA, 496 bp, Homo sapiens
acataatcgtggagaaaacaagggttgttttaaagcaaagatcctttgttataattgaaaccctgccatgaacccaagtgttgctgtaaagccaaagtctacctagtaagacaaatatacagtgtgtatttgcttaaatacatctaaagaaattgcagaacttactgtatatttatataaataaaatggcaaaaacaagctgaatataatatgtcattataatcttgataggaaaaaatgattgatgctttcacgtgttctttttttgctggttatcagttcttttttataaattgcttttgaaaacacacttgagatacataattgaggaaagcaactctaaacataaaagtagaaattaatgtataatttcttaattaatttatgaaacgaatatcatttgagccaattctgggatttttgcattatagagaatacaggccaaatttccccaggaattttctaaccactcttgtttagagaatgctaagaggtt

SEQ ID NO: 210437 - DNA, 164 bp, Homo sapiens
actctttcttcctctttgccatcttcagtaccacataaaataatctgggaggaacttctaatgaatcagactccataaggaacaaaggaaaaggtgccaacaaccccttttgggggtcttcggtcttcctgtggaatttaaagaatcgtaggcagattcttctc

SEQ ID NO: 210438 - DNA, 424 bp, Homo sapiens
taggaaactatcagaatgcctgtgtatgagactctcttcaagagtggtccaagagaggagagaatcctacttggagaaagaaggtggtagcattggacaggcagcagaggagccctcagcagcaagaaaggagctaagagaccctgtatctgtccctcacccttcagagctggtgccccaaactcaaagccatcatcacattggatggagcccctgcctcaggtttagtcacttgatcctatttgaggagaagcaaagatatctgtgactcatgaagagcatgaaggtggtggagggacttgataattaggaaatcaaaatgggcaagaataatgtgtgcctacaaatgggacatgaatttgaaggaaatttaagttaaatttgctgccacacatgatgatcaggttcagtaataattgtattt

SEQ ID NO: 210439 - DNA, 522 bp, Homo sapiens
cattttcgtaatgatgtatcaagtggcacttaccatccacccctttaacacccaaaccattctaatccatgtatacagaccatcatctgttttgttattgtgttctataatgcagctttgcgagttatgcagttttggtcctcatgatatttttctgattggtttttaatgtattttgttctaacgagccaacattgttatacatgtaatttgtttatttgctagattgtactctttcccaaagatgggctatgaactagcatctactttcattttacctatttacctgtaaacattgaaaaaactgaatcaaatgcagtgatatcggacctagttttattgttatgccttataatgaatttaacttcacagttttctaaatgagagcatttcccaaagtgctggtattataggcgtgaaccaccgtgcccagcctcccccttgtcttttctaacatttatggggcacttattatgtgccagatatgctttaaattctttacatacatcattacgaaaatgc

SEQ ID NO: 210440 - DNA, 544 bp, Homo sapiens
gtatgtgtgtttatatataattttatatgtatatgtgtgtatgtatatatacacgtatatgtgtaaatatacgtatatatacacgtatacacatacatatacgtgtatacgtgtatatatacatatatacatatatgcatacatatatatatacgggcaaagacttaatatactatccacaggctattcagattgttcaagaggctctcagttgaagaagcaaacagacaaacaaaacggtttcatacacaggcaggcatttggctgagtaggtcggcaggatatggaaacttgctttgaggtgtttttggattctcacctagaattctactacttaatggctgtgtggcttctttgcaggctatatactgaattcataaaggatgttatgagagtaaattcaaagaattctgatgttttgaaatttgttgtgacttggttaactatggtgaaatgttacattcgtgttacattatggcttttgtttatacgggtctgattatgggataacttaataaagttgtaaaaaactctatgtttttca

SEQ ID NO: 210441 - DNA, 519 bp, Homo sapiens
ggtaaagggggaggggtgggaatttaagctcattttcttccccaagtatccaaaggtctcctggatggagaagagcactggagtaaaaaccccagtacaaaccttactggggacagtgggcaaccttgtcgggttagtaaaaacaaatggtgtgggccctggaaaatgagggctggaggctgtgaataaagcagtggatgtgtttgttcagtacaccaacgggaagaagtacccagatgggaggagtactaggggcaggagaaatgccagacagactctagtgccagggcaagaaggaagatcattttgtttgcagaacagggagggcacagggatggtgctaacttgttcttgtgatggctctgagctcctacctaacaatgagaaagcttgctccttcttcccttcctggatgacccaggagccctgggctgggatgcagtgacctcatttccagccccttcccttctggtgatgaacctccctatcttcactcagaaaacagacttggattagagg

SEQ ID NO: 210442 - DNA, 355 bp, Homo sapiens
cgccaaatgtgaaagctgcagttcgctaatggttcctattaagctttggagaaagagtagtggtgtggtgggtgtcacatacctggagctttagagccttctgagaagataattcggtaaaaatacatcattttttgattggtgttgaaggaagttgtttttcgttgcacagattaaatttaaattgttcatgagagctaaagagcttgaaagcatttctttgttttctaatctttaaaagtagagaagagtgagctggctatataatatagaactttctcggctttactttaccaaagcagtctgatttaaaaacttaaagccaacatatttcacatttggcgagtttaagatt

SEQ ID NO: 210443 - DNA, 413 bp, Homo sapiens
tattattccagtttttgttatctaactatattcattgctgtgttttatttctcttactctctcataatctatttttgtagcatcaaaatacagttgttccttaacacaggggttaggggatgccaaccaccattcctcaaccttcatgtagtcaaaaattcatgtacaacttttgactttcttaattactaatagcctactgtctagaagcctcactgataagtaatcaattaacacgttttgtatgttttttgtgttttctttttttaacttttgcatggtgtaggagtatgggggagtctcgtaaaaaccagaaaacctgctagacaaattctaaaacagccgtaacactgatattttgtgttatatgtgttatacactatattcttaccataaagtaagctagagaaaaa

SEQ ID NO: 210444 - DNA, 313 bp, Homo sapiens
agagaggcaaggtgatgacctttggagttagtgtcaaatttcttcaaacacagtgattaacctcctccatgggaggaacagatatgggtgatgccacccaagttttttggggggtgtgagtggcactgagagcacagacagtgaaagtgggactcagccttgctgctccaagtgtagtccatggtcagcaggatccaaacccctgaaagcaggttagaaaggcagaatctcaggttccaccctagctgtactgaatcaaaatttgcattttaataagaaactctggtaattcattgcacatttaaagtttgag

SEQ ID NO: 210445 - DNA, 512 bp, Homo sapiens
taaaaccttaattcaaaggagaaatagataatttcaagaggtatttttatgaggtaatagtaaaatatattttattaacagtacctatagttatgtaaaataggtagtgccaattaactgacactaaactagcttcttggcctggcgcagtggctcacgcctgtaatccaaacactttgggaggccgatgcgggtgtatcgcttgggctcaggaattcaaggccagcctgggcaacatattaaaaccccctttctataaaatatacaaaaattagccaggcatggtgtgtgcctgtagtcccagatactcaggaggctgaggcacgagaatcatgtgaacccaggaggtggagtttgcagtgagccgagatcacgccactgcactccagcctgggcaacagagcaaaactctgtctcaaataattaataaataaactagcttccttttcaaaaaaagaaataaattaggtcctaagtcctaaaagcccatcctactttaaaattgtttattc

SEQ ID NO: 210446 - DNA, 469 bp, Homo sapiens
catctatgcaaaatggattatatggttgaacatcttaactattcttgcaacagacccctataatccatttcaccctatccttttctctcatttgccaagcaagccccaagcatatactcaagttgtagtcgatgttaacctgctagagaaatgacaagtggtcatgatagtgccatttcaatttcagtctccaacctcagctgagtcttcaatctgacaatacttttcttatccttggccagctcactctttcattatctggagtaactattccaggacttcatcactcccttcaaactctacttcatcacagcccaacttactgaagagattatctttcctgctcatcaaaaaaaaaagttaatccatgcagtacactttccctcagctttccaattcccacttataaacttctctacatcagcctaggcaacacagcgagaccccatttctacaagtaaataaataa

SEQ ID NO: 210447 - DNA, 389 bp, Homo sapiens
ttgaaagtgcattgttttcctataaaaatgcaaatcgtatttaagattttcatgtgaattgtgagagtctaaatagtttctgcggcataaatgcatggtttaatggtgcctgggttgtaacagaaaagtgtttgagcaaaaatcataagggaaaaatgattcatattttatgtctgtctacattagacctgctcagggaatagaatttgggaaacacataataaataagaaacctgcatgcttgattgaacatttgctttcttcactatcaggacacgggggcatatattttaaggcttttaaaggcatttgggagagattttatataggccataaaatgcattacccctcaaaaataaaaatcactgaagaatatagttggctcacag

SEQ ID NO: 210448 - DNA, 188 bp, Homo sapiens
cattaagtgttctatatacaaagccctacatggtccctagagcatagcaggcattcagtgaatgaaatgaatgaatgaaaagctagagtcacattttagtgacctaactgtatattttcagagtaatgtagtgcttaaaaaaggacaatgataacacgtttctacaaagagatgcatgacagataaca

SEQ ID NO: 210449 - DNA, 413 bp, Homo sapiens
aagaaaagaccaaattgctattagagagattgaaagctctagagggcagcatgttgacttcagttaagttttacctggttgggtggattccattgtcatcggtgtcttctggctctcagggcctttctggaacctgaagctgttggcaacatctgtgctgtccaccctgctctgagtctgctgcagatgtgttgaaaaggtgactctctccactgggaaaatgaaaaactttatgaccggcaacatcatttttacagccaagtgaactcctttgataaaatattcctcttttctgagcttatttccttcctgtgtgtaaagaggggtttgggcagattgtaagctttctctcagctctttgcatctatgttatcacacttcctcactatacagaaataaatatccttattgcc

SEQ ID NO: 210450 - DNA, 512 bp, Homo sapiens
agtatcatcttataaataagctatgatgccttccattagcatcataacttttgttaactgttcatctaaggactcataaatttcccacactcccagggccaagatgctgtctcactccaccctggcaacctcatccccatttcgtccccaccccccactattctaaacaaaatcagagtctcttccaagtttttactgaaaaatttgggtctctgggtctcccttgggcatgacagctcaggcctgtaatcccagcactttgggaagctgaagcaggaggatcctttaagcccagcctgggccacatagtgggacctcttctctattaaaaaaaaaaaaaattctttttaaatttaatctggcatagtggcatgcacctatagtaccagctgcttgggaagctgaggtgggaagactgcttgagcccaggaggcacaggttgcagtaagctgtgatcccaccactgtactccgtgacagagcaaggccctgtctcaaaagaaaaaaaaaaag

SEQ ID NO: 210451 - DNA, 601 bp, Homo sapiens
  misc_feature (469)..(469): n is a, c, g, or t
  misc_feature (474)..(474): n is a, c, g, or t
  misc_feature (490)..(490): n is a, c, g, or t
attaaatgcctcttctcttttgtccaactcttctgcacacactttaaggggctttccctggtgtgtgtcctcttttgtttagccacccggaaattgaaatgcttcaggcccttttcattcttacataaaaccttggctgctttttctccccaatatttggaaaagtcgaggtatcatgtgagctgccaagcgcaccggggtgggaattggaaaggatccaaggccctgttatttcttcccactccttcccagctcactgtgaacttcttgcaccaactcctaatatttgtagaagttctctgagatgttttccctttgcaccctgtcccttatacactcaaagagtcgaattccaaaattaatcaccaacatatgcagcttctaagtttatgcttttcaaacaggtgtgtgtgcgtttcctgccatgtgcaggggacatgaaagagcacgtcagcatggcacctcctgnagcanggattccaggattagncaagttggaggttttagatggctggcatgctgctgtgccctgcactatgccacctctgttgcagcatagtggacagccccatgcatgccttcccgagggctcatggctctc

SEQ ID NO: 210452 - DNA, 320 bp, Homo sapiens
tgaactcctgacctcatgtgatctgcccagctcagcctcccaaagtgctgcgattacaggcttgagccaccacacccgtcctaaaatacttttttaaaatactgaattcacatccttcatagatagtggaggttccccctcatctcctgtgagaatttgtttcacaactgagttttcatctggtacatttttctgtaaggtctatattgctcactgtggtagccatctcaaaaatggcccccagtgataatgacctcctgatatttacccccttgtgtagtcccctgaaaaactatcaagattgggctatgtggcctggc

SEQ ID NO: 210453 - DNA, 187 bp, Homo sapiens
tggcttagaataatgagaatagttgtggagagggagccaaatgcccaaatttttggtcagtgtgtgctcagggcattgttagtgacaggaatgaaggagagaggtggtatagctgaatggtacaagttttgaaagaagtgttttcataataatttggaagaataatggtctagaggaactttgggga

SEQ ID NO: 210454 - DNA, 478 bp, Homo sapiens
tcctgctataagccaacttctttcccacaagacagtacaggacacagcctacaggaggaaatagaagtcctgatctttctctttcagtatcctgtgctgtcagaggtcactttagctaggcttaaaaaccagaaggaaaagaatttcaggatggcaaagggatgggcatggtagtggtaagacgatgaggtgtgaggggcagaggaataagaaatttaatggtttttattcagactttattatttgggcatgagccattggtgattaactcaatctccagcccctttgccctccctgaaggttggggaggcaggaagtccatccctctgatcatgccttggtctccattccccaaaccccatcctgaagctatctagggcccccaataccgagtcatttcattagagaaggacattcatcactccagaaattccaagggtcttagaagctcttgtgttagaaactggggactaagacc

SEQ ID NO: 210455 - DNA, 392 bp, Homo sapiens
gttgttttgcttcaagtcacagtttccaaaaatctattgacaatgttaagtgagagctttctctactttcatatgcctgaacttttatgaccacactcctactgcccccttaaagttagttagaggtggacatcttgcaaaagggtactccttgtagatagacatatgagcccaatagaagggtcagaatctgcccattatcactattgagaaagtaaattacaataacccaagggtggactattttgtcctcttcatgggtgcaatttggcaaatgatgttttagagaaatcaagtataaattaatatcaactgttttcatctttattttctagggtgatttgattattgtactgagtaaaacaaataggcactggggataagtggtatgt

SEQ ID NO: 210456 - DNA, 410 bp, Homo sapiens
cagaaaagtggtcaaattagacttaggatcggtagaagacaaagaagaagggaagttggatgaaaagaaattagttcatcagtacaaaaacacaattagatagaaaaaataagttctagtgttcaatagtatattagtgaggttatagttaacaatagcttattttatatttcaaaacagccagaagaattgtaatgttcccaagacaaagaaaagacaaatgtttgaggtgatagatatccaaatcaccctaatttgatcattacacaacgtatacaggtatcaaaatgtcacatgtaccctcaaaatacgtacaactgttatatatcaatacaacttaaaaaataaagaaaaagaaatagggaattaccctacttccttttctttactctctagcctggacaaagaat

SEQ ID NO: 210457 - DNA, 228 bp, Homo sapiens
gcacccagacagtcactgttttctagttcagtcttacctttttcccgaattctcacaggacttctttatgctacttatatttcatttgtcacaggccaccttattcagtagaatacctttggcatgactatggtttgttttcttcttctctccctccctgcaggattctgcatatcctgagggcagagactactcttatttttttatcccatgacatccacatagagt

SEQ ID NO: 210458 - DNA, 411 bp, Homo sapiens
ttgctaaccatctgctttcaggtgtattttcatatgccaaagtttaccttagtgccactctgaatgacctaacaagcatgcaaaggaattgaggaaggtgaaagagagtgacactgtattaattactagtctaagaccctgttttaaagaataacccaagaaaacataaaattagaattcaagtcccagtcccacagttttccctgggcataaaatacttaaaaataaaaatgtgaacgggcaactacacttcactagtttcctcttagtttttaagccaactcagtagcctgccttatctcattctaaaccttctgagagcagggactttgtttttcctttctgctatttccacagtagtaagaacagtacctggcatatggcaggtccatatatatggtagaaccgact

SEQ ID NO: 210459 - DNA, 612 bp, Homo sapiens
gttctgtgcaagaacagccatttgggaacatgatggatataagctttttctcaaacatggtttccttgcaattttagctttaccacataacctgcccttctccacctccccttccaaagaagacttacttttttttttcaattctgaaatcaacttcttagatctacttttccttacctttttctatcatctgcctccagaactggacagcttttatgcctccttcttacgctatcattctttgattccaaatattcccgagctttagatgtaattccaaggttgttcccacatggagtgttgaaattcctgtttcacccctgctaactcaaactaatacccccagtcatttcatctcaattcagagccctaggctgacatactgtcacgtgttctcccaaccccaatatgagctctataaaacaatgttgaaacagacactggaaaagttcccaccaggagaaaatgaagtttccttcgcaccttatttccatgatgtcttatttatttttcacaaaatcttttagtctccctctatacccaagtgaatagtgggaactcctgctgccctctgtctgccactgatctttctttctctgttgtcccttggtg

SEQ ID NO: 210460 - DNA, 475 bp, Homo sapiens
tgcccaacagtagtccattgtatggatataccacattatatttattcattcataacctgatggacattggcttgtgtcctctttggcatatatatatacacacacacattatatatatatgtatatatatatgaatgctgctaatgaacattcatgttcaagattttatgtgaacatgttttcatttctgtagggtgtatacacctaagagtggaattgcgggtcatgtggtaattccacgttttactttgagaaactgccaaacttttccaaaggactgtcactagtttccattcccactagcagtgtataggggttctgatttctccacatcctccccaatacttgtctcattttaattacagccaccctgtggatatgaaatggtgtctcactgtagtttcgatttgtatttccatgtgcttactgttcatttgtatatctttagagaaatatccaaattctttgcccattt

SEQ ID NO: 210461 - DNA, 121 bp, Homo sapiens
gaaggccaagaagggatatgatcaataaggctgatcatatgtttggagcaggctgtgcccgtgcaaaggcatctgactgagaaagtggatccgagctcagatccggcccatgcccctctaa

SEQ ID NO: 210462 - DNA, 425 bp, Homo sapiens
cccccaccccgccccccatgcaccaccctccccagggctctctccgcagaccacagtgagctgcagggcaaggcccggctgcgggcccgggacgtggtgtgtgttctcatctgtattgagtccctgtgccagcgccacacgtgcctggaggccgtctcaggcctggagagcaacagcagggtcttcacgctacaggtgcaggggctgctgcagctgcaggctggacagtacgcttctgtgtttgtggacaatggctccggggccgtcctcaccatccaggcgggctccagcttctccgggctgctcctgggcacgtgagggcgcccaggggggctggcgaggagctgccgccggatcccggggaccctcctactgatgcccgtggtcaccacaataaagagccctccaccctccccaaaaaaaac

SEQ ID NO: 210463 - DNA, 532 bp, Homo sapiens
gccgggtggacaagcggacgctggtggagctgcatggtttccaggctcctgctgcccaaggtgccttcctgcgaggctccggtctgagcctggcctcgggtcggttcacggcccccgtgtccggcatcttccagttctctgccagtctgcacgtggaccacagtgagctgcagggcaaggcccggctgcgggcccgggacgtggtgtgtgttctcatctgtattgagtccctgtgccagcgccacacgtgcctggaggccgtctcaggcctggagagcaacagcagggtcttcacgctacaggtgcaggggctgctgcagctgcaggctggacagtacgcttctgtgtttgtggacaatggctccggggccgtcctcaccatccaggcgggctccagcttctccgggctgctcctgggcacgtgagggcgcccaggggggctggcgaggagctgccgccggatcccggggaccctcctactgatgcccgtggtcaccacaataaagagccctccaccctccccaaaaaaaac

SEQ ID NO: 210464 - DNA, 312 bp, Homo sapiens
cctcttgccctgtggggctgtgttcaggtgcctggaggccgtctcaggcctggagagcaacagcagggtcttcacgctacaggtgcaggggctgctgcagctgcaggctggacagtacgcttctgtgtttgtggacaatggctccggggccgtcctcaccatccaggcgggctccagcttctccgggctgctcctgggcacgtgagggcgcccaggggggctggcgaggagctgccgccggatcccggggaccctcctactgatgcccgtggtcaccacaataaagagccctccaccctccccaaaaaaaac

SEQ ID NO: 210465 - DNA, 664 bp, Homo sapiens
cctttaagaagttaggtggtaagattggaaatcatttatccaaagtatggaactctgagaattaattagaaacgtgaattccttttttatttttttataaaagcattacaatatttaaattaaatgcctgtttataactataaagcatagcagcattttagaaaataagaaaaaggtccttaaatttttcccctcacgaggatctgtgactttttgtattccattatgttgtttttatgcattaatgcactaattttaaagatagtttaagctgggcatggtggctcatgcctgtaaccgcaacactttgggaagctgagacgagaggattacttgaggcctggggtttgagaccagcgtgaacaagatagcgagaccttgtctttacaaaaaaaagaaaaaaaaaaaaaagaaaacatggtagtgcaagcctatagtcccatgaatatatgtcctatgaatatatgaggtattattagtacctcgtatattaataataatcacctcaggaagtgtcagaggtgattcaaactccagcctcccaaatatgctgggaggctgaggcaggaggatcacttgagcccaggaggtcaaggctgcaatgagccgtgatcgtgccactgcactccagccctgggcaacaaagcaagaccctgcctcttaa

SEQ ID NO: 210466 - DNA, 304 bp, Homo sapiens
ccaggcatcctttatgtatgtgtactggaaatgcccatcactattgaaggtggcctttccagctgctacatctcccagctaagtcaaaaaataaatttaccaggactttgcctaaccaatctaggtaatgaagtcaacatccctccttccttttcctacccacactgcctcacagaatttattcaggtgccctgactcaggccttcatctcccagaaggatagaggtcagatactctgaggggacacatgggaggtacctgagcaggcaattatgaatcacatttctaaataacaatccatgca

SEQ ID NO: 210467 - DNA, 465 bp, Homo sapiens
agaacccacaaatatggagggcttactgtacttgtttcttctgcctgtaatgcttctctccagatatactcatgtcttcctcctggccttcaaatttttgctcaaatgtttcctattcaataaggccttttgaaagccattttactttaaatttttcatagcatttatcttctaaatattataaaaacaggccatacggccaggcacagtggctcatgcctgtaatcccagcactttgggaggccaaggcgggtggatcacgaggtcaggagattgagaccatcctggctaacatggtgaaaccccatctctactaaaaatacaaaaaattagccgggtgtggtggcgggcgcctgtagtcccagccactctggaggctgaggcaggagaatgatgtgaacctgggaggcggagcttgcagtgagctgagatcgtgcctctgcactccagcctgggtgacaatat

SEQ ID NO: 210468 - DNA, 498 bp, Homo sapiens
agaaggcctggtagcttctacttttaactcttgggatccagttgtcatataaaaagcttaaggtagaatacagaataatgagagagcacatagagagagtactggatgataacacaccagatatagtgagaggccagatggagaactaggccttcttggatattccagctccagccaaactcccagttcagtgcagctctatgagtgactccagtgacatcacaaagagcagtggacctgcctggtcaacccacagaatcatgagaaataataaattattgttttaagtcaaaaattttgggggttttgttacacagtagtagacaactggtccctttcaacctaaatgactcgatctttttttttttttgagatggagtctcactctgtcacccaggctggagtccagtggcgcgatctaggctcactgcaacctctgcctccccagtttaagcaagtctcctgcctcagcttcccaagtagctaagattataggca

SEQ ID NO: 210469 - DNA, 605 bp, Homo sapiens
aaaccttatgaatgtaatgtttgtgggaaagcctttagccatcgtaaatcccttactctgcatcagagaattcatacaggagagaaaccttatgagtgtaaggaatgtagcaaagccttcagccaggttgcccatcttactctacataagagaattcatactggagaaaggccctatgagtgtaaagaatgtggaaaagccttcaggcagagtgtacatcttgctcatcatcagcgaattcataccggagagtcatcagttattctctcctctgccctcccataccaccaagtcctatagattcaatctcgtaaatgcttctagcatccatctgcttttttccagcacatgtcccatcatcatagtccaagacgcaaccatctcatctggatttctgcagtagcataactgttgccccttttgcttctatcaactacatgtttaacactgtaggcagcctaaccttttaaaaataaaaatacataatttatgttattttcccatttaaaacacttgatttgaaaaatatattaactaatccatttcaaggatttagcacacactggcatatagttattgctaaataaatgctagccattaaggta

SEQ ID NO: 210470 - DNA, 589 bp, Homo sapiens
cccaagaacaaagccaacatgatgaggatggcaggacagaaagacggggagaggctaatccttattgaagtcagtcattggctgagctatccatggatactacctccagacttcctttgatgccttactgcctaaactacattcaggtgggtttactcataccctagccaaagcatctcagtgatacatatatatgctcatctatttctaaatctccaacaagggtaaggaagccttttaggtcagtggttctcaaagtgtggcccctggaccagcagtattgacatcacctggaaacttactagaaatgcatattcttgggccccatccagttcttgtcaatctgaaagggaatgggtgcagcagcaatcgtgctttcacaagcactccaggtcattgtgatgcatgctacagtttgccaacctctgctttatatactactctgttgtcatactgatatcagaactgaccactgggagtgagagcaccactcattattccatccaacttacctttttctatcattgcttcatttgattctgctatccctaaaacaaacaaacagaaaaacaagaaaaaggacaaggaa

SEQ ID NO: 210471 - DNA, 533 bp, Homo sapiens
tagttctctatttacaaaatcataatagtttttagtatgaattagcctatgggttaacatgcgtgtgtgtttgtaaataaataaggtcattcaatatatgttctgcagcttgcttttccactgaatatatgcacattcttagtgatatacatttaaattgtttctagtattttgctgttacaaataaggaaaaattattttaaaaaatatatcatgtacatgagctattttataagatttctagacatgaaattgctaaaataaagaatataaacatttcaaattttgatggatattcctagataaacttcttacaagtcttctctaatttatactcccataagcagagcatgaaaatgcctgtttctatatgtccttttcaaacctggatatcattcatatctttttaaaggcatgagtgaaaacctccttaatgtaattgcttctcttaggaagtttatggtttgctgagagtatctctgtggactgaggtttctcacccatcttgtttttaaatgaacagagttacaatg

SEQ ID NO: 210472 - DNA, 518 bp, Homo sapiens
gtgtgtccccaccagcagggcctgagtatttgtctcccatcccctgctagcacgaccctcttctttctggtagaggagacagtaagacctgtggcatccccaggccctctatgagtcaggagagagggcatggagctgttttcctgctctgcttgtggggctgggtttctgaggcccatgaccttggcttcatcaatattttctctagcctgtcaagaaaagttgaacttcagtgaaatatatctcagaaatttgccacaaggagagggctagggaaaacctaactaaaagatgttagaaaagagaggccaagtgtatcccaggttctgtgtccagtttcttttagtccttcatgaaggtgactgagctgttttagaaataacatagttcagccaggtgcggtgcctcacacctgtaatcccagcactttgggaggccgaggcaggcagatcacttgaggtcaggagttcaagaccagcctggcaacatgatgaaacaccatctctactaaaaataca

SEQ ID NO: 210473 - DNA, 431 bp, Homo sapiens
atcttggagatcttttcacatcaatgaattagtgtgccttcttgatgacttacatcaatgctgccaaggatatatgtctgtcacctccagttttttagaagcaaagggagaatatggtcttaattttttttgccacttctcagttcgtttgttgattactaataggaatagacacaaagaggtaatgccacctgctgctcctttaaagcaagaagttgggaagaagagagctattcattctgtgctgtgccttctgcctaattcaatttggcttagatttgtgttgccttttttttcttgtaaataggcccctgattttcataataatgttttgtttctcagggatgccttcgaacaaacactggttatctgcttggtttttctgttactgtaaatttggattttaataaaaataaaattttcctgtcttt

SEQ ID NO: 210474 - DNA, 410 bp, Homo sapiens
aagggtttttttgtttgtttgtttgtttgtttaatagatgaggtctcactatattgccgaggctggtctggaacttctgggctcaagtgatcctcctgcctcaacctcccaaaatgcttggatttacaagtgtgagccactgcacttggccttcaaaattattataaaaaggaatgaagcccagtttagttgcagaaaattgaccactttttcatttttgtttctagaaacattcatattgtagaacatattgtcaatcacccagattctctattttttattcggataaaagaggattgctgcttatttcacattattttctgacattattttttcatttattccttctatggctttattcaattggatagatatagaaatacaagaatctccaagtcaaatatcaaggc

SEQ ID NO: 210475 - DNA, 551 bp, Homo sapiens
tcacttcataaaagatggtgcataaaataccaaaaaagcaatgatataatctcagaataatggacagaccatcacaaaacagtctgattgttacaccctttccacttttggcacacacacacacattttgattttttttgtttatgacagcttagtaacctttcctctatggtggagaatttggggagcattttttcatatttatcttaattgaagtagtcttagagctagctagttctcaagaaaatcttgattctacctttagacacatcttcatcccatctttgtctggagatagggtgccattatttgactaaagtgtttatgttaatgttcttaatttcatagtgtgtcaaccttgtccgttcttggtaatcaaagttttatggtatactcctagggtgaaattggcattctacattcttgacagaatataatcttatactctgtcctgttacttacagaatttcacttgaacatgtattacagatgtagggattaatattcttaaattggcagtttttaataatgacaaaatggaatacacaatc

SEQ ID NO: 210476 - DNA, 333 bp, Homo sapiens
caactcagcttagatcaacagactttcctgaaattggctttcgcacctcaagagtagatacttccatctcaagaaggatctctgagccatacgtccagctcaagaagcatctctgagccttaggattcctgggactttgtgagcagggagagcagagacttccagaaagaagacattagcttgcaccttctctagcccttctttgccaagttactgggacctttcccttgcaggttgtgacccacttagccctagagtccaccttgatacagtgagacacccagtggaagcctcagccctcctggtaggtgaagcctggaggttcagatgccc

SEQ ID NO: 210477 - DNA, 411 bp, Homo sapiens
aacatccaaaggaaaatagctataatttttctgtgttttttttcttttttgccagggaggaaatgttttcctgaagccctcctacctcactctttgtcttatttatctgagtcataggagaaccagcctttaaacaaattaagaagttttgtttttgaaagaagcaggaaggaggtataaaatgaatagtgggtaggcagccaacaatgtctgcacataatatttttttcctttcagaaatgttatcaattggttttccaagttttctgggttttttttttttcatctttataatgtccttttctctgctgagacttgccatttgtttttttgttattaccatttttaatagaccttgaacatatttataatgctgattaaaattcttgtcagctaatttcaatatatggg

SEQ ID NO: 210478 - DNA, 350 bp, Homo sapiens
atacagaaaactatcttcatgaccttgcagtaaggaaggagttcttaagcaagtcataaaatatactaacaataagggaaaagattgttgttttgagcattaaagttgaaaatatttatttattaaggcaccattaaaaggcaagctacaaatgtcaatcaaaaccacaatgagattcctccttacaccaacgaggatgtctagaatcaaaaagaaaaacaataacaagtgttggtgaggatgtggattaatcaggactgttatatactgctggtaggaatttaaaatggaagaatggctgtggaaaacattttgagttttgctttgtggcaagccacaaagtagaaaaa

SEQ ID NO: 210479 - DNA, 592 bp, Homo sapiens
aggacccatcacctttcccacatcccagatcctaaaagtactgggagggtctcatcaggcctcagggacctttgtgggaaatgcatgggaggctgtggagaagaggaaggaagacaagggactttaaaacctgggctgcaagaccccaaacaagcctcctcccctctctggggcccttcaacttcacctgcaaaatggcaataatgaaacaaccttccaagagctgtatgtcatgagaattcagtaagacagcacactgaaagcatgcagcacatgtatgcctttagcaaatgttacccttgtccccctgtaccttctccatggatgccccttgctgtctcctgtgccaaacatcacctcctcagcgaagccttcccacacttacctaggcaattctgctgagttcccacagcaaaatattcagatttttataaaagctttctgtatttttttattattatttttttaaagagatggggactcactctgctgcccaggctggagcgaatgatgcagtcatagctcactgtagcctcaaactcctgggctcaagcaatcctcccacctcagcctcctaagtagctgggactac

SEQ ID NO: 210480 - DNA, 590 bp, Homo sapiens
aattgtaattagaaaaagcaacattatttccagctgtcatcagaattttctactagaccaggtgtgctttggatctcttaagggatattataaataatgtagaataataatgctgtgccattcagacttctcttttatgctcatcacccccaaataggctccttggcgtcaccgttgtttacggcgtgctgacagtggccacacccaggtgaaagcttctggagttacactgtgtacttctgtgtgactctgagctaggtggggccatctgcaagtgagataagctgtgtgttacctggttagacgaaagcctgtgacttcctcaggggagtcgcccggtacacaaaacattgagcaaagaagtccccgtttgcagtggtccagttagagatgtcttgctccttgctatgtttgccttttgaggaactgatctagttcatggctatccagaaaataattggattttttggttgtactttagtaaatctgccagtatctttaatttcctagaaaaatgtaagtcataatatattctgtcatttttctccagtgtaggcaacgttatcgatacccatgtgacttatgcatgg

SEQ ID NO: 210481 - DNA, 493 bp, Homo sapiens
aaggatgaagttggacccttaaccttgccctgcatgtaaaaattaactcaaaatggattaaagatctgaaatgacaaaactcctagaagaatatgtaagggaagagcttcttagatttgattatgatttatttgatatgataccaaaaactcagacaaaaataacagcaatagagagtgggagtgtatcagactaaaaaactgcccagcaaaggaacaatcaccagagtgaaaaggtaccctatacaatgggagaaaatatttgcaagccatatatccgattaggaattaacatccatcatatataaagaactcatactactcaacaacaggaaaaagaaaagtatttaaaaatgtgcaaaatagtgtatctccacagaagttatacagatggccaacagtaatatgaaaagatgtgcaacatccctaatcattatggaaatgcaaatcacaaccataatagtaaatgaattatcttacaaccatttggtcac

SEQ ID NO: 210482 - DNA, 223 bp, Homo sapiens
aaatgtttgtacactaatacacaaatttacaaaagatattatacaggccatgtaaaacacccatggcaggttgaatttggatttggggccccacatttgcaatctcttctttaacagatttgctagaatattgtggttcaagtgcatataactaacatgttacatggagaactacttctgagattagtaggcacttctaaaaaataatgggggggggggtgct

SEQ ID NO: 210483 - DNA, 154 bp, Homo sapiens
cgtattgcaagggtgtgtgtgtgtgtgtatctgcctctgtgtttagggagactgtctggagcccagagtggcagccacatgtccccagcacttgggacccgggagaaaattttggggtatctttcctgagtggctctgggacggtggtttaggg

SEQ ID NO: 210484 - DNA, 320 bp, Homo sapiens
aggggttacacacgtgagccaccacacccagctgacaaggttttttctgcacttagaattatttaattaggacagaggctggaaagtggaattaccaaggcagaggcctgggatcttttgcaggcatttgatttcaatacctatggccaattggtttctgaagatggaatttagcacatgagaaggccacaagccgggcacgggcacgcccgcctagactgccatgttaagtataccactcacagtgaggtatctttttaatgtgcccatgtcctgttacctttggtagactttattcttctctggctgttgggtgtcca

SEQ ID NO: 210485 - DNA, 590 bp, Homo sapiens
taaaaggggccagtatgaagttcctctgagttcctgctctcttggagcacggctcctatcacacaataatgtgttattttgttgaattttggcatccttctagcttgtttggtcagaagccaaaaaattagagtgtgtcggtccaccagtttctcagcagagaagctctcttctcacccagcgagtgtgctgtacccttggcctctggccaagaagggaaatccattttacataaagaatgcacaaagctcaagtgctcagagactttttacctactaaaataactttatggacaaatgccagtctgctagacacattcagcaagaacatttggcatgcaaaacaaggtaaagtactctgtggaggtagcaagttttttagaaacaaggaaatggctgtgcgtgccctcgtggcatgtcacgtggcttggcactgccggctgattggctgcggccgagtaaatacagccgccatgtaaggagcggaacgtcgcccttcactggctccttaaaatggcggcctgaacccacaccaggagaagcaagccgagtcccattctcagtttcccctctgaagttttttgttttttg

SEQ ID NO: 210486 - DNA, 470 bp, Homo sapiens
gtcacatcataccacatgccactgccacgccaagaagtggatttagtgttgtaaaaaagtatactatataattctgcagtattggaaagatagaaacccaataaaaatatttctgttaacagtaaggcgtgattttaaataacctgatgtcataattaataaaatgtaaaatgactaacttccccgaagtgacaattgcataaacacaggaagaaaaatgtgagtaaagcagaataactgtttaatttgtgtgcgctcattttgacaatatctattcagatgaagtctgcctagttttgcttccgctgcatggattcacaagcttcctttcagctctgtagttatacttttgaaaacataaaaggctttgttcattctttgaggagggaaatggggaccattatcatagaaaatgtgattttttttttggcgtgacttgagatataactgaatcatccccaaaaagactg

SEQ ID NO: 210487 - DNA, 151 bp, Homo sapiens
gaggttaccaacttcacaaataatgggtttccatagaggatgtcatcttgaaaaacacaaacatagtttcatgtgtttcattgggcttcacattgcagccttttcatctatctacatatcttggagaccctttcctgctgattcctgtagg

SEQ ID NO: 210488 - DNA, 494 bp, Homo sapiens
agaagacaatcaaaatgaaacaaagcggggatggtaaggacagctaaaaaaaatcctaaggctgctgacacacccagataactggtagctatagttatgcctgctaagattggggtgtttggggcttggctttcgttagctcccttggtcttattttcccaaaaaagaaacctccaggttatgggcaccttatttagtctaatcatctggcaggatttgcagggtaattgcccagaactagaatattgatccagatttttacattactcatcccttttgctgcttctgagctgcagccagagattgctggttggttcacaggaataagcagtgttagtttaaaatgtgggcaaaaacttaaaaacaacgaatgagtctaaaatctaatgacaaatatataagtcttgaaacataatttctctccagttctcatttttgttaaaaataaatcatgataggactgagttgtttgcaaaataaactttagtcttgta

SEQ ID NO: 210489 - DNA, 398 bp, Homo sapiens
aaccaaacttggcttgaaggtttctcaattgaatgtgaaacctgtgtatatgaagggctgactttttgtatatgcaggttctgcaaggctgacagaattttaaaaattcatatttttaaaaatatgaatttatgttgctattatttttacccataatcctcactatgtgagttctatgggacacatgggtgtggggagccgtgtggaactaatcccctatgtataccaagggacaacagtaacttaattccactgagatgtagaaatgttactccacttcctctttccctttttttgtgctattgttgttatacataccaaatatttatattctacaaacccaagaatacattgttacaattattactttatgtaattttgtgtctattaaagatgga

SEQ ID NO: 210490 - DNA, 555 bp, Homo sapiens
acacagtggagaaagaatgctttttaggcttcagccagtttttcttatcacaaagccctcacctacttcttgtttcatatagaattcttccagttacccagtcacttaaaccagaaacctgtgagctatcctacactttctcccttatatagttggttattcagtcctttaataaaataatctttaggctgtgtacagtggctcacacctgtaatcccagcactttgggaggccgaggtgggtggatcacttgagcccagaagtttgagaccagcctaccaaactagcaagaccccgactcttaaaaagaaattagctgggcagggtggcacatacctgtatagtcctagctacttgggaggctgagatgggagcatctacttgaacctgggagtttgaggctgtgttactggtggagggtgtccaggttcttggcatcttgaacaaagaactggacaaaacacacagacaaagcaaggaagggatgaagtcagagatttattgaaaatgaaagtacactccacagtgtggtggcgggccctagcgtaggggctc

SEQ ID NO: 210491 - DNA, 213 bp, Homo sapiens
ttaagatattttgctattgacttctagaatttctatgtgcttctcttttatagtttccatttctctcctgaaattctctgttcactcatttagaccatttcaattaagtttttgaacatattttcctaactactttgcaatccttttctgctaattacaacatctaggttatcttaggttctatttctgttgaccacttcttcacaaattgag

SEQ ID NO: 210492 - DNA, 468 bp, Homo sapiens
ggagctctaccagctccttcccaacccccgacattctcaatgcaacgtccctaaggtgggagtcaacatggttggctcaaggagcagagtaacaggaagagagtggcaggtgatgacctcagaaaggttacaagcacccagatcatgtagggccctgcagaactggtaaccacttggcttttatgctgagtgagacgtgaaataattggagggctttgagcagatgcgcgatgaagtctggtttcaattataacagcattcctccagctactatttgagaatagactgtgaggggcaatgacaaaagagggagacaggagattagtttaataatcccagcagccaagttcggtggcttacacctgtaatcccagcactttgggaggcgaggcgagacagaaggatcttttcagcccaggagttcaagaccagcctgggcaacatggtgaaaacctgtctctacaccct

SEQ ID NO: 210493 - DNA, 213 bp, Homo sapiens
accatggggctgtgggggaggaggccctgtgcagggagacctgaggtgcccaagagaagcctggcggggtctccacactcctagaggtgttcccaggctgggctcctggaggacctggacgcccaaacttctctgcccagcacagatgtgtccactggcaccccatcccctgccttgctccctaaagccaggcacgctgggcggtgctgctgc

SEQ ID NO: 210494 - DNA, 751 bp, Homo sapiens
catcttttattgaattgtctaattgatttgtaggacttagaaatattaagttaaactatatgacctaccatttctgtacatcaaaaatggttaaatatcataatttcatattgtttatcctaatatatatgatgagtcctttgtcagttatatgtattgcaagtattttctcctgctgtggtttgcctttctactctcttaacggtgtctttaatgaacagaagttctaaactttatgtagtataagttatctctttttctttatggcatttatctgtccatgaaatgaatggagatgaggacaacatctgaagttgttttatgtagaaagtgcaggaactgggcctctcccctgctgctctgatagatcaaattgtggttaaatcaagcagacagatcacagaagacccaaccataggtggaatagaatgtgcttacagtaggttgcggttgccaccccaggatgtcttccttttagaggaagtctccaaggacaattctgaaagacaaaagtcatgatgttcttccctccctcatcctcctgtgatctgaggtcttccctcctcgggtgctgggttgttgctcttcctgcgcctccacgtattctgggtatctcattccagtagcactaacttcatgttttcccaataattccttagtcacacctgctcgccggaacggcagggcgctataaacctgcggcaaacctgaaccggcgcctcagccgcagggggagcacacggccgcgccc

SEQ ID NO: 210495 - DNA, 448 bp, Homo sapiens
cacacatatatatgtatatatacactttataatacatatataaagttataagtagagcaaattgaacatcctaaatatgctttttaaattattggtgtcactgattagctttgaaagctgcaacatttaaatttcttatatcttgttcttagttaagataatgaagcctgggaatctttattagtaatatcaccatgatattattttagttctatttcctttaccttattgcataggttgatcacagaatagcagtatccacccgattcttttgcatttattggagaaaataggactgacaagtttcttctgtagctttagatattttttatgaaaaagtataagattggctctggggcaaaatctgctatctaaaaccacctatttactaacatctgggttagtactaaagccatctatgctgctaacatttacctgtgcttgcctt

SEQ ID NO: 210496 - DNA, 534 bp, Homo sapiens
ctgtcagaatattaatgcatgtccaagcacttgaactaacttatcattaaggtcctagaactgcctagctctgtagaatgtttctgtaggattcatgaaaacttttgtggaagtcttaatggtgtttaccacatttaaaaatctagattaggtcatcttttcccccctgttaaatccaactgaaattctgaatccagttaggaagttgcagctagcaggggctttcagttgtgctatgtatttggcaagaaagttcaagaatcggcttgtttttttctaagacatgttataaattcattctaaatataaatgacatttgcagctcatagatgctgttttacccaaacattttttaatttaattaagcatgcttaatatgatatatcaatgtattccttattaagaaaacaagggaatgcggctgggcccagtggctcatgcctgtgatccagcactttgggaggccgaggcgggcagatgacctggggtcaggagttcgagaccagcctggccaacatggcaaaaaaaaaagaa

SEQ ID NO: 210497 - DNA, 421 bp, Homo sapiens
gtcactggtaatactttggtggctacgaaaccttttcaaaaatgccttactttgccagatctgagtaggagggagatgggggagactaaggaatcttttgcatgagccctactgttgccacgtgcattggaattgccctcattttcttctcgtggcatccagagacttgtcacttaagaggtttcaaagtgacatttgaagctgttcaggatgagcagctaataatagtagaaagagtcctaggcttagagtcccaagacctgcattggaaccctggctggcaacttcctagctgtgtgtccttgagcaaggcacttaaccttcctgatcactcatcttttagatgcagaatgaaattaacactctccctgaaaacccaactgagagacaagtttatttgtgttaaaacaacaacaacttg

SEQ ID NO: 210498 - DNA, 625 bp, Homo sapiens
gtactcgttttgaaacaaaaccccaagctgctgatctgactttaaccaaattaccaacacatcaataggtaacttggtacccatgctttcagaagctcatccgtggcactggacatcactcactgaatcaaaatgagaaatatatcaatatcataatccagtttttgaaatctagtgagtcttaagattaaggctaatacattcaacaaccacacctcataagccaggagttcaaatcatgtttatacacagttaaactgtatacagaatagaagacatataattaaccactaaagctggcagtctccaaacaagaggtgaatgtgttacctccgagtttatgattcattattatcacaactgacagctagctttccactgacccacactttctcatgagctgcatagccgaaggcaagagaacactgtcactcctttacttcaagaaatcggtttacttgtggtattcttgtggtaattcctcctcaaacttatataaatattactatatatgtgtgtatatatatatatacacacacgtacacatgttacatacttctgtttcattcctgtgtgatatgaaataaacaaatatacagattccttgcagtattggaacaatgat

SEQ ID NO: 210499 - DNA, 191 bp, Homo sapiens
atccttttcagcatttcttcatagaaaagtaattatctggctacttatcattaactaaatataaaattattttcaaataaatatccttgaccacacagaattttgttagtgtagcattatatgtaaatttagctctataattctgaattttcagtttattttaaaattttgagatattattaataaactcg

SEQ ID NO: 210500 - DNA, 181 bp, Homo sapiens
cacttcagcttgtgttggggaaatgcacaatgcatactgtacacaccccacacggcgctgtcacctagaaagtcactgaacacaccacacagacaatatagtcaccatgcagcatcacactgcaacaggacacaaagacacacagcaactacacagctcacagactcacgcaacgcagaca

SEQ ID NO: 210501 - DNA, 506 bp, Homo sapiens
aaggattggggtaccggattctttattacaccaaattacatcatcccttttttttattgctatcatttatttcatgataattgcctttcattaagacaaactcttcctgttaataaacattatttcccagaatactcaaagttttactctttggtctggcactgactattttttgttctttggtttgaaccaatatagaaaacggaaaggtggcccatcacagggcaagaaagtaatgatgtttctaaatatgtcttattctaagtcagatatagacactcttggctatgctgttcaaagtggcaattagtatttgatatattcttaatgatctgctaattcttgtaaagtttctattttatgatccactaattcttgtaaaatttctaatgtatgcagattattaaatgctgctaataattttccttgtagaaattacaacatatgaagatatttactatatttattacttgtaatccaactatttaaaaatatctttaaagtga

SEQ ID NO: 210502 - DNA, 244 bp, Homo sapiens
caaattagtcccttccactatatatccattcttatttcccaactcaagctgtcctttctagcttgaattaacgcagatgctccctgagatccctaactgtggtctcccctctgcaccaatttatatttcatactatcactgattagttttcttttaaaattagtaatttaaaaaccccactgatgttgttttctactcaatttcgttggttccatattttacacaaaataaagttcaaattcct

SEQ ID NO: 210503 - DNA, 637 bp, Homo sapiens
gaaatatttttcctctgtttattatttttgaaatatttttcctctatcatttttgcaaaccatatatcgccaggtttacatacgggtccaaggcaccttctctcatcattccagagaaaaatgaagtatctcccaacagaaagtatatagcttcactataattcatctgtgtgcgagacagggaaggggcatattataatgggaaggaacagattttgacgcacctgatccatatttgaattccagctcagccagtagcctgctgcatactcctgacttctctaaacctcggctttcacatctgtgaaacagggcccacactatcttagaaagatatagtaaagattacaaacaaggccgggcgcggtggctcacgcctgtaatcccagcactttgggaggccgaggcgggcggatcacaaggtcaggagaacaagatcatcctggctaacatggtgaaaccccgtctctactaaaaatacaaaaaattagccagatgtggtggtgggcacctgtagtcccagctactcaggaggctgaggcagcagaatggcgtgaaccccaagaggcggagcttgcagtgagctgagatcgtgccactgcactccagcctgggtgacagatcaagactccgtctc

SEQ ID NO: 210504 - DNA, 202 bp, Homo sapiens
ctccattcatgcaacaagcttgatccatagcaccaaccaccaccaagagctctgtgagtgagtcttgccttccccacttgtattagtccattctcgaattgctgtaatgaaatacctgatggtcgtcccatcagcggattttatacattgacctttgttggttataaaaacagagtcaacgagtgtacacaatgacgctggt

SEQ ID NO: 210505 - DNA, 409 bp, Homo sapiens
gcacctttatttactctgcctgaaaccttgagacaaatagaaatccatcattattatgctgctgggctaagattttctgttataaacactttccttttttggcatttaaggtgaaatccacattagagcttttctttgttctttctacctaattttctgtagttttcatctgttattgggagcatcctcactagcaaatgctcagaatgcatttatcagacagtatattagctttaattagttcttctaagtttggtcagctacacattatcacttcattaaatgaaggttgtgaaacactgatagaaagtttatttacaaaataatatagggaaacatacatttagtttgaaaaaatgagttttttccccctgagatacacaacaggaacatattaggccatactgag

SEQ ID NO: 210506 - DNA, 133 bp, Homo sapiens
acagagcttcccaaggaagttacatgacctcgccttgggatattcagaaatgctagtcaagttctggcagcctgaactcttcctcctccaagctgaaatccgagagatacccttcctcctcttggccatactg

SEQ ID NO: 210507 - DNA, 476 bp, Homo sapiens
tgtaatattaacaatgtcccatatctaataaaaaattactagacattcaaagaaacagtaaagtatgatcattagttacaaaataattagttaatagaatagatcccaaatggcagagatgtgaaaataccagataaaaattttaaaacatcaattataagtctactcaaagatttactgtaaaataaacataatgagtaaacaaataattctttagagagatactactgaagaaaataccagaaaaattaaatatgagtagacactatacaaaataagaaatgttgaaaatttgaaaacattaatttaaaaagtaaataatatattacacagtctgtttgaatttgggtaaagaaaaaatgtttgtattttggtagaaaaacaattatgttaaatatcaagaaataattatttctagtttatttgaatttgtaaattttggctttggcacatttcctttgcatcaagcatttagc

SEQ ID NO: 210508 - DNA, 490 bp, Homo sapiens
ggaaatgtatttggacatccaagggagagaaggagagggcatccaaaaacaaaaggaggaaagaaggaaaccaggaaggtagggcaaggttaggcagtgtggagggcaaagagctgggtcaacattttaaaacaaggaaggctgctgcatgattctaaattacgtgtggggcgacgctcactgtggcttgctcccaaagggaagtctgtcatgctcccagatcttcatgtatgtgggtctcttgggggtggagcagcaatggactgatttcacttctgggccatgtgaagtgaagagagagagagggttactggatttgcacctcgagaacatagggtccctcagggactcatagcaatctttgcaggagtgaagggggctttggaatggggattcaagccattctgatagatcttaagtgcccccagttgacatctggctcatgcttgttaagtgcagagcatctaataaactcagagaaaactgttga

SEQ ID NO: 210509 - DNA, 563 bp, Homo sapiens
atgcattgtgtgcactgacctgttcctgggcatgagcctgaattcgctcttgcccctttgttgggaagcagaaacgtgtggggtttcgcagttactttctttagtcccctttaatctctagctaatgctgagcttctgcagagccagaagggtcttagggcctactctggaagagcctcactcccattctccttattccctggagctcttctggatttctagcctgtgtctgtcttgttataatcacagttttcatgttgtgatccagtctttatccttgctccttagagctatctactgagccccttctgtgtgtattacgcatgtggtagacatgaagacagagtaatgccgtatcttaagaaatgtcacagtcttaggtggggacagagtttaattatgcagtgctcagtgaaaggtggatctgagtacctgatggcagcatggagtcacaaaggaagcattctaggctagtcttagaggctggtgctctgagaatacgtcatgcggtgggaagagggttatgcccatatgagatgtgaaaagtgggtgggagagggcgt

SEQ ID NO: 210510 - DNA, 210 bp, Homo sapiens
ctggccccccgccccgccccccattaccccactcactggctccctggatgctctgtggctgggatgttagcgcccccatcatgccccatcacccacaccgggctatttcccccaccagcctgaaagcccccaggagtggcggccactgacttttttcctgtagcctcagactcaaaggaggcacttaataaatgcacacagaaggactga

SEQ ID NO: 210511 - DNA, 688 bp, Homo sapiens
aaaaaatatatacttcattaagaaacatggcctttttagctctcttctgagttgaaaagcataactaatattttgtgtgtgcttaatttatataaaattatgaacactacatttacctgtaattagagcacttattataaatagttagagctattgaggccatagccagtatctttttcaactttgcaaaatgaggtgaatagtcactaaatatttactgaatggatattagtgaattcaccttgtccattatgtgcctttgaagagagagagcaagcaagcaagagagcgcacacactttagttcatcactttaatgttttttattatttatttttattttttatttattttaagttccagtatacatgtgccaaatgtgcaggtttttacgtagggatacatgtgccatggtggtcttctgtacctattaacccatcatctaggttccctccccttgcctctcacccctcaacaggccccagtgtgtgttgttcctctccctgtgtccgtgtgttttcattgttcagctcccacttatgagtgacaacaggcagtgtttggttttctgttcctgtgttagtttgctgaggatgatggcttccagcttcattcatatccctgcaaaggacatgatctcatttctttttatggctgtatagcattccatggtgtatatgtaccacatt

SEQ ID NO: 210512 - DNA, 577 bp, Homo sapiens
atgcatctgaatgcatttccaaagatgattctgcattcaaagaaataccagatttaaagaccataatcataaagggcacaacaccgaataattctttatatattcaaaataattcactgtctgattttcaaaacattccagtacaggacagtttaggaagttcaaataatcctttgtacttaactagctcgttggaaaatatgactgttgataatttaaatgctagtaaagaaactgaagttggaaatgtttctttagttgaacaaagtgccaagaatcacacttttaaaaatgataatttgcagttttctcagtgtgaaagtccatccctaactgaactgtttcaggaacacaaagaaaacaatataagccagtgctttactttatctgacctttgtaaccagtcatctgccagtttcacagatctaagtttgggatcctttcccctgtcacaattagcaaatcgctgtcagtcttcacccggaatatcagaattaacaggatctctgtcgtcattggcatttcataaagcttctcccacaagagaccttgagaatttgtcactttctgaattgat

SEQ ID NO: 210513 - DNA, 345 bp, Homo sapiens
gactcttgtgaaaagagaggatatgttcacacctagcgtcagtattttccctgctaggggttttaggtctcttcccctctcagagctacttgggccatagctcctgctccacagccatcccagccttggcatctagagcttgatgccagtaggctcaactgatgggagaagactggccatcttctcccatcaggatatgtctcaaaaagtttaaattatagaaaaaaatctgtaaatcccaaagaacactacaactcagcattaatcctaaaactgttggggttatctcttttactagtgggaaacatgcagtttactgtgcaactagccaaaggcctgctaatg

SEQ ID NO: 210514 - DNA, 408 bp, Homo sapiens
cttctccacctgccagaatgcatcagagaagactgtcaccaaattattcccccattcaaccattagtgttgccacatctataagcataatgcattaaatttacaccatgctcacaaatactttccattcccccacttctcagcattgtagtgatcaccgtttttgtccccttcctctgcctcccccatcctaaaccctgccagtactgctcctggtgagaaagtggcaaggagacactaagaaccccttcctaacataccaatgtcccacagcacgtatggagaaggatgaccggggcacccattagtcaatgatatatactaagctagtgaaagtaaacagtggttatctctgatggtaagtttatgggcaattccaaatttcttttaatgcctctctgcatttgcc

SEQ ID NO: 210515 - DNA, 164 bp, Homo sapiens
gctgctagggaaagacaccaaatgtataaacactgacaaaacatgctaacatcaagagagggcaagcactcagattggtgcacacaggaaaacacagggcgaaaatgtggcataatttctcaatttttaacctaagtcttaccaatcaactcacaagaatagct

SEQ ID NO: 210516 - DNA, 425 bp, Homo sapiens
catcttttaaatttttctttgattctttctgcctcatgtctttatagacatttaatttcaatcattgagttttggatttttctatccattttaccttctcctttttctacctgttgttgttaaactggaaaacaaaataactattgattagcatctctgtcagagaaagagtagtcacagataaagaggagaggtgaaatttttgtttcttgtttatttgttcaaattatatttctattataaagtttaaactgttggctgcattaaaccatgatttgggtatgtagcaatatttttcataaaatattattttcttggtggtgccctcacttgagtgatgattatattgtttccttctgaattctgtagaaacacaaaatgagtcaataatcagagccttctatgtatcttcttttgttgctact

SEQ ID NO: 210517 - DNA, 460 bp, Homo sapiens
acaaatgaaactaaagctcagaagagtactgtgacttagcaaaagcaactgcagcagagccaggataagaaccaggtttttaaattctaaatctgccgttcttgtatttacaaaattgtctttaaaatatacttcctcggtgaatagtgcagatccactgattcctatgatactttatcaataatataaatagtttaaataatttgaagttctggagagatgaagcatcaaaaagtactcttgtagggaaaccagttcattattttggttttctataaatcttctgaaaaatatcactagaggttaaaaatcattactaacaatagacagtcatctctttatttctactttttcttccctgtatttagagactgtctttttagaataaccagagtaacatctagaatttgtagtgtgatggaaataccagtcaaaatcaataaaatataattctcacata

SEQ ID NO: 210518 - DNA, 362 bp, Homo sapiens
tgatgcatgaggtgatctagaggatcccgactgcatctgtgcctcccaaagtgctgggattacaagtgtgagccatcatgccggccaatagtgtattttcatagcggttacattatattagatattataagtaatcaagagatgatttaaagtatacaggaggatgtgtataggttaaatgcaaatactgaaccaatttattttacatcaaggacttgaggatccttggattttggtgtctatgggagggaggtcatggagccaatcccctgagaatactgagggacagtttttttttgttgtttgtttttgtttttgagacggagtctcgctctgtcacccaggctggagtgcagtggcgc

SEQ ID NO: 210519 - DNA, 525 bp, Homo sapiens
ggagcatcattgctttgggccaatgtaacaaactgctcctggtttactccaggggattcttgctgccttttcggtgtatgttaaaaatgctgctgctgattgaaataatttagcatctgtttcactgaacagtgatctctgaagttgcccatgtgtgaacacataatttcctctctttgtggacaattctgatggtctctgttgcatctcttgtgtacttaaaaatgggatccacaggccgggcacggtggctcacgcctgtaatcccagcactttggaaggctgaggcgggcggatcacctgaggtcgagagttcaagaccagcctgaccaacatggagaaaccctgtctctactaaaaatacaaaattagctgggcgtggtggcgcatcctgagatcctagctcctcaggaggctaaggcaggagactcatttgaacccgcgaggcagaggttgtggtgagctgatatcgcaccactgcactccaacctgggcaacaagagcaaaactccgtctcaaaaaaaa

SEQ ID NO: 210520 - DNA, 318 bp, Homo sapiens
agcccaaaacaaatgtgtgggattggttaagcccggagatctttaaaaattaacatcatttggccaggcatggtggctcacacctgtaatcccagcactttgggaggccaaggtgggcagatcacttggggtcaggagtttgagaccagccgggccaaaatacaacaaattagccaggtgtggtgatgggtgcctgtaatcccagctactcgggaggctgaggcaagagaatcacttgaacccaggaggcggaggctgcagtgagctgagatcgtgccactgcactgcagcctgggtgacagagtgagactctgtctc

SEQ ID NO: 210521 - DNA, 347 bp, Homo sapiens
gagaaagcacaaggggatgattttgcttacaaactgctgttccaagagaaaccgatggcacagaattaccaaatctgacttgattgtagtagaagaggaactcattcactgaacaaatatttgctgagtgcctaccaagtgcatggcattgtgttagctgccagagatagacggtctttgtccctaaagagcacacagattagtgggtaagagtgcaagcatcatatcaccaaactccttgaatagcagggtgagcaatttatatgtgttaaggtcagagggcaaaggtggctcactgaatatttttgagcccagaagttgtattatcagagatacgaattaaaaaa

SEQ ID NO: 210522 - DNA, 564 bp, Homo sapiens
tctcagtagaaggaacattgcaagtagaaagagccagcagtaaggatgcacgtagcagtctagaagtagaggtgagaccagcttggagatgaaatgaggagatgtcttctgttctgtgctggagaagtactggtaagtgtggtgtggttgggattcacaggcctcagccatcctcactttggtacaagttattttggtacagaactactagaatgtcccaaaggctgtagtacaggaacatttctgaaaggacaaaagctgccatgaatattgagaaattgtatggtgccaggtacagcctggatctgagcaagactgctggatggtgtgtggatagatagtgaaggcccagatttgggaacagattggatctcagatatccagagcagcactgtagaatctagttgcatataataatgttttaaaaagggtatcttaggctgggcacggtagctcccgcttgtaggcccaggcctttgggaggccaaggtgggcagatcacttaagcccaggagttcaagaccagcctgggctgcatggcgaaaccccatctctataaaaaat

SEQ ID NO: 210523 - DNA, 303 bp, Homo sapiens
gtggggaagctgaactgacaggagatcagtgtggtgaggggtaaagattaacgggaaatatagcccaaatcaagcctgcagggtaggctggaccagtctatacagggttaggcaaaaattaaaaagtgggatttacccccaaatggttgaaaagtattggaggaggcacaggagacaacgtgtatgaccacaagttgcaagactataaatttaaacacaaatacaaagagctagtgcttttaagtacaaataataaagaacatttgggatcattgggaagtgatgtggctggagtatgaaatg

SEQ ID NO: 210524 - DNA, 238 bp, Homo sapiens
ccaacctaggattttatatcagcaaagttattcttcaaaagtgaagaagaaataaagactttctcagaaaagcaaaattatagaaatagaggacagattaggggttgccagctgtaagtgctggagagggaagcaggtatgtttataaaagggcaacatgggccaggcgcggtggctcatgcctgtaatcccagcactttgagaggctgaggcaggtgggtcatgaggtcaggagttc

SEQ ID NO: 210525 - DNA, 384 bp, Homo sapiens
taggaacattggtgttgcaacattgtgcccacagtctgggtggcctggaaagacacatgagccttgaaaggaactacaaaatcagcttcagtcccaacaaattttttttaacaccactttatcctcctctagagatgtattattgcttctgaaataaatgaaagcagcacccttttctgttttctgagtacaaatgattagtttgaatcctcatagtttgagcataaaagtaattcttttcatgtaaattgtatttatgtgaaataactactttattgtattttatcataaataaactataatggacctggtttttacagttgctttgtaaaagtacacaccaaatatatttgagatattactaacagtgcaacaagtttttaa

SEQ ID NO: 210526 - DNA, 305 bp, Homo sapiens
tcagtaaacccaacccatattcaagggggaaggattacacaggtgagaatatcaggacttggggattagtggggatcatatttagggctgcctaccacgttgaagatctttgatgttacatcttcaaattgttacctttcttctttcaggtcctgttgcacaagtagggatagtgtttcattcgtgtagtagggagtttctgtacagtgttaccaagattggtatttcataatggaagtaactttatagttgtgagttttggtgctggagagcattattcagaggttaggtagttctgttacttg

SEQ ID NO: 210527 - DNA, 111 bp, Homo sapiens
cagcttttctacttcaaagaagataatactttcttgaaggtcagcagtaatcctaattcaggtgtatgtacattacagctttcttatcttctttttctcttttctcttcag

SEQ ID NO: 210528 - DNA, 1951 bp, Homo sapiens
gacccacgcgtccgcggacgcgtgggttcctcttgaagtgactttctgcttccaatcaaagctcaagaattccacctaaaaatgtttttctgctcaaaagctcttttttattacttccatgttttgagccttgttccagaaagctgaggtttctccaggtctgaccactaatcagtgagacattggtgcctctttcttcagtgcttctagcaggcctactgataagctccctagatgagatacactgcataaaaaaatgatgcccaaaggacagctttaagtgcctgctagatatctgttctttcagaagtctctctccacctatctctccagtaaagatggacttaaaactaaaagactgtgaattttggtatagtctccatggccaggtcccagggctgctggactgggacatgaggaatgagttatttctgccttgtaccacagaccagtgctctttagctgagcaaatccttgccaaatacagagtcggagtaatgaagcccccagaaatgcctcagaagaggagacccagtcctgatggagatggtcctccctgtgaacccaatctgtggatgtgggtggaccccaatatcctgtgcccccttggcagccaggaggccccaaagcccagtggaaaagaggatctgacaaacatttctcctttccctcagcccccacaaaaagacgaagggtctaactgctcagaggacaaagtggtagagtctctgccatcttcctccagtgagcagtctcctttacagaagcagggtatccattcccccagtgactttgagctcacagaagaggaggctgaggaaccagacgacaactccctccagtcccctgaaatgaaatgttaccagagccagaaactatggcaaatcaacaaccaagagaagtcctggcaaaggccccctctcaattgtagccaccttattgccctagcattaagaaacaacccccactgtggcctcagtgtgcaggagatctacaatttcacccgacagcatttcccctttttctggacagctccggatggctggaagagcaccattcattacaacctctgcttcctggacagctttgagaaggtgccagacagccttaaggatgaagataatgcaagacctcgctcttgcctttggaagctcactaaggaggggcaccgccgcttttgggaggagactcgtgtcttagcctttgctcaaagggagagaatccaagagtgcatgagtcagccagagttgttgacctctctctttgatctttgaaatgccattgctcccttttggaacactgccttccttactgtgcctacttatcccctgacattcattaatctctaaacttacccagcctggttggtgccaagtctgtctttagctactgttacaataatggtgttaagtaaagttagaggtgggtacaggggagacagaacttaaatccaggtggagagtcatggaaagtcgcacgaggagagtggctgttgttccaaattttgagcaaaggaaaagaaatcctagaaacaatggcatagaaactaaggaaagaagggtgtgttttgtgaaagaaaggaattttgtttatagagagtattttcacacatgaaagtgaacagtggaatataaagcataaaaggcaggatggagccgagccatggagaacctcgagtgccatgtgaagagaatttgacttgtgatgaagaatcaagtttccccttctaccattcatcagctacatctcctttttaagtaacccattttatccttcagaacctcacttttctatttctggccctggacttctaagccttgtttctttgtcatccaattccaatattgacaaataattctaaacagctacttttagtttgtatgtttaacgtcctgtgaaatattcctgtattaaccccaagccttttgatgataaagctttattttctatt

SEQ ID NO: 210529 - DNA, 534 bp, Homo sapiens
acaaatctgagcaagtgggagccctcctgaagatcttctccttgcttagaataaaggtagagatctcaagcctgggccctgcttccccccaccctgctttggattccagtgacactggcctctgccatggctggggaccctcctctcccttccctcctacccatctcctactctttgcccctcaccacccagtgaagatctgctcgtcctctagagctcagcaaagtgccactttctcgaggagaaactcttccttgccttcttaattagatcaggagaaacctgatcacaagccatgctaatctttttctccatagttcctacctcttcttgtgatcatccatttgtataactgattagtgtttgtctcctcactgttgtgtaaggtccataaacacagggatatcaactggttttgtaccacttgtcctttgtacctggcatagggtttaccatgctgtagatgatcaaaaaatctacagtgagtgagtgagtgaatgaatgaatgaataaaaagactttgtaagaagccaa

SEQ ID NO: 210530 - DNA, 605 bp, Homo sapiens
tcactctttatgagagttttctttcctggtaccctaaagctactcaaagtatggtccctggggcagtagcattggcatcatcagggagctagttagaaatgcaaaatctcagatcccaccccaatctactgaaccagaatctgtattttaacaagatctccagatgactggtatgcatatgaaaatttaagaaatccctgttgtaaatcaccttttgctcaagggtcagggattaggagacactttgtcaagtcatggttccccaccctggcttcagtggaatgacttggggaactgtgaaaaatactgatgcctgggttccacctccagagattctaattggtctgaaaggtcaggtccaggaatcaggagttttagaagttccccaagtgattctaataggcagccaaggctgagaagcactgttgtacatgattcttataatttgccctagcttcttagaacacaaggtatatataagttgatgtggccagatgcagtggcttatgcctgtaatcccagcactttgggaggccaaggtaagggcatcactcgagcccaggagtttgagccagcctgggcaacatagtgagaccttgtctcta

SEQ ID NO: 210531 - DNA, 374 bp, Homo sapiens
ccaggggttttgtgttgttcagagtggtaaaggttcaaacctaggttctattttttaagtaattattaataaataaaatgatagcttaaatacgttttagaaaataatactgcttcaggacctcttaatgtaagtgaagctattagtgccagtcagatgagtgaacatgcttatgactcacataaacactgcaagcccccatgggggctttaattagtttttataattagtcatttactgttactttatacatagaatggataactgattacagacagtaagcagaagaagcaactgatgttgtgacgattatcatttgcagtcatctggtcaaaattcttacagacttttcatggtgtagataatgttttatt

SEQ ID NO: 210532 - DNA, 335 bp, Homo sapiens
cagtctaccacattttcaagattcttgacaatcaagtatcattctacttatcaagcttaatcactactattgtccagcacagaattctcagtctgataagacctatcccttttcccaatctcacttcaaatccattgcataaattcccttctacctgttgctttttgtttatttaactcccctaacagtaatgtcctttcttttctctccttccttcacagggtatttaataagcacttaataatttgccagacatccttacaggcccttaggagtaaaatgataaataagacaagggtccaccccatctctgatgagacccactttgtcatact

SEQ ID NO: 210533 - DNA, 434 bp, Homo sapiens
tggcataatatttttgaagtgtggataaaaaaacacaactgtccactactaattcttatctgtgagaactacacgtcaagaatgaagtttgaataaatgatcagcccagtgagaataagcaaagcctatttattcagagtttgctatatagcaaaggagtcagaagctcatttggatttggcagaaattcaaagccaagcagaggaggaaagctttataggaggaaaaaaagatggtttctgacatctcttgagtggaggcagctgggatggggaaggtggaggtaggataactagagcagggcatcctatttggttagttaggaaggtatatttggatttctccaattgttcctaagttagaagtgaggggagaaattaggaaacctgttagttgctgttaaagttttgactgttcagatttgtgtgccacag

SEQ ID NO: 210534 - DNA, 386 bp, Homo sapiens
ccccccactcacctctgtctagctaattccttagtccttcaggaaatctcccctgaacaccgtgaatgccagactgagttagcgccccccccaaccaacttaggtccctgtttgctactttatcatcagagacagtagagcttgatggccaagtgggacctctggcactaatacctatccactgggtattcatcctggctctgccacttgctacttataaaaccgtagacaatcaccaggcttcagtcttatctatgaatcaatctatgagacatgtagctaacagaggttggggagaactgaaggagtaaaacacaccaagagcttacagcagtcactggcacttagtaagtacccaataaatattagctacaattcatgatcca

SEQ ID NO: 210535 - DNA, 238 bp, Homo sapiens
ttatgactgcattattataaagatgaatataatcgtgcccggattcattattatatattcattattctatttacgttttccttctgatttaaattgaacttaaaatattttcaggggcctctgaaagcatcatgggcctgcagcactgtggctgctgggcctcctgactaggtcatcctgattctgcttctctgtactctttatatttttgataatgaatagacattacttatgacat

SEQ ID NO: 210536 - DNA, 362 bp, Homo sapiens
acccatccttctggatagtggagctttccagctagcttaaggtttgtccttttaaacatcacatgtggccgggcatgctggctcacacctgtaatcccagcactttaggaggccaaggcgggcagattacttgagtttgagaccaccctgggcaacacggcaaaaccttatctttacataaaaatacaaaaattagcaggcatggaggcagacgcctgtagtcccagctacttgggaggttgaggtgtgaggaccacctgagcctgggggagtggaggttgcagtgagccatgattgctccattgcactccagcatgggtgacagagtgagaccttatctcaaaataaaataaaataaacat

SEQ ID NO: 210537 - DNA, 383 bp, Homo sapiens
gaaagtttctaagacatgagctttgagccactaaaggataaggttttaaaatataaggtatgagataaatcaggaggaaacgtgaaacatgtctgcactgggaattctaccaggattttcttttgttggcatatcaacttgatggaactcatgatgcacgaggtcttcaacttccctcctccactcctagactgcactggtcaggccctggctcctgtcaaccatgctcagttccactgctttctttcaggcccttatcagactctcactggggctgttccaaaggcttcttcacaaatggcattgcagatcctctctcctcctgccaccacaatgacctttccactacaacaatagacccgtctgtagctccctattgccaa

SEQ ID NO: 210538 - DNA, 440 bp, Homo sapiens
aagcacagacaacaaaagcaaaaataaataagtgggactacatcaaactaaaatgtttctacatagcaaagaaaacatcaacagagtaataaggcaacatacagaatggtagaaaatattgcaaaccttatatttgataaagggttaatatccaaaatatgtgaagaattcaaatcaatagcaagaaaataaacagtttacttaaaaaatgggcaacagactttaatggacatttctcctaaaacatatacaaatgactgacagatatataaaaatattctcaacatcaccaatcatcagagaaatgaaaattaaaactataatgaaatgttacctcacacctgttagaatggttattatattaaagaaagaaaggaaaataacaaaccttggcaaggaagtgaaaaattggaactcttgtacactcttggtggaaaagt

SEQ ID NO: 210539 - DNA, 259 bp, Homo sapiens
agtgcacaggacacatctgaaggaaattaaaagtgctgttccagatgaatacatcaaaggtaagcaagcaaaacaaccttatgctgatgggagaagatgcgtgcgtcccatcagggattgaataaaaaacaatctcaggcacgctaggaaataggacaaaacaacaaaaaaccaagacaaagacttgaagttatttacgcatggacattaaaataattgtgattaatatgcttaataaaatagatgagaagacggataa

SEQ ID NO: 210540 - DNA, 452 bp, Homo sapiens
ggaagatgtgaaaaaagaaagggcagcttctatagtcacaagataaacatagccatattaattaaaaataaagcatcattacatatgcctttttgtagctcatattaaaatttaatttacaacttgtttgttctataataaattgtcaatatagcaaaaatgctaagtcaacaatctagttatatattcaatgtataaatatggttaacttctccgttgagaaaaacttagaaacttctttattaaaatgaaaccagtcggacattgcttttctactttatttaatttaaaggaaaaatataaacttaatgtattcttttaaggaggatttcctaaaatattgggcatagttatgtgaactctatacatttagtctgctgttattgttcttgtttataccacagagaaaggtatatgtacattatggtggaccagtaatttcaataatgaaa

SEQ ID NO: 210541 - DNA, 566 bp, Homo sapiens
ggcctcccagaagtgctggattacaggcgtgagccactgctcccggcaaatttttttccttcacatctctgctgaatgcttgtaaaattgcagcgcagatatttgtgtacgagtgtagtatttatattgaggcagaatattgcagtgtcgcccaggctgcagtgcagtggtgcaatgttggatcaccgcaaccttcgcctccgtggagtacgagcgattctcctgcctcagcctcccaagtagctgtgataacaggcgcccacacatcacgccagtctgtttagtatattcagtatagacggggttccactaatgttggccatgctggtcttgaactcctggcctcaagtgatccacccaccttggcctttgaaagtgctgagattacaggcatgagccaccacgcctggttaatctttatctttttttttttttttttttgagacagagtccactctgtcacccaggctggagtgtagtggtgtgatctcagctcactacagcctctgcctcccgggttcaacggattcttctgcctcagcctcctgagtagctgggactacagt

SEQ ID NO: 210542 - DNA, 1524 bp, Homo sapiens
ccggttccaaaattgtgatgctatactagggacctaccattaaatgtattttcaggatgaattctcaatgtgcagagcagagctgattgtatcaataagccaaaataatgtacaccttactgcttcaaagtagtacaggtttttccccttctccaggaaattgtgttttggaattctgtttattataggtaaggaatataatctatatcttagtaatagtaagaggaagtggttcttttttttggaggtgctcaggagatcagcatctagcacaaggtgaggacctgcccttgctctaggatgttttggcactaggcactagagctaggatgctgttgtttgacgtgcaccctctgcttgcagtcccagcccagttctgacttcttcagcatactaagagttagtaatacattcttagaactagagggcatttttagagatcatccagtctttccgtaatttaaagaatatgtatgataatatctaacctgagtcttgtaccatggagggtttgtatactttcattttcccagttaattcttagagtaaccttctaagaaataagaattgttgtaacattttacagatggggagttaaaacttagagagactgaggttacatgacctagtgcccgatcgattcaaacccgcaaacttgcgttcttgatcataacgctgcaattcctccctgtgcagagagaatatagtgacatgctgaaggcctatacaactacttggtattagttttgggactggaattcatcatttctgacttcgctaattatgatgtgcatagacgaccatgactcttgtttgattggtaggttgaggactagccacaaagaaagatggggagaagaagaaacaattcatgttggtagagaggagaaaaggatttaggttgatggaattacatagcctcagaaagagataggcatcttttgtgacgagactgtgaaagaagagaacgatatcagttcatgcagtattctcacacggttttgggagtacctgctgagaacccttctgagcactggggatacagtggcaaatgaaacaaaggctgatgatctctatctctatctctatctgtgtctctatctctatctctatctctatctctatctgtgtctctatctctatctctatctctatctctatctgtgtctctatctctatctctatctctatctgtgtctctatctctatctctatctctatctctatctgtgtctctatctctatctctatctctatctgtgtctctatctctatctctatctctatctctatctgtgtctctatctctatctctatctctatctgtgtctctatctctatctctatctctatctctatctgtgtctctatctctatctctatctctatctctatctctatctgtgtctctatctctatctctatctctatctgtgtctctatctctatctctatctgtgtctctatctctatctctatctctatctgtgtctctatctctatctctatctgtgtctctatctc

SEQ ID NO: 210543 - DNA, 497 bp, Homo sapiens
attttcctgggaggagagactagtgactgtcattttgtcatgtgatcattcgttgccataagtgatggggaaaggggaggtagctggaagattaaagatgggtcttcagaatactgtaactgaaggcagaaatcagaggctgttcagggcctctctccaatgggattgattgacttggaatcatcagattttagacctgatgaggggagtcttaaagatcatctgagtgaactactctgatcatctcagttatagcccagacagctgacttgcccaaggtcacagagctaacaggcaattaattagaagtgtttttttcccattctgtctctcaacttaagtgaaatatactaatgtactaacgtgacaaccatcttaagattttattccatgattttgaaatacaatgaaattttggcttttatctctattttttgctctcttttgtacttttaacaaaagtactgttattcattttttagctcccttgtctccaa

SEQ ID NO: 210544 - DNA, 362 bp, Homo sapiens
cccatctcgtgaccggcgattatccaacagctgaggctagggcagaacaaagtcaaggcagggaaagtcaaattatctcccttctggagctaggacaccttctgcccttgtatataagaatttcaggatatggccttcggattccaggacttgcaccagcagccactctcccatcaccctccccccatccctctcccaccaaggttctcaggccttcagactcacactgagaattacaccatggactcccgattctcaggtctttggacttacactaagtaatgctaccagcttggtaggttctccagcctgcagacagtctatcgtgggacttctcagcctccataatcgcgtcagccaat

SEQ ID NO: 210545 - DNA, 518 bp, Homo sapiens
ttctttatatgttggacagatttcaaaagtgatagtacctttgtttgtggtttcattgaatatttatgaagctaatgtcagatgtaggcaacattcatagcataacaggaaacttccataagtttgtgtattatgttagtctatgagaatgtgcaaatgtattggaaaattaatttagaatagcacatatttatgaaacttaagatgaatgttttatcaaatttgctctgatttgtgggtttagccctgtcttttattataggcttagtaagatatacaagaaaataaccatcatgctgtgaaaaagtgaccccaatcaggtactgactgcacagattcatgtaccctatccatcttcttgggccccttctccactggcttcttccttcctatctcccctcccccagggaaaaactggtttcatatttgtaaaagcaattttaatacttaatcatctctgagagtaacctgaactttaattgtcaaaacttaaccaaatgaagacattttctcagcta

SEQ ID NO: 210546 - DNA, 197 bp, Homo sapiens
ggtcttggcacaagctgcagggagcagccctgcttctgcttctgggaaaggggaggctgaggcctggacaagggaaagactggccacgagaaccacttgtgagggagtcttctgttctgaattcatgtagagtgtgcttccttttctagatatttctcttgagcagtattcctgttgctgcctgccagccttctcgt

SEQ ID NO: 210547 - DNA, 684 bp, Homo sapiens
gctttgttgcccagactaaagtgccatggaatgatgacagctcactgtggcctcaatctcccaggctcaagtgatcttcccacctcagactcctgagtaactgggactataggcaagccccccacgtctcattaatgtctgatttttagtagcgatgtgttgctatgtttccaaggctggtcttgaattcctgacctcaagctatcctccctccttggcctcccaaagagtgctgggattacaggcttgagtcttttaatcaccaagataaagatactaaattttgggattttctttcccccagtgctcagaaatgatggattcctggcctttcctctgcccatactctgagcactccagaaagccccaggcctttagtatccatgagtcatcatgggaataaattcacatttacctttgtacattctaaaactctttccccacatcttttggaactcatgatgaatcttcaacaaaattgttctgacttttctctgcaaccctacagtggtgactgttctaaccttattgtggcttctaaatcaactctcccagtttctaaaaactaggctttccatcttattttggattctgctccatttactatctttttcttactgcagttattactaaggttcgagtgtaacagcttctaataacctgggctttcagactgacctccca

SEQ ID NO: 210548 - DNA, 765 bp, Homo sapiens
agggcagggtcttactatgttgcccagactggtcttgaactcctggcctaatgtgatcttcctgccttggccctccacaatgctgggattataggaataagtcactgcacctggcctcttatgattttcttaataacattttctctagcttactttaatacagtatacaatatataatatacataacatagaaagatgtgttcattgactgtttacattattgataaggcttcagtcaacaggaggctattagtatagttttgggggagttaaaagttatacgcaaattttcaactgcccctaatccttggattcctgaccccgtgtttttcaaggatcaactgtatttctatttaccaaatagttcaataattgcttaaagtcagaaatttgtcctctggaattctgtaatatgacttggtgagtttttcaaggccaggatctaaacatctaatcctatgattcagttttaaaagttaatacacttcctaaaacatattcagctcagaaaactgtatctggcaataaaaacctgatattgcttggctgtgtccccacccaaatctcatcttgaattgtaattctcacaattcccacgtgtcattggaggaacgcagtgggagctaattgaatcatgggggtaggtctttcccatgctgttctcatgagactgaataaatctcatgagagttgatggttttaaaactgggagttttcctgtacaagctttctctctttgcctgctgccatccatgtaagatgtga

SEQ ID NO: 210549 - DNA, 755 bp, Homo sapiens
atggaggggggaagactggaatttttgatcatctacttattgaaaatggcgctttctttcattctttctgattctttcttccttcctttctttaaaagatcaaacgaggacaataccaaactaataaattggatgggggtggtcagaaaggaaaggggatactgtaggtgatgcatataatggatatgtattcatgcattagcaaaagaatgatcattttgaacataaaatgcaatttgattgccatggaatgtgtaaatgagaacaccaaaagctgaggtacaaatatatgtccagaccacccacaggtatgatgcaggtgtgtgtaaagcgagcccagtataagctcttccctctaatccagatgcgaggaggctccatcttctaagggaaaccttcctgctaattagattttaactatgatctttcagaagtaaacttttattatttttagctaagaaagttagaatcaggaaatatgatttttctatcatgaagggaatttaaattgagcgtgatatctattgcttataattttaaattaggcttaatattaagtttttaaaaagtgctaaaccaccccttttaaaaacgtttacatctgattcacagaactaaactaaaatgtatttgttacagctaaaatgtttcggactattagtctgtaatattatatgtggatatgaagctaaatattttacgttaaaacgggggcagggggtagaggggagaacaacactacaaagagcttacgc

SEQ ID NO: 210550 - DNA, 320 bp, Homo sapiens
aaggtaaaagattgaaggaattttggataagagaaaatttcccataaaaatgtttacttttatcctttttttcttttttaacaccatagtattcctgacatattgactattcaatttagaaagattggcagttggactcagataattcagtacttggctctggacagttgttaagaaccctgctgaaaatggtttatatgcagaaggtttcagcaactcagatcaactctgctgatctcaggatctatgctaggatgaaaaaaagtccctggcatgaatttgtttttcttgtcactagtattttccagttgaatgagttt

SEQ ID NO: 210551 - DNA, 587 bp, Homo sapiens
ggaaatttgtattcacattcagttagtcattccaccagaatgacttcatcacacaatattttgtgacaagaacctgaacagcctgttttacagtattcttttcatcttttattatatgcaccaaaatttttttttaaattttcttgaacctctaaatctacgttaaaaatttacctgatacactttctaaatggacaaatgccgaaggtagctgtgtatacaaatgtgactagaaggaaaaagatgatatagaaataaaataactccttgagttgatcattctgattggcatttatagagtagaaatgttttgtaattacagaggaaaaaagatggcctttccttcaacagttatgagccgtcagaattttcaaaaatactgcattttgacaatgtagtttctagtttgacaatgatatatttatcttcacaaccaggaaaatgtagataagaatttggtttataaatatttaaattcttattaaaatgtctaataaaattgttttccccatcacttgattctttctgtaagttattttatattgtaaaatgtaaccaaataaaaataagtaaataaacagtagcag

SEQ ID NO: 210552 - DNA, 211 bp, Homo sapiens
ggacatggtagtgcgtcctgtagtctcagctactcaggtggctgagacaggagaatcgcttgaacctgggaggcataggttgtagtgagccgataaatataaaaagtattaaagtactaacagaagaaaatttccactgatcaccctttagctttaaataatgcagaagcatatgcccagtttacttgtaattaaaaatcatgcatcattc

SEQ ID NO: 210553 - DNA, 484 bp, Homo sapiens
atttacaagccatactgcactaatatatagtcataacaaaatacacactgaagtaggaatgtggatacttcccgcaccccaaaaactgtcttgaaaaacaactagagggctgggcgcggtggctcacacctgtaatcccagtactttggaaagccaaggcaggtgcattgcctgagatcaagagttcaagaccaacctgggcaacagggtgaaatcccgtctctactaaaatacaaaaaattagctgggcatggtggtaggcacctgtaatcccagctactagggaggctgaggcatgagaactgcttgaacccaggaggtggatgttgcagtgagctgatatcgcaacactgcactccagcctgggcgacagagccagactctgtctcaaaaaaacaaaaaacagagcaaggcaggtcttcatttgctagaacgcaaggtctgcaatcaaacatccttaaaaagcaacttgcaaaccaggcgc

SEQ ID NO: 210554 - DNA, 428 bp, Homo sapiens
gacagcgctgagatgataaatactgggctcagatccagcttgggccactcactcccaagattcatacacaaacagaccagcttgatcagggcccagcagggaggtgaggcttaaacctcctcgctggaggaggagccaataagaagactggcagcttggatagtgagtgtgtgtgtgtgtgtgtgtgtgtgtgtgtgtgtgtttgtgtgtatgtcagagtgacctatcccaggtggatgctgggagtggtggcaggaagtggggtgtgatcagagagacaggaaaatgctcagagaaatgtgtgatagctcagataggtctcaaaccacaaggccctgtctacacatccagcacgattccttctggaacacagggagttaaagatgaaacaactctagaaactgaaaccaattatccatggcaattta

SEQ ID NO: 210555 - DNA, 502 bp, Homo sapiens
aaaaagaacctggtaaaataccaaccattgagaattaaattattattgaaacaactgacatttttaaagaaagcatatgttaacagaaaaaaaagatcttcagaaattctataactcagagatattcactgttaacatcatgatttaacaattttcttaccactgaaataatagaaaaaaatgcccagtggcataattgattaattcagttgttccttaagcctctttccaataaaaaccaataaaactatgatgaaagaaagcaataaaggcctgacatggtggctaatgcttgtgatctcagcactttgggagattgaggtgggaggttcacttgaggccaggagtttgagatcatcctgggcaactaatgagaatctgtctctacaaaatattttttaaaatagccaggcctggtggtgtgcacccatagtcctagctacttgggaggctgaggcaggaggatcacttgagcccaggagttcaaggctgcagtgagcta

SEQ ID NO: 210556 - DNA, 302 bp, Homo sapiens
cctatttagaatccattcagacttcaaatacaactcactctccaagtgttgctttgtctacccagctagaaataacactttgaatgcctacagcatcacagctatatacctcttgtgacaaatctccttttctagcttgtattgaccttctttcctatgatagggaaacttttttgttatctacattatctctgcatccccagggtgactaggaattcttggcccataacaagcactcaaattagtgttaggcaaccaaatggatacatcagtcatcgatcaaacacccttggttcctacat

SEQ ID NO: 210557 - DNA, 1037 bp, Homo sapiens
gagagaatgagtgcaaagccggggaaatgccaaatgcttgtaaaaccatcagatcttgtgagaactcactatcacaagaacaacatgggggtaagcacccccatgattcaattaccaattacctctcactgggtccctcccctaacacgtggggattatgtgaactacaattcaagaaagatctctaggcattcagagtacctgcttgcttggtcaagcagcctgaatcaccccacccctcctgcgtagagatcttagtgctgggagactctgcttcatccccacgaaaatctccaggcactagaagcaccacttaccaggatcagcagcctgagccatcccacccttcctgtgcagaaactctgatgcaatggaggacctctccactccaggctcaggcagatcaccaggcattcagagcacctgttcacctggttcagcagccctagccatgccccctttttggacatagatcttggtgcagtggggctttctctgctcaatgcccaggcagatctgtcagcatctggagtacttgttcacctggatcagcaacctgagacacaccaccattcctggacatagatcacgtggcagagaggacctctctggtccacacccagacagatctccaggcatctggagcatcagctaacctggatcagcagcctgagccaacccacccctcctatgcagagatcttaatgcaaggagaccctctctgccccaggctcaggcatatctccagacacctggagtacctatttccctagattagaagtgtaggccatcccctgaatctggagtggggaggttgcaatgaccagcaacttatttaaaaatgtgttgtttttttctccaatatttggattatttccatatatctttgtgttattgatttctgatttaattccatcatgttaagagattataatttgtatgattgaatacattcagtcttaaaatttatggtatatattggtgcttgttttatgtacaagatatgatacatttcagtaaatgtttcacatgcactt

SEQ ID NO: 210558 - DNA, 867 bp, Homo sapiens
  misc_feature (31)..(31): n is a, c, g, or t
  misc_feature (282)..(282): n is a, c, g, or t
  misc_feature (289)..(289): n is a, c, g, or t
  misc_feature (308)..(308): n is a, c, g, or t
  misc_feature (342)..(342): n is a, c, g, or t
aaaagaaaaaaaagaaaaataaagtattttnaacaaagttcatatacaggcacagtctcagtgaactggcgtcagggcctcgtacagtctctgtgcagccagctccaccatttctcggagggattcatcgtcttcacttccctcttcacattctacagtccgtgtctccaagttaaggttggcagttttcccgtccactgtgacgctaagaatagagtcatcctttacacttacacagtcttctccaaatatgtactggagcatgatctccaacctcttgcngtaaacntgcatttctaattttttanaaaccttctgtactgcaccttttcttattttggnatttgactgaacttccaatatcacagttgtcactgtatctgcatacatatcattagaagggtttgccagccattctaataccaccatgcctggttcttgtattacagtaatatttttgaacactttcagagcaggtttttcttgaatttctaattcttccacatcacctgtgaatttctgcagctggtaacagagcaaattaaagggaccagtatatggaatggcttgggtttgcttcaccgtgctcatggccaggtcagtataattggacaggtcgcaaggagaaagtatgttataattaaagtttcttttaacaagtattcctgagacccgctggccttgttctggttttttgtctgctaaaaatcccataaccttggctagtttttctcctctgaagtttaaggtcactgcttctgtattccgaggattatgaacctctatgtgaacttcatcgttatcttcatattctcgaatcagtgctgctttcaatctggccatttcattctgttctccatggactaa

SEQ ID NO: 210559 - DNA, 873 bp, Homo sapiens
gtacgtccaagctcggctcatccatcccaaattgcggccccgtggtaatccttggggcctaagttttgcgcccagcctgcggggagaagtcccatgggcagaggccggacggttctggaagcgggctgagggccgtttgggtatgaatcccggaattccgggtactggagtgtggtctacaaggggagtgggctccaggactccacgttatatgggggaagagcgcgtctggaagatcgcgttggggggagtagggcagggggtaggggcgcgtgtcccctaaaactcgggcgcaggggaacgagcccagttgccctggtctgaggacggtactgttccaagctgtgctgaggagtttgtgtacgtttgatccttatttgccgttttggagatcctaagtcgtcagatatgggccattttataaggttcaccctaatgccctttcgaaaaattttgaaagtgggaaatgagagtagaaagccaaagatagatgcctctgaagaacaaccgaagaagagcccacaacatagactaagagaaatgtgcacctatcatgtgtcaaggtgcttttcattccaccctcataacaacttttcaagggaggttcaattatcgcaattttacggatgaaaaaaaagggagactaagagaggatgacttgtccaaagccaggaaggtttggagaggcaaaagtgagttttgaacctaaggccctgggtatgccgcctacacaggcccccacacctggtttaatgctcactgttgctgtcgcgaaattcttatttattttttaacaagcggccccatattttattttttgttctgggtactatcaaggaagtagctgggcctgttttctggctctaaaacccg

SEQ ID NO: 210560 - DNA, 298 bp, Homo sapiens
tgggtctttcatcaatgtatgaagatgctaatttcaagtttcagctaaaattgagagcatagataacagaaattttctgaaccatgacttttatttttctaagagtcctttttctaggtttttaacttctgttcagcatttagtagacacaaacattgatagatgattgaagatgttatcagtgcaaaagaaaattaagtcaatatatctgtcgaaggttacccagacacatcaaagattaaaacattcaaaaagggatttttcccctaaggaattcaaatgtgttaaaaggacatcc

SEQ ID NO: 210561 - DNA, 124 bp, Homo sapiens
aatataaattatatgtcaagtactatacaaatattagaactatcaactattaatacatcatacaatatgcagacctttgatgttcaaattggataaggccaggctctttggaaacccctaaata

SEQ ID NO: 210562 - DNA, 954 bp, Homo sapiens
aacgatggtcctcagctcaacgagtgtctcagctacttgggaggctgaggcaggaggatcgcctgagcctgggagttcaaggctacagtgcgcagttattgtgctactgcgctccagcctgcatgacagagcaagaccttgactcaaaaaaacaaagttatgtgacggctagtaaagttaatgtcatcttatgctgtgctaatatggggtgggtgggggactctgctgctttgattaaaccacacctgaagtattgtggttagttctgggtgccacttttatgagggccagtactaactagaatttatccagaaaagtatgatgaagttaggatgggaaatggacttgaaaccatgtgatctaaggtatgattgaaaggatagagatctcttagcctggtaaaaaagattcattgatggctatcttcaatatataaatgccatatgaggatagcagcaggcttattctcttaggtcagaatcagtactgagtgggtagagtggtaggaggaagattttgagtcattaaaaacggtctcagttgcaccaaaatagtgtaagccttattatgaatatcatagaaaagtaggtctcaggctttttgtttttgctttctaaaccacacctatttgttaaggtgtcaagaattgggcagatcacatatttaaatcactttagaatgggagcataaatgtgtgcttttatattcattccgtaaatatttactgagcacctgtcatatgccaggtgctatactagctgttgatggagcatacattcaggctgaagaagtacattttgggggtgggtgtgtccatgtccaggttctctagctatatcagtgtaaggggttcttatgtgaacagcaataacatagaatatattaaagcttaggtgttggaaagtttcaaccagaaatacataaaaatatattattatacagtgtactagtgat

SEQ ID NO: 210563 - DNA, 521 bp, Homo sapiens
aacgatggtcctcagctcaacgagtgtctcagctacttgggaggctgaggcaggaggatcgcctgagcctgggagttcaaggctacagtgcgcagttattgtgctactgcgctccagcctgcatgacagagcaagaccttgactcaaaaaaacaaagttatgtgacggctagtaaagttaatgtcatcttatgctgtgctaatatggggtgggtgggggactctgctgctttgattaaaccacacctgaagtattgtggttagttctgggtgccacttttatgagggccagtactaactagaatttatccagaaaagtatgatgaagttaggatgggaaatggacttgaaaccatgtgatctaaggtatgattgaaaggatagagatctcttagcctggtaaaaaagattcattgatggctatcttcaatatataaatgccatatgaggatagcagcaggcttattctcttaggtcagaatcagtactgagtgacctcgcctgcccggaccctctggtcgc

SEQ ID NO: 210564 - DNA, 762 bp, Homo sapiens
  misc_feature (466)..(466): n is a, c, g, or t
aacgatggtcctcagctcaacgagtgtctcagctacttgggaggctgaggcaggaggatcgcctgagcctgggagttcaaggctacagtgcgcagttattgtgctactgcgctccagcctgcatgacagagcaagaccttgactcaaaaaaacaaagttatgtgacggctagtaaagttaatgtcatcttatgctgtgctaatatggggtgggtgggggactctgctgctttgattaaaccacacctgaagtattgtggttagttctgggtgccacttttatgagggccagtactaactagaatttatctgaaaaactcaaagtattccgagaatttctcctgcccaggcatcctcctatttttcatgagtggtttctgagaacattccctgatcctacatcatggtacagtagtagatcagcttactgccgttccactgcagtaatgtcaatggttggttatatnctggggcttggagaccgtcatggtgtattctctttgattctttgactggtgaatgcgtacatgtagatttcaattgtcttttcaataagggagaaacctttgaagttccagaaattgtgccatttcgcctgactcataatatggttaatggaatgggtcctatgggaacagagggtctttttcgaagagcatgtgaagttacaatgaggctgatgccgtgatcagcgagagcctttaatgagtgtcttaaagacttttctacatgatcctcttgtggaatggagtacccgtggggc

SEQ ID NO: 210565 - DNA, 835 bp, Homo sapiens
gctgtgtcagcacactgggagttttacagtgtacggattggcagacagcctggcttctttccagggcattaacagttatgcacttgtgtgtctttagagccatggtcactgcgtccctctctctgcctcaggcctctgtgttcctgcaggccagtgccttgcgtttgtcctgccaagcctggttgctcagctctccctggctctcaggagtcaaagcgcatctggttctgcttgtctggtttacctgtgttaaaagcaagactctgcatgcttattctcacatcagtcagaagacgccagcctgttgtttttcagagcgaggttctcagtgtgagccatgtgggcggtcctttttggtttgaaggtgaccaccctcgctttcagcggaccggggcagggatcagggatcaacagcctggggcagggatcagggatcagggggcagggatcatcacgcaggaagctgtgtgaaagaggtgtgggaagctgcttccctggacttgctctcggttacttcagctgcctgtctgctgcgttttcccaagcgtgcttctcagtggttgctgttaatgttctaagggccaccatgtaacatttatttgaaaacagaaacaaaactgtatgtggacactgattgcctgttcctaaggacctgctccttagagccaagccgggaatgtccgcatgatcggccctgggccgacattggacgggcccggactagcggcaacacgcgctgccccgggacacacaactccaccatagccacacgcctacaacgccgtctatcagagacatacaccccgcttcgcagctccaatagcgccccttttcg

SEQ ID NO: 210566 - DNA, 172 bp, Homo sapiens
aattcggagtaatgctcattgttagtattcagtaaattaagggatagtttaaatacatgcaataagcctggaaaggggaaaataattggttcctagaaagctgtgaaagactccaaaaacataggtttttgaggaaacttcttacttctttagtgaatattgtggcatacat

SEQ ID NO: 210567 - DNA, 480 bp, Homo sapiens
aaacaacaaggaaagtcagaattgtttggaaaacactttatcagttctaatcccttcacattctctattccactctcctgcctcagagcttttcctctacagttttaatcgcctacagtgctttttcttctccttacaaactttcttcatcgccaattatcctgggtgtcttttacgtctttctttcctggacttctactactgacactcccctacggcatcacactattaactgacacttcaatatgctttatattttttactgctaagattttaagctctgtgaggcagaacttaaactatagatatataagaaaattccaagcacataatagctactcaataaataatcatcagttgattagtcaactatataaaactatacttgaattgaatgaacaagggtaagaaagccttcatgttacttaatttaaatgaagctgaatataattagaattaatcagattggcaatagacacc

SEQ ID NO: 210568 - DNA, 486 bp, Homo sapiens
atgcccggccaacgcatattttctttggcccacattttaggtgtttattaataagtgttggtcgacgcccaaaggagaaatctcagaggtcatggttgttatactatttttaaaggtctcccacaggatgcttaaggaacctatagcagtggattctgcctttagtgaaagtggaatacagctcatcatccttgtctcaataataaccccatttcctcattggtgaaatgggaacaataataataaaagtggatttcgtctcaaagtacatccgacggtccggtcttccactgtttttgatgactcaccttctgttgatcccttgcctacttcaccggtacattaggagatttaattaaagtgtgtagaggatctaagctcttcagagaaacacacagcattattatggcagataacacttctgatcttccataatctcttgaaggtaatgaaaccagcaatatagaaagctgagggtttaatata

SEQ ID NO: 210569 - DNA, 383 bp, Homo sapiens
cggcacgagggtgcctgcattttccccgaattgtttaaccctcatgcttcagaattaggctgaggcttgcggggtgggtcatgttgacctgggtgaacagagatccctttaagaagaacttctccatgttccagaggcgcgttcttactgcagatggcgacactgaggcccagagagacatcatgaccagcctcaggtcccacatgcagcctgctgctctgtagcctaaatcagatcactgtcccagctttcaggtcaaggctctggttgtgacacctgggcctggactgcgggtgaaaagttttgatgcaaaaacacagaccgtccattgtcctatgggctaagtggactcccttctgctaaccagagatgcttgtgctggc

SEQ ID NO: 210570 - DNA, 533 bp, Homo sapiens
ttccctcatcaacactggttaagttcagatgctcatatttttcatggaatattatgttgcttccttgcatcccacaggtctagggttgttgagttgcttccctatcttgaaaaaaaacatttttttgagacagggtcttgctctgttacccaggctggagtgcagtcatgcagtcatagctcactgcaactttgaactcctgagctcaaatgatcctcctgcctcggcttcccaagtagctaggacaacaggtgtgggccaccatgtcctgctgattaaaaaattttttttggtagagatggggagtctcactatgttgcccagcctggtcttgaacgcctggcctcaagtgatcctcccacctcagcctccgaaagtgctgttacaggtgcaagccgccactcttggccctgccatcttaatatatgctatttaatttaattaattaatttatttattttgagacggagtttccctcttgttgcccaggctggagtgcaatggcgccatcttggctcaccgcaacatccgcc

SEQ ID NO: 210571 - DNA, 471 bp, Homo sapiens
agtggattaaggagtaaatgagccagaagagacggtcactggccccctctgccagaacgtggtgagataggaagcaacagagagagctccagggagaagtccagggtggggcttaatgaaaaggaaggaagcatgcttgtaagttgcaggaaaagagccttccaaaggggagaggtttatagaaggaatggggggactgatttttttttttttttagtgggggaaacaaagaagggtcgtctggccatacttctgcattttgaacttaatctttaaaaaataaggccgggtgcggtggtttacgcctgtaatcccagaactttgggaggccgagacgggcagatcacgaggtcaggcgatcgagaccatcctggctaacacagtgaaacccggtctctactaaaaatacaaaaaattagccgggcgtggtggcgggcgcctgtagtcccagctactccggaggctgaggca

SEQ ID NO: 210572 - DNA, 459 bp, Homo sapiens
gctagagaccacagcttgcttgcctttatattcttggtgactagcaccgcgctggcacagaaaacacactcaggcatttgatggcaaatgaatccgcatatctaaagataaaccagcatatctttgtcttctacaacctaacccacagcaagtgactctaggcagctcaggtaaaacaccaggagtgacttgcagagatgctctgtttatccctcatggaggcccgctaagagatctgtccattacccagccccccagagttttttcatgacagccactgactctcaggacatgggaggcacctgggatcacagccacagaatggggcactgggcctgtgatgggttcaaaaggaacatcccaggacaccactctagacctcttatttatatactttttaatcaatacaagatgcagaagagttatacaactattaaaagagccatttctggggcaggc

SEQ ID NO: 210573 - DNA, 318 bp, Homo sapiens
  misc_feature (177)..(177): n is a, c, g, or t
  misc_feature (200)..(200): n is a, c, g, or t
  misc_feature (229)..(229): n is a, c, g, or t
  misc_feature (243)..(243): n is a, c, g, or t
  misc_feature (255)..(256): n is a, c, g, or t
  misc_feature (265)..(265): n is a, c, g, or t
  misc_feature (277)..(277): n is a, c, g, or t
ccatatcccctgctcttccagttctgaatggcattagtccagttgggtcaatgaggagcagtttggtgaagtggttaaaggtcggggaaagtgtgcttatattttgaaatttaaggtttgtacaagctgcttgtgaaattctgtctctactaaaaatacaaaaattagctgggcgangtggcaggcgcctgtaatcccanctacttgggaggctgaggtgggagaatcncttgaaaccaggangtggaggttgcnntgagatganattgcaccaccncactcccgctgggcatcaaagcaagactccatctcaaataa

SEQ ID NO: 210574 - DNA, 447 bp, Homo sapiens
aaataaataaataaataaataaataaataaataaaatgttatcaaatagtgtggcatatcacagagaagtcttttgtgaaaggaagagtcagctgatgtgacaaacttcattgttgtcttattttaagaaatggctgctggcatagtggattgtgcctgtaatcctagcactttgggagactgaggcaagaggatcacttgagactaggagttcaagatcagtctgagcaacataacattatcccatctttacaaaaacagatttttgttttaattagctggcatcatggtgcacctatagttctagctactctggaggctgaggcaggaggattgcttgagaaggaagcagtctttctggaggattgctccagaaggtcaaggctgcagtgagctatgattgtgccaccgcactccagcctgggtgacagaaggaggctctatttc

SEQ ID NO: 210575 - DNA, 286 bp, Homo sapiens
catgtcatatggccagagcaggagcaagagcgagaagggggaggtgccacacacttttaaacaacaaggtctcaggagaactcactcactgtcatgaggacagcaccaagaggatggtgctaaaccattcaggagaaatccacccccataatctagtcacctcccaccaggccccacctccaacattggagattacaattcaacatgagatttgggcagagacacagacccaaaccacatcagagggtatgcaagataaagttgaagaaatctcctagaaatcagg

SEQ ID NO: 210576 - DNA, 588 bp, Homo sapiens
tagttgttgcctttaccgtatttattattattattctcatgtaaaagtagatgtctctcctggtgtaattacctggctacttctctctcccacacttgactggaaactcatctttctaatccagtgtagtatctccagctcctgcccccgaggtcaggactcaggaaaagtttgtcacgtgaaggagggagggatgctgtatggcttactcctcacagggaggctgtcagtcagggtcatcattcctgttttgcagatgtagaattcaggttcagaggtgtgaggtgacctactcaaggtcactcatcctgcaaatggcagacacaggtggtggaccaggcctgtctgccttcagatcctgagtctttggcatcactgttcatcatcctgtccactccaaggctgttgttaggaggctctgggctcatttctcttccaatcaatgagaggtctgttgggcagcctgttgctttcttgaaagaagtgtaatgaaaaccagattttttttcaacatgatatctcgttccccacagagactgtcagttctcatatgttccaataaaactgctaaagaaacagccacttaaa

SEQ ID NO: 210577 - DNA, 849 bp, Homo sapiens
cagatggtgaagatacaaggtcatcataggagaaaagaagatagctccactgacatgtataatcccatgtggttctaaccagaatgtataatcatctgttagaggtactgtggtaaatgacagggacttttcacaaaaacaattggctaatagcatgctaaatttgttctccatctcaaatcttgaggagaagaattttcggagtgaagacatcagtaagaagacctgacaaaccaggaatgatttcatttctcctgagaactggggaaaccgacctataagagttaacttttctttgaaagctctgcacagttcaggcatcaattttgatgatgtatctgcctgtaaaagattgtcattattttcaacacatctgtatctcagattggactcctctaaaagcatttggaattggaatttcctaggaatatcttctactaattcttaaaactggaaagccatgcccatgtcatcggttctggggtgaccctaacatttcatctagcagtgattgtcttctaaaacccacctgtcaggctgctatgacccatagttaatgctttctcttcaccaggacattgacaaaagaatggaattggtgaaaaagaaaaaagtgataagaggctaattttatgaaccatattttttgctgtaatcttttgtttaaattttagcatgctttgctttgtgtatactgaatttttgcagcaaaagaattacggaaaagcacagatactctatatgaccagagatgttcttgggaattacaatgtagcaagagataatttctaaaataaaaaccgagcggccagctcaatttcattcttccatttcattgaatttatgtta

SEQ ID NO: 210578 - DNA, 306 bp, Homo sapiens
tatcaagtatttcatatatcatgcacatacatttttaacaaaaagcaggtctcttggtggggtgggaaggggtaaataataaatacaaataaacatgttaataaattattttagaggaactgttttgtatgtttttaaggtgtcacaaaatattttttgatttccatatgcttaaacaagaggtaacttactaagcaacatgttacttgaattatgtacttcaagtgaatgaaatgactacagctagaaagtaaatagtcctactatagtatttgcatgtccataaagaataaacaaaagataact

SEQ ID NO: 210579 - DNA, 617 bp, Homo sapiens
gttggcaaagcgaagggcagtttgactccttaattataaagttggatgtcatttgagaaactctgggaattggaagtagaacaaattcatactttccctataacttttaatttcttgtcatacattcagaaaacaagagatgtaaaattcataaaactgcttgtataaattcagaaaacgggattataaaagcaaagacaaattgtcttacgattctttgttctacttgagagattcaagtgttggagtaataaaaaataccagggactttcttttttttaataggttaatgccacctaatgtgggcttctcagaatgtgatggcaaacttccaaatatgatgtgggagccaaaagagaccaactggttttacaaaatattaagaacacaaaatttcccaactcatatatttgaatattcctaaaaaataataagtcaaaattgtgttggtgggctgggcacagtggctcacaactgtaataccagcactgtgggaggctgaggtgggaggattgcttaaggccaggagttcaagactagcctgggcaacttggtaagacctgatctctacaaaataaaaattttaaatttaaaaaattaaaaaaaaaaaattagcc

SEQ ID NO: 210580 - DNA, 311 bp, Homo sapiens
cacacaatggaatgctactcagcagtaaaaaggagcagatttactgaatcagtttacacagaacaacatgaatgagttttaatgcattatcctacatgaaagaagccataactcagggctacatatcatgtgatttttatatacaggcatgaaatgtgacatttagaggcaaactatagggacagaaaacaaattagtggttcctaagatctgaagtaggagagtgaccacaaaggaacacacggggggactttttgagccgagggaaacgttctatgtcttgactgtggtgatggttacatgactgaatg

SEQ ID NO: 210581 - DNA, 475 bp, Homo sapiens
  misc_feature (311)..(311): n is a, c, g, or t
agatgaccggtccccctaatggaatccctcttgggctcaagtgatcctcctgcctcagcctttagagtagctgagactacaggtatgcaccatggcacttagctagaagatgatggattctatacatgagccttaaactatttccagattttgtttctatgtgagaatgaaataatcttcatttttgttacagctactgttactttgagcttactggtatatacatacagctgaacctaacactaactgatacataagcttgtgcttccctgatttcttccacccacacacacacacacagagacacactntcctttttttttttttttgggcgcaaaattttgcgctctaaaaaaaggttttaataaaagggggcccttaaagtttttacttatttccccattttaaccggggcactgactctaaaattcctcgggaaggattccttaaagggtttcctcttttaaaccaattg

SEQ ID NO: 210582 - DNA, 717 bp, Homo sapiens
  misc_feature (660)..(660): n is a, c, g, or t
  misc_feature (700)..(700): n is a, c, g, or t
cacgcatgtgccgctcccccaaggtcttcccgctgagcctctgcagcacccagccagatgggaacgtggtcatcgcctgcctggtccagggcttcttcccccaggagccactcagtgtgacctggagcgaaagcggacagggcgtgaccgccagaaacttcccacccagccaggatgcctccggggacctgtacaccacgagcagccagctgaccctgccggccacacagtgcctagccggcaagtccgtgacatgccacgtgaagcactacacgaatcccagccaggatgtgactgtgccctgcccagttccctcaactccacctaccccatctccctcaactccacctacccaacgcatgtgccgctcccaacgcatgtgccgctcccaacgcatgtgccgctccctaaaaacaaagtttgtttgttggatgttcagcctcatacagtgaagcatttaaggacactagaatttaagccctatgtgatatttataaagcctccatcaatagagcgtttgagagaaacaagaaaaaatgcaaagattatttcaagcagagatgaccaaggtgctgcaaaacccttcacaaaagaaagaatttttaagaaaatggattaaaatctggcacagaataatgggaaaggtcaatatgggcattntttttgaccaaaaattataattaaaatggatggacctccnctggggggcatttcaat

SEQ ID NO: 210583 - DNA, 407 bp, Homo sapiens
taaaataaaataaataaataaattattttgtagggatggggtctctctttctcagtctggtcctgaactcctgtgcccaagcaaccctcctttgttggcctcctgaagtgctggaattataagtgtgagccactgcgcccagcctgtttatttatttatgtatttttttaaaaaaatatgtagatgggttctcactgtgttgcccaggcaggtctcaaactcctggcttcaagcagtcctcctgccttggcctcgcaaagtgttaggattacaggtgtgagccaccatgcccaccccttctttttcttttcaggctccttgcttccattctgctgacttctaatggttgtctgctgcttgtaacaacacaaagtttaatggattaaagtgacgaatatttattatcc

SEQ ID NO: 210584 - DNA, 293 bp, Homo sapiens
gcctgggggagcaataaccattcatggtgttgtttgcctggtcgccccaagggcagatacttcccaaatcccttaaagtcgcagatccatttgtctgcttatgcagaaccccggggtgtgaaatggataaaggtgcaggatccttgttgaatcgggtgagtggcatagaagccctcctgcttatgtggctccccacaggcacccactttgcagaatctcagcacccggttggagaaccactgttgtgatgctagaacatggatctttgggtcagccagaagtgaagacctcag

SEQ ID NO: 210585 - DNA, 108 bp, Homo sapiens
gttggtctcaccactatctgtaaccacaaaatggatcataaaaatttcaataacataagtagaatggctggattagtagtctctaaagtgaagaagtaacattgaaga

SEQ ID NO: 210586 - DNA, 689 bp, Homo sapiens
aatcctaactcttatgaaccaagggatactgacaatgctgggccccaaataactattgttttctcaaaggctttaagaccatgtgttatactgtgatttaatcaggttctttcctaggagtctgcctgagtcacttggtctgtgtgtctctccctccctgtcctaagggggcttttcatgtgtgactgtgttctgcctgcctgtctggtaagaatccagcctcctgttacttgcccaggatgctgactgtgggccctctcccgcagtggaacatttggcatcaggtaccaggaacagagtcagtatgctgaaatgtttgcatgaatgtggattttcagaaagctttcttatcagcagggcacacctgtctgttcgtgatctttgcccttctccctttattggcatcacttggacgatacctttaattgccctgctgggcttgatgttgagctgcttttctccatgtgtgtcgtgttttgtgctttcttgcggcaggagccttttgctttgtttatctgatgcttcccttttttggttttccccgggctttccagctcttggagcacccttttgtcagcagatgtacttttgtttccagtttttaaattctaattacagtgtaactcaactaaaatcatggaactggggaacataaaacaaatcattagggtaatggaggcatagaagaa

SEQ ID NO: 210587 - DNA, 476 bp, Homo sapiens
ctcttgaacatcagattccaggttctgcagcctttggactcttggacttagaccagtggtttgccgggggatctcagatcttcagccacatactgaagtctgcactgttggcttccctacttttgaggctttggaactctgactgagcaactactggcttcgttgctcctcagcttgcaggtggcctatcgtgggacttcaccttgtgatcactttctgtcacccaggctggagtacagtggcacgatcacagctcactgcaccctcaacttcccaggctcaggtgattctcctgcatcagcctcccgagtagctgggactacaggtgtggacacattgagaagtcactatctatgaactaggaagcaggatctcaccagacatcgaatctgctgatgccttcatcttggacttctctctcagcctccagaactgtgagaaataaagtcctgttgtttataagccactcagtctat

SEQ ID NO: 210588 - DNA, 387 bp, Homo sapiens
aatgtgtaatggggtgctactgaccatctactcccaactccaagttgagtgacatcacattagtaacttgaaattggtcagggtgcaaagatttacaccaaaaaagtggctacacatcagggtgtcctttccttggagagctggctattagctttatcagcatatccctggccttaccttgtgggttagggttggtgtaagtttgtaggaataaaacaccagtcacttggaagctaccagcccagctttctttaattgaatcctaaccctttccaaatagccctgccttggggcgtttttgctgtgcctaaaaaaaaagggtggtggctgagtttagtagcaggggaagatgagtcacatagtcagctagttactttttaacctcat

SEQ ID NO: 210589 - DNA, 273 bp, Homo sapiens
ccgtggagggagtgagagaggaagggggtggcaggacaccagggaggcaatgcaattgaacagaatggtcagtcttctttttactgtcttgatgcagttagtgtttagatcattagggccactcagtgaaggtgcttgaaattgatggccctggacacccctatgtaagaagtccttgggccacaaacagactgtagatctcatgaaggcaccaggagacagaagcctggttatcacaggcaggtccgacagctagggttgtggcttcttgcc

SEQ ID NO: 210590 - DNA, 422 bp, Homo sapiens
agcaaaggcccagtctctcaatgcaccctcttactgatggcacctgtcttgttatgaacaggtaacagtgcatccacactggtctggaccagctctcccttctccctgcctggtgaaccctcagggtccaactgtcactactgtctccactatgtcttcctgatgttccacccccggtcacatcctcaatacatctgtgactttctttttaaaacggcgtctcgctttgttgcccaggctggagagcagtggtgtgatcttggctcactgcaacctccacctcatgggttcaagcgattctcctgcctcagcctcccaagcggctgcgactacaggcatgtgcccccatgcccggctaatttttgtatttttagtagagagggggtttcactatgttggccaggctggtctgaaactcccaa

SEQ ID NO: 210591 - DNA, 416 bp, Homo sapiens
tgacatgtagaatctaaaatagtcaaattcacagaagcagacagtagaatgatggttttcagaagatgaggagagagggacgtagggagatgctgttccacaagtataaggttttggtatataacatgaatcagttctgcagtctgggtacaactgtgcacaccacagcagttgtgcctagagttaacaagaccgtattatacatgtaacactttgtcaagagggtggctctcatggtaagcgtttgaccgtgataaaataaaaatttcaacacgtatgtttattgcaatactatttataacagcaaagacttggaaccaacccaaatgtccatcaatgataagactggataaagaaaatgtggtatgtagacactatggaatactatgcagccataaaaaaggatgagttcatct

SEQ ID NO: 210592 - DNA, 781 bp, Homo sapiens
caaaaacacagaaagataggcaatagaagaatgagctatgatgtacccatcattttgattcagttatcatcacgtcatggccaatcttgttttagctatacttccatctgcttctcattctcttgttacttttgacctgtaaattttgaagaacagatatcccctacagtagccctgtgaggaagatgttatctctacttttgagatgagaaaattgaatgttaggataaatttcttttctaaaatcacccagcttgtaagtggcagaataagaattttaaccaggtctgttaagttcttcctctgcagtcagttgtttttccttctgtttaggtcagattataaccaaggagggtggtgtattctgacagcagctaaatgttttactggagtattaccaattcagtacctacagacacttgttaattgttttgggttagggttagcttagagttagatttttttcctttcctctgcattatttttgaccatttaaaaaatcatattgaaggccgggtgcgctggttcatgcctgtaatcccagcactttgggaggctgaggcagacagatcacctgaggtgaggagttccagaccagcctagccaacatggcgaaaccctgccttactaaaaatacaaaacaattagccgggcgtggtggcaggcgcctgtagtcccagctactccgaggctgaggcaggagaatcacttgaattcgggaaggggaggttgcagttcactccagcctgggcgacagaccgagactctgtctcaaaaaaaa

SEQ ID NO: 210593 - DNA, 509 bp, Homo sapiens
tccagtctctttctgggggaattgagcccacttctcatttcatttaattagatgaaatagaactcaaagtacaatttactgttgtttaacaatgccacaaagacatggttgggagctatttcttgatttgtgtaaaatgctgtttttgtgtgctcataatggttccaaaaattgggtgctggccaaagagagatactgttacagaagccagcaagaagacctctgttcattcacacccccggggatatcaggaattgactccagtgtgtgcaaatccagtttgcctatcttctcaagttagggttaattggataattctggagaagtacacattgaaaactagaactaagccaagcaattaaatacgtttcctgcctattacatgccttggtactgtgcaaaagagctcacagggcatctgaggaaagattactaacacacacctcaaatgactgtgtctgatttcctagaaggactcagaaagggagtgatcactgtggattggactg

SEQ ID NO: 210594 - DNA, 621 bp, Homo sapiens
actattccataactgatagttagtattattaacaatatgattagtaatataatcatattataactaatcatattactaatcatattagtcatattattactaatcatattactaatcatattagtcatattattattactaatcatattgttataaaagacaggatccactgccccaaccatcaacatcaccacccaaatagatgtcttttcttcatgcagaaattcactcaaaacctaacatggatatctagacacagccacacagttttattaaaagctttgtaagcctccaaaatacaggttctcaactccagttgcacattagaatctcctgggaaacttttttttgagacggagctttgctctttttgcccagggtggagtgcagtggcgcgatctcagctcaccacaacctccgcctcccagattcaagcgattctcctacctcagcctcccgagtagctgggattacaggcatgtgccaccactcctagctaattttttgtatttttagtagagatggggtttgtccatggtgatcaggctggtcttgaactcctgacctcaggtgatccgcccacctcagtctcccaaagtgctgggattacaggcgtgagcc

SEQ ID NO: 210595 - DNA, 400 bp, Homo sapiens
  misc_feature (248)..(250): n is a, c, g, or t
  misc_feature (253)..(253): n is a, c, g, or t
  misc_feature (261)..(261): n is a, c, g, or t
  misc_feature (267)..(267): n is a, c, g, or t
  misc_feature (297)..(297): n is a, c, g, or t
  misc_feature (319)..(319): n is a, c, g, or t
  misc_feature (334)..(334): n is a, c, g, or t
  misc_feature (361)..(361): n is a, c, g, or t
cacgcagcggcggcggcgacgcgagcggcagcagcccgggccccgcggtacgccagcgcggcacggccagcaggagcgccaggcgcgagcccgcggccactcgctgcctccggggcactgcgagaggctttgcgctccccagcgcggcgttcggactcggggccagcgcggccacggccgcgacaaaggacagcagacgccgggactcgggggctgtgcccagggaccggcccgggggatcctcccgnnnagngttccctncacgcntcccctccccgggcggccggagcgcgagcnggagcgggccccgtcatatganagcggcgacgccgangccggcgagcgcgcgttctgcctgctncgctgcgccacggccgccggcgcctggggtggcccttgc

SEQ ID NO: 210596 - DNA, 888 bp, Homo sapiens
aaacatacagatggcacagtaagtagggtctatctgtatattatacactgaaattaagtctgcttgctttctgaataaacactccaaggtcgaaaatatacctgtctgcagttgtctacagtgctagaagtttaatagatttgcagttttctagaagcaagtaaaataacagagccttgagtcattcccaaggacattttaaaataactactttttctttcagaaatcaaagggggttatcttactttgtgttccctatctaatcctcttaatcctcaaaacttgttgacaaattcttcctcggactcctgcctcactcatttacaccaaccaccctactatctataaacctagccatggccatccccttatgagcgggcgcagtgattatagactttcgctctaagattaaaaatgccctagcccacttcttaccacaaggcacacctacaccccttatccccatactagttattaccgaaaccagacgagctacctaagaacagctaaaagagcacacccgtctatgtagcaaaatagtgggaagatttataggtagaggcgacaaacctatcgagcctggtgatagctggttgtccaagatagaatcttagttcaactttaaatttgccctacagaaccttctaaatccccttgtaaatttaactgttagtccaaagaggaacagctctttggacactaggaaaaaaccttgtaaagagagtaaaaaatttaatacccatagtaggcctaaaagcagccaccaattaagaaagcgttcaagctcaacacccatcgtctaaaaaatcccaaacatacaactgagctccttacactcaattggaccaatctattaccttatagaagaactaatgttagtataagtaa

SEQ ID NO: 210597 - DNA, 372 bp, Homo sapiens
tatactgctgtgcggctatactgttaggagcatttataggtagaggcgacaaacctatcgagcctggtgatagctggttgtccaagatagaatcttagttcaactttaaatttgccctacagaaccttctaaatccccttgtaaatttaactgttagtccaaagaggaacagctctttggacactaggaaaaaaccttgtaaagagagtaaaaaatttaatacccatagtaggcctaaaagcagccaccaattaagaaagcgttcaagctcaacacccatcgtctaaaaaatcccaaacatacaactgagctccttacactcaattggaccaatctattaccttatagaagaactaatgttagtataagtaa

SEQ ID NO: 210598 - DNA, 598 bp, Homo sapiens
ctctctctttctgtctgtctctctctttctttccttctttccttcctttcttctttctttccttcctttcctttctttcttttttttttcttttttgagatggagtctcgctctgttacccaggccggagtgcaatggcacaatctcggctcactgcaacctccacctcctgggttcaagtgattctcctgcttcagcctcccaagcagatggggctataggcatgcaccatcatgcccagctaatttttgtatttttagcagagatggggcttcactatgccggccaggcgggtctcaaactcccgaccttgcgatccgcccccctcagccccccaaagtgctgggattacaggcgtgagccactatgccggccgcaaaggattctttaacacaaaagggcaggactcatgagactgacctgaccattacatggtgcagtgagagttcaatttaagcctccttatgcttctttgactaatttagggccatgcagtgtcaaacgcaatgagggcacaaaagcagcttctccctggctatcttcagaaggaatcttagattgcccttgaacaccatcaacaatctgctatttggagggc

SEQ ID NO: 210599 - DNA, 488 bp, Homo sapiens
acttataatcgaccaagatttcttccatacatgaatagataaacagtagcacatcaagaaagtagaatacaatttagcattacaaagaaattcaatttcaagcaatgaaagtaaatatagaaaacttaatgcaattaccaagactcccaaaaatctcaatctgaacaagctgcttacggtttgaatccaactatatgatatctatatgcaaaaggcaaaactatgaagacagtaaaaatagcagtgtttgccagggtttgggtagggaggtatgaattgatggagcagaggacttttagagcaaggcaatgaaactactctgaatgacgctataattgttgatacaagtaattaaacatttgtccaaatccatgggatgtacagaatcaagagtgaagcctaatgtaaactatggactttgggcaataattatgtgtcaatgtaagttcattgattgtaacaaatacatcactcaggtggggaatatt

SEQ ID NO: 210600 - DNA, 348 bp, Homo sapiens
cgcagtcttctcccatcagcgaactcccatatgttccacaggaagagtgttttaaaactcagttccttgcccagcccagtgagttagtaccacccacttcctggactcagttcaaattcctcaacacactggagtcagaaaagaaagtcaatgaagggttccttctgcctgagctctggcttggaggcatgtctcatcctcagtaacctttcaagtgtctcataaagcagaaaaaaaaaaaaagcaaggtttcttaaagagggtatcctgactgggtgtggtggctcatctcatccactcccatggcttgaaatacactgatgggagcaagatggggatcctctgtac

SEQ ID NO: 210601 - DNA, 500 bp, Homo sapiens
tgattctgtttctgtggctgctggataattccatctggacatccagctatcatctcaaatgcagcatgtctagaattgaacttatcctaccccctgatgactggccttcctcttggtgaccaagtcattcatttctcagttcattcagtctatgtctgaacctctttaactcttttatctcctggataacccatatttaattaccttcaagcaatgtatatcctttcattataatatcctttattctattccccttctttccatttcacaaataccaaaaagtacagatttttagtacatctaagctagttgaatatcagccaaattggtcttcacgctttgattctttcccttctctggtccctcctatatacctctgccagattaatctgcattaaagactctttcatcagccgggtgcggcggctcacgcctgtaatcccactactcgggaggctgaggcaggagaattgcttgaacccaggagacggaggttgttg

SEQ ID NO: 210602 - DNA, 302 bp, Homo sapiens
atttgcagtgaaggggacagtgctgctagcatctggcacctggggagagaccaaggatgctgataagcatttcacaatgcacagggcagcccccattcccaggccccagtaatgggttatccagctggaaagatcaacagtgctgaggctgaaaaatcccgccctatctccttgctaccacttagcattgtcaggcatctaactttattcatcctaataggtatgaaatgttatcgtgttttgctttgtgcttctttaatgactaaatatggtgaacatctttttttgggacttactggcca

SEQ ID NO: 210603 - DNA, 462 bp, Homo sapiens
tgcagaaacacacccacacctacacagtcctgtcactctcagctaaagtgaaggaagcaatttaagatctatttaaggtcttcacatgaatggcaaataagcagagaagagtaaaattaaggatacaaggtatgattcatattcttgttaggactataggtatcagagacgacgctgggcaacattttggcagaagtgcagaaagaatgtagaagtgtcataaaagggagtagactagatgacttataagctcccttctccaattctaagtaaacatgtttcattctaatgaatggctgcttttacagcaagattcagaatataaatttaactcattaggagtttaggattagtttgatgaatcagtgctacacaaagaaagatccagttataaatgttctctagataaaaagccttgactgtttctgagaaacttggaacaatgtttcagttaagagtatg

SEQ ID NO: 210604 - DNA, 444 bp, Homo sapiens
catagtgagaaggggggtggaagaaggggtcagctgctcagtccggagtaggcttgcaagactgcattcctcaaacaacaggctctagatgtcgcagtagataaccttggtgacagggagtgatcgcctccagcaaacctgttggcaggagcagtcatgagtttgcccacatcctgcattcatgataaacagtttgctgtttgatcacacagcctccagtggaatgctgagttggtcacgtcccacgggccttcggctccctgcacccactagccaacatctcttgctccctccctcccactcatatatccttcccatcctctagtatctatcgttcttttctctacctccatgagatccacttttttttttttttagctgacatacatcagtgagaacatgcagaatttgtctttctgtgtctgcctttttcactgaacataa

SEQ ID NO: 210605 - DNA, 585 bp, Homo sapiens
tgagttggggttgctcagggtgaaatgagcccttacccctaaagaaaaatgacaaggacactttagtcaaattgttaatcctactgaaggaaagcatccctggagagaacactggcttccaaagcttttatctgttacctgtaaatgagttatgtaacacatggaccattagctgcaaatgttttcacttttgcattttacaataatttcagaccttaaacacatcattctactgaagacttaatggattgaagaatatctggtattgatatctttgatatacagctttgggagggagaggggccttttgcattgccactgctattgattggtaaatggtatttaaaatttgggtgagaattgggacaggttgggagaattttcacaaagggtgggagaagtgaacataagctctttaattaaatggaatattgagacaattttgtaagaagttactggtgtataatgctgacttagtttcaaaaatttagcctaactttttgtaagttaattaccaaaatgccaacagacagaaaccaagttgtactagttatctcaagaatttaaaacctttccctactattc

SEQ ID NO: 210606 - DNA, 393 bp, Homo sapiens
tgcgtaacaccatgtgtgatggggcagattcgtttaccttcttttcccacatcaccctttaggctgggagctagttcttgtttcctgttgcaaatcaccattctcacaacactaaaaattactacacttaggactacttcattgactgacaatatcccactgtcccagcagcaagagggactgccgactctgtccctttaaaatgaagagaaggactcacaaaggagctcccatcctccactagcaaggggtcccacccaccacagaggcaagctgtggtcaaggcaggggcttcttggggtctcatggagaaaaggttcagaaatcaaagccccaccccaggttggtcccaagccagtcactggatgaacacactccctggtacctgtggaa

SEQ ID NO: 210607 - DNA, 318 bp, Homo sapiens
agtcctgaactgtcagtgctttctagggcgtgtgagcagacataggttatatgttgagacacaggctctactgatggacagttacctgaattgtaaatcctggttcttgtcacttaccagccatcagctcttaagtgactttgtctctcagtctcagtcactgctatcagtgatgacagcacagaatataggctagtggatgaaagtgtgggctctggcccttacgagctgtgtgactttaggcaaatcatttaccccgtctgtggtgttcatctgtaaaatggaaacaataataagacctaccttgtgggtttgttg

SEQ ID NO: 210608 - DNA, 391 bp, Homo sapiens
cgcctggccagggtcagtcttcttgatgataaatgtaaaactatttaaataatttggatatttagtagtctaagaaatttaatgggatgaattttccctagattgttaattatctctttagaaatacatactgcatctactttgttctggcttactctcttaatagctatgagaccttgggtatgttactacacttttctgtgtttcatttttgtaacctttaaaagggaagtgtagtaataatagtacataattcctatgtagttgtgaggattgaatgagataattcataaagaacttactacagtgcttggcaaatattaattacttaacaaatggtagctgttattaatgttatctttctagagtagaagtatggaatttattgtga

SEQ ID NO: 210609 - DNA, 1401 bp, Homo sapiens
  misc_feature (1344)..(1344): n is a, c, g, or t
  misc_feature (1390)..(1390): n is a, c, g, or t
  misc_feature (1399)..(1400): n is a, c, g, or t
tgcaaccaccattacggcgtgatccactccttttcctctaagaatgctgaacggtaccactctagaggcagtcctaacccagcgcagccgtttctgcgcctgatctcagcggacgcagtgcgggacttctccctttatttctgcagagctgagggcaggcggcgcaacaaatctcagccatgctctttcacgggatctccggaggccacatccaaggcatcatggaggagatggagcgcagatccaagactgaggcccgtctggccaaaggcgcccagctcaacggccgcgacgcgggcatgcccccgctcagcccggagaagcccgccctgtgcgccggctgcgggggcaagatctcggacaggtactatctgctggctgtggacaaacagtggcatctgagatgcctgaagtgctgtgaatgtaagctggccctcgagtccgagctcacctgctttgccaaggacggtagcatttactgcaaggaggattactacagaaggttctctgtgcagagatgtgcccgctgccaccttggcatttccgcctcggagatggtcatgcgcgcccgagactctgtctaccacctgagctgcttcacctgctccacttgcaacaagactctgaccacgggcgaccatttcggcatgaaggacagcctggtgtactgccgcgcccacttcgagaccctcttgcaaggagagtatccaccgcagctgagctacacggagctggcggccaagagcggcggcctggccctgccttacttcaacggtacgggcaccgtgcagaaagggcggccccggaagcggaagagcccagcgctgggagtggacatcgtcaattacaactcaggttgtaatgagaatgaggcagaccacttggaccgggaccagcagccttatccaccctcgcagaagaccaagcgcatgcgaacctctttcaagcatcaccagctccggaccatgaaatcctactttgccatcaaccacaacccggatgccaaggacctcaagcagcttgcccagaaaacaggtctgaccaaaagagttttgcagggagaacaaatcttggggcattacagccaaacatcccgacgtttgaaaattccctaaagtattaaaagaaggggaaaagtttgatcggaaatccactgcagtgaagacaaagacactattaggttatgataatcatacattaaaaaatttattaagccaaaaaaaaagagagagagagagacttaaatgtcatttactgaatgttaacgaaacttgtgttctttatggtgtctaacacaactgaaggcctaaaattatgtggtttaaacaaaattagataaaccangtacaaaaccagagcaacctggcagtaatatgcccaccccatattngaaaaaaanna

SEQ ID NO: 210610 - DNA, 1016 bp, Homo sapiens
acgcagggactggcccgcacctctggccgccgcctcccgccgagaaccgagttctagttggggaaacgtctgacatctggacatcaaggtaagaccctgatggagatattttagtcggagcagttttctgccctcggagtgcgcccggacgcccgggagtttcagggacttcttgggagcctaccggaggaaggcccggctttgctccaagccgcgtccctacctgaggtctccacgggaggagcggtttggacgcgccccaccggatgggaggaggtgcttggggaagccgggccgtaccgccggtctgactcccggcttttctctgccagtgcaaccaccattacggcgtgatccactccttttcctctaagaatgctgaacggtaccactctagaggcaggtgagttatgtgccaggttccttctgatgttctctgccccttgggccagtgcgtataccatgtgagtgtgtgtgcgtgtgtgtgcgccttcgttgggtggaacgaagaggagtgtgtgtttgtcttaaaaattaaaccgcgcttcgtaggctcaaaaatacacattctctttcagagtctcctgataggactcctgaaaccctccttttgcctttctctttgactgtctttgactttcctcaggatcagtgtccggggcgccaggcagaggtcctggttccactgatcctccagtagtcagtggctccagggacgcgctcctgaccctccggggagctgctgggggtgtctctttcttggaagggatggaaggggggccgagaagacactgtttctcacacgtgtaggggttaactggaaactggcttcacccacatttttttgttgttgttcagtcctaacccagcgcagccgtttctgcgcctgatctcagcggacgcagtgcgggacttctccctttatttctgcagagctgagggcaggcggcgcaacaaatctcaggtaaaagagcatcagatttcagaagagctgtattctagacttggcgcaggcc

SEQ ID NO: 210611 - DNA, 1207 bp, Homo sapiens
tgcaaccaccattacggcgtgatccactccttttcctctaagaatgctgaacggtaccactctagaggcagccatgctctttcacgggatctccggaggccacatccaaggcatcatggaggagatggagcgcagatccaagactgaggcccgtctggccaaaggcgcccagctcaacggccgcgacgcgggcatgcccccgctcagcccggagaagcccgccctgtgcgccggctgcgggggcaagatctcggacaggtactatctgctggctgtggacaaacagtggcatctgagatgcctgaagtgctgtgaatgtaagctggccctcgagtccgagctcacctgctttgccaaggacggtagcatttactgcaaggaggattactacagaaggttctctgtgcagagatgtgcccgctgccaccttggcatttccgcctcggagatggtcatgcgcgcccgagactctgtctaccacctgagctgcttcacctgctccacttgcaacaagactctgaccacgggcgaccatttcggcatgaaggacagcctggtgtactgccgcgcccacttcgagaccctcttgcaaggagagtatccaccgcagctgagctacacggagctggcggccaagagcggcggcctggccctgccttacttcaacggtacgggcaccgtgcagaaagggcggccccggaagcggaagagcccagcgctgggagtggacatcgtcaattacaactcaggttgtaatgagaatgaggcagaccacttggaccgggaccagcagccttatccaccctcgcagaagaccaagcgcatgcgaacctctttcaagcatcaccagctccggaccatgaaatcctactttgccatcaaccacaacccggatgccaaggacctcaagcagcttgcccagaaaacaggtctgaccaaaagagttttgcaggtttggttccaaaacgcacgagccaaattcagaaggaaccttttgcggcaggagaatgggggtgttgataaagctgacggcacgtcgcttccggccccgccctcagcagacagcggagctctcactccacccggcactgcgaccactttaacagacctgaccaatcccactatcactgtagtgacatccgtgacctctaacatggacagccacgaatccggaagcccctcacaaactaccttaacaaaccttttc

SEQ ID NO: 210612 - DNA, 1695 bp, Homo sapiens
  misc_feature (1638)..(1638): n is a, c, g, or t
  misc_feature (1684)..(1684): n is a, c, g, or t
  misc_feature (1693)..(1694): n is a, c, g, or t
aagcagccagggaacgctgaaaatagcacgtctttttctttctttgtgttcaaaactattttctttcttcaccagattttgttttcctccccccgctgcagttgtttcccattagtaactcgatctctcagagcagtaagattcgccttctacgcctctttttccctccgcccgaattgtttgttttctgcacatctccttcagggagccgctgaggcttccccccaactcttcccagttctttttgcttcccctcggccccccaagcagaccgatttccactccatctgtttcttctcctcctttctctccctctttccctccatcctcgagcgtctctgcgctcctacagggcagccctctctggtcccttgcctccttcactcggatgagctgaaagccccgggcgtgtgtatatggaaatagtggggtgccgagcagaagacaactcgtgtcctttccgccccccagccatgctctttcacgggatctccggaggccacatccaaggcatcatggaggagatggagcgcagatccaagactgaggcccgtctggccaaaggcgcccagctcaacggccgcgacgcgggcatgcccccgctcagcccggagaagcccgccctgtgcgccggctgcgggggcaagatctcggacaggtactatctgctggctgtggacaaacagtggcatctgagatgcctgaagtgctgtgaatgtaagctggccctcgagtccgagctcacctgctttgccaaggacggtagcatttactgcaaggaggattactacagaaggttctctgtgcagagatgtgcccgctgccaccttggcatttccgcctcggagatggtcatgcgcgcccgagactctgtctaccacctgagctgcttcacctgctccacttgcaacaagactctgaccacgggcgaccatttcggcatgaaggacagcctggtgtactgccgcgcccacttcgagaccctcttgcaaggagagtatccaccgcagctgagctacacggagctggcggccaagagcggcggcctggccctgccttacttcaacggtacgggcaccgtgcagaaagggcggccccggaagcggaagagcccagcgctgggagtggacatcgtcaattacaactcaggttgtaatgagaatgaggcagaccacttggaccgggaccagcagccttatccaccctcgcagaagaccaagcgcatgcgaacctctttcaagcatcaccagctccggaccatgaaatcctactttgccatcaaccacaacccggatgccaaggacctcaagcagcttgcccagaaaacaggtctgaccaaaagagttttgcagggagaacaaatcttggggcattacagccaaacatcccgacgtttgaaaattccctaaagtattaaaagaaggggaaaagtttgatcggaaatccactgcagtgaagacaaagacactattaggttatgataatcatacattaaaaaatttattaagccaaaaaaaaagagagagagagagacttaaatgtcatttactgaatgttaacgaaacttgtgttctttatggtgtctaacacaactgaaggcctaaaattatgtggtttaaacaaaattagataaaccangtacaaaaccagagcaacctggcagtaatatgcccaccccatattngaaaaaaanna

SEQ ID NO: 210613 - DNA, 540 bp, Homo sapiens
ttgtaaggatgaccatggttccatccttccctctcgtggcacccaccatctgctaagaaacatgactgattcctggttttctgatccgtttgcaattttaacttgagttttttttttttcaaattgtcctattcgcaactctaaatatgtcaagattagtcagaaaaaatgcaatccttcctttttaaaatgttatcttaaagggatatattatctttggtaaaatgaggttaatttcagatcactcacacacaaacacacaggcacatactactttagatctgtgccacatcaataatgcagtagcccggattattgaccagctgaaacaaggaaagtcagactattctgtaggtctatagatgcgggacattgcatttaaattgcctgacattaaaagccgaaaaaggaaaggtaggaacttttgccatcagaaaatttgtgagattaaaataaataaataaataaataaataaagaagaaaaaaaaagaaaaagaaaacacaaaaaagatctaaaacaaaagataaccaaaaaaaaa

SEQ ID NO: 210614 - DNA, 445 bp, Homo sapiens
caatcccctctatactcctagcccctctacacccctggcacatggtaatggctgcataagtatccaaacaaagcatctatacattactactctgagctcttggtcacactcaggcactttgcatcacaaaaagacgttattctcttcccagttctcctagttctttctcaatcctcctgagcaggtcaaggaaaaggctcaatgtagtgctaggttaccttcaacacctctccatctcttgctaatttccctttttaaccaaaagagagtatgcctcatgttgtgaacaggcaacagtgctggctggaatttaataactgtttggggtttatttatggttaccttccatttacctagtgacgctgtttttccattattatagtgacacaaagtctccttttcaaatacatttgttttacaagtgagtcaactgcaggggaaaata

SEQ ID NO: 210615 - DNA, 860 bp, Homo sapiens
ggagagagggattagagggattgtccggcgtgggtctagggtcgttgaggcctaaagttaagcctttgtggggaggacggattgggggctgggtcactttaagaaaaagattctaaaattacgaaggcagaattccagggagtctcccgggcctggtcctgaagcttgagaccccggatatatacgctccagggggctgcggtgcgctcttcgggtccccgagccctgtgtttaggaacacgcggggacgtccaaacacccgctcctctcccgccgggcgggctcctttgtcttctgggctttcgtcgcgagatggaacgctgggtcagtgcatcccagcaaaacacgttaggagtaaacgaaggcctttccggggacctgggtagtcggttgtaatggcgtttgcctgggatgcagcacctttggtgggccattagatgacgtgtcgcttctccaggggcttgctaggcactagcagaaatgctcccctgtgcttactcggtgttatggaagattgcttgcacaatgctattcgtacgaaaggatattattaaaagtgatttatgggcgggcgcggtggctcacgcctgtaatcccagcactttaggaggccgaggctggcggatcgcctgaagtaagcagttcgagaccagcctggccaacatggtgaaaccctgtctctactaaaaatacaaaaattagccgggcgtggtggcatgcgcctgtaatcccagctactcgggaggctaaagcaggagaatcgcttgaacccgggaggcaaatgttgcagtgagccgagatcgcgccactgcactccagcctgggcgacagagtcagactccctctcaaaaaaaaaaaaa

SEQ ID NO: 210616 - DNA, 504 bp, Homo sapiens
cccctcatgttctctaccctcaagggtcgccgaatcctcctgaaatccccggtggggttcgggctgggctcagctttcttctctgcctatccgcggtctcggggagccaggcgcggtgtctgcgctgcgccaaggagagcttccagctgaactcagaaacacctggggcttggggtttcgggcaggagacctctgctcctagacttgggggtcatttacacactctcatccccaaacccccctcccgcacggggattcagacgaaaatcgcgaagaggaataataaaacaaaatgcaaagtcctcagggagtcggcagcggagtcggtcccaggacatggctattgctttgcagctctcactgggaccttgggacggtcagcctccctctcctttccacagccaattccatgcgcagagagcgtcctaacccttacaactcgtctgtgctacacacccaccgcccaatggctctgaaactttttgcccatactcttagattgag

SEQ ID NO: 210617 - DNA, 413 bp, Homo sapiens
attgggtttaagcttggaggataaatggaaacagccattcgtcttcaaatgaaccaaaataatcctgcaagataaaaatacagtattttaacagtattaatattttaccaaaagaacttgaaggtgaaaatcccaaaagccacgacaattccatgattgtgaaaatattaagtatgcaaaattttttgtttgtttgtttgtttttttcttttgagacagagcctgggcaacaagagtgaaactcctttgaaaaaaaaatgcaaaaattagctggacatggtggtgcgtgcctgtggtcccagctactcgggaggctgaggcaggagaatcgcttgaacccggaaggcggatgttgcagtgggccgagattgcgccactgcacttcagcctggcgagagagtgagactccatct

SEQ ID NO: 210618 - DNA, 293 bp, Homo sapiens
aaacacataaccatcctcaagtctctgcctcccaatgcaacaaaggattggtatattcatttactccacaaatattcagagtttgagagaaattgtaaaataaattctttgaaagatttaccagttcaagaaatgcatatcatgtatatgaatgacaattaatatttattaagtgccactattatcagaatttatctcatttctctcgccccctctaaataaattagtctgtgaagctgagacaggaaaagagctgccccagggtggaaatcctcaaatggagccagggcact

SEQ ID NO: 210619 - DNA, 211 bp, Homo sapiens
actccagaggccatagtagttcaatactccatcctggacaagttacacggcagagtaatcagctgtttccttatgtcagataaacttactggaaaagtcagtttatagaactatagacttctataggtacagaagaatccctaagaagggagagggtgctttgtgcgtattcagagccacacatttctccggagaagagatggttagagca

SEQ ID NO: 210620 - DNA, 113 bp, Homo sapiens
gtgggtcccaagtttctgaaagaagagggctaaggctcagagaaggctctggcttctgagggggagaagccatgtgtgaacatggcactaatctgagctgatgggaaggcaca

SEQ ID NO: 210621 - DNA, 929 bp, Homo sapiens
gggaggccaactcaggaggattgctttaggcgaggagttgaagaccagcctgggcaacaaaaaacaaaaaaattacccgggcatggtgatgtgtgcctgtagtcccagctacttgagaggctgagatgggaggatcccttgagccctggagttcaaggttgcagtgagccatgatctccccattgcactccagcctggatgccagagcaagacacagtatcaaagaaaaagaaaaaaacacaaaagaggtagaagggctcagcaagtgctttccacattcgcattcccttaaaatcgggaatgctctaaagctagaggacttttaaaaaacagaaaatactacttaagtattttctggtgcccatgtgaagtctggcaaaagacagaactttaaataattaaagagggctaatcacgaaagaccctaagtctgcaggaaagatgaaaggggtcttcctaccaatcctcagatccttgaggactgacttcacagcacacaattggaaacaacttaaggtctcacaactactcatgaaatagtatgaaataatattcaaattaaaaattttatatagtagaatgtcaaaatttagattcggattatcaatgaaataacagcaacaacactggtaattgttagggtatctttacagctaaagcataaaattatgttaaggtcctgtgtgtgcaatctggaatcaattcgtctaaaaccacacaaataaaagtggtttagaggcaaacttaggacagcataacttttcaggtaggttaaaaaaaaatctcgaaccaagagatgacaggaattggtgatctgctggcagtgagatacaagagatgaatgaagggtgatatgggtactgtggggctgccttccttttccacacaaaattcttatggttttaagtcatttagagaagacagatttg

SEQ ID NO: 210622 - DNA, 398 bp, Homo sapiens
ttgtaaactctgagttgtacttttcctgcgcccactgcttctatgccactgtctccagatgcctatgaatttcaaatgcacagatggagccaggatctgtatatcaagcagcatctccccaagtggtttccacccaacacaagcagtgtaggatgtgaacaggcacgatttcaatacaaacactactgctcgaacaacagtggaagcacattaaacattcgataaaatgaggtcactgaagactcctcagaacttttcagatgctgatgtccagggttggtctccagggagtgaataaagtatgcggggttccccaaacctactggctttagggctttctgttgatgatcatttctggggagcagtggtctgcaaaactctttattttttattttttg

SEQ ID NO: 210623 - DNA, 354 bp, Homo sapiens
attttattgtggaaactggggagaagcatgcctcctgtccccagggagaaggcaggagcgaatgggcaagggcaagggaagggctttaagggagaggagaggtgggcctggggctcgctgagtggtcggctggagcagtgggaagtgccccggtggggccggtggctggtgtgggggtagaaccgcggtcagtagggtgaaggtgctgagggctggaggctcaggaggtggtggcaggggcctgactcttggagccgggcagcaggctgggtgtgctcagaggctcatggcccacctggcgaagctccttccaggtgcaggcaagcctgaggcgtcagggcagcaggcggccgc

SEQ ID NO: 210624 - DNA, 855 bp, Homo sapiens
catcattgtaaagttgaaaagtcttaagttaaaccatcctaagttggggaccgtctgtatttgaagggtatccacaaaatatggtaggtagtaattgcatttatttaagtgagaaatgctgataaaaatatacaggagaaatcttagaagtttgaaggcctgctgacagaacctgacaacatgagagaatctatttagaatctcctaaaatgtcaagaaaacgagtaatccacattatcagctgtagagaggtcagggagtatagtattgtagaataggctttttgaaatgtcactggaaactcatcaatgagaatttctggataagattagagattatcagtgacaaaattggagggcagtgttcatgaagatgtacagttctaaaatttggaaacactttaaaagacatgtttcaaaatagagtttaaatgctgggtttgttctcttttagctgtcattataaaaagcagaataaatgtttcaatgagcaatgtttgatgacatttaaatgtataatatcacccctcctatctgtaagccagattaatgctaagcacaattctaaaaccaaatgcaagcaaaaatgtacacatacactccaaagaaaagactcatttagattagttttcttgattttatgtcagcttctagtcggtgggtgggggggggttcgggctcccagtaagcagaacggacggacccgcaaagggacactgctggacgaccaacagagcgaagaaccggtggagaacctagtattaaacccggtaagctggaacaaatacggtacaaaatgggcccacgagaggagggagaccccccacaggagagccccgggggcccaccgtatcac

SEQ ID NO: 210625 - DNA, 319 bp, Homo sapiens
caaaaatcaagctgtctaacatagggtgacagcagtactcccaaaaagcagagaaggatgaggcagaaaaagtatttgaagcaatattggctgagaaatttccaattttgattaaagtaaccccacacaaacagcagcccaggaagtgtggccaattacaagtaggataaataacaaagaaaattgcatcgaggtgtatcacagtgaaactgctaatattaaataaaaagggaacaatgatgagaattatggctgactcataatcagagacagtgtagcacacgggacaatggaatgatgttttcaaaatggcgaaaga

SEQ ID NO: 210626 - DNA, 421 bp, Homo sapiens
gaaacgaaagctccttctggtcagcatcccctcgtggatcaattcttgccagggtgcatttggacaataattttgcagggtcaggcaaagcagaaacaaacaagagtcaggctacctgggcaagctcaggtgtcgctgatgagtaatgcctgcagaaccctctggccagtctgctgcctcctcaagaagggctgttagctcaaccagatacactattatcagcttttaaacagcgctttggagcaacagctttactccccgaaaagatgcagaaaatcagactctttcaggtgattctcaaaaacaggggacccaccccagcccacgacaccattcaaagttgagaaagcaaagtgaattaaaggggtttgcaaccgctttcagactcatccagctgccgtccacaatgacaaacatatat

SEQ ID NO: 210627 - DNA, 404 bp, Homo sapiens
tcagctaagaacacagttccccatcaccaagctttgctttgcccaacagaccccttctcccttaggatgagattcagtggataatcacatcataatcacgaccctctgggaagccgcctctctcatcctgggttgtgtgttgtgtgtttcctttccacactccctcagcagcctttgcctcccactttcatagaatctaccatatgggattttaactgtttgtcttccactagacaataagctccttgaagactgaatttccaggaacttctgttggatctgcatgtttgtgaagtgaattactgaaggctgcccagtttcatctgatcctagtcaaaacctaaatcccttatttctacgctaccttttgccaggtaaaaataaaacatgtaaaccatcatatc

SEQ ID NO: 210628 - DNA, 362 bp, Homo sapiens
tagattggtacagccattatggaaaagagtaaagagctttgtaaggaaattagaagtagaactacagtatgacctagcgatcccttttctgggcatatacccaaaggaagtaaaatcaccatcttgtaaagacatctgcactccatgtttacagcagcgccattcacaacagtcagcatatgaaaacaactgaaggtctgtcaaggatgaatggataaagaaactgtggtgtatgtatgacagaatactattccgccctaaaaaagatcttgtcattcaccacacaggaataggcctgaaggacattaggggcagtgaaataagccagatacagaaataaaatattgtatatggcctggtgt

SEQ ID NO: 210629 - DNA, 512 bp, Homo sapiens
cgtgagccactgcacccagcaccatatcaagttttgtaaatcaggaaatatgagttctccaactttgttctttttcataactgtttaggctgtttggggatccttacgattccacatgaattttaggatgggcttttctatttctgcaaaaaatcattgggattttaataggaattgcatcaaatctatagacgactttgggtaatattgtcacctcaacaatattaagtcttccagtccatgaacacaggatgtcttttcatttatttacatctcctttgatttattttagcaatgctttatatttttcagtatataagactttcatgctgggtacagtggctcatgcctgtaaccccagcactttgggaggccaaggtgggcggatcacaagatcaggagattgagaccatcctggctaacacggtgaaactccgtttccactaaaaatacaaaaaattagctgggcatggtggcgggcgcctgtcgtcccagctacttgggaggctgag

SEQ ID NO: 210630 - DNA, 532 bp, Homo sapiens
ccgctcatctcgcagtatccctacctatgctcctgggaggagtctaccccagatacggttagggacctgcctttccctattaggataatttcttggaacttgggaattggacttctatggaacggaatcgattgaattaattttatttatttatttatttttaaaactttaattttaggtcgaattaattttaaagctgagttcaagggcagggaaaacgaccgggtgggcctaagcctgctggggtgtgacagcttggggctgtggggacgggggctggcgaaactttccttgctctgccgcttgggctgagtcggcaataaagactgcggggacaagacttttgccccttgtaaggttggatgagaggcaggaagataaaggggggactgtctgtgctgacaaaatctggaaaaggtgatgcactgggaatacttccttttggaaactggtgctgacttataccatcttccccacttattatagcatttttgtatccatttcaatacagttaacgacgttctgttaaaca

SEQ ID NO: 210631 - DNA, 350 bp, Homo sapiens
atcttttcaatatgctgctggattccatttactggtattttgttgaagattttgtatctgaacgcttaagataacatttacactctatcagaaatgaattgaccataaatgtgagagtgtatttgtgggttcttgattctcttccattccaaagatagacatacatccgtctgtatgtctgtctttatgccagtaccatactctcttgattactattgctttgtaataagttttgaaatcagaaagtataaatgagattttggtatctgagtaacagtcctcatagaattagttgggaaatattccctctttattctggtccctctttcttttttgtttaactgtgtatc

SEQ ID NO: 210632 - DNA, 377 bp, Homo sapiens
actcggcacgaggagatttctctcagcaaatgaaggaggcatccaccaaactgtcagggcccagagaggagaaaaagacagaggaagggtgcatttgatatctctgactgggacatccatctccgcctatcctgggacctccacactcctggttctctggccttcagacttgatcagggactaacaccatcgcctcccacccccacctttgttctgaggcctttagactcacactgaatgataccgctggctttcctgcttctctgtcctgcagccagctgattgtgggacttcactccaaaattgtgtgagccaattcccataagagataaataaatttgtaaataaacacacaaatttcctacaggcttatctta

SEQ ID NO: 210633 - DNA, 485 bp, Homo sapiens
tattaatacaacatcccctccagcaaaggggagtgccccccagtcccaggtaccgtgtgatggcgatcattgcgtcccctttcctgagacctttcacggcagcgtacacctccaggtgctgcctcactgtcaggttgggccacagcgcattctcctgagggcagtaccccaggaagcccaggggttcccctccaccgctccctttcaaaatcacctatgcaaaataagttcattcttagattctatcccaaatgtcacgtatatgtatatgcatgtaagccgtacttcagagatgcccttctcttcacacacacaggtgctaagtgcacaaatgcaaatcagtaatcacttaactttggggaaaaggtggtaaaagcccactttaaaaggcagacattccatggttatccattgtagtgtagactttactaccaattccatgaccgtgattgaactcaagattgctgatttgagtgtcttttact

SEQ ID NO: 210634 - DNA, 1155 bp, Homo sapiens
gttaattcatgatacaattttaatacattttaccaacctaaatagaaaatcaaactgaaaaagtaacttcctcattaaacaaacacaaaaaaattctaaatttacatgctaggtaatttctaacaataattttttaaaaggattttatcttaattttcatttatgtttctatagccagagtcttcccaagattcaatactttgtttggtttcctatcatctcaatgatctcttccaaatcctgctgaagttgttagaagtaaaattatctccatcttataaatgggaaaagtaaactggcaagtcaaagaattttctagagaataggcccacagagaaggctgttaaaccaggatggagagatttaaacacatacacctaggggaggcagagaagagacgggaacatgaggtggcctgaaaatgagcacagtatttgaaggtctcccaacatgagtttgatcacatttaaagcccaccaatttagagctttttcaaactccattcaaagggggttttcctgacgtatctgcaaaacctaataagaaggccctgtcctctgtgtaagcagcttttcatacatgcatatattcatttattgattcattcagtaactacttattgagcatctactatgtgaaaggcattcctatcagccctggagatgcaatcgtgagtaaaacagacagaaatgtccctgccctcacggagtttacatcctggtagtggggacagaaaatttaaaaaaaataaataagtaaaatatgtgtcagtattaagtaccatggagaaaaaattaaacagcgatgaaaaatataaaacgtaaggatggttgaaatattcggtcagccaggaaaggtgtcatgaagttgagttaggaaactgactacatgagaaacatttaaacaccttcttaccttgtcagacggtattctgagttccagattcaagcagcctggtttccatacacagtaccactttttatttattgtgagaaaattgcctaattttgtgtctcagtttctttatctgtaaaatggggataatttttttaactagtagagttgtgaagagtcaatttaaaaacaaaacacatttagtgcttaaaacagtgcctgatgtataagaactcaataaatattaggttttgtaaaaac

SEQ ID NO: 210635 - DNA, 351 bp, Homo sapiens
  misc_feature (2)..(2): n is a, c, g, or t
  misc_feature (13)..(13): n is a, c, g, or t
  misc_feature (39)..(39): n is a, c, g, or t
  misc_feature (42)..(42): n is a, c, g, or t
cncccccactgtnggcatcatgatgccgacagtggggcnacngtcggcatcatgatgtgattttactcttcatttgccttctgccataattgtgaggcctccccagccatgtggaactgtgagtcaattaagcctctttcctttataaattacccagtctcgggtatgtctttattagcagtataagaacagactaatacatccggtctcatctggaggtttgactgagggaagatccacttctaagctcactctgtgactactggtaggcctcaggctgtcactggctattgactgaagactaattagtttcttccctggtggacctcttcctagggcagctcacaacac

SEQ ID NO: 210636 - DNA, 406 bp, Homo sapiens
agcccacattggactagagagagacttcagaccaagatatcatgtttatgttcttttagctagaattgtgttaaggcaatgactatctcctacagcttagaagttctgaagtacatggccaggagcggtggctcacacctgcaatcccagcactttgggaggccgaggcgggtggatcacccgagctcaggagtttgagaccagcctgggcaagatggtgaaaccctgtctctactaaaactgtgaaaaacacattagccgagcatggtgatgcatgcctgtaatcccagctacttgagaggctggggcacaagaatcacttgagcctgggaggcagaggttacagtgagccaagatggtgccagtggactccagcctaggcaacagagcaagactctgtctcaaa

SEQ ID NO: 210637 - DNA, 500 bp, Homo sapiens
tacggcactgttagagcctgtgtcttcaatgccagccccgtggatgcctacgagccttctcggcagccgtgcgagtgccttccggaggtagccttcatggggccgcgactgctgtccaggagctctgccaaaagcgtgctttcctcccaccgtcacagcagtgctgggacgtaggtgtagcatccgtgtgagaacacgaggcctcgctgtgccagtaagaggccaggctgggatttgaaccagattgtctatcttcagagccccggcctcgaaaatttcacttcttatgggaaattccaaatgtgcacggtaggaagaaaagagcgctccaccttgagcttgtcaccacatcatgtggtggcctcgcccacgccgttcccctcccccagataacccgcctaaatctcactcattcttttgtttcatttgtaaacgtgtgtatcttttaaaaggctctttgtaaaaacataacctcaataccggtagctcatgtaaagcaa

SEQ ID NO: 210638 - DNA, 473 bp, Homo sapiens
attttatgctgctaaaacctgctcttctggtttctttagaaagaaccaggagatcttcatggtttctgagcctgtataggcttcccatttagagggcccctggcacccacgtgtcccactctgttaccctttgttactttatgtgtttataagctgttaagtgtagtgccttaaaacctcaggctttggccagacgaggtggctcatgcctttaatctcaacactttcggaggccgaggcaggtggatcacctgaggtcaggagttcgagaccagcctgaccaatatggtaaaaccccatctctactaaaaatacaaaaattagctgggtgtggtgacgtgtgcctgtagtcccacctacttgggaggctgagacaggagaattgcttgaacccaggaggcggacgttgcactaagctgagatcgcacaactgcactccatcctgggcaacagagtgagactcaaaaaaaaaa

SEQ ID NO: 210639 - DNA, 247 bp, Homo sapiens
agacttaagacatctattctccacactgtatatttttagactctatatattacagaatctatatatttaatacaattcaatccaaatcccaggaaaatttttcaaagaaattaagaagctgtttctaaaattcatatgaaaatgcaaataatctaggattgtccggacagagacggagttttgctcttcttgcccaggctggagtgagtgcaatgacgcgatctcggctcactgcaacctccgcctc

SEQ ID NO: 210640 - DNA, 591 bp, Homo sapiens
attaattcattcttagaaagtgaccataccaaaggcttctatgttttctttgtagaattcatgctactattttcttgaatttttatttagatttaactcccttccttttccatacgtaaagggaaaaaatagtggaagtggagaaattattagccaaaactcactaggacatttcccaccgtatgctgtactagatttttaggttcttaaggaatttactgtagatatttcagtagaccctttgacacggacagtatagataaaggtatatcctttccctcatagactatattactcttaagataacatttagccaaactacatgtaaccaagttgttacccttatgcttgttatatagcagaaatctctgtgcccttgctacctgttgtttatattcattttaagtagaaattaaattcaaacaggaaatggcaggcatgtatttgcaaatgaagttgaacttaaaagatattaacttgggcctggcgcggtggctcatgcctgtaattccagcactttgggaggccgaggcaggcggatcatgaggtcaggagatcgagaccatcctggctaagacagtgaaaccccgt

SEQ ID NO: 210641 - DNA, 492 bp, Homo sapiens
tgcggcagtgctcgtaacaatggtcgtagcttgtgttccgggtagaacgtgggctgctgatctccagtgggtctctcgtatgcattacagagccgatttcactaatctgcgtgtccactcttcctttaaaaccatgggtgtcattccattgcaggctcagtcctctgcctgtctctggtttctgagtccaggcctctaggtgccatagataaggctctgttacatagcctgaatagccctgtgaatgaggagaggaggcatctgttgtgagataatgaaaatggtaggtggctagcacctatttatactgttgttcgtacaccacatactcagtgaatatcagaagaatggcgtgggtacatctgtgcattcacgaatttaaaaatttcacttattttggaatttgtcacatatgtgtgcctatatgcatcttttcttgttatacttacaaatgtgtcttccaacatttgttttccttagattaagtcaaat

SEQ ID NO: 210642 - DNA, 575 bp, Homo sapiens
aaatgaaacagcacagagatatcagatttcacctatgaaacagggagtggaggtaagatctaatgatgtagaatgtgccatgtcatatattgctggtgggagtgcacttaagagatgatttggaaatacttatcaaatgcctcaaaatatgtgtatttttgacccaatagttctatttatggagttttatcctaagatcataatttacaatatgccagataacttggatagaagaagggtcaatgtgctgttcttaatacctaaagaatggaaacagatccacatgcccatcaatagggaactgtttagaaatgttacagtaatccacacaaacgaaaactgttggcgacatattggtaacagaaagaaagcaaatttgcatatcacagtaccttttttgaaaaaaaaagtataaggaaatatgtctggaagagcgtgtaaaatgttagctgtgcttaaaggctgtgaatgagttttatgttgtcctgtgtttccatattttccaatgtatcaccaatgaatacctattatatgagtaataaagaaaattgaaatattgatttttgaggaaaaaa

SEQ ID NO: 210643 - DNA, 991 bp, Homo sapiens
agatacctttatcaatgaatgtgtcaacctttctggcatacgaccagcccacaataagttactgtggggtgcatcatgaacttctctcccataagtcctttgaaacgaatgcacaggaagatacgatggaaacacacctagagactgagctggacctgagcacaatcacaacagctggccgaatcagtgaccataaacagcagctagcttaactgagatcattggtagccaggggttgctaccaaactttgtaacctcaaggacaaaatgaggaagatgtgttcattgtggactctaaaaacaaaacaaaacacaaaatcccctgttcaaataaacaaaaaatccaagattgattcatgaaataaagaagacatgaattgttttaagtctacactttgtaattagctaagttgtgcagtattttttgacttaaacagagtatgaccctgaaaaataaaagaatctttttttttcaaaactcatcctacctacctgtaaaaactgtacaaagctaatgtatttttcatattgtaaagtttcaattgtagaaacaactggtatgtacagtaccataatttaattacattttactttaaaaactttacacatttcagtttctaaaattttaaattaacaaaaattatttcttgtgttattcagagttactcagttttgtaaggactgttttgttactgcttttgtgcccagaaaccttgactctaaaattctgtgctgtgcgaaacatgcacgatttttattatgcttactgcgtagaattttatctacttgttccagaaataatacattaaccaaaaaggatttaattgttcagacttgtaagaggttcttcaattacataggcaggtttttcttaaaaatgaaaaaaaaatcaaagatttttttaacagttctcagacttaactgttgccttgaattacagcctagtttctaagcagtgaaatgtaatgataaagagggatattttaacata

SEQ ID NO: 210644 - DNA, 374 bp, Homo sapiens
caaagttatctgactttatttattcagaaacacaacccattaagtgaaataatggtgaaaacaaaagtgactttccagcttttcgatcgggccccgcctccccggcccttcaattcccgaggcttgaccgggagggagaaagttcccccaaccgcgccaccgcctgcttccactgcaggcaccgggcaggacattgttgggccaatgaaggtgatttttttgtcactctttgtgtttccacttcctgaataacactcgctaccatcattaccatgcaaccagaggcagctccctcttccattcccttctcaagtcatatgtcctttttcagaattgtctgcattacttttctaccttttagaccctcaaatgct

SEQ ID NO: 210645 - DNA, 179 bp, Homo sapiens
ctatggctgtatataggaaatgttgacttgactatcttacggaacagattctgcatggttttagaggtaaatgtttgggaataatttgcagctaacgtgtatcccaggagttcaccatttagtgcaattcacaatcagaatttcttttaacaaatcatattcattgaaaatgatagtca

SEQ ID NO: 210646 - DNA, 332 bp, Homo sapiens
taagttgtgttgtttaataacttcacagaaattttaacttcttaaaaactaccacacccaacccttagacttttaaactttcatttagatttgtggttgaacacaattacaacacaattatgtgctgtaataatttaaaacaatgttcagtgattttacagttcaactacctctgtttcaattgctccattaaatcatattctcactatgtaccaagaagtacacaatgagtattgtcattgacttaggatataattcacctatatttgatttcagaaaaaacaaaaacaaaaaactagctgttacttacaaaagagatcaataattgatat

SEQ ID NO: 210647 - DNA, 376 bp, Homo sapiens
agaaataggagtgctgggatggtgccaaccagtgtgtaatgtgccaatccttattaaagtttatctttgaggaattttagaggaatttgaaaatatggcactaagggccgggcatggtgactcacatctgtaatctcagcactttggaaggccaacgcaggcggatctcttaaggtcaggagtttgagaccagcctggccaacatggtgaaaccctgtctctactacaaatacagaaaattagccgagtatagtggtgtacgcctgtagtcccagctactcagggatctgaggcaggagaattccttgaacctgggagtgagccaagattgggccgctgcactctagcctgggtgacagaatgagactctgtctca

SEQ ID NO: 210648 - DNA, 313 bp, Homo sapiens
tgtgcagaagctttttggtttaattaagtcccatctatttatctttgtttttgttgtatttacttttgggttcttgactttggggacttgggggaaagggtggggggtggagagggataaaagactacacattggctacagtgtacattgcttaggtgatgggtgcaccaaaatctcagaatgaccactaaggaacttactcatgtaaccaaacaccacctgttcccgaaaaatctattgaaataaaaaaatttaaaaaatgaaccaatcaaaaataactgcaacaacttttcaagacatagacaacacaata

SEQ ID NO: 210649 - DNA, 172 bp, Homo sapiens
ggaagttggcttatagccctcaaatgctatgatgggctgagctacattttattttttattattattgtttgcagaagtctataatagaaagtcaggtgtggaaatggggaagcactgaagttgagttcacaacttagtgaacacaaattagttgggtgaccttggagagatt

SEQ ID NO: 210650 - DNA, 502 bp, Homo sapiens
aaaggtggaatcctcttccccgatgccttgttttatagcttcctttgccattaggaagatgatcattgctgtagtacatttatctacatacacttaggagtttagcttgtccagggcagcaaagcccatcttttctatgtcctcagatttaaacaaatttattatgatttttcaccaagtactaagaatgatttgtacatgctgtagataatcagtcattaattctggggaacattcatatccatgggcataattatttctaaagataattttatagggcacaacctgtgcttttgcagttattgtaaaacaatttttgttatcttgctagttattgttgttattgtaaaatacaccgaaattctctaccgtataatttttaaatgcagcattcccagaaattgaggttgtaaagagaccattaattttgcaaatgattaaagtctctcactggttgctggaacctctgttggaatgctgtctttagaagctgcatttggat

SEQ ID NO: 210651 - DNA, 336 bp, Homo sapiens
tggaggcctaggggattttcagccccctagcaaatccattctgatcctgacttggattttaatctctagaactctcatgtataaaattttcagccatttctaggaattttaagaaaagctaatatgggacttttcagttcagttcagatttaaaagtgttcaggacccctgaagggagtactgaaactaaggaagttttctgaataacctaaacctgaaattggactaggagcagaagagagtagggtctggaggatctgcccatcgcagacctaaaattccgtagtctttttggagatctgaaatgagtgatttttgcacttaatgacttccctc

SEQ ID NO: 210652 - DNA, 452 bp, Homo sapiens
gctagaaattggtgtttttattatttttgaaagccgtcccctagattttttaaagcaaacttttttgaaatttatacagaaactgttttctatatacatctttatactaaaagtacatagatcataaatgtccaactcagtgaatttttactgtttaaatatatctgtgtagtcagcactcacatcaagaaatagaacgttaccagcaccccttgtaaccacccagtcccctcgcagtttcttttgtcgtaaaggtaacaactactctggcaatagatttgttttgcctgtttttaaactttaaatcatacagtatgtactcttttgtgtctggcttcttgctttcaacagtatgtctgagattcatccttgttgtcacttggaacaatagttggttcattctcattgctatataatgtttcgccatataaacctgtcattatttgtacatt

SEQ ID NO: 210653 - DNA, 321 bp, Homo sapiens
taaactatttgaaatgagcatgtctttctttttatcatgatggaaagaacagtttttttaaaaactagaatcaaaaagcaactctgcccaaggaaaattctgcatggaaaccccacggcggcatgatggggaggggtcagggcggctcctccgagagcagctgctggctccttatcctggtggcagccgcggccttatctctgtgatgcagacagaggctgccatggaaggaggaggcccctggccctgggctgcccacacagtgtatacaagacacagccacccgcacctggcagccactgtcgccaagtcgctagggat

SEQ ID NO: 210654 - DNA, 194 bp, Homo sapiens
tcagaactactggaccaaaaactgtgggatggggcccagtaatctatgtctaacaagccccccaggggagaggaaccactgataaaaatcttgctagcatgctgcagagaaatatgctatgacaatctgtactttgggatccacgcttcaagagcattctagactgggaaatagggagattacttacttagcct

SEQ ID NO: 210655 - DNA, 619 bp, Homo sapiens
  misc_feature (308)..(308): n is a, c, g, or t
ggcctctcaaagtgctagaactacagatgtgagccaccacgcctggacccaaaacagacttttaacagaagaaagtttcacaagacttatcatttttctgagatctgaacaaccattgccttttaaaagcacatctgcctttgaagtctcccattggtggacaggggagtcctatctcctatgagaccaccttggttcctgctggagggcagcttccacatattggtgtgtggcaggatgaaaggatgctgagctcctaaagccagttatggtggtgtgtcaggggtcccccacggaaattgtaaaanccccaaaaaaaagcccccagacccccgggtttttatcttttttttccccccggaaaaaaggggggtgtgtggagggaacccgttgtggcgccaaatttcccccaggaggaaatttccccgttaaaaaaattttttcttttttaaggcttattttcccttacctgggggcaacagaggtttaaaaaaggcttttaattggcacaaacagggggaattgggggtgggcccctatccaaaccccaatcgccgaagaacaaacaaggcaccccccaaaaaaataacccccgtttatcggcgctttcaccttttcc

SEQ ID NO: 210656 - DNA, 372 bp, Homo sapiens
cctagcaaaatggaaaaataacaatatgtgctgaattaattattagcttaaaatttaaaacttaagtagcatgatttgagtgcagccagcatcacctgccgtgagatcggtgctgtctacaggaggatggagcttttggtgaaccactgagctgggagtagctacgggcacctttacccagtcccaaaatgtggaacatttgagtttaaaaagcagaaaactctacagttaaaagccaatattaaggttgagtccattaatctaaattaatctgattttttatttctttaaataaaaaagtaatcctatgcaatcaaagttaaagttcgtatatggctccctatgaggtactacattccctgaagtgtccca

SEQ ID NO: 210657 - DNA, 395 bp, Homo sapiens
aacggcagtgcaccctatctatctcatagtcgactctctgagtatcccccgttttaggagttacatgaacaattattcaaaatatttctctattcagttttctaagattttattcggatttttgcatctatactcataaaaaaatcacctacattatcttacatcctcttgcatcatctttcttacataattttatttttaaaatgaaaatcctgtttacttcattaaatgaattagtgtcttatgatcattttctatattttgggagtataggggttttttgttttgttttgttttgttttttgagatggagtcttgctctgccacccaggctggagtgcagtggctcgatctcggctcactgcaacctctgcctcctgggttcaagcaattct

SEQ ID NO: 210658 - DNA, 426 bp, Homo sapiens
ctcttcaaacgatgtatgagaagacaggtgctacaccccgtgtaagttttccctgagcaatcctgaaatgatttggttttctgacaactctccccatgtcagatcaactctggcttggcagagaccttacaggaacacgctagagaactccagacgaattgcatcccacggaattctaatcaccaaaacccagctgatcagaatcaccggggaacttctgaaaactagttttctcatctgcagtggatcaaaatcttcagggatcaatctcaggaatcaaaacattctactaatcatccagatttgatcaaatcaatatagcggcactacttaagacagtttggctaatggaaagcaagcaggaggtatgagctttcctcagttatgttttataccacagtttaattatatgacaaattgttgaga

SEQ ID NO: 210659 - DNA, 319 bp, Homo sapiens
tacagtagaaacttcctttgcaattctctcactatatcaaatcctaaaagagacaattttgctgtcctgaattctcaccaattctgagttctcccaaagaccaggttcctgccaaactatagcagtgagccctggatcttctcaaagaaatttaacatatttttacaagaaccttctcacaggtggtgtgcaacttgcctgttctacaggaataccaaccaggggctgcctcctatagctgcaccataaattccatttccacaactcaagagatttaacttctgcagagagagatcctgaagaatggatttgcttaagg

SEQ ID NO: 210660 - DNA, 310 bp, Homo sapiens
agcctccctggccctcaggcactctaaggtcacttctcctgagacacctgctggttggtctactgcctaaatgccagcctgtccacctgctgccacccctaaccccccgcaaggctggctcctctgtgtgactcaagtctcagatgaactagtaccttggaaaggtcttccctgcactctcccatctaagatcccaacccccggcacgttatcttggtttactgagtgcccagctcccaccaccatcagaaattaccgttcctgcattaacagtcactgctgctccccacgctctcccccacacactcta

SEQ ID NO: 210661 - DNA, 619 bp, Homo sapiens
ccggtcttgggctttgaagaagcctaggagaaattccgcttcggccatcacgctatgaaaagtggatttttttttcttaagtcaattttttttttttgaaaatatgagacttagtaggtttgggaagtgggctaaaagaacatttgatattgtaattgaccccccctttaaggtgacagtgtttttcccctacttaaagcgccaacttttttgtgcactataaaagctattactatccataaattgttactctcggtagaaaataacctagtcttgctcggtgttattgaagagccaagagggtattggagaatcacctccagaaggaacaaggaagctcattagcactgaaagtcccccggatcaggcccaggaagctaagcatccgtatactttacaaatggaactaaagtcagctactaatgggaactttgcacaaaagaattagtttctgacacacaattcgcagatacatttacacaaactgatgggacaacttgcagtcacaggagcaggctgcattagggagggttcctgccctactgagttccaggtggatttaatttcactcattcctttccttatgatgtgacgtttctacccccccaccctttttgta

SEQ ID NO: 210662 - DNA, 307 bp, Homo sapiens
ggacaggttctattggaaattcctcttagaagattcttaaagtaagtggagagaggctgagtggaaatttagagctgggaatcctacagagagtgttcaaagccagggatggattggctctcttgggctgggtgggggacatttgtgccctggaatactccattcttggcattcaaaagtgagccctgttgggaactcttcacatgactgaaaacttgtattctttttttctagttcaagcaaatatattcagacatcttacactatcactctattactactaagaaaaacaaaaaccaagactgaa

SEQ ID NO: 210663 - DNA, 101 bp, Homo sapiens
tgaggagatgtacaggatgagaaggagctagctgtgtgaaaagtggtaaacaaagtaaaggggctaatgtgcaaagcctctgagggagtgtgcttaaggac

SEQ ID NO: 210664 - DNA, 474 bp, Homo sapiens
ccaggaaggtgcttaacaataataacgtctaccgtcattgcctactttttgagagaggcactgctctaagagttttgcacctattgtgtatgatccctaaaacatctctattttacagatacggaaattaaggcatatagaagtcagctaatgtgcccatgatcacacgggaagtgaacctggattcaaatccagttggcctccagagcccatgcattaaccattaagttctacttcggtccaataaatgatataggtttgcataaagaagtcaatctggcagggcacaatggctcctgcccataattctagcactctgggaggctgaggccagccgatcacttgagcccaggaattcgagaccagcctggaaaacacaagaagaccctgtgtctacaaagaatacaaaatttagctgggtgtggtggtgcacacctgtagtcccagctacttgggaggctgaggtggagggat

SEQ ID NO: 210665 - DNA, 260 bp, Homo sapiens
ttctatgagaaatggacaggcccagaatgcagaaaaccagtaaagacctaacttcttgttgtagttaaactcaacatcaccatcatccaactggatattcatagactactttatctaatgacaacagagtacacattcttctcaagctcacatagaatgcttgtaaagatagatcacattctaggccataaaacacactttaacaaattttaaagaatacatatcattaaaggtctattaaaatagaaaccattaataga

SEQ ID NO: 210666 - DNA, 250 bp, Homo sapiens
tgtcattattcttatcatcattatctagttgtatacacagctttactgatttttcccccccctaaatagatggcatgattgtgggcaatgacttcattttcctacttgtagaaatcagttgaaattctagtctccctttcattgcttatttatgatagacttgctttcatagggttgctggtgatggcaccagttcaaacattttagatgaaggtttataagaatgtgtatactgttcagatatggggtt

SEQ ID NO: 210667 - DNA, 600 bp, Homo sapiens
tttcagcctttaaaagcgcgggccctgccacctttcgctgtggcccttacgctcagaatgacgtgtcctctctgccgtaggttgactccttgagtcccctaggccattgcactgtagcctgggcagcaagagccaaactccgtccccccacctccccgcgcacataataactaactaacaaactaactaactaactaaactaactaaataaataaaatctctacacgtcacctctaagtgtgtgttcccgtgaggagtgatttctaagaaatggcactgtacactgaacgcagtggctcacgtctgtcatcccgaggtcaggagttcgagaccagcccggccaacgtggtgaaacccccgtctctactgaaaatacgaaatggagtcaggcgccgtggggcaggcacctgtaaccccagctactcgggaggctggggtggaagaattgcttgaacctggcaggcggaggctgcagtgacccaagatcgcaccactgcactacagcctgggcgacagagtgagacccggtctccagataaatacgtacataaataaatacacacatacatacatacatacatacatacatacatacataca

SEQ ID NO: 210668 - DNA, 326 bp, Homo sapiens
cagaagccaaactaattttgactactaaaattgtgagtcagaagccaaactaattttggctactaaattagttacttccctcgggcctaccaatcttcatatgtataccatggcttattttgacttagctggttaatttatccagatacgtagatggtagcaaattggcattatcaaactctactttttcataccaaagagcaaaataagtgtgcttataaccgtagttcctgtctttataaaaatgtatgaaaaaatttgagcttctgttgataaataaaatgtaaatgctactttttgaaataaaactttacacttataggctt

SEQ ID NO: 210669 - DNA, 211 bp, Homo sapiens
gaaatctccgtactttcttacctcaatcttactgtgaagcaaaaatggctctaaaaaattaagtctcaacagatgttttgatgaggcagatctattttactctttcgtgaagctcagcatgcagctctgtgatgttgtactaggggagatgctagaccagagtaaaaatatccagccagttagggctcagaatctggacccactgaatctt

SEQ ID NO: 210670 - DNA, 248 bp, Homo sapiens
aatggctcaagcaagtactctaaacagaaaaaaagtatagaagaggaatttctggaacagcaagaatgaagcaaaaaaagaaaagaaaaaaagcaacagaaaatggggaaaaagtaagtaaacacaaaacattttcctttttttctcaaattttctgcaggagtttcaaattgctcaactggctattgctaatattaaggaggaaagagatctagggaatgaggcaaaaaataacattcttctctggt

SEQ ID NO: 210671 - DNA, 632 bp, Homo sapiens
cactttctcatcattccatgactttgctttgcatctactgttggcagctggaagggccaagggtccttgcattgccctgaccttcaagggctccggatttcctgtgagagatgtccaagctccttatctgggcatgcacagccttgttggatcatcagcctcttctcctgcccagccccaaccatgccagccacgtcgggctgctccctgctcctccaaggcctctcctggcccctgcacctttgccactctccacctgtggtgcatataaatacctctttggggaaaataagaattaaagccctagtccctctatgatccaacagaagtgtactcggtttgcttgagagagccctggtttgtatcaatatatgtcggcactttagctttcctagcgcaggagtgttttatatttattttgataaaaacataattcagaatattaggtgagcctttaaggagcatcgatttattcaatgcattggtgaactccagagttgacataaatgtgctcttttgggtgagaactcatcctgcctctcgtttgcaggacctaatgagatagaattataacgtaattttttttaagacagagtcttgctcttgtcgcccaggctggagtgcaatggcat

SEQ ID NO: 210672 - DNA, 408 bp, Homo sapiens
ctcaggcttaggccggggatggccctgcagtatgcctgcacaggagttctggcctgccagcagcagctctggcaccccactggaagctccattcccccacctttctggaagtagccttgaaggcctagagcttccaaagtagtgagatagagactgcagggattgtccgcctggttgagcactcatggttccagggagggttgaggcactgtgctcccatggctgacttggcaaatcccaccagccaccccatgtcatacccatgacagacatcactaatggaacatggagctcttctctgctgagtcctgctcaggcctctagagcagagctagccagtcagaatatagtgcaatccccatatgtcattttaaagttaaaatatttaagcatgttaacaaaaatagc

SEQ ID NO: 210673 - DNA, 279 bp, Homo sapiens
cagcattttgacttgtccttttagactggctctcctcaactcaagatgaaaactcaggcaacacgtgcatatgacagctttcaaaaaggattgccccacatctttactcagatccaagaaaagcttcctaatctcatcaatgacaagaggactggaattcccagctttaccttagactaaccaagatccattctcttggagctggggatagcattccatttctggaacacatggcttggtgagggatgaacacctgagcagcatcagagccctcctggc

SEQ ID NO: 210674 - DNA, 370 bp, Homo sapiens
ttgtgcactccaaataaatgtaataaccatgcacactactataaccaccctaaccctgacttccctaattcccctccatccttaccaccctcgtaaagcctaacaaaaaaaactcatacccccattatgttaaatccattgtcgcatccaccttttgtgagagcgttggtgggaaaacccttcataaaggacattggagaggggccatttaattatcaaatgtaacacagttaaccttagggagatgatgaagcgagatcattatgtgtcactacttgctgggattctttctatttaaattataagttcaggttatatgatgttgtatgttcaataataatgctcataatagatgaaatgttataatgag

SEQ ID NO: 210675 - DNA, 396 bp, Homo sapiens
agcaaaagtgtctctgaagcagattcagggattagatagcccttatccgtaatgaaagacttacattataaaagaatataagtttccatggtttttatctttcaggattaccaatgatgtgacttttacatgttaattgttaattttgcatcttaaatatctgaactgacaaaattttaatttaagttttgtaccttttaactcccttttggccaaaaggaattttcaaaaatatgtattccattcccacagcttgccagttgcctccaccgtaagaaaatgctgaatatgacatcatatcactaatatgccctctcagttgccaaatattttggttgttagattttttttttttttgagaggatggtactcataaaatcaagatcgctctgtcac

SEQ ID NO: 210676 - DNA, 355 bp, Homo sapiens
gaagcaggtggtgaaaggagccctgatgctgtatcctaaaaagttctgactcaggcccaagccacaaaagagaggctgtggccagaacaacaaattgtgggatgctcttggcccattggtactgctgtttgcgcacatccagtattgaataaggaatagcagagacctaataacatttcattacatcaaaaccctttcacatatcctccaaaaggagaatttctgcctaaaaatagactgtttttcagcactcgaattgcacacatttattgttttctgtattagctctttgattttatcaatttattcaccaaccatcccagtaatcaatagcaataaacaaaaatgaattaat

SEQ ID NO: 210677 - DNA, 310 bp, Homo sapiens
cccaaatggaatccttcaaggcatgagcagatgaataaactggaatactactcaacaataagaaagaaagaaactatttgatatatgcaataacttagatggatgtcaaggttatcatgctgtgggggaaaaaatccagtctcaaaaagtcacacactatgaaattccacttatatttcattcttgagatgataaaattatagtgatggtgaacagaacaatggttgtcatgagttagggttggggaaagttgtgactctaaaggataataggagagaattaattttttgatgatgaaacagtccatctt

SEQ ID NO: 210678 - DNA, 391 bp, Homo sapiens
aagtgttaatttctgcagcaagttttatgtcagcatagattagaattcaattatctttgtatttcttgagtataacttgagttagggaaagtgagataagcatttggtaagattaataattaaccaatgttctatattgagatttgtgccaatttccacaacaaattcaacattaagtccttcgtttacacttgatgcctatggagttttcctatctactttatgaatgtgagaaagcacaagacgatgcacataattatgtataaatatgcttaaacaagttttgaaggcccaatagactactactaaataaaaataaactatcaaaatagagccctaacgtaacagcgaatagattttgtacttttcagaggcagatctgcaattactt

SEQ ID NO: 210679 - DNA, 122 bp, Homo sapiens
ttagagagtgtcatggagagtggcaagtggtctggcttgttaatgactttgtgaagccttaaactgccttcctttgggtttctctctgaaagaaaaataaactcttatcttgtttctgcctt

SEQ ID NO: 210680 - DNA, 275 bp, Homo sapiens
tgtgttactttctgtgtttctttgtggcctgtgagttttagccccttttgtcttcagttatccctcttacactcaaccttgagaaatgatattatcctattattttggatacttttggcagttacactctcaagtctgtgacttctggaaccatgcagatctttattgtaagacagaaatcccattatctgatttacctgcccattttcagaggtccccaaagaacccctaggttggtgaggtttctttgagaaaatggctttatgtgtgtgcaa

SEQ ID NO: 210681 - DNA, 325 bp, Homo sapiens
tttaggagtaatttacataaggaatgtattgagggcattagagatgactttatgacctgcttatgatctcaagctttttactgaataatttatcatcacattgtgttagctattttgcttcttgatagatcattttacaccacaatattgctggtgcctaaggaaaaaaaatgtctcttcagcagatcttaatgatttctagaaagggtaatttgattctgaagataggattttgacttgccctggtattaataagaaattttctctatgatactgtggttatttccaccccccaaacaatcatagatactaagtgcaaacttgc

SEQ ID NO: 210682 - DNA, 1895 bp, Homo sapiens
cctgaagatttactctgaacttagcatatataaggctttctgaaattctacggaaatatatttaactttttttaacccagtatgtcacagacttatttgatagttagcctgctttcatggaataactactaacatctggaggcatactagtgtttcattagattcattttaagaaatgtttccatataattatggaaacatatataattatatatattttatctaattttgattcctagttttgtgagatttttttcctttgagcacatagcaatttttactacagttgcaggcattttctttagctagaaaaaaaacaaaaaacaaaaaaaacaaaagcaggaaaagctggggccccaagtactctgaaataccaatctgtgggcagtgaggaatcactgaagcttttaagcaaaaaagttgtaaagttgtatcagagtttttaggggaactaatatggcaatggtatatcaaatagattaagggctaaggctgttaatgtaatattttagatgagatataagaacctgatctggagttgtgacagtaaaaatgggaaggtaagggactttgtgtgagaaaatgaaggaggcaagttgctgaagctgattggctagaggaggagggaataagtcgttggatgactgctaatgatttagactaaatgaatacatttgtatttcaagacttgtcatctcagatcactatcagcctactttaaaataaaatttttgacaagcttacttagattgacgtttgagatcacataggcactcatcagaagcaggtctgttctcttcctctttcatattactttgtattttatgggttatctgaatttattttcaggtaaccttttcaagggtcccaaccccttctggcacttttgaaattataaaagaatttcaggatgtttactgtgtgccccccacatgtctccagcatctcaaagctgtaattttttagacagtaagttaaccttcattcagaaaacccaggagagagtattccacaggaattgtctatattttgatataaaaaatctttcattaaagaattattgagtcttaacttgggaatgctcctgttccagtttaagctcttttctcagcgtatgaaaaggagataagcaggataacagcctctttagaatatccttaaattgcagccagagattaaaatgcatgtgtcactggtaattgctatttactgtgatttataccagcatattattattgtttattttgggttcagggggtacatgtgcaggtttgcttgaagggtatattgcgtgatgctgaaatttggatttctattgatcttgtcacctagacaatgaacatagtacacactaggagggttttcagcccttgcccctttccctacacctccctccttttggagcccccagtgtctattgttctcatctttatgttcttatgtacacagggtttagctccactcataagtgagaacatgcaatatttgttcttttttttcaatactagtagattattaatagaaatgtagcgttctctgagatcccttgggatctttatttcatttatatatttatttttaattaatttcttttttaagagacaggttcttgctctgttgcctaggctggtgcaatcatatctcactggatcaaacgatcctcctgcctcagcttcccaaatagctaggaccacaggcacatgccaccacacctggctaagtttaaacagttttttttgttgttgttgtttttgggtttttttttttgtagaaactaggtctcactgtgttgcccaggctggtctcaaactcctgttctcaaacaatcctcccaccttggcctcccaagatgctagggttacaggtgtgagctaccatgcttggataattagttc

SEQ ID NO: 210683 - DNA, 351 bp, Homo sapiens
ttcactcagctgtcgctatggaattagcagacagaaaaggcacagcgtcagtggctgggtgtccagagagaagcagcctgtctctctagataatacttggcaaaatcacagcagtccggtgtgtggccctttactgaccttgattaaaaatcgggtgtcagcaccccaagtggatccttcttacaggtgcagattcagactcattatccaagttgacagagacagaagtaaatattcaacaaatatttattgagcacttactatgtgccaggcactgttgttgtaggtgctggaatacagcaatgaacaaaaaaagtgaaacattcttccttagatggtggtaaagcgata

SEQ ID NO: 210684 - DNA, 430 bp, Homo sapiens
cattttaaatataatttggtataataaatgcaattgatataaatcgggtctcctaaaaactgttacttgatgagttattaggttgtacaggttattccatatttgaggggaacaaaacataatattgctatgtatgtgtgctttgtatgaatatctaaattaataatgaaaaagttcttaatattggtcagattttagagaagacagtgtaattgttgtggaatgatatgttctttggcctcaggtgctttatgcagaaaagggtagattctgaaaatgaaagaagacaggttgtgtgatttatggttgtgggctgtgaaggtgagcaggacctcttttctacatttaaacgttgataaagttttcatctttgttgctaacttttgagtaagactgatctactagcattcagcagggggcagcaaaggca

SEQ ID NO: 210685 - DNA, 458 bp, Homo sapiens
actggtttcttctgggcccctcctagacgctagtgcactttctctgtgctcattcacaagtgtgatcacagctcactgcagcctcaacctcccagactcaagcgatcctcccacctcagcttcctgagtagctgggaccacaggtgtgcaccaccacacttagcaggggtgaagcgctttgtggatgtcattgcacacgaccctaatggcaggcagagagggtagataaccccatgtagagataaggagatcatcactgaaggacgttgtgtcacttgagtcacttgtctgacagtggacaagcttgtgtcagggcagtggttaggagctcaaggcctaataataataaacgcagatacacagatgggattaagataaaaggatttggggcggccgagggagttgccactttgtgtgtccatttcagagtgcctcagaccccagcccagctcagccac

SEQ ID NO: 210686 - DNA, 503 bp, Homo sapiens
aaggaagtaaaaaatctgatctgggatgtagatttctccatcagtcgactttaaggtgggcagtgtctttgcagcatctttatctgcactcagtttttcagagcttaacacactggaaagtgtagcagttcttgaagccactaaataaatcactagatttaggaagtgcagagccaggcaagacgtgtgaacaggtgaagcaggctgggcatgagcgaggcctgttctaagcgtgctgccactgctctgttctcgtccatggctgccctgcagaaatgtcagcctggagttgctcagttatccagtttccaggactggctggatgtttgcatttttgtgtgaagccttctgagtttttaatgttggcaaccaactaatatttttaaaaagcaaacactgtgaagacctaataaattgcttctgcagccccgtttcatctgcggggtgccagtttgcatttgcagcctagattatgaagagttgatacgtttcacagagcaaaa

SEQ ID NO: 210687 - DNA, 468 bp, Homo sapiens
gtccaagaataaggtatgacttttcttttactcaagtggtctttttttcaatgtccattagagtttaaagttttcttcatgtaaatccagcacatttcttattaaaggtattgttaataataacttattaaagttatttcatctttttgtggttattgcaaataatatctttctgtatctcttgtaactgttttttttttttgcaagtagtgtctttttgtatatcttgtaactggtttttatataggaaaattatgtgtgtgtatgtgtgtgtgtgtgtgtgtgtttacattaattttataaccaaccaccttgctggacagaaagagcatactgaattaaggatagacaggactattctttcctgttattttcttgacacagaatggggcaacttaggtagtctctaataacacaggaacttggttaagaattttcttcatcataatcactactcattgtagataa

SEQ ID NO: 210688 - DNA, 408 bp, Homo sapiens
ccactcccctccccaccaaggaaaaaaaggactgtagaggatgttaataggccacatggctcagcttcagatgactcggcaaggagattgatgcctggctttggttaaatatttgaaatagtactaatccattgcctatatttaaagtataaactttgcatagctacaaacattgattctctaagacattagatcctagactatctggattgtgctgttctgtttttgttcataatctgaaaatgtaaatcttaccattttagaaaaggatttccctaggattttaagttcttaagagtcagacttatctgtagacatcagtgtgcctaggattcacctgctatcatacagtttcttttctgttttccaaacttagaccaaaatagaacaaaagttaaagtttctaga

SEQ ID NO: 210689 - DNA, 567 bp, Homo sapiens
tgactctgaggattacagtcggtctaccattcacaagaatatactccaaatagcttagggatccaaatatattttttaaatgaaatgataaagcactgtactagaaaaaaacatggtgaacttgtctttaactttgatgtagaaaaaaagctcaactgtgattgtgccactgcactccagcctgggggactgagcaagagaccctgcctcaaacaaacaaaaaacaccaggcatggtggctcatgcctgttatcccagcactttttcaaaacaaacatttacaattttatgtttaggcatcatgttccatgatcttatgataggaagataagttcttatagttatttgtggtttgagagctaagaaaatttatataataacatttctttctttcttgggtgtgctatcattttctctcttagcttggttgcttcgtattaaatttgaataaacatgtttccctagcctgttctccatatatttcccgtgggagtatgaaaactatctgaccattattccaaagtgactaagcatcataggccacagtataattggacaaaaggagct

SEQ ID NO: 210690 - DNA, 695 bp, Homo sapiens
tgttcagactatctgaggtgagatccaaaaattgaaaggcttaaagaatatgctaagtaagttgattgggcgtgatataggaaaaataataggataagttgatgataaatggcaaccaactatagcttcaccatcaagaagatgatggggacaggtggaggctttgcaaaccagggtacacccatccttaacaagagaagccaaccactcagctcccaacctctgtcactatatgcaaattcatgctcagcataccagatactctttttttttttcaagtgaagtcagaatttaggagttacatatgagatatgatccaaaaatatttgagccaacactaaaaaggcaaaatctgaggctgctaatcaaggcaccaggcaggtctcctttaatctgcaacattcaataacctgggtaagacttgcaactgatcccaactccaagtacttatcatctcttccacaaccagagtccaagacaatagcatttccaacctggttggctaaatggcttcctggcttcctagaacctctattcccttacaatccattatctatagagcagccagagggcagctttaaaatgcccatcagatcacattacttccctgacaacccttcaactggcttcctactctggcccacaaactatatgcagtcaggtgccgggtggtctcccctgcctctttgtgtccc

SEQ ID NO: 210691 - DNA, 681 bp, Homo sapiens
aacatgatgaaaccccgtctctactaaaaatacaaaaaaaattatccaggcatggtggtgggcacctgtaatcccagctactccagaagctgaggaaggagaatcacttgaacccaggaggcagaggttgcagtgagccgagatcacgccactgcactccagcctgggtgacagagcaaggctctgtctcaaaaaacaaaaaacaaacaaaaaaaaaacaaaaaaaactggctgaggtgcttgctggggaccagtgtgataggaaatgagtggtgggagaagggaattacacataccaattacagccatgtgaccagttccagaaacaagtactctagtcattagagatattttctttattgcttagatatggacatttgtatacataaactgatatttttcttttttttctctcccattccaataccctctaatagtatcagtatatgaatcatggttactcgtatggtccagttttaagttataggatagcaagataagattgtgaatcagaagataaacatttattcacagatggataaagtggaactctgggtttcttcttttaggtttggttgtatgaagaatcattgaatcatataatgtaaaagcataatgttgctaatatctttatttggaagttaaagattaaaaatagggtgtgtggatgccgagctgatg

SEQ ID NO: 210692 - DNA, 397 bp, Homo sapiens
cacaaattaccaaatggcctcctaggggctgaaataaggacctctttaggcatcagtgtcccaagttaggaattggaatcccagagctagaatgttcttcggggtcactcttgtgacgggcagtcctggcttgattcaagccgcttagagcacacggctgcctggaaaatgctcatcctcccggtgacctctccatccaggctgcatgtcggggtgggcatcagcactggcatcctggatgctgggtgaagtcactggcccaagaaaacccactgacttgggtgacagtgaagcccaccagtcccagagccccagatccaggacacacacgccagtcggggagccaagctgaggtgggagccatcactgcttctcagcagtgccttgtctctccatg

SEQ ID NO: 210693 - DNA, 796 bp, Homo sapiens
agcctgctgcctaggtggggccacagagcatcatggaggctcattagagatgggacatgcggcggctttccctgctgtcagcaggagtgggctctggattcctcaagatgctttaaaataaaacggaaaggcgcaattatgcagccaaacagaaggcgaggcagctgcctacaaaacgaggctttctccgtaataggaccccaaccccagagcacagtgcggccgcctcaccgtcccccccaaggctgcagccgtgacgcgtctgtaattggatgcttcgctgttccagctcttggattattcaaattacaggattttcagtttcaattaaggttatgaccaggcaacaagatgagcaagataccatgtttcacctttatagtctatttcagcaagaagcatggccaaactagtaacagtggggataatcataaaattaaccaacacgtactgagtggttaccatgtgtcaggtctggttcaaggtatgttatatacatattgacttatttaaccttcacgccaacttacttgactattgatattatattatcatcgtcccctagcctacaaatataaacactgaggtgcaaaaaggttgaggaatttgctcaaggtcacatagcagttaagtggcagagccgtgaatcgaacccaggcaatgtggtcctagacagcgtgctcttatttattttgttttgtttttttgagaaacaaaattagctggcgtgtgcacactcgggagtacttaagccagagaggttgattgtgatgccggataactaagcactcggaca

SEQ ID NO: 210694 - DNA, 501 bp, Homo sapiens
tgtaaaacagaaacatgttttatataaatccaaatataccataaattgctttaaatgtcaatggtctaaatacagcaattaaaagacaaagactgtcatcacggattaaaaaaactatattgactcatccaaggggaagcagagggcaactatacattgtctacaataagcccactttaaatataaagacaccagcagatgaaaagaaaagggtgggaaaataaaatgagtcaaaagaaactggagtatctatattaatttcagacaatgcagacttcaaaataaggaagattagagataaaaagcagcactacataatagaaaagagattaattatccaaaaagacataacaatgctaaatgtgcatatacctaaaaacaaaatgtcaaaacacatgagacaaaaactgatagaactgaaaagagtagacgaatgtacaattatatttgaagaattcaacatccctcccatcattaattgatagttcaggtaagcagaaa

SEQ ID NO: 210695 - DNA, 423 bp, Homo sapiens
aagaaaatcctattgattctatctttaaaatatatccagaatccaatcaattctcactacctctaccagatacatcatctctcaccaagagtattgcattgacctcctaagtagtttccctgcatctacacttgctcactatggtctagtctcaaaacacagccaaaataaaccctttaaacatctgtcagacggtgccacacctctgtttgaagttatccagtggcttcccattatccccaccacgttctgcttcatccatgccagttatgcttgggcctcggggcctttggcttgtttcctctgcctgcaatgttcttccccgcagacatccacatgcatgctctctcatcatcttcaaggtcaccttctctgtgaggacttttcctggctgctctatttaggtctgcaattacgcccaaa

SEQ ID NO: 210696 - DNA, 820 bp, Homo sapiens
tgccaccacgcccggctaattttttgtatttttagtagagatgggttttcaccatgttagctaggatggtctcgatctcctgacctcgtgatccgcccacctcagcctcccaaagtgctgggattacaggcgtgaaccaccgtgcctggccgacatttgagttatcctaaactttaaggaatattgcttcatttttacttatttctggcagttatagaatacatcatatatttaatgtagataatatttttctctttaggaaaagatctctcaattctttgaagtttttagtaagctaccatattttctaaaatctatttaaaataaaagaagttgcagccatattcttgtaatattaacacaagcataagccactagttgctggataattcttacagagaaggtgtaaatagaaggcaacctcaaatccttctccatcaccttttgctgtttataagactattttcctgaccaccccccaacaccacagtaagcaagccataatacgtagaacaaaacccactccctatgtagtcccttctgaatcacactctcacctttcaaatgacaggcagacagcagagaccaagtggacgaaagaatctcaaagttggaagatggcctttctgaatgaacaaagcctccaagaaatatgggattatataaaaagactgaatctatagctgattggtttacctgaaagagatggggagaatggaaccaacctggaaaacatatttcagggtatcatccatgaaaacttccccaatctagctagaggccaacattcaaattcaggaagtgcagagaacctcagtaa

SEQ ID NO: 210697 - DNA, 459 bp, Homo sapiens
gcgtctattcaactttctgacagaaatctgggacaactactgtgggtggatgagaaaacgataatgaaggaaagtctggcagtggtgtagtgaaaaaagtcttttcaaatcacaattgaaattgttagatgagttaagtcactgaagaagattccgtttaccttaggcatgatttttttatatatatcattcaaagagaacaacgtgggcttctgttgagtaatggattcttaaattttctaatcagaattcttatctgccaatttaatctaatttacatcagcagcgtaagattgatgctttggcaatatatcgtcaatcaaaagaacccaggactctctatcagaagagctggattctaatcctaccccaccagacatgtattccttgtactgagcaattcgtataaccctctcacaaccctttccccacctgtaaaataaggctattggcttggat

SEQ ID NO: 210698 - DNA, 425 bp, Homo sapiens
tcaaggagaactttccatatcttatttttgctcctttgtatgaatttccatttctcctctctctctccctttccccccaccccgtctccctctcccccatcttctctccccaaaattggccctctcagttgcctcatccacagggaccagtgcttccaaattttaaattttttcctttagaagaccatccagactgagattgaagctctgtgtcccaattccagattccagagagaatctaatagaccttggtgtctactctgggacagatgagctgtagccagtgggacagaatgacctagcagacacagagctttgaagtacccatttctgtgggttggggacagttcccagaggggcctggtggacagtccagcaaggcttctgctacagtcttttttgttgttgttgttggggggacagag

SEQ ID NO: 210699 - DNA, 670 bp, Homo sapiens
cccaaaggattttctttagtctttctcagacagctctgccagtaattaattctctcagtttttgtttatctaggaatgtcttattctgcctctatttttgaaagggttttgctgaatatgaaattcttagttgacatatgtattttttttcctttcagcatgttcaatgttattcttctgccttgtggcctccattgtttctgatgagaagtcatcattcattctatttttgtatttccctttttataataagttatttttctctttcagcagtttgactctgatgtgtaaaaatgtagatttcttttcttttttttttgagatagagtctcgctctgtcaccaggctgaagtgcagtgacatgatcttggctcactgcagcctctgcctcccgggttcaagcaattctcctgcctcagctcccaagtagctaggactacaggtgtgcactgctacgcttggctaatttttttgtatttttagtagagatggggtttcaccatgtgggctaggatggtcttgatttcctgacctcgtgatccacccgccgtggcttcccaaagtgctgggattacaggcatgagccaccgtgcctggcatgtgtagatttctttagttttatcctatatgggatttattgagcttcttgggtctgtagattaattttttc

SEQ ID NO: 210700 - DNA, 423 bp, Homo sapiens
catagattttaaaaggtttaattaaattgatagatgatagatccatcatgaaaggtaaatttaaggggtgggggacattctgaatgtttttaggacaatgtcagtaaagggcagtgctcacccaagagacatatattggtatcactgtcagaatatagggccggatgaactgttgtgcttgtgaattattgggttacattattgaattgtgacccatttaatgacgtgttctgcttagcgtctttaggccccacctaactcttccagctctctattcgacattctctttggattgttttgctataacttgaaatttgggatgtcacaaacgaaactgtcatctgtttccgccaaactgtggttctgctaatctcccaggctggcagcattggagacttgctgacttctttcatcccccactct

SEQ ID NO: 210701 - DNA, 632 bp, Homo sapiens
tccagaaatattgctgcagtaaatggactatagtagtatattttagttttgcctgattttaattgtcaaacttgtggagtttttcagcttcactgttttcaagtttctcatcatctcacaaaatattcatggaattggtaatgaatgcccagttgtgtgtgtgagtatgtatttaatcagtgccagattaggttgtccctttgtatataattttgactttccttgcttatatctataataattttcactaaacatttgtgtaactaggtaaactgtaaaataattatctcatgatatctgtgacataaataatacaattagagatgctaaactgaaattataaattatacattattttaaagacttgaatttgatttcttttaaatgctcatacgtatttaccatcatatagtaaaaaggttttaaagaatagttaagacagaaacaaggtctattaaatgggacagaagtgctgaaatttacaaacagaaaagtagctcatcttgtggtcttcctcactgttcagtggttacatgtgacatcatatttttaaatcatacctagaaatttttaactgtactggataatgtttgtcttctttgatgataaagacaaaccatccatctgggaag

SEQ ID NO: 210702 - DNA, 253 bp, Homo sapiens
cctactccaagaaatgaatgagggtggccagcctgtgaggctagaagcaaaatggaatcagccatgctagactttcttactgtcatcatctttgcaaaggcagtttcattaagacaaaatatatctaaatataagcccactccactactacacattgtacctcctggtattgtttagaatgacttttcccctgtctttccttttttcagggccaatgtattcttcaataaataaatgtgacttgatttcaaca

SEQ ID NO: 210703 - DNA, 508 bp, Homo sapiens
ttgaacccaggaggcggagctgctgtgagccgagatagcgcaactgcactccagcctgggcaacagagccaggctctgtctcggaggaaaagaaaagaaaaagagaaactataacaacattatgtgaagtgttgtctgctatggaagctcacaaaagcctaggagtccagggtttttcttggtgggtgatcttcaaggtacacaatgaatgaccagctaccaaagctctctagttcacgagaaggaaaggtgttcaccataaataatgctgtttgcacaaactggaacaatcaagttcaaagattcaatcacacaaaacgcaaaatattccaagagctcaattctggcctgtcaaggaacagtcacagaaaatggtcctcttgggaacatgaaagacttgagcaacttgggcctgctgaattaatcctttcctgcccaagataacagaaaatcatatgtggttatgtaagaacacactatacaacaatgaaatgttgctacatacaac

SEQ ID NO: 210704 - DNA, 523 bp, Homo sapiens
cttcacaaattcttctcaagtaacagggttggagcaaacttttactgttttgaattagatgaacaaaattgtatttaattttacttcccaagagaccttccattttctctgagaactttttctcatgatgaaattctttaagcaggtttattatcagatacagatgggattcatttagtgccaaggatgactaccaggttccagatttttgctgctttagtggttacctttattttatagcacagactgtaaatgagttattttagtaaaagcattttccatgagttttctgggaattaatttgataattagatgccagtttttaaaatgcataatatatgcatctgtatcaaatgtgtatgacaggtgcaaagcaacactttcccttacttggtttttctgcagcagcccccacatttatgaaagtactatggcattttttcttttcaccattgcactcctatctggcctattagagaatttttcaggatagggaagggagaagattgagaagatttctggc

SEQ ID NO: 210705 - DNA, 392 bp, Homo sapiens
ctaatttcatgacttgtggccgtctctgaagtgcttgctgcagtgtggagtgatcgtatggctttattgtcatagagaagaccaaataagagaaaaaacaacaaatgccaaccacacgatgggtgaggattaaacaggagaatgcacaggaagcttgcagcacctggtgagaactcaacgaaggtgtgggtccgccttctgatgacggaacctgttacagctgtctgtctgaagcgatgagatgaggcaacccttgctctgggaaggcagagtcacctggcatcatcaaggcctttagcacctgctaccacttgtctgctacgaagtaccagaaaatgacaaaaacctcggacttgaagcaaataaactaagtaaaaactctgaacaccaaa

SEQ ID NO: 210706 - DNA, 338 bp, Homo sapiens
ctctcatcctcccctgacaacactttacttcattcttaaagactccttttgtcctgatggtgtttgtttcattgctttctaccgtactccagtctgaattttactgactcctagtgattgcttagacttgctatttgattctgttgtgtgatttttgattatactcctttgtgctatttaaactagcagtgtttacctaaattagtggtggtagtgaaggacacaggttggcccatttgaatgaaaatcaggagcattgcactggccctgccgttaagatgaatttccatgaattccctctccagaagggcactaggaatttggctggactacagaag

SEQ ID NO: 210707 - DNA, 473 bp, Homo sapiens
cggggtgcacttcaacaaacagtagagaagcgaacaaagcacacacttatccctggagattatactgttgcaggcgggacattcatttagctaccattgtaataagggatctgagggaaaccatggtcttcgatggaggaaacatctgatggaatcaaggaactcacagagggacttgagaactcagctctgaaggaagtgcaggaaacaagaccggtcttgtttcctgcacttccaaaatatagtcttcaagggtcctgacattccaaaaatcatcacactggttgactgtgtagatgggtttttttttgttttgtttttgttttttgagacggagtcttgctcttatcgcccaggctagactgcagtagcacgattgccaccactgtagctattgttcttttttttctttttctttttttttctgagacagagtctcattctgtcgcccaggctggagtgcagtggcgcga

SEQ ID NO: 210708 - DNA, 138 bp, Homo sapiens
ccttcatcttctgcaaagcaagcaggtaagcaattctctgcctttgaatctttgccaagataatgtaaccatgggagtgaaatcccatcatatgcacaagttgcgtgcatattcaagcgggggagattataccaagtg

SEQ ID NO: 210709 - DNA, 471 bp, Homo sapiens
ttcagaaaacttagaatatgattttaaataaaaataataactaaactaaaaaagcaaatcctgtataagcccttagttacttgggaagtcatttaaaagttaagcccatatcatctcaaattccaaaacttattgcaaggtaaataatcaaaagggtggtgctggcacaaagaaaaaagatatagattgatgggacagaaatgaaaatctagaaataaacccatctatggtcaactgatttttgacaagggtgccaacaccactcagtggggaaaggaaaagactatcctttcccttcaacaaatgatgctggtacaactagacagccatgtgcaaatgaataaagctggatccttacacttcacaatatacaatggctcaaacacttaaatgtaagagctagaacaataaaactctacaaagaaacatagggataaatcttcagggtaaaccctgaaaatctggcaatgg

SEQ ID NO: 210710 - DNA, 423 bp, Homo sapiens
ctagcaacacttcagggtaagaactacagcctgagactccacctgctatgatttgaatgtatcccacaaatttcatgtgttgaaaatttaatccacaaattcatatgttgctatttggagaatggggccttaaagaggtaatcagaattagataaggtcatcagggtgtgacccccataatgggggccactttattagaagaggaagagagacctgagctgatatacacattcttaccctctgccatgttatgacacagcaagaaggcttttaccagatgtggccccttgaccttggacttcccagcctccaggacactaagaaataaatttattttctttataaattacacagtctgtattatagcaacagaaaatggactaagataccaccccagggttctcttctcctaattgctcaggt

SEQ ID NO: 210711 - DNA, 409 bp, Homo sapiens
ttctttttcctggagagaagcatgctgcctctgaacagtggagaggaggaaaatcatcagcatcctcattggggtcaggtgacctgggcctcgttcttccgctgccacctgccagggttgggattgtcacagaagactgttcctctccgtggtgactgattgcggagagataagggggttaggaacatgcagcttgctgtgctgggctcagaagggactccatgtgattgactccagtggagacttattttacctgccatttctgtagcaagaaggaacccagatggggccaggggtctgtgaatgcctggaaagtatatgtcaaacattgtgtgagggtacacatccttttctggggaagaagttccatggcttttaaaaatcagagtcctaaaggatcccagtgact

SEQ ID NO: 210712 - DNA, 582 bp, Homo sapiens
ctctaaaacaggaaatgaggttaaatgtttgtttttcaaatacagaattatttgctaagctatgattgcattcttttaaaattactttgttgaacttactttattcataaaactcaaatcaagtttttagttttcctctgtatttaagcagttttaacctccaagctatatttataaaattgtttgatctcaatagatgttattcagggtatactccatacaaaaattcatattagtgcagtggcaatattggattttatattgccatatggctacatataaataattgaataaatagtaataaaatcattgggttaaagatatcaatgacaattaagaaaatactaatgcccttccatccctgagaatgataaaaaaaaactatcttcatgattcattatatagttgaaaaaaatttttaaatgtctcattaactagttagagctgtcagattatttgtaggaagctcatttagatgttgatatgtttattactaggccaaaatgtaagaagatccactttgtgccaacaatgcgcccacatatgctgatcccttctggcttcttcataagtattttacac

SEQ ID NO: 210713 - DNA, 524 bp, Homo sapiens
ctctaaaacaggaaatgaggttaaatgtttgtttttcaaatacagaattatttgctaagctatgattgcattcttttaaaattactttgttgaacttactttattcataaaactcaaatcaagtttttagttttcctctgtatttaagcagttttaacctccaagctatatttataaaattgtttgatctcaatagatgttattcagggtatactccatacaaaaattcatattagtgcagtggcaatattggattttatattgccatatggctacatataaataattgaataaatagtaataaaatcattgggttaaagatatcaatgacaattaagaaaatactaatgcccttccatccctgagaatgatataactagttagagctgtcagattatttgtaggaagctcatttagatgttgatatgtttattactaggccaaaatgtaagaagatccactttgtgccaacaatgcgcccacatatgctgatcccttctggcttcttcataagtattttacac

SEQ ID NO: 210714 - DNA, 504 bp, Homo sapiens
aggagaaatacctaatgtaaatgacaaattaatgggtgcagcaaaccaacatggcacatgtttacctatgtaacctgctcgttgtgcccatgtaccctagaacttaaagtataataaaaaaatacaaaattaaacaaaaacaaacaaaaaaagaatatctgaggttccagttaactgtaattattcatgttaaaattagccttaccgtataaggtatcatttttcactatttttagcagtatcctctatatttacctccacatctaaataatatgttcataatcctatttcttgatttgataattttatactttatctgttgacttcctgttatggcaaataaggatttatttagttttttgtagttttccccctcctctcatccttccagtagagttctatcacaatattttgctaaatcaattactctgtgtttatgttattaatactataaaaatattgttccctgcaaagctaaataaacctgtgcttatatacctttta

SEQ ID NO: 210715 - DNA, 540 bp, Homo sapiens
ttctccatttctgaatggaccaggtagttcagtactcagactgcaggtatacaagggaagagagaaggccctgcccttcaacgggtagaaatgccctacaatataacatagagaaatgccctataatataaccacaggatccagccatctgaaattttcataagcttccccctacattatttctcctaggctatatgcaaaaacagtgataacttgatatgaacatggctttgggccctttctgtctagaaaaacaaatgggttcactatgacaatcagaaataaactctttcatctgtcccgcagaatttcatgaaggagtaaccttccattctaggctttgtctaatggccaagcattagacaaagcattagaaagcagttcctttctcaaaactgcctgctgagaataagcacatagctgcccgactatccggagcctcaggcccaaaggttccacttcagagacagagatgctaattgatccaacctgctgtccttcgtggagaagacagtggggcccagtgccctggtgaaccaa

SEQ ID NO: 210716 - DNA, 346 bp, Homo sapiens
agaggagtgtgtggctacctgctgatgggagactcagtgggctgctggggacacccataagctgcgggcacatacctactgcaaactcaccccagcaacctaggacatgaatatccccatagctagacctggtagacttaaagccaaccattcctgatacttctaatcatgaaaaattataattagaatgtctgtttggataaagccaaatattaaggagttagtgtaaaagctgtgcccaccctccccccgccccgagaatcctgtgtaggcattagaagtcatgcaatcaaagagtttatgagtacacgagaagcaaaaaaaagcagaaccacatttgcataca

SEQ ID NO: 210717 - DNA, 507 bp, Homo sapiens
agtgtccttaaggttcatccatgttgtggcatgtgctaggatttcctttcttttaaggctgaataatattccattgcatattttgtttatccctttatctgttgatagacacttgtgttgtttttacctttcggctattgggagtaatgctgatatgaacatgagtgtacaaacatcttttcgagaccctgctttcagttcttttgggtatatgcccagaagtggaattgtggatcatgtaattctatttctaattttttgaggaaactccatactgttttccatagtggctgaaccattttatattgccaccaacagttcacaaaagtgctaacctctctgcagcctaatactttttctttttttcctgttgagatggagtcttactctattgcctaggctggtaggcagtggtgcgatcttggtgcactacagcctctgcctcccaggttcaagcgattctcctgcctcagcctcccaagtggctgagatgacaggcgcatgcca

SEQ ID NO: 210718 - DNA, 576 bp, Homo sapiens
aaggaaattacctcaatgaaataaagggccatgtgtgaaaagcccacaactgacatcatactcagtggtgaaaactgaatcctttctctttaagatgatgcacaagggaaggattccttttctcaccacttctattcaacattgtattaaaaattttacccagaccaagcaggcaagaaaaacaaaaagcatccaaataggaaaggaataaatataatgatcttttcataggtgacatgatcttgtacgtagaaaaccctaatgattccacacacacacataaaactgctagaactaataaacaaatttagcaaagttgcaggacacaaaatcaacacacaaaagtcagttacatttctatactcagcaatgaccaatctgaaaaggcagttgaggaaacaatcacatttacagtagcatcaaaaagaataaaatacttaggaataaactttaccaatgaggcgaaacacttctacactgaaaactacaaaactttgcagaaaaaattgcagaaaacacaactaaatggaaagaccttctgtgttcatggtttggaatccttaatattttgttaaa

SEQ ID NO: 210719 - DNA, 383 bp, Homo sapiens
gagggctgtatcctttagtggtcaaagcctgtctccctgggctcttcccaaagggctcagctcccaagtggcctcttcctcttctgcctcctccccatccaaactcctgcttttcagtagggtcaatcctgagaatgaaacagtgacttgaaattgatcttccctgaggttggatgagtgatgatccctgttattcttggagaggtattttcttttggttaagtagtagattagcccaaacgcgtctctattcagtggcatcccagaagatgtgaatgatatattttgagatagtgagtttcccctgaaagccctaaaataggaaccctggtaacctctgcttttatgtatgtgcttggctggtcctattaacactagctgga

SEQ ID NO: 210720 - DNA, 594 bp, Homo sapiens
caccttgttatcagatatctaatgtcacacactatgtgtgagtgcagttttttatgaattgcagaattttaaaaaaacaacaaatgacatttcttttccagtacttactttgtttatttaagaaaaatttggtatccctcttctacctcctggagctctttttaccatccctgtctttgaagggattcagagtacccatgctcttctacgcatttttatttaggtatcttttgtaggtatgtccttaccttgaaagtgccttacgttccaaaatgtattaattcaacaaactttaagtgattattatgtgccagataagacagtatttcagccctgggagaattccaccttctgaatagttttctcaagctagataatcataggaaagcaaggactttcccataatttttagttcctctaagccagtgctttcaaactttagtttgtgatccattaatggcttgtaaattcaatttagtgagtcacaataacaattttaaaaagtaatggggagtgtcagtgtggtgcataaagtaagggtaaacattattatgggaaacttttgtttgcctcttttttttttttttttttttt

SEQ ID NO: 210721 - DNA, 381 bp, Homo sapiens
tcaggagttcgagaccagcctggctaaagcggtgtctctactaaaaatacaaaaataagctggatgtgcttgcttgaacccaggaggtggaggttacagtgagccaagatcttgccactgtacagccaagatcttgcctgggagacagagcgagactctgtctcaaaagaaaaaaaaaagaaagaaaaaagaacagggggttgagtcagacagtctggagttcaaatccaactgtgctccttcatttctgtatgaccttcggtgagtgtcttcacccctggaactcacatttcatcacctctgaagtgggcataacaatctgtgctttgcaggctgctgtaaggatgaaatgcaataaagtgtgtacagcacttggcacac

SEQ ID NO: 210722 - DNA, 1346 bp, Homo sapiens
  misc_feature (1163)..(1163): n is a, c, g, or t
tgcgttgggttcttcttgctgcagggggcctggccactcatgggtggtcaggacaaacccttcctgtctgcccggcccagcactgtggtgcctcgaggaggacacgtggctcttcagtgtcactatcgtcgtgggtttaacaatttcatgctgtacaaagaagacagaagccacgttcccatcttccacggcagaatattccaggagagcttcatcatgggccctgtgaccccagcacatgcagggacctacagatgtcggggttcacgcccacactccctcactgggtggtcgacacccagcaaccccctggtgatcatggtcacaggaaaccacagaaaaccttccctcctggcccacccagggcccctgctgaaatcaggagagacagtcatcctgcaatgttggtcagatgtcatgtttgagcacttctttctgcacagagaggggatctctgaggacccctcacgcctcgttggacagatccatgatggggtctccaaggccaacttctccatcggtcccttgatgcctgtccttgcaggaacctacagatgttatggttctgttcctcactccccctatcagttgtcagctcccagtgaccccctggacatcgtgatcacaggtctatatgagaaaccttctctctcagcccagccgggccccacggttcaggcaggagagaacgtgaccttgtcctgtagctcctggagctcctatgacatctaccatctgtccagggaaggggaggcccatgaacgtaggctccgtgcagtgcccaaggtcaacagaacattccaggcagactttcctctgggccctgccacccacggagggacctacagatgcttcggctctttccgtgccctgccctgcgtgtggtcaaactcaagtgacccactgcttgtttctgtcacaggaaacccttcaagtagttggccttcacccacagaaccaagctccaaatctggtatctgcagacacctgcatgttctgattgggacctcagtggtcatcttcctcttcatcctcctcctcttctttctcctttatcgctggtgctccaacaaaaagaatgctgctgtaatggaccaagagcctgcgggggacagaacagtgaataggcaggactctgatgaacaagaccctcaggaggtgangtacgcacagttggatcactgcgttttcatacagagaaaaatcagtcgcccttctcagaggcccaagacacccctaacagataccagcgtgtacacggaacttccaaatgctgagcccagatccaaagttgtctcctgcccacgagcaccacagtcaggtcttgagggggttttctagggaga

SEQ ID NO: 210723 - DNA, 446 bp, Homo sapiens
aacaggtggctttctacttgggtcccctctgggatattctcagcatgcaaaaggggtttgtttgcacattcagcatacttaggcaggctttagaaatattgacttaagtggaaattgcctcaaaaaatacagataccagctgggcatggtgtctcatgcctgtaatcccagcactttgggaggccgaggtgggaggatcacctgaggtcaggagttcgaaaccagcctggccaacatggtgaaaccccacctccacaaaaataccaaaattagccaggcatgatggcaggtgcctgtaatcccagctactcaggaggctgaggtgggagaatcgcttgaacccaggaggtggggtttgcagtgagccaagactgtgccattgcactccagcctgggtgacagagtgagagtcagtctcaaaaaaatacagagtgagagacagtctc

SEQ ID NO: 210724 - DNA, 573 bp, Homo sapiens
ttaattatgtacgtaagtgtgttttggttgcccaaaagcttaataagggtctccaggatggtaccttgtagaggtggagcagacagagaatagcagccctgttctgctctgtgctggttcaggaggtattttggagagtgagacactgtgtggttctaaagggacgttgactgaatagaggagctctataaaaaggcaaccaagatctgggaagaataacaccaataatacctcatgaatattgaacgcttactttatcccaggtagttctgtaaggactatatatatattttttttcaatcaatcaatccaacagctattgagattcttctgtgtgtctgacgctattctaggcactgtggattcagtcctgaatgaaacagacagaaacccatgccctcccatagctcacttttctagtgcaagggggcagaccataaatacaatgagtaatgaaatatggaaatgtttaagtgcctagagaaaagtacagcaggtaaggggaaccaagagccatattttcagttgtgtttcccataaagccttgtggcatttactcatagtcagattaaa

SEQ ID NO: 210725 - DNA, 368 bp, Homo sapiens
tcattgttccccagtggaatagatctcctgtacagcagtcttcccatcccacaatattacaaggaaggttctgcaagcaccaccctcttcctgacattctggtgatgagagttaatgaccgcttatgtgggacacatgaaataacagaggttaaaagttatcaaagcgtgccatgcatctgaacagattatgggagctttggcagaggatgacagccctgatactctcccagtcactagacaagtgagctgagtccctgtgtcaggatgggaaaggcagatgcccccaagggtgtgacagatcaaagtgggccaagtcaccctgcgcttgttaaagtgtttttcctaaaaggaaaactttaaaacatt

SEQ ID NO: 210726 - DNA, 467 bp, Homo sapiens
aagagaagctgctggaagattcatcctctggggtctctgggttgatgttttacctcaatgcatctaggactcagaatagctggttgcaactatgactcttcattaacctgctgaataacatagaccagccatccaactttccccacttaagaaatgaggacattatctagtcttctcacttgacagaactgtcgtgagaaaagattatttatattaatatgctgaaagcctaacccacatggtgatggtattaggaggtggggcctttgaaaggcgattaatgagaacagagacagcatgattcagattggtgctcttgtaaaagaggccccagagagctagtgagccttttccaccgtggaggacccagcaagagggctccatctatgaaccagaaatcaggatctcaccaggtttcccagcctgaagaactggaagaaataaacttctgttgtttataagctacc

SEQ ID NO: 210727 - DNA, 385 bp, Homo sapiens
actgtgatccagtgatgagaagatggagtgcaatgctttataaactgttaagctctatgaaaaggtgtggtattgttatttccaaaatactcagttaaattactgattctttcagaaagacaataaaagcctacctgaacatccagattaacatcactaagcaacaccacacactaagggaagctaaagtaatttctgcttaaagataaatgaaaacatgatctgtgaccttacccccaacccggtgctctctgaaacatgtgctgtgtccactcagggttaagtggattaagggcggtgcaagatgtgctttgttaaacagatgcttgaaggcagcatgcttgctaagagtcatcaccactccctaatctcaagtacccaggga

SEQ ID NO: 210728 - DNA, 353 bp, Homo sapiens
aaagagggcgggggaggaggctacaatcaaactttcctggcccattctcttcgaagattccttcctattctggctaagaatcaagccccgctcctgcagaaggggcaaggaaagcggccgattcctgggtcgacgagaatctcccaagaactgtctcgacaggagaagcaggggcacccatgacctacaacccgcgaggcctggaggtagcaaaaggccgccttcgtcatttctctcccagcttggatgggagtgaggggttgagaaaatgcaggatgagaaatccaaatataactaacttctggccaactctctgcctgtatgactctaggtaccttggagccagtgccagg

SEQ ID NO: 210729 - DNA, 1415 bp, Homo sapiens
ggatcacttgaggccaggagtttgagaccagcagggctaatatggtgaaaccctgtctccactaaaaatacaaaaattaacagggtgtcgtggcgggcacctgtagtctcagctactggggaggctgaggcaggatatattgcttgaacccgggaggttgaggttgtagtgagctgagattgtagcaccacactacagcctgggctgcagagtgagactgcgtctcaaaaaaaaaaaaaaaagaaaagaaagaaattgtacattgtatttattcaaatttgaaaattatgtccaaatgagaaatgttatagttttgatttgaaaagattataacaagtttggctaaatgatcaggtgaaaacatgctgaagtccaacatgaaaaagtacaaagttggaaggaaaaaaatagatgatcaaaatgtgatataattggcaaggcacaatttggcagaatagtaatttattagtgctgaatgatttcgcgttatagcatttatgttgctttttaaatcttaccactattaatatagctttcttgtaagatgactgaacctttgttgaagtataatgttgcgtgttttaagctcccttgttttaaaaagtatatagatttaaagctgtgacaccaaaacctattatctagctgttgataaatggctctaactactggttacaagcatacagttatgatctattaggaaaatatgtgggaatttaagttatgtcagatagaaaatacagtttttaactgttgtctgtttcctcaatctagaaccatctatccgaaagagattaatgtaaacatgtgggagacactccctggcagagttttttaaaaaatggttacttaagcaacagattaataagtctttttatgaaaaatttaaaaattgcaaatagggccatcctagatcccgtaccaaaggtaaccgctgtttttttatttgaaatgtgtatcttttcagacttttctgacagggttttaaactctcattttaagttgtaagactaggcttgtttatttgttgaaaaatatctgagcacctattatgtgccagcctaagctagagactagagaaacaacaaagaacaagacaccgtgtgggaggcaaagtggctggagcatggttgtgtttagcggggaggtttgggcagtgggcaggcaatctcaagactgtgttttagtgtcttgtagatgatttaaaaacttgacctcaaggcccagcgcagtggctcttgcctgtaatctcagcactttgggaggccgaggtgggcggatcacttgaggtcaggagttcaagaccagcctggccaacatggttaacccccgtctctactaaaaatgcgaaaattagccaggccaggcgtggtggctcaagcctgtaatcccagcactttgggaggccaaggcgg

SEQ ID NO: 210730 - DNA, 301 bp, Homo sapiens
tataatagaataccataaactgggcagattgagcaaccaatgtgtatttctcacagttctgaaaggctggaactctgaaatcagggtgccaacatggttagagttttgttgtcagcccatctcctggtccacagatagctgtcacttcattgtatcctcacatggcagagaacaaagaggaaaagcaagttctttcctgtctcttcttctaagagctctgtgacggttaatattaagtgtcaacatgattgcattgaaggatgcaaagtattgtttctgggtgtgtctgtgagggtgttgc

SEQ ID NO: 210731 - DNA, 626 bp, Homo sapiens
tcttggcttactgcaacttcgacttcccgggttcaagcgattctcctgcctcagcctcctaagtaactgggactacaggttccagccaccatgcctggctaatttttgtatttttagtagagacagggtttcaccatattggccaggctggtctggaactcctgacctcaagtgatccacctgcctcagcctcctaaagtcctgggattacaggtgtgatccaccgtgtctggctacagacaaaacactttctaaattgaagagttctgtgcaaatgtaaaagccagtttttaaaagtctaattttgttcaatcagattgtaataagattctcagtgtgtacatatatcagtctatcaatttcctttactagaagaggtctggtggtcgtcatttcatacttcccaattttaaaactgtaggagtgctcagtagcccaggtagatacatagtctaatgtaaaagatgaaaggaggcactattttgtaccttcaacatagtaaacttggaatggctccagacatgaattattcatcagtttatccttccttttacaaaaacctgtgttggtaaatgaatagtggggactgtagtgcacttacacaccaaaacctcaattcctttgtg

SEQ ID NO: 210732 - DNA, 203 bp, Homo sapiens
aatagaccagtggaagagcatatacactctagtaagactcacctgatttatatcaaaagtgttctataatccaatggtttaagggcaatttttttttcaaaaaatggggccaaatcaattgaatatcctatgttttattttaaaaattcctggtttttacctcacatcattcattataagataatttgaaatgcatcatagag

SEQ ID NO: 210733 - DNA, 479 bp, Homo sapiens
attttcacctattgttgcctctgtgagaagagagagagctatggtagagaaaagaagaagtatacaagatgttgcagcaatgtggacgtagttggaggccattcattatcctaggcaaactaatgcaggaacagaaaaccaaatactgcatgttgttacttataagcaggagctaaacactgagtacacatggacacaaagatgggaaccatagaccccggggactacttaaggggggatggtgggagggggcaagggttgaaacactatcccatattgtgcttgctgcatgggtgatgaggttattcgaatgccaaactttagtgacacgtaatctacccatgtaacaaatctgcacatgtacccctgaacctaaaacaaaagtcggaaaaaaaagaaatatacaagataacaagtttattactaaatggtaaagaatgacaatttcattattaaaactttaaaaaattaaaaaactc

SEQ ID NO: 210734 - DNA, 1741 bp, Homo sapiens
aagatgttccagtcaggattcaatccttgatacacagcaaagcattcctatggtaaaaaggccccataactgtaattcacatggagaagatgccacacaaaattctgagttaattaaaactcaaagaatgtttgtaggaaagaagatctatgaatgtaaccagtgcagcaaaaccttcagtcagagctcatcccttcttaagcaccagaggattcatactggggagaaaccctataagtgtaatgtatgtgggaaacacttcattgaacgatcctcccttactgtacatcaaagaattcatactggagagaaaccctataaatgtaatgaatgtgggaaagcctttagtcagagcatgaatcttactgtccatcaacgaactcacaccggagagaaaccctatcagtgtaaagagtgtggcaaagccttccataagaattcatctcttattcagcatgaaaggattcatactggagagaaaccctacaaatgtaatgaatgtggtaaagcttttacccaaagcatgaatttgacagttcatcagagaactcatacaggagaaaaaccctatgaatgtaatgaatgtggaaaagccttcagtcaaagcatgcatcttattgtacatcagagaagccatactggagaaaaaccctatgagtgtagtcagtgtggaaaagcctttagtaagagctcaactcttaccctacatcagcgaaatcacactggagaaaaaccttacaaatgtaacaaatgcgggaaatcctttagccaaagtacatatcttatagaacatcagagacttcattctggagtaaaaccttttgaatgtaacgagtgtggaaaagctttcagtaagaattcatctctaactcaacatcggagaattcacactggagagaaaccttatgagtgtatggtgtgtggaaaacatttcactggacgatcatcccttaccgtgcatcaggtcattcacactggagagaaaccttatgagtgcaatgaatgtggaaaggcattcagccagagtgcttaccttattgaacatcaaagaattcatactggtgagaaaccctatgaatgtgatcagtgtggaaaagccttcattaagaattcatcccttacagtgcatcagagaactcatacaggagagaaaccctatcagtgtaatgaatgcggaaaagccttcagccggagtacaaaccttacacgacatcaaagaactcatacgtgaggaatgttttcactggcccttacctcatgattaactcttcagtaataatcatatgagacatacaatgtagaaacctaataaatgtaatgattgtgggaatctttcagttgaagtacaatatgtcatatcagataataccactgcagagaatccatctaaaagtagagaaatcttgattcagaatgtataatttcctttatatcagaaggtttaaatagctaatataaacaatgaagagtcatgctgaagataagttctgttatatcataccgcacattctcctttggctatcagagactctacactggagagaaaaatgtgagagtgtttaactggacagcccagagacctggtatgtagtcctaatctgccactgccttggacaacttgcctacttccaccaggttatggttctttatttggtaaatgaatgattttggagttagaaatcttgtaggagctctgttagctctaaaatgctacaactctataaatataatgaatgctggg

SEQ ID NO: 210735 - DNA, 1508 bp, Homo sapiens
  misc_feature (1452)..(1452): n is a, c, g, or t
  misc_feature (1469)..(1469): n is a, c, g, or t
  misc_feature (1495)..(1495): n is a, c, g, or t
  misc_feature (1506)..(1507): n is a, c, g, or t
aagatgttccagtcaggattcaatccttgatacacagcaaagcattcctatggtaaaaaggccccataactgtaattcacatggagaagatgccacacaaaattctgagttaattaaaactcaaagaatgtttgtaggaaagaagatctatgaatgtaaccagtgcagcaaaaccttcagtcagagctcatcccttcttaagcaccagaggattcatactggggagaaaccctataagtgtaatgtatgtgggaaacacttcattgaacgatcctcccttactgtacatcaaagaattcatactggagagaaaccctataaatgtaatgaatgtgggaaagcctttagtcagagcatgaatcttactgtccatcaacgaactcacaccggagagaaaccctatcagtgtaaagagtgtggcaaagccttccataagaattcatctcttattcagcatgaaaggattcatactggagagaaaccctacaaatgtaatgaatgtggtaaagcttttacccaaagcatgaatttgacagttcatcagagaactcatacaggagaaaaaccctatgaatgtaatgaatgtggaaaagccttcagtcaaagcatgcatcttattgtacatcagagaagccatactggagaaaaaccctatgagtgtagtcagtgtggaaaagcctttagtaagagctcaactcttaccctacatcagcgaaatcacactggagaaaaaccttacaaatgtaacaaatgcgggaaatcctttagccaaagtacatatcttatagaacatcagagacttcattctggagtaaaaccttttgaatgtaacgagtgtggaaaagctttcagtaagaattcatctctaactcaacatcggagaattcacactggagagaaaccttatgagtgtatggtgtgtggaaaacatttcactggacgatcatcccttaccgtgcatcaggtcattcacactggagagaaaccttatgagtgcaatgaatgtggaaaggcattcagccagagtgcttaccttattgaacatcaaagaattcatactggtgagaaaccctatgaatgtgatcagtgtggaaaagccttcattaagaattcatcccttacagtgcatcagagaactcatacaggagagaaaccctatcagtgtaatgaatgcggaaaagccttcagccggagtacaaaccttacacgacatcaaagaactcatacgtgaggaatgttttcactggcccttacctcatgattaactcttcagtaataatcatatgagacatacaatgtagaaacctaataaatgtaatgattgtgggaatctttcagttgaagtacaatatgtcatatcagataataccactgcagagaatccatctaaaagtagagaaatcttgattcagaatgtataatttcctttatatcagaaggtttattctgggngaggggatcctaaagantcggggtggtgcaaaggattgcaaanaaaagggaaanna

SEQ ID NO: 210736 - DNA, 355 bp, Homo sapiens
ttttcagactgctccctggtttctcttttttagggtttaaattatcttgtttgacaggtcttccacctgtctctcatagtggtggttttccatgagtgcagaaatttgtttgcaaactcatcttgcataggagggttttttctccttatttgcccctcactagcagctgaaataatgattgagccttgaccaataggatatacaactctgaacaaggttccaaagtaagcttttaggattttctctagaacggacaacaaaacataagatatgtgtgtgctgcacagttgtaggtcctattctcacacctatctctgcttccttcctgggccatgggagagctacctgccacaaa

SEQ ID NO: 210737 - DNA, 378 bp, Homo sapiens
ttaacacccctttcttggtcctgaatcttgaattaatgattaagaacagaaagaatgattggaggccactatctcagtagcaacagggtaactaggcattccctgctatagccctgtggctatgtttcctctgaaatactactagttcctacccctttcaaagtctggtacttcaagtcttttgtctccctcatatggcttccaataaaagtcattttgtataagctggacagcaacccctaaccaaaacatgattccccaaatgttaatacccatataaatgaacgaaagaggaaggcctcagaaatctagcttcttaatgccaccagtaaaacagtgtacagggtgactctccaagagtgagttaggatgtggggt

SEQ ID NO: 210738 - DNA, 655 bp, Homo sapiens
catgagagattctgaaaagaatatctgggctttagaaaactgtagttggtagctgaaataaaaagataaataaaaaataaaatttagtatcctctctctcatctctgcctcactctctactcagcacctctgaaccaacccacccactccccagcttcaggaggaccggggtgcccatgctctgtgtctcatgatcttctgcctacaggaagcctatcccatcccctacccgaagttggttaacttgtgttttttctttccaagctagttctagtttcacttccttctggtagccaatggtgagagttttgattctgcctgagtttgctcctttctccattggtggagtcttcaagccaataggccaatgaatgatgattcctcactggactcctctcttggtggtcctgctcctatggacaggagccctcaggccatgctttgaaagatggccactacacatgccggatgtccactctgttcagatgatgcttgagactcaacctgaatctggcttttcctggactggcaaggtgttgagggagcaagttgttgaggaatccacacaagggaatgatggctgacctgggagggtccagtacagctgcagtgagccacatctgccttgagtgaaattattcctagataatgagag

SEQ ID NO: 210739 - DNA, 634 bp, Homo sapiens
  misc_feature (583)..(583): n is a, c, g, or t
  misc_feature (619)..(619): n is a, c, g, or t
  misc_feature (634)..(634): n is a, c, g, or t
catgagagattctgaaaagaatatctgggctttagaaaactgtagttggtagctgaaataaaaagataaataaaaaataaaatttagtatcctctctctcatctctgcctcactctctactcagcacctctgaaccaacccacccactccccagcttcaggaggaccggggtgcccatgctctgtgtctcatgatcttctgcctacaggaagcctatcccatcccctacccgaagttggttaacttgtgttttttctttccaagctagttctagtttcacttccttctggtagccaatggtgagagttttgattctgcctgagtttgctcctttctccattggtggagtcttcaagccaataggccaatgaatgatgattcctcactggactcctctcttggtggtcctgctcctatggacaggagccctcaggccatgctttgaaagatggccactacacatgccggatgtccactctgttcagatgatgcttgagactcaacctgaatctggcttttcctggactggcaaggtgttgagggagcaagttgttgaggaggacctaccttgttctttggcctnctggagggtgggcatctgccatttgtgaagctgtcntcccctagcttttgn

SEQ ID NO: 210740 - DNA, 358 bp, Homo sapiens
  misc_feature (332)..(332): n is a, c, g, or t
tttttttttttgagagacagggtcttgctttatagcccaagctggagtgcagtggtgccttcacagctctttgcagccttgaactctgggctcaattgatcctcctgcctcggccatctgagtagttgggacaacaggtatgcactaccatgcccagtgaatttaaaaaaacaaacaaacaaaacactttttgtagagagagggtcttgctatgttggtgaggctggtctcaaactcatgccctcaagtgatcctcctgctgtagtcctagcactttgggaggctaaggcaggcggattgcttgagctcaggagtttgagaccagcctggcnagcatggtgaaaccctatctctttac

SEQ ID NO: 210741 - DNA, 357 bp, Homo sapiens
tggatgtcagtgcatcatcgtctcaacttctttttaatgtccatgggcacccatccaacaggtaggaaaacctggcccaacaaaggcagtctttaattttgctcactggtggtaagagccggagtgcgagtgttggacatcttggaaaatttccccaggcggcacatgagatgatatttggatacttgcaaagaactttctagaatctccacagcaaagagttaaagaagtgtagattgtccctcactgtaatgattacggggtcttgtttttatttaacatggagcattttgtctgagcttctcatctccaaatgcataaccccagaaggcttctccacccttgccccttcactga

SEQ ID NO: 210742 - DNA, 816 bp, Homo sapiens
aaatgaacagaatgaatgtaaatgcagggtgatggatttcaacgcatacaatagaagtttctaaaaattacaagagtctaaatgtgaaatgggctgtctcagggagcagtgagtttctgctaaagtgcttaatcagaggctgcatacccgtcatcagcatgttcttctaagtgtccggttagggtgaactctaagccctcttcacctctaaagattctgtggttttgaatcttgatccccacctaaatgacctcctcatttagtccacagacaatagtatgcatattccaaaggagcaagacatgtctttgggagtccccctgaatttcttttctccgtagacctctcttttgagttgcccttgactatctaaaacagcctcattgttaaacccttgtcagaaagagcttttctttttttctctttctccaactagaataggcttgttagcaacccatcctttcaggatcttggtctttggtcaagatctaataatctaatttaccctgataataccaaaagactaagggttcccaggttaaaaaaaaaatatgcattttacaagaagccttttggcggcccaaaccttgatggaaaggtgcattaatgataggaatttaaggatccctgtaaatctctccctaccttttctatctccttagcctgatgtcagatttccctttctacctgtagcaaacaccagaaaacttgtccttctgatacccttctaagctggggtctccagaaagcctaaaatgttataggccaccaagtcctagaagggttcactcatcacccccaagtaggccctatctg

SEQ ID NO: 210743 - DNA, 329 bp, Homo sapiens
atgtgcttagtaaatattgatggaattgaatgggagagtaaagaatagaggtaacagatctattgtcttttttaaataaggactgaaggtcattgctatgttttatagaaggaccatatagtcccagcaaatagaggatatgcttaacagctaggaaaacctgagaaccaaatccagctttaccacttaacaacctttgtggccttgggaaagttactaactttcctgaactgtaattttcttttctgtaaataccgtctactttacagagattttatgcggattaaattagacaatgtacatatagagtcaggcacacaacgaacacc

SEQ ID NO: 210744 - DNA, 478 bp, Homo sapiens
aatactacagaaaagatatttatagattgtgatgactgacatcaagggaataaagaaggtgatgtataataatggagtgtatttgagggtgaagaaagttctctctgtggatgttatttaagctgaggtctggaaaatgagaatgagccagctaagagaagaggaagaatattccttatagaagtagagtaattgagctaagtgtggtggctcacatctgtaatcccagaattttgggatggcaaggctcaagggctgcttgaggccaggagtttgagaccagcctgggcaacacagcaagactctgtctctacaaaataaaaaatgagccattatggtggcacgtgtctgtaatcccagctactctggaggctgaggtgggaggatcacttgagcccaggagttctaggctgcagtgagccatcacaccacagcactccagcctaaataacagtgagaccctgtctcaaaaaaaaaa

SEQ ID NO: 210745 - DNA, 539 bp, Homo sapiens
tgctgggattatagcatgagccactgtgcccagccacatattagattatctgagaaaacatttaagccattgggagttcctaacttggagcaggagcagaaagctgaaaatagaagtgccagcgagggtctgtgtacatcagagatggaattagatgtgtagcatttgccgttataaaaaataaaataaaaagttgagggtaggtggaggttccctcaacaagtcaatgtcttgaaacaagtgggggtggatattccagattaaaaacagatgaaagagacattatttgacaaatggagcatctgaaccatgattgcatatcagtttggaaaaaacagccatgaaagactttttggagacaaatggaaaatctgaatatggactgcatggcagatgttaaggaattggtgttaattttcttacatgtgattatggtactgtgattgtgtaggggaatatccttattcttagcaaagcttaagtgcaactacatgcaagtgggtcagcaaaaaataataatagtaagtgtgtgggtacac

SEQ ID NO: 210746 - DNA, 337 bp, Homo sapiens
atgagtatttgataacaaccagaactgtacattctgggccaggtacggtggctcggcctcccaaagtgctgggattacaggcgtgagccaccgcgcccggcctacatcgtgctttcttggtcatcacagaatcctcagcagtcaataaactttgaataagtgaaagtgtgggtattgggagagtaaggattaagttgatgcaacatttttagcctgactggttgggcacatggcagtggcatttgctgagatttgaagcaaagccagaagaaagggctgagcttgattttgtgttttaaatatgcaagggagaagatgctaagtgcggttgtagata

SEQ ID NO: 210747 - DNA, 207 bp, Homo sapiens
taaactctaaaagaaaaggactttgggccttatatctgccacccattctttcaatggaggtgacacccctcatttctatatttccagtcatctctcaatgaaaaggaacatgcaggctggctggcctttggagagcaccccacacagttttgaggagctctgcagctctgcttgccctttctgcatcacagcagatccaaaaggtga

SEQ ID NO: 210748 - DNA, 332 bp, Homo sapiens
cttcaaagacattttgaatgaagtttcaaaagctagcattcctaaaccaaatcatgccaatgcagtctacaatgaggcaggtctacgttcccagactcctcaaggctcacgcgtaggtctggggcaggcacatcttagaagcacatccgtttcatatcatcaagacactccacacctgggcaccactcacagctgaactaaggccccggacacaaggtataggggcctggctccttcgccccaaagcaagacagctcctggagcgaggggtgcagacaccaccacccagcctcctccccttcacccacaggtctcacaccagggcgcactaa

SEQ ID NO: 210749 - DNA, 390 bp, Homo sapiens
taacccaaatagcactttgactattgaataaattcaaatttttgtttaaaactttcccagtagaaaacaccaggcccagatggcttcactggtaaatcctacccaaatatttcagaaagaaataataccaaatttttccagaaaatagaagaggtgggagtgtttctccacatattcaataaaccagcacaatcttgataataaaactagattactacaagacaggaaaactatagaacaacatgatcataaatgcttacataatcataaatgcaaaatttctttaaaattttttagcaaatcaaatctaataacaaatataaaggattttctccttggaataacagattggtttaatttttgaaaatcactacagttcattatattaac

SEQ ID NO: 210750 - DNA, 485 bp, Homo sapiens
tggttggttttgtccttacgttggtctacctgccaaagatggcattaatctggggtgtacttggggagcaaagcaaaggatgcttgagtcgcaaaaaaaaatctcaatccctaattctcagcccaaaatcaaataattccaatttagagcaataactctgattagcagtgaatctctctctgaaatatcccaagatgagcaaatgttattgaaactgtaaggctgggggcctgggaagagatgaaaaatcaccaaggatttaagaaaagctttggctggcctccaatttctaacaatgctatgatgtgttcctctagcttctccctccctgagcttcctgtcatcacacagcactgaggcagaggtccaacaggcagcatcagctacaaacaggcagcaaggagccagagcactggaattcaactacaaagttcaggggacaagctcaaggtaggattgattcagttcctccaacggttagagac

SEQ ID NO: 210751 - DNA, 456 bp, Homo sapiens
aaggaagggaggaaaggaggaagggagggaaggaggaatttactagaagcaaattaacttctgtaatcctaagtacttgttaaggcagaaaaacgcagataagaaaatcgaagttgagggcaaggagctcatctttcacggtcatagacctcagttgcaacatctggaaaaagagctggttgggcatgccgggcaggcttttgtgacaatgtaagagcaagtgaagattgcatctcagtatgagacaccgtaagagcttgataaatggtggaccctctgatgttgacaacatgatgtcaaagatggtgtttgctgttgtttcaaatgtcttatttcaaattcccaattagtttcttcatgccataagggcaaaatccacatctcatactttttcaggatctgctctcacttccccaaacatgtaataccaccctggtcttcaagtccactctcaaa

SEQ ID NO: 210752 - DNA, 489 bp, Homo sapiens
aactatcaaatttttaaataaaggcacatccaaaagaagttgcaagtgagctaaagttaatttaaaaatatttaaaatcatcacttgttcaagaaaaaattctcaaacatgacaatgttctcaactgaaaacaaaacaagaagtagactttgaaggttttactaatgagtgttcttccatcaaagccaggaaagtaacattctaataaattcttgggctttgtttgtttgtttgtttggtataagtaaaataatttaaacttaatataaagttttaatgtacctacttttcaactttccaactttttttatgctacctcaatgttctggaaaaaattaaccgattaaaatacatcaaggccaggtgtatgtttcacacctgtaatccgaggcactttgggaggccgaggcgggagtatctcttgagcccaggattcaaggctagcctgggcaacataacaagaacctgtttttatatttttttaaagta

SEQ ID NO: 210753 - DNA, 547 bp, Homo sapiens
tccacccataacaacagagtctttactgattcagaagaacttgcaagtgctttggattttaaaaaacacattgaagttcttcattacttactccaactctggccaggtaaatgattctatggaaatgtttttcactttcaatgatagggtatttgaattaactaatcattaaatatgctcatatatgattgaagaaactcttctagattttgctttttcaaaatgttgtgaattgatacctgccctttagatttttttcatttaaatgttttctgcctttgctgatgacattgtaggcacgtagattaatgtgcacatgttagacttggtcagatctagatttaaatcctggttgtgccacttattagcaatctgaccttgggttggtttcttaacgtcttagagccttgtatcatcttttgtcatatggatttaataatatgtttatagatttttattaggatttttaaaaattgtgtatgtagtgtgctcagtgtagctcttgacatgtaatagagactcaataaacactaatttatttactctt

SEQ ID NO: 210754 - DNA, 967 bp, Homo sapiens
taaagttccagggtgcaagtgcaggatatgcaggcttgttacataggtaaacgtgtgccatgtgtgttgctgctcagatcaggctatcacctaggtatgaagcccagcatccattagctatttttcctgatgctctccctcctcccacacctccaacaggtcccagtgtgtgttgctccccaccatgtgtccatgtgttttcacatgtgttttcaccgttcagctctcccacttgtaagtgagaacatgtggtgtttgattttctgttcctgcgttagtttgctaaggataacagcttccagctccatccatgtccccacaaaggacgtgattcgttcctttttaaggctgcatagcattatggactggataaagaaaatgtggtacaaactcccttcttaagcctgtttcccatgcaggattgtccaagggctgattccttcccactcagcccattttcgttcatcttctgctcaccccctcacaaggaaatccagccctcagccagcctcatccctccaggagttttcacctaccctgcatctgtcagcacctccaagtgtttatccccatcccagccttttcctggccctgagctgtggattaatttcctgttgctgcggcaacaaatcacagatttagtgacttaaaacaacgcaagtttattgtcttacatttgttgagtcagaagtctgaaatgagtattaaggggctaaaaccaaggtgttgacaggaccacattctttgtggagacttttaggagacaatctgttaccgaccattgccagcttctggaagctgcccatgttccttggctcgtggccccttccctgcatcactccagcctctgctgctgccatcacatctcttcctctgactctggccttcctgcctgtccttataaggacccctgtgattatactgggcacacctggataatcctggataaactctccatctcaagatc

SEQ ID NO: 210755 - DNA, 930 bp, Homo sapiens
taccaggactaaattttgataaaatgacttttgctgttcctttcatatctaagattcttgaggagaattaaatatagtagtctagagtttcaacctttgaacataacgaccgtgggcgtataccttgtaaaggggtaacactggtgagccataaactaatccaaaaattcacaccttttcttttgttcttacaggtaggtaatccataatttcattgtcggtggtggtatgttcaattaagtactgtttgctaatatttaccttctaagtgcactagtaagggttgctaaaaattactttgaaaaagccaacattgacatattactagtttactgaagaccaaaagtcagtattttcactagaagtctgcactctagacactacatatataacctatcactctctacataatagattatttgcaattatttagttattttatctaattctaattataaccctatggaatttttatgttactgttactacattttacagaggagaagacagaggtagcagaaaactaagctaatttcccaaggtaactcaactagcagaagatagaaccacatgtggagatcaggctccagagaaatccttttaacatctacactatatttcatcttagcacctgtagagttgtcgagcttgagcggcacgtgagaaggcaggcataagtgggctgtggttgaacaaaaaatgtcagagataaatgatcatcagtctagaggtgaagacaatgtgggattagagtgaggaagaaggtacctgcttggaatgagagatgtagttgctttgagtgactggagtctggatggcgtagtagcaacaaggagagagagggccaggcgtggtggctcatgcctgtaatcccagcactttagggggccgaggcaggtggatcacaaggtcaggaattcaagaccagcc

SEQ ID NO: 210756 - DNA, 969 bp, Homo sapiens
  misc_feature (223)..(223): n is a, c, g, or t
  misc_feature (259)..(259): n is a, c, g, or t
  misc_feature (265)..(265): n is a, c, g, or t
  misc_feature (480)..(480): n is a, c, g, or t
  misc_feature (485)..(485): n is a, c, g, or t
  misc_feature (507)..(507): n is a, c, g, or t
  misc_feature (571)..(571): n is a, c, g, or t
  misc_feature (818)..(818): n is a, c, g, or t
  misc_feature (850)..(850): n is a, c, g, or t
  misc_feature (960)..(960): n is a, c, g, or t
ctgagccagcggctgctaggaggctgtgtccgcaagccagcggggcgaggcgcctgggccctgcgcgtcaggtcccggcctggggcaccggggctgccagcgtcggaggaggcctgagacctgggaggaagctggagaaaagatgccctctgaatctttgtgtttggctgcccaggctcgccttgacaccgaatggttgaaaacagatatacagatggtagtntcgaaccaagtggaacaaagaaagaagatctgaatnacaaanagaaaaaaaatgaagacgaaactcctgcacctgtatatagggccaagtcaattctggagacctgggtgtgggtcaagcaaccagatactcgggagactgaggcaggagaatcgcttgaacctgggatgcagaggttgcagttagccgagatcgcaccattgcactccagcctgggcgacagaacgaaactgtgtctcataaaacaaatataactnaaatngtaatgtgtttctttaaaactnaagaaaatgtgcaaggtggatgtcttcctgtcacttcgcacagcctactgccatagcacctganccccagaccctaaactcactgtcctgctcggggaccccagaccacactggccattgaaggcaccccaagtactctcctatcctcacctcgctcctgcagtaaatggctaaatgaataactcagaagtgaagccaaaaaagaaaaagaaaatgcacatggggaacaggagaggcgagcagaggccagtctggaagcctgggctgatacgctgtgaagagatgtctccgggtgctgcctgcggggcgcntctgccattcagaacacacctagagaagtctnaaccttaaagagcacacattcctgagttccctgcctgcccacaaaactttccttgaaacaccctaacctctgagcctttgggggggctgatttcagtgataactccagtncttccatgt

SEQ ID NO: 210757 - DNA, 517 bp, Homo sapiens
  misc_feature (223)..(223): n is a, c, g, or t
  misc_feature (259)..(259): n is a, c, g, or t
  misc_feature (265)..(265): n is a, c, g, or t
ctgagccagcggctgctaggaggctgtgtccgcaagccagcggggcgaggcgcctgggccctgcgcgtcaggtcccggcctggggcaccggggctgccagcgtcggaggaggcctgagacctgggaggaagctggagaaaagatgccctctgaatctttgtgtttggctgcccaggctcgccttgacaccgaatggttgaaaacagatatacagatggtagtntcgaaccaagtggaacaaagaaagaagatctgaatnacaaanagaaaaaaaatgaagacgaaactcctgcacctgtatatagggccaagtcaattctggagacctgggtgtgggtcaagcaaccaggtaatctgagttttggcactttggaaagcttgatctgacgctccttttctaaataacttggatggattattcgtattttttggtaacaattttaaaaaatgtaattaaaaaaatttaaatatcgtggtaaaatatacataccgtaaaacttgccattttaaaaaaaaa

SEQ ID NO: 210758 - DNA, 499 bp, Homo sapiens
  misc_feature (16)..(16): n is a, c, g, or t
  misc_feature (22)..(22): n is a, c, g, or t
  misc_feature (31)..(31): n is a, c, g, or t
tttcaactctttgccngcaccncgactcttnaggatcccccatcccagaataaaccttgcggaaaagaaatgttggcagagaaaaaaaaaaaaaaaaaaaaaaaaaatgggggggggggtgaaggaaggattgttctcaagactaaagagacataatcactaaatgtaatgcatgaaacagctgaagccatgttcaaaaaggtaagtttgaaggcagctacagaaatttgaatatggactgaacattaagcattgagaaatgtctttagatgctataatggtattgtgactactttggaaagtgtcctgacagatgcatgctgtaacttttaggggtgaaatatgtctgcaactcactattcagcctaagtgttcacacctacacatttacataaaaaatatggtaaaatgttaattgttgaatctaggtggtaggaatacatgtatacacagtatttttttcaggatatgcttgaatattttccaaaaaaaaaagaag

SEQ ID NO: 210759 - DNA, 526 bp, Homo sapiens
tctgaatgtttaacttaagacaccctgctgaacatagcattctcactctaactccgtgaagtgcacaataatatacatttgaaggtaaggattgaaatatttatagtactaggttttcccatacagtaatatgaattcaggatacatacataaaagacaacaaatgtttttcattttcttcatttgagctttgcactttaataacaaatttagtaatttgttattaaaaaatagtataaactctaaattaccttaagaacaaccaaagcatacaaatcgtactttaaaatgttaaattttggccaggcacggtggctcatgcctgtaatcccagcactttgggaggccgaggcgggcagatcacgaggtcaggagatcgagaccaccctggctaacacggtgaaacctcgtctctactaaaaatacaaaaaaattagctgggcttggtggcgggtgcctgtagtcccagctacttgggaggctgaggcagaagaatggcatgaacctggaaggcagagcttgcagt

SEQ ID NO: 210760 - DNA, 499 bp, Homo sapiens
cagtgtgtaggatgctggaaatggtggagatgggcctgcgaagagagtgctgggaagtgatgacccaggagcagcagccgggcacctaacaatgggtcagcaccgtgggcgtggagacaagggccgggattgatcaatacccaagaagtacaatgtacaggacttgggctccatttggatggagtgggtgagggaggagtcagaaatggcttccggtttccagcttgggcctggggattggagatgtccccactgagagtagggcacaagtgaggaaatggtttggagaggaagatgataagttacatcatggatgtgctgagtctgagttgcctatgggacttggaatggggggtggcaaaaggtgtgtgatcttgagcaagatattcaactcttctgggccttgggcttctcatttgtaaaacggtgataagaatattacttcccatttgtgttgctgtgaatattaaatgcgctaccacatgtaaaatgttgagaa

SEQ ID NO: 210761 - DNA, 411 bp, Homo sapiens
agattgcgccactgcactccagcctgggcgacagagtgagactccgtctcaaaaaagaaaaaaagaatgatttgctaattaattatgcaggcagctgatccagtgctgtgtaaccttgggggccaccagatgccaatcaatcagtagaatgggagagaaggatggaggaagtgaggacaaggggcaaggaggaaggtctgtccacctgtctcttctgtgcaggaggtgtccaagcaggaggagcacgtcacatccccactgaaaaagcccacagaaaatgaaaagcccacatgcttgtccattgctgcaggatgggggcaagtggagggggagaggtgtcggcgctcccaccttactcccagtcatggctgactcctccctttccttcgttcttgttcctaatctgtcacc

SEQ ID NO: 210762 - DNA, 153 bp, Homo sapiens
acaaaaaacctttcaatccttcactatcttccttagcaactaccatcctccccctttccttaacctctacacgaagttcatcctcatcatatctacttccttgccactcacattcagtcctctggtctctgtaattagagttttgcccctaca

SEQ ID NO: 210763 - DNA, 422 bp, Homo sapiens
tactgcactgattggcacacacacgtgtgcacacacacacgtgcactctttcccatacacgatcaaactcacactcatttactcacgcacacttggtctcccccacacactttcttcctctctctctcttgcgcttccacacacacacttgcattctctctcactccctcagccaacatgccgctttctggacccaggctgaaatgtctggtgtgcagcgtgtcaaacctcattgttagggtctctagttacagcacatgcttcaaacatcaggtggcaatccttttcctaactcatcaggctgtgggcctgagctgctgacgccagctcctagcttggaaatgcttcttcctatttgtaaactcggaggagaagctcttgctaaagcgtcctgttctgatcattatgacttactgtaaaga

SEQ ID NO: 210764 - DNA, 525 bp, Homo sapiens
taggctggagtacagtggcgcgatttcagctcactgcagtttccgcctcccgggctcaagcagtcgtcccacctcagcctcccgagcagctgggactacaggcacacgccaccatgcccagctaatttttgtatttttttgtaaagatggggtttcaccatgttgcccaggctggtctccaactcctgggctcaagcagtcagtataatccctccggcagtgctgggattacaagcatgagcaaccacacctggctgtcctcagagttaaactttaaaattagtagcatgttgttaactttatttctttccaaagcagatttgaaagagctaaaaacattcagaagtacagaataattaattgaagaattgggctgaagagaaagtaagtctagaaaataagctctggccaggcacagtggctcacgcctgtaatcccagcactttgggaggccaaggcgggcagatcacctgaggtcaggagttcgagatcagcctggccaacatggtgaaaccccgtctctac

SEQ ID NO: 210765 - DNA, 615 bp, Homo sapiens
tgaagcaggaggatcacttgaggccaggagttcaaggcctcagtgtgctatgatcacatctgtgaatagctacagcccaggcaacatagcaagatcctgtttctaaaaataataataaaatagaaaatattatattatagagaagatatacaataatacataataaataatatataaaatagaatcataatggcaacatcgtatgtatatgccagtacctatgactaatttagaagaacgccagtttttaataccacaaatatcaatcctgtaaacatttttatatagaaatggatgtacaaatttcttatttccttagcataaattctcaaagttgagctatatcaaaaggtatattattattatttactatgaatagagcttgccagattatccatctggaattgtttagcagtttatgatagtgtgtttctatctcctcttcaatattggatattattttttaggcaacgaagttggtagataacaaatggcatctcacttttattttatttatttaactttattttgtgattttatttagaacataatatcaaagttgtttattagttagtagtattagttctttattggtacgtttccttattgctacat

SEQ ID NO: 210766 - DNA, 353 bp, Homo sapiens
cctggaaggcgtctttaatcaggatttggtagtacacaagctctccggattgtctgcattaacatacagggacttaaaaaggcacaaaatccctcgcacagcgacgcgtgacggcggggcgccccctccccgcccgtgcgcggccgtgtgcgcgtgggtgcgtgtccgtgtcccacccccgtggcggcgccgcgcgtgtgcgtgtcggtttcaagtgttggatttgtacagtactcgcagtctaggggcagggggctcagtgcatgcttttctacccgggcctggggccaccccccgacgccgctatgtacactaaggaggacgcaccccggagagagagaggaagaaaaaaa

SEQ ID NO: 210767 - DNA, 278 bp, Homo sapiens
aaaaaagatccaaagaaagggtggtagacaaaggtctagctcctaggctgagggcctcagggcagaatgcggcttcatcctgagtcaatgatcttctcaggtagttgcttcatatatacccccttcccaacaccagagctgctcttagactgaggtcaagtgtgagccagagatggctggagatatgagaacaagagcaaagcggacaggaaagggctaggagggatcgcaccaacacactccagcctgggcgacagagcaagcctctgtctcaaaaa

SEQ ID NO: 210768 - DNA, 315 bp, Homo sapiens
tttttaattagttgacaccaataactagtttagaagaggctgtgtcatgcccagtgtggtggctcacgcctgtagtcctagcacttggaggctgaggtggtcggatcacgaggtcaggggttcaagaccagcctgaccaacggtgaaaccccatctctactaaaaattcaaaaattagccaggcgtggtggcacacacctgtaatccaagctactcaggagggtgaggcaggagaatcacttgaacctgggaggcagagattgcagtgagccgagcgccactccagtctgagcaacagagcaagagtccatcttc

SEQ ID NO: 210769 - DNA, 280 bp, Homo sapiens
tagcacacccaaaaaagttttaagaaaaaattccaatagactaagaaaaaatagtctatatttactgacaacctacaagtctagtatgcactagaatttacatcgacaagtttttgaaatgacaagtcttagacaaataattgatactatcttcacacccctcagtggaggtcatttcagtagaaagagccggaagtggcgacgtgatcctagacacgctctttcttctctccctgggacccatttccttatctgtaaaacgaaaaggctggactagatg

SEQ ID NO: 210770 - DNA, 1037 bp, Homo sapiens
tgggcctatggctatgcagctggagaggaagggatagtgtggggagcttggacttggccgtttgggacagggggatgggagaggcagaggtcctgcctcaggcctccataggagtgacatttgctggtgtcagaagcttggcaagaggggaggatgatcagaccctgcatggacagttcgaattggagctctctgcagagtccaggaagagaggtctggatgggagggaagccatggggtggaaaagatagcttccaatggaaggcagtgaaaactcgccataagtgaaggagaagaaggaggccaaggagagggggcaggaatggcagccggcagccaggcggtcagtggagcaggtgctcaggaggcccacaggagagcttcgtggaaggagtggacagtgtctgaggcaaggggcaaaaggcatctgctggagctggtgaccccagcttggtgccccccaaagccagagtacgaggctgagaggatgcaggtgtcctcctaggaggtttgagtcagaaggcacgaggcagaagcagtgggggaggactccctcagtagagcgaggaggaggcccctcatccaagaggaggttggagcacaggggggtctaggtttgcagtttcgggaccggtagctgaggggtcccagggcctttcttctgtgaaggagaatgtgtccaccgtggggagggggtcgggagagagagatacttcagagtggacagggctgagaaagctttatgggccgcgaaaggcagagtagttgttggtggatgagggtggctgtggcaggtggcgtttcaggtgagacagctcggggcccagaaagacactgggaggaggagagctctgctctccagagaaacaggagcagagaggaaaacagagccgcagcgagcggcttgtggtctggggatgaagcccaggttgacagcatcctctgcttcgctggtggaggtgggggcatcattctcacacctgtgctgggtcctgtccctgccagccaagggagaccaggaccctgccactgttgcg

SEQ ID NO: 210771 - DNA, 363 bp, Homo sapiens
  misc_feature (318)..(318): n is a, c, g, or t
  misc_feature (349)..(350): n is a, c, g, or t
  misc_feature (353)..(353): n is a, c, g, or t
  misc_feature (358)..(358): n is a, c, g, or t
tgggcctatggctatgcagctggagaggaagggatagtgtggggagcttggacttggccgtttgggacagggggatgggagaggcagaggtcctgcctcaggcctccataggagtgacatttgctggtgtcagaagcttggcaagaggggaggatgatcagaccctgcatggacagttcgaattggagctctctgcagagtccaggaagagaggtctggatgggagggaagccatggggtggaaaagatagcttccaatggaaggcagtgaaaactcgccataagtgaaggagaagaaggaggccaaatcggcaaagncaggaattggcggggatcctctagagcgacnncanggcancaatg

SEQ ID NO: 210772 - DNA, 586 bp, Homo sapiens
aaagcttcatttctatacacttactgtcctttaaatagttactataccccacttccagtgaaacttgttatactactgtgtgaaaaaaatggacttttctctatccttcatttccacaacttcagttagtatggacactgtgtgtcctccactagagagagggttctctcaggtcaaggacatctataatgtttttattttttgagacagggtctcaactctgttgcccaagctggagtgcagaggtgtgatcacagcacactgtaacctcaaactcctgggctcaagttatcctccacttcagcctcctaagtagttgctaggactacaggtctaccacagcagcctaatttttttttaattttcatttttgtagagatggggtctcacttgatattgccccagatggccttaaatcctggctttaagtgatccttctgccttggcctcccaaagtgctggaattacagatatgaacgaccatacctggcccccatgaaatgtttaagcttggagggaacaaatgtaggctaattagctcatcttttcagctaaggatggctagaaagtggctgattcatccaaa

SEQ ID NO: 210773 - DNA, 561 bp, Homo sapiens
gcatactcaaagagcttttgaacagtatcagaacattcatgatatgtagtttttgcatctttgaatcatatgccaacaatgtactctttggaaacttatacatccatatattgatcaatttcataaaaaggaaatcaagttcattctgagtaaaagatgtgggataaacctcaaatttaacagcagattgttggaatcaatgaggatggaagctgaaggtgacaagcacagttacctcatggtgttctgagcaagttcatcaagtatcaacattaaattgatacaaagactgtatttcatcggccacaccagcacattctcgcaggattcagggctaaaatacaactgtcagcataagaaacaaaaaagcccatttcttagacaacttgttaaaatgctatctttctttataactttctctaacttggtacatatcaatatcaatcaatgtcacaatgatttaagtattgacaatagaggttttggaaagcaagtgaataaagaaaaggatgaatgattttgtgtttgtatgtgtgaataatcaatttcattcttattgta

SEQ ID NO: 210774 - DNA, 503 bp, Homo sapiens
ctctctcttcccaaacagtgcctttactaattgaattgatcagcatgatgacttgccacctcctgaccagtcctagaatgcctagtttagcccactcgtgggatggccaccttcaaacagcaagtgtatgatgctgagacaggactggggcagaaagtcaggtaagccacccaacaggtgggccagaggaatggtgtcctctgagactggttagcatcctgtctgcatggtggatgggattagctgcaggacacacttctcacttctacaaggggatcatgatcatgacactttctgatgtctctaaagtgactgcaggtggatgatgaccctcaaaaagctgcaaaaattctgagtggatggtaagcagaacacacaagaagatccttaggggacagatgagtttcaggtgtcaaatgcacaaatccctgattctttaagtatcaatccgataggtcaatacaaatatttggaagcaggtttgcaaagaaactaaaaaaaga

SEQ ID NO: 210775 - DNA, 564 bp, Homo sapiens
gcaacagaaaattagttactgtcacctacaccatgggcttctttccaacatttttccaaaaatgatgctttgattctgagggtgacatctctgcctaacttgagaatggacatttgttctgatacttagttttcacagttatcataatttcttttttgaacaagatattttaactcttttcactgcacatatttattttcccaactgttctcatttgccaaactaaagctttaaaaagtatctcagaatttgtaatggctaacacttttaaaaatgaatttggttttataagtcaagctgacacaacacaatttttcggacaaattaagtccccaactttgctgttgcctgaataatttgtgccccaagttacagagctattgacatcattctcctttggaccatcacccaaaaaacagagtgtttctattctagttctcctccttcagggcaagacacatgtcactttttccagacaaattgacacccaggcaaatttcaaacattgttgtataactactttagaatcagagacttcaaacctttgactagtaatatgtaaaa

SEQ ID NO: 210776 - DNA, 1019 bp, Homo sapiens
cagaggtcaaggctgcagtgagccgtgatcatgcctctgcactccagcctggacgatagagcaagactttatctcaaaaaacaaaaatttaaaaagatatcaggtagctcatagaattgttgagagggctgtaaaaccaggcttgaacttaaacagcaacgataaaccacccacagaacggacatgatgaagaagttggcaaatgttaccaactgtcctggtttttttggtgactgtagtttccaaggattcagatccttccatgccaaaatctgaaaaatgctgggcaaagtatgactgacaatgtggtaatcttacagctagcactagagacatcaagcactagacaacacaatttgccctttggccacttatacaatgggaactcacgcttgcagtaacctctattgccactaggagagagaaacacagaaggaggaagggagaagggagagagaggaaaaaaactgttgcttgtctccttagctgtgagtcaaaggtctaacacagatgtctggctgaaaagcctaggtcacatgcctgcaccccagagaaagtatgtgacatcttctgcttccattatgggaaacagcctttgcttgtcacgaagatttacatggtgagacatatcctaaatatagggaagctgttgaagtggcccaaataatgaccaatttctactaatttgtactaatatccaaattacttttaattatctaatattacttagatacagtgaggcaaccattcgttggatatataatggtttctttgatttcaaaaatctttttttatgtaatatatgtctgaagaccatcaaaataaattcttaaagtcagattaataggatgttacttataatattattgtaattatttgaccacataatagtttatgcccattatatactatgtaattgtatgatggaaataatgctgtactttgtttgtaaaagtttaattatcctgacctttgttcatcataaagaattgctccatttctattatttatcgaggaaa

SEQ ID NO: 210777 - DNA, 521 bp, Homo sapiens
gagatggagtcccgctcttgttgcccaggctggagtgcaatggcacaatcccggctcactgcacttcagcctggtgacagagtgagactccgtctcaaaataaataaataaaaataaaaaaaaataataattccttacatttgcacaaccctccatggtttgtagaattttcccctgctacctcttttaattattacatccccgtctgaggacaggttggcactactgctgcactgagcaagtaagaaaactatatgatcaaagagatcatgtagctgtccagatctcctaattctcatgatagttggcccactgtttccccatcatactacaatcacttcacacttttaaatcataggtaactgtttttaaaaggacttttggtttggtgcccccatgaatgaacctgctccactgaatctgctaaacaaatctggcatgtggcttagggtgtggagaacctggtgagtacagtcgaggctatatccagtggaaaatgtaaagatatacaaaagtggagt

SEQ ID NO: 210778 - DNA, 561 bp, Homo sapiens
ccaaaggggtagattctttctgtgactctcacactgcaaagacctgtcctgccccaactgcttataactatatatacacatagttgttttttcccctctcttttacacagaggaaatactttatatattttgttgttgtttcaaaaattgtatggaaattaacatttcttgtctcgggatggtgcgaggcacagaacaagaacatcatttcatttccttatgatcttctgtctcctggcggggcacccggcacctctcctttggcttatagggtggagtttagacaggacctaacgaccaccaactctacttaatgacaggtgttgggtaaaagtttgccatgtgaataaatgaatgtattcatccttaaggtcccctcattttcccctagagtagcccagagcctcatttcaacctgatagcctcagtgcagactgtgatgtgccccgttggagccccagctggcatgcagggcagtgggctcaaagtgaggtgcgagaagggggtattaattctttgtacctacttataaaaaatttattaaaactattcctgtattaa

SEQ ID NO: 210779 - DNA, 258 bp, Homo sapiens
aggagtaatcccgggataaagggaagtaggatgagatttttttacagcaagaggctaaggacaggaatattttaagaagggaagactggaagcaaggatgcctgtaagaggccatcaggagtaatcccgggataaagggaagtaggatggtgcaatgaagaatttaaggtggcaaatatgagactgtagagtagactggggttgatctaattaagaattaaaattcagagatgatttaaacattaaagagataatatt

SEQ ID NO: 210780 - DNA, 192 bp, Homo sapiens
aagcatacatgaaagtagaacaaatgctatgatgaaatccagtatttccattcctcagtttcctgttattgatactttataatttcatgtttaaagaggggtctctttacctctctgtgccttccttcctgctggaatatccaatcatgaagtctgtcaatactttagaatgtatctcctagagaagaggtt

SEQ ID NO: 210781 - DNA, 447 bp, Homo sapiens
agcctgggtgatggagtgagactctatctcaaaaaagaaagagagaaagagagagagagagagggagggagggaggaaggaagggaaggagagaggggggaagaaatgcactgggctgagcgcggcggctcatgcctgtaatcccagcactttggatggcccaggtgggtggatcacttgagcccaaaaatttgagaccagcctgggcaacatggcaaaacctcgtgtctacaaaaaatacaaaaattagctgggcatgttggctcacacctgtagtcccagctacctgggaggctgaggtgggggcatcacttgagcccaggaagtcaaggctacagtgagccgtgatcacacgactgcattcctgcctgggtgacagagtgagtccctataaaaaaaaaaggaaggaaggaaaagggaaggaaggagaaagaaagagagagaaag

SEQ ID NO: 210782 - DNA, 108 bp, Homo sapiens
ttttgtggtgggggcctttgcctagagcaaggtcagtgtggaatatacagagaaggatggtgtctagcagcaactacctcctttctgctgccctcatctgtgcaaaac

SEQ ID NO: 210783 - DNA, 548 bp, Homo sapiens
caccacgtcgcgtcctaccaggcaatgtcaggaaggaggttgcctttgagcatcgctgttttctctaacgaggtgggacaggagcagtctccggttttgagagattatgaaatgctttcaaaatgctctactttccgaaaatatcttacactctgcttgaatcttcttcaggaggaagccattaaaacaggagcctggccaggctcttacctgtgaagatgcattatgcacattttgccctcttactctttttgaatctctgctcctggtctttccctgcccccgccccgcccagctcctaccgcccccgcctcggggctgaattgtgctttgatttttgggtgaaagataagtcacaatttaaaagcgaatttcttcaggcaaagacattaataatactttaattaaaatgcacttgtaggccaggcgcggtggctcatacctggcgctttaggaggcgcggaggccaaggccggggaggatcgcttcatcttaggagttcgacaccggccaccagcctgggcatcttagagagacgccgtctctac

SEQ ID NO: 210784 - DNA, 567 bp, Homo sapiens
agtagttatctgaggactggtgaggactggctgaccctttcttatacatgaggaagtatgagtaggactggggcgggggcttgaggctgttagaagtcaggggaagttcctaactgagaagctgcacagaagtgatggaagtctcatttggtagactcagatctattgggagatttggtcctgtattagtcccttctcacactgctataaagaaatacccgagactgggtaatttacaaaggaaagaagtttaatggactcacagttctgcatggctgtggaggcctcagggaacttacaatcatggcagaaggcaaaggagaagcaggcacctccttcacagggtggcaggatggagtgagtgcaagcaggggacatgtcagacacttataaaaccatcagatctcgtgagagtcactatcatgagaacagctccggggaaactgcccccatacctccacccttggtcctgcccttgacaagtggggattgtggggataattcaagatgagattttgggtggggacacagcctaaccatatcaggtcctcactttggggatcttgc

SEQ ID NO: 210785 - DNA, 296 bp, Homo sapiens
ctttctcatcaatacaattcactctacatactgctacctacctgataaaactctgctcagaactctttcaatagctctatatagtgaactcaatcaaattttaacccctatgcctaacttttaaggccaaatttatatcctccttatttatttatccaagctaatttcctacttcagatggacaccaaagaatcaaatcagccgtatcactgaacaatcacaaaatggcccatatatcaaccctcatgcttcctaacacagcatctgttggcttgaccttctgatggtgtcaatgc

SEQ ID NO: 210786 - DNA, 575 bp, Homo sapiens
gtgctggtattacaggtgtgagccaccccacctggcctctttgttatttttgtttttgtatttgtttttatttcttaaaatttctatgaattacaaaaattcttgcaagagtctatccttattttggatttattctgtctttgtaatctagttcttaatagccctctgttcttaaggatagcaaaacagattggttttaagaatgaatggtttgttgactgtcttaaaaaataacgcagggctcggtggctcatgcttgtaattcgagtactttgggaggccaaagctagaggatcctttgagccacggagttataccagcctgggcaacatagggaaaccctatctgggctcttaaaccttcataggtcctataattactatgtttgagcccataaatattaaagtatttcacataaggaaatgctgaattatataattaaagacagaaaagtagtataaagtacagttcttcactgttaattaaattgttttgtcaaaggtcctaaacttttttgctcttaccctggcacaatagtgttcaagattaaagagtaatttgtcctttattttcag

SEQ ID NO: 210787 - DNA, 157 bp, Homo sapiens
gtgtccaatgattaggtgggcatagacgtgcctgtaaaagggaagaaatggaacagagccatctgttcctgtgaaatcactttctttagtattaagtgtaggtacaaaaaaagtgtcttttgtaatgcatctctgtaacacagcatattttccctaa

SEQ ID NO: 210788 - DNA, 514 bp, Homo sapiens
gactatgctttttgccaattctttggtgagaagggattggtagttaattatagaaccactttctatattaattctagatattgtattctaatccttagaaagtaggctgtggaagaactaataattgccctcaaggacccattctcttcttctcataagagaatctatggttgcccaactaaagcttctatttcgcagcactcattgcagatagttatagctatggactcagttctggccagtggactctgaataaaggtactatgtacactgttggctgtgctcttaaagctaagggatgtgccatctcatcccctgtgctctctttgttggctgggaagctggcaggatgataggagttaagccagccattatggactttcagatggaaaccagctgttgaggatgagagagcgacaaaaagaagaccgtcaagattgtggggctaatttaccagcctgaattgccaacctgtgtttttgtattacaggcaaataaagtatgtgtttttaaa

SEQ ID NO: 210789 - DNA, 850 bp, Homo sapiens
cattaacttggggtgaatctgcttatctgaggcaatgttatatggaaaaatcaatgctcagatgtgaagcagagttcgtgttttatttattaattcatttttattaaatatagttaaagagggcctttctcacttaaagaatcatattaaaaccaaaattagattaatggaactaccatataggaacataatattgttaagatttttgataagtttaaagaaacatgccttttcattgagaagtagagaaaatatttaagctcttgtaaaagatggcagtaaataatttgtatgatatcatttattcaagtattatctgtacttgtagaaatgtttttgcaaggtatataaattttgtattgtctatggatgtaatgtaccatttagaattttatattttacattagaagtgtatgatgattcagaagaatatattactagaaccagtgttctctctattcttcattccatttctcaaaagtgttttgtactgtttgccctgttgctcactatgattttgtatattcatctaatggattcactgggaatttggtatagcatatttctcacagtgctgcctggcacactgtttcagttcctgatctcctttgaattattgcttgagtttgctaattttcttttaaatagatcaaagcagcctctttatgccataagtttagctccagtgacattgaatagtcattgtcaagtactggttgtttgttgaatattatgtttaatagcaataatacgaaataacatattactcatgcagattattaacttaatgttaaaagaagccaggattaaaatgtatcactcaaataaaacatcttgtcttactaacata

SEQ ID NO: 210790 - DNA, 381 bp, Homo sapiens
ttaaatcttcattcaggctttaacttgcacgcacaagtgtgtgaaccttcctctccatctccagggcctggctccaaacagcatttccatggtcatggaaatgatctgaagacttccacagatgcctcactacttttttttttttttgaaaaagggttctattttttcccccaggggggaggggcggggccaaaatattggttaatggaacctttaaccccagggccgaattgaggggccgggtacgggtttaattaaaacttcaacttttgggcccaaggcggtcttccggggttaagtttccaaaatggtgggataaaaaggcccccccaacattccccggttatttttggtttttttggaggacacaggtttttgttg

SEQ ID NO: 210791 - DNA, 172 bp, Homo sapiens
tgttattttggggcttatcaactgagaaaaagtagaaatgaaaggtatatcatcttaatgaaaaaagccatttgtgagtcttctttctttatctatttgttctgctttataacggtcaaaatccagaagaggcgcctgcgaaaagtgatatatattcaccatattctcctgc

SEQ ID NO: 210792 - DNA, 427 bp, Homo sapiens
actatatggaatctatgaagctgcaaaaatgtgatgaatccttaagcatttacacggaagtgtctctctttcccttgtgcatgtggatggacatgcatgcgtgtgcacaaacacacacacacacacacacacacactccttactttagttattccatactgagaagagcttcctacatagagcccttaccattccctctgaatatctccaccctcctcactgtaagaattcctgctcatccttcaagactaatttcagagtatcatctcactaagaaagcctttcctgactcctgtctgggtaggacttgcacttaatgtttgctgaatagaataaagaaaaaaaatctacattttctatattctaaaaattagcttgaaatgtcattctcgaattaattgttatctattctctttctctcaaattc

SEQ ID NO: 210793 - DNA, 468 bp, Homo sapiens
ccattaaaaacaaacaaacgaaagaattatttgactcagtaatcctcctctttctaatttatattctcaggaaataatccaaaagaaggaaacattaccttctttaacaaagatgtttgttgcaacattattcgtaatagagaaaaagtagaaacagcctagaggttcagaaacaaaggaatcattagttaagttgtagagtgttaaatataatgcatttatagaaaatgaggattataaagtattatagcacatggaaaatacttactgtataatatagggagaaaagcaggataccaaatagcatattcactatgagtgacatctacataagcatatattcataaggaaaagactgcagagaaaacacagaaatgatagtaattgtgatgatctgttagaattatctgtaacttttttcacatttttttggtactgtagtcatgttgctttggcaaaaaagtgata

SEQ ID NO: 210794 - DNA, 418 bp, Homo sapiens
ctatttctggatacttttctcctttataaaatctttcacataaatacaataagaaaaatttaagtcagttttaaaatagtttgcctcacttgtatgtattttaaatattagctagaattttggatgcacaaatatgtattgcaaaatcccttcttctactgagtggtatataagtttttttaaaatggaatgtggatgctttaataaatttcatattgcagtgaagacactgagcacttagagacaatgacatcaatacaatgaaaactgattccacagaacacttacaaatgcatacattttcctccaaagaaacatgtttttcacagatttaagtaacaaatgatttacataggattcttctgattccaaaatatgtacagaatttttgactgtcagaaactgattagcagtggtt

SEQ ID NO: 210795 - DNA, 312 bp, Homo sapiens
tacccctatttcttactatatacaaaaatcaacttgaagaataaagacttaaatgtaagaccccaaactataaaaccactaaaagaaaacacagaagaaacagtccaggacattggtctaggcaaacattttatggctaagacctcaaaagcacagatagcaaccaaaataaacaaatgagactatattaaactacaaagcttctacacaacaaatcaacagagtaaagagacaacagggaatatgagaaaatattaatatctgcaaactattcatccaaaaagggactaatatccagaatatacaaggaac

SEQ ID NO: 210796 - DNA, 143 bp, Homo sapiens
acttgtcacaggcaagaattatcaatggatgctacaacaggagggcaaaaagtgtaagaaggaggatacctatacagtctcaatgtatctctctacaagaaatatattagttatgaagggaaaaataataacttcactgacac

SEQ ID NO: 210797 - DNA, 403 bp, Homo sapiens
ccatatggcaaaactggagggattacaaaatctctgcagagatggagcttgcaatggctccatggtgataatgtcatttagaaccaaaggtctggagctgaggaatcaatcaggatgagggcaggcaaaaaagaacaggacatttttcccacccttggcaatatgaactgaggccaagtaggggagcagtagtgttgttgctccaccaaacaactatgactgtcctcagctgtccagtgaacagcaggcttgtcctgtctcatttgcagcatgtcttgggtgctcaaatacagactgggaggattgagttcagttcttggtatttaaaaggactcctaaaagcaataatagacaaagactttcatcctcactcccaccaactcctcccaatcagaattagaaa

SEQ ID NO: 210798 - DNA, 490 bp, Homo sapiens
aattagccgggcgtggtgacggacgcctgtaatcccagctactcaggaggctgaggcaagagtatcacttgaacccaggaggcggaggttgcagtgagccgagattgcaccattgcactccagcttgggcaacaagagcgaaactccgtctcaaaaaaaaagaaaaaagaaaatagaaaggccactaaacattaccgaaagacaaaaaccagaaatatgtgtctgggccaggtgcaagtggctcaggcctataatcccagccctttgggagggcaagaccagaagctaatcctcttgaggccaggagttgtaggctgcagtgagatatgattgcaccactgcactccagcctggacaacagagcaagaccctgcctctatatattaaaaagaaagaaaaccaaaaagaaatatgtgccttacaatggcaagacgtggcaaaaaaagagaagaaaaaaactcttcatctcaagtcatagttcaaacctcct

SEQ ID NO: 210799 - DNA, 1200 bp, Homo sapiens
  misc_feature (1)..(1): n is a, c, g, or t
  misc_feature (30)..(30): n is a, c, g, or t
  misc_feature (45)..(45): n is a, c, g, or t
ntagagtttcttacaaaatcgtcctatccngcatgcacttttggntactctttcaactcagaagtcaacataaagggtatggatgatgacgccactcacagattcaaagaaagggcaaactggcagagtgagtcattggatgttgctggcacagctataaagatccagtggcccaagttgtgtacctgaattcaagcagtgggacaaatgagggtttggcatgcagctcgtcatcttaagagttactatcttcttgccctggtgtttcgccgttccagtgccccctgctgcagaccataaaggatgggactttgttgagggctatttccatcaatttttcctgaccaagaaggagtcgccactccttacccaggagacacaaacacagctcctgcaacaattccatcggaatgggacagacctacttgacatgcagatgcatgctctgctacaccagccccactgtggggtgcctgatgggtccgacacctccatctcgccaggaagatgcaagtggaataagcacactctaacttacaggattatcaattacccacatgatatgaagccatccgcagtgaaagacagtatatataatgcagtttccatctggagcaatgtgacccctttgatattccagcaagtgcagaatggagatgcagacatcaaggtttctttctggcagtgggcccatgaagatggttggccctttgatgggccaggtggtatcttaggccatgcctttttaccaaattctggaaatcctggagttgtccattttgacaagaatgaacactggtcagcttcagacactggatataatctgttcctggttgcaactcatgagattgggcattctttgggcctgcagcactctgggaatcagagctccataatgtaccccacttactggtatcacgaccctagaaccttccagctcagtgccgatgatatccaaaggatccagcatttgtatggagaaaaatgttcatctgacataccttaatgttagcacagaggacttattcaacctgtcctttcagggagtttattggaggatcaaagaactgaaagcactagagcagccttggggactgctaggatgaagccctaaagaatgcaacctagtcaggttagctgaaccgacactcaaaacgctactgagtcacaataaagattgttttaaaaagtaaaaaaaaa

SEQ ID NO: 210800 - DNA, 329 bp, Homo sapiens
ctatctaactctactaagtgaaaagatggttttcctctttaaaactgattacttttcaggtacacgatgaatagtccttgttcaaaatggcacagagaccagaagagttttggatttcagattttttcagattttggaatatttgcatatatctatgggatatcttggggctgggacccaagtctaaacacaaaattcatttatatttcaaatacattttatacagagcctgaaggtaatgttatacaacattttaaataattttgtgcatgaaacaaaattttaactgtgaacactcatgtaaggtcaggtgtgaaatttcccatttg

SEQ ID NO: 210801 - DNA, 672 bp, Homo sapiens
cagaccaggcctgtaatgatgacgtttctttacccctccaatagagggtgcactcttgtgaatggcttttgtggctagttacttcgtgggtgctttaccatggtcagtttgcaggcaatctgttttgtacaggccatgctatagagacttatttacttattcttcagctccctctgcaggagctcagtgagctaaaggtgctagagagctgtaatggctgcaaacacccattcttttttatggctaaataatacttcactgtgtgtatataccacatttttttcatctttttatgggttgtttccacctttcttctattgtcaataatgctgctgtgaatattggcatacaagtatctgtttgaatctctgttttcaattctttttggaacagaattgtcaggtcatatggtaattctatgtttacctttttgaagaaccaccaggctgttttccagaacagctgtacccttttacatttccatcaacagtgtatagatgttgcaggggtttttttacattcttgttatttattcattttattttatttatttttattttttgagatggagtctcactctgtcgcccaggctggagtgtggagttgcagtgagccaagatcatgccactgtattctccagcctgggcaacaacagagaaagaccctgtctca

SEQ ID NO: 210802 - DNA, 257 bp, Homo sapiens
cagactggtcttgaactcctgacctcaagtgatccacccgcctggcctcccaaagtgctgggattaaaggtgtgagccaccgcgcctggccctaaaaatttttaaatctgcagaaaatttgaatgactcacctagattcatcagtttattttttgttacattcactttgtctgtatataaatgtgtgtatatacatctatacacccacacatacttgttggttttggctgaactatttgaaagtatggagaaccact

SEQ ID NO: 210803 - DNA, 451 bp, Homo sapiens
ctttattctcctggagcatacaaggtagagttgcgcttgagaagtcagtggtttccttttgggaccaagtgggaaagacacaatccttcatatgtcaaccgtcacacaaaatgggaagacattcagggtagagtaactgctctatccctggaaaattgaagttaaactatagagatgacaagaatttctttaaaagtccctgggctggatacagtggctcaagaatcactcgaggccaggagtttgagaccagcctgggaaatatatagcaagatcctgtctctaccaaagaaaacaaaataaaattagctgggcatggtagcacatgcttgtagccctagctactcaggaggctaaggtgggaagattgcttgaattgcttgagcccaggaggttgaggctgcagtgagcaatgattcaatgattgcaccactgctctccaaaaaaaaaa

SEQ ID NO: 210804 - DNA, 432 bp, Homo sapiens
tcatattctccttcttgcctcactcatcccagggaggaagccagagatgccaaaagggaagaaggccaaggggaagaaggtggctccagctgctgctgtcgcgaagaagcaggaggccaggaaagtggtgaatcccgtgttggagaaaaggcctaagaatcttggcattggacagcacacccaacccaaaagggacctcactttgctttgtcaaatggccccactttatcaggttgcagaggcaaagagcgatcctctaaacatggctgaaagtgcctcctgcaacgaaccagttcacccaggccttggacccccaaagagctactcaactgtaatacataagctggcccactagtacagaccagagacaaagcaagagaagaagcagaggctgctggcctggactgagaagaaagctgccagcaaagggga

SEQ ID NO: 210805 - DNA, 651 bp, Homo sapiens
tcatattctccttcttgcctcactcatcccagggaggaagccagagtcattctgcccaagcctttgcacctacagaaacttgtaaagaaaatcgaaaactggctttttttcacgtctgtcttgtacagaaaagacagtcccgacagagtttcactcttgtcgcccaggctggagtgcaatggcgtgatctcagctcactgcaacctccgcctctcaggttcaagagagtctcctgcctcagcctccggagtagctgggattacagatgccaaaagggaagaaggccaaggggaagaaggtggctccagctgctgctgtcgcgaagaagcaggaggccaggaaagtggtgaatcccgtgttggagaaaaggcctaagaatcttggcattggacagcacacccaacccaaaagggacctcactttgctttgtcaaatggccccactttatcaggttgcagaggcaaagagcgatcctctaaacatggctgaaagtgcctcctgcaacgaaccagttcacccaggccttggacccccaaagagctactcaactgtaatacataagctggcccactagtacagaccagagacaaagcaagagaagaagcagaggctgctggcctggactgagaagaaagctgccagcaaagggga

SEQ ID NO: 210806 - DNA, 857 bp, Homo sapiens
aaaaagaaaaagagaaaaaaaagatgtcacataccattttctggccttggagataaatgagaggagagactgtggccattgtactacagtttttccgaggggatttgcctttcctctctcacccttccaccctgtttcaatcaagagtctgtagcaaggtagacctattcatacaggctccccctctgctctgtggtaccagattgttgctagttcccaggcatctgtggaggaggattttgggcgagggccctggctgaccatgaaatccacgctaggcctggatgagagagaccctagctgcttcctctgtacctacagcattgtcatggtgctgcgcaaggtaaggattctgggtgctgagacccaaaggaaagaccatttttctccctctctctgacctactgccctactccaccttaggaaggggctgtttgctccctcgtaccctatacaagtagcagcacgaagcccctttggttgtatcttccacttacctaccttttcactgtcatccataggattgggcccaggtggaaggagagagtgggttatggtatgcctctgcacttccaggccctgggtggggtggggtgagcacactgccaccctcaaatctccctagtggttaagggttgtgtgcagagacatgccagtacatgtgccaacatatccctgcctgtgactgttatgatggaacattgtgtaaacacatataaacaaaagaaagtgctggacacagtggctcacacctgtaatcccagcattttaggaggctgaggtggaaggatcacaaaggtcaggagttcgagaccagcctgggcaacaaagcgagaccctgtctctacaaaaaaata

SEQ ID NO: 210807 - DNA, 2392 bp, Homo sapiens
cctttaagaaggcggagacgccccagtggcggcgtcttcgaatgcggcctaaggcgcctgccgccagtctcctggcgactttccctatatcgcagagactcatccctctgaccccagcccggaagcactgtccctcggagtccgagacttccacctgggtcgtgtccaaggccccggcgactccccggactcggggtgccgggccaacctccccgccgaggcccacccgccgtcgctatggcgtgcagtttgcagaagctgtttgctgtggaagaggagtttgaagatgaggatttcttgtctgctgtggaggatgcagagaaccggtttactggctcactgcctgtgaatgctgggcgcctgagacctgtctcttctaggccacaggagactgtgcaggcacagtcctccaggctgctgctgttacaccccactgctccctcagaggctttgggcctgccagacttggacctctgcctccctgcctccagcacgcccagtgctgacagccgtccatcatgcataggagcagctcccctaaggcctgtctctacttccagcagctggattggcaatcagagaagagtgacagtgacagaagtgctcagagagccagcaagacctcagtcctcagccttacaccccctactcacctttgagagccaacagcagcaagttggtggctttgaggggcctgaacaagacgaatttgataaagtcctggcaagcatggagttggaggagcctggcatggagctggaatgtggagtcagcagtgaggccataccaatcctgcctgcccagcagcgggagggttcagtattggctaaaaaagcccgggtagttgatctgagtggatcttgccagaaggggcctgtgcctgccatccacaaagcgggtatcatgtccgcccaggatgagtctctagatcctgtcatccaatgtaggactccacgaccccccttgagacctggtgctgtgggtcaccttcctgttccaactgccttaacagttcccactcagcaactccactgggaagtctgtccgcaacgctcccctgttcaagcacttcagcctctccaagctgctagagggaccattcagagcagccctcaaaatcgtttcccttgtcagccattccagtctccaagttcctggttaagtggcaaagctcatttacccagacctcgaactcccaactcaagctgttctactccctcaaggactagctctggattatttcctcggatacccttacaaccgcaagctccagtgtcttccattgggtctcctgttggtaccccaaaaggtccccagggagctctgcagacacccatagtcaccaaccacctggtgcagctagtcactgctgccagccggacaccccagcagcccacccatccctccacccgagccaaaactcgccgtttccctggcccagctgggatcctgcctcaccaggcagccctgaagcagcttcctaggaacaaggtccccaacatggcggtgatgatcaagtccctgactcggagcacaatggacgccagtgtggttttcaaggaccccacgggagagatgcaggggacggtgcacaggttgctgctggagacgtgccagaatgagctgaagcctggctcagtgctgctgctgaagcagattggagtgttttctccttcacttcgaaatcactacctcaacgtgacacccaacaacctggtccatatttacagcccggattctggggatgggagcttcctcaagccatctcagcccttccccaagatgacctggatggactcctgagtgagcttcctgaagacttcttctgtgggaccagtagttgagactgccccaacgcaggacaacccaccatgagcaggcagctctgggcatgtgtctggtcacatccaagggggagaagaaggccagcatgattggagagtggacacagccggggggcttctgtggttgctcccaccctgggtgttttccctgagagccccctcatctctgcgctgccctcactttgggccttcctttgccgttggcaccagaatccggccggagactggctctccagccaacaagaaaggcctgtcaccctcgccttgggtgtccctctcctgcctcagcttaattttagaggatattgggcctggttttcttgtcccttcataccctagtccctggacagctgaggagatgaaaggagccacaccacaacaatggcggcctgcccctccacacaggggagaagcacgctcaggcttcctctgctttgtctcttcagacctgtggttgctctgctcatccatgcccaaggttcccaggtgcaggacagaggtgtggcctattgtaccttgttctgaaataaagcatctcctgcttaaaa

SEQ ID NO: 210808 - DNA, 913 bp, Homo sapiens
  misc_feature (844)..(844): n is a, c, g, or t
  misc_feature (890)..(890): n is a, c, g, or t
  misc_feature (896)..(896): n is a, c, g, or t
cctttaagaaggcggagacgccccagtggcggcgtcttcgaatgcggcctaaggcgcctgccgccagtctcctggcgactttccctatatcgcagagactcatccctctgaccccagcccggaagcactgtccctcggagtccgagacttccacctgggtcgtgtccaaggccccggcgactccccggactcggggtgccgggccaacctccccgccgaggcccacccgccgtcgctatggcgtgcagtttgcagaagctgtttgctgtggaagaggagtttgaagatgaggatttcttgtctgctgtggaggatgcagagaaccggtttactggctcactgcctgtgaatgctgggcgcctgagacctgtctcttctaggccacaggagactgtgcaggcacagtcctccaggctgctgctgttacaccccactgctccctcagaggctttgggcctgccagacttggacctctgcctccctgcctccagcacgcccagtgctgacagccgtccatcatgcataggagcagctcccctaaggcctgtctctacttccaactgccttaacagttcccactcagcaactccactgggaagtctgtccgcaacgctcccctgttcaagcacttcagcctctccaagctgctagagggaccattcagagcagccctcaaaatcgtttcccttgtcagccattccagtctccaagttcctggttaagtggcaaagctcatttacccagacctcgaactcccaactcaagctgttctactccctcaaggactagctctggattatttcctcggatacccttacaaccgcagcaagttggtggctttgangggcctgaacaagacgaatttgataaagtcctggcaagcatggaanttggangaacctggcattgggaa

SEQ ID NO: 210809 - DNA, 2726 bp, Homo sapiens
cctttaagaaggcggagacgccccagtggcggcgtcttcgaatgcggcctaaggcgcctgccgccagtctcctggcgactttccctatatcgcagagactcatccctctgaccccagcccggaagcactgtccctcggagtccgagacttccacctgggtcgtgtccaaggccccggcgactccccggactcggggtgccgggccaacctccccgccgaggcccacccgccgtcgctatggcgtgcagtttgcagaagctgtttgctgtggaagaggagtttgaagatgaggatttcttgtctgctgtggaggatgcagagaaccggtttactggctcactgcctgtgaatgctgggcgcctgagacctgtctcttctaggccacaggagactgtgcaggcacagtcctccaggctgctgctgttacaccccactgctccctcagaggctttgggcctgccagacttggacctctgcctccctgcctccagcacgcccagtgctgacagccgtccatcatgcataggagcagctcccctaaggcctgtctctacttccagcagctggattggcaatcagagaagagtgacagtgacagaagtgctcagagagccagcaagacctcagtcctcagccttacaccccctactcacctttgagagccaacagcagcaagttggtggctttgaggggcctgaacaagacgaatttgataaagtcctggcaagcatggagttggaggagcctggcatggagctggaatgtggagtcagcagtgaggccataccaatcctgcctgcccagcagcgggagggttcagtattggctaaaaaagcccgggtagttgatctgagtggatcttgccagaaggggcctgtgcctgccatccacaaagcgggtatcatgtccgcccaggatgagtctctagatcctgtcatccaatgtaggactccacgaccccccttgagacctggtgctgtgggtcaccttcctgttccaactgccttaacagttcccactcagcaactccactgggaagtctgtccgcaacgctcccctgttcaagcacttcagcctctccaagctgctagagggaccattcagagcagccctcaaaatcgtttcccttgtcagccattccagtctccaagttcctggttaagtggcaaagctcatttacccagacctcgaactcccaactcaagctgttctactccctcaaggactagctctggattatttcctcggatacccttacaaccgcaagctccagtgtcttccattgggtctcctgttggtaccccaaaaggtccccagggagctctgcagacacccatagtcaccaaccacctggtgcagctagtcactgctgccagccggacaccccagcagcccacccatccctccacccgagccaaaactcgccgtttccctggcccagctgggatcctgcctcaccagcagagtgggagaagtctggaggacatcatggtttccgcgccccaaactccaacccatggtgctctggctaaattccagacagagattgttgctagttcccaggcatctgtggaggaggattttgggcgagggccctggctgaccatgaaatccacgctaggcctggatgagagagaccctagctgcttcctctgtacctacagcattgtcatggtgctgcgcaaggcagccctgaagcagcttcctaggaacaaggtccccaacatggcggtgatgatcaagtccctgactcggagcacaatggacgccagtgtggttttcaaggaccccacgggagagatgcaggggacggtgcacaggttgctgctggagacgtgccagaatgagctgaagcctggctcagtgctgctgctgaagcagattggagtgttttctccttcacttcgaaatcactacctcaacgtgacacccaacaacctggtccatatttacagcccggattctggggatgggagcttcctcaagccatctcagcccttccccaaggattcagggagcttccagcatgatgtggctgcaaagcccgaggaaggcttcagaacagcacagaacctagaggcagaggcgtcccctgaggaagaactcccagaagcagatgacctggatggactcctgagtgagcttcctgaagacttcttctgtgggaccagtagttgagactgccccaacgcaggacaacccaccatgagcaggcagctctgggcatgtgtctggtcacatccaagggggagaagaaggccagcatgattggagagtggacacagccggggggcttctgtggttgctcccaccctgggtgttttccctgagagccccctcatctctgcgctgccctcactttgggccttcctttgccgttggcaccagaatccggccggagactggctctccagccaacaagaaaggcctgtcaccctcgccttgggtgtccctctcctgcctcagcttaattttagaggatattgggcctggttttcttgtcccttcataccctagtccctggacagctgaggagatgaaaggagccacaccacaacaatggcggcctgcccctccacacaggggagaagcacgctcaggcttcctctgctttgtctcttcagacctgtggttgctctgctcatccatgcccaaggttcccaggtgcaggacagaggtgtggcctattgtaccttgttctgaaataaagcatctcctgcttaaaa

SEQ ID NO: 210810 - DNA, 2620 bp, Homo sapiens
cctttaagaaggcggagacgccccagtggcggcgtcttcgaatgcggcctaaggcgcctgccgccagtctcctggcgactttccctatatcgcagagactcatccctctgaccccagcccggaagcactgtccctcggagtccgagacttccacctgggtcgtgtccaaggccccggcgactccccggactcggggtgccgggccaacctccccgccgaggcccacccgccgtcgctatggcgtgcagtttgcagaagctgtttgctgtggaagaggagtttgaagatgaggatttcttgtctgctgtggaggatgcagagaaccggtttactggctcactgcctgtgaatgctgggcgcctgagacctgtctcttctaggccacaggagactgtgcaggcacagtcctccaggctgctgctgttacaccccactgctccctcagaggctttgggcctgccagacttggacctctgcctccctgcctccagcacgcccagtgctgacagccgtccatcatgcataggagcagctcccctaaggcctgtctctacttccagcagctggattggcaatcagagaagagtgacagtgacagaagtgctcagagagccagcaagacctcagtcctcagccttacaccccctactcacctttgagagccaacagcagcaagttggtggctttgaggggcctgaacaagacgaatttgataaagtcctggcaagcatggagttggaggagcctggcatggagctggaatgtggagtcagcagtgaggccataccaatcctgcctgcccagcagcgggagggttcagtattggctaaaaaagcccgggtagttgatctgagtggatcttgccagaaggggcctgtgcctgccatccacaaagcgggtatcatgtccgcccaggatgagtctctagatcctgtcatccaatgtaggactccacgaccccccttgagacctggtgctgtgggtcaccttcctgttccaactgccttaacagttcccactcagcaactccactgggaagtctgtccgcaacgctcccctgttcaagcacttcagcctctccaagctgctagagggaccattcagagcagccctcaaaatcgtttcccttgtcagccattccagtctccaagttcctggttaagtggcaaagctcatttacccagacctcgaactcccaactcaagctgttctactccctcaaggactagctctggattatttcctcggatacccttacaaccgcaagctccagtgtcttccattgggtctcctgttggtaccccaaaaggtccccagggagctctgcagacacccatagtcaccaaccacctggtgcagctagtcactgctgccagccggacaccccagcagcccacccatccctccacccgagccaaaactcgccgtttccctggcccagctgggatcctgcctcaccagcagagtgggagaagtctggaggacatcatggtttccgcgccccaaactccaacccatggtgctctggctaaattccagacagagattgttgctagttcccaggcatctgtggaggaggattttgggcgagggccctggctgaccatgaaatccacgctaggcctggatgagagagaccctagctgcttcctctgtacctacagcattgtcatggtgctgcgcaaggcagccctgaagcagcttcctaggaacaaggtccccaacatggcggtgatgatcaagtccctgactcggagcacaatggacgccagtgtggttttcaaggaccccacgggagagatgcaggggacggtgcacaggttgctgctggagacgtgccagaatgagctgaagcctggctcagtgctgctgctgaagcagattggagtgttttctccttcacttcgaaatcactacctcaacgtgacacccaacaacctggtccatatttacagcccggattctggggatgggagcttcctcaagccatctcagcccttccccaaggattcagggagcttccagcatgatgtggctgcaaagcccgaggaaggcttcagaacagcacagaacctagaggcagaggcgtcccctgaggaagaactcccagaagcagatgacctggatggactcctgagtgagcttcctgaagacttcttctgtgggaccagtagttgagactgccccaacgcaggacaacccaccatgagcaggcagctctgggcatgtgtctggtcacatccaagggggagaagaaggccttcctttgccgttggcaccagaatccggccggagactggctctccagccaacaagaaaggcctgtcaccctcgccttgggtgtccctctcctgcctcagcttaattttagaggatattgggcctggttttcttgtcccttcataccctagtccctggacagctgaggagatgaaaggagccacaccacaacaatggcggcctgcccctccacacaggggagaagcacgctcaggcttcctctgctttgtctcttcagacctgtggttgctctgctcatccatgcccaaggttcccaggtgcaggacagaggtgtggcctattgtaccttgttctgaaataaagcatctcctgcttaaaa

SEQ ID NO: 210811 - DNA, 1864 bp, Homo sapiens
  misc_feature (1504)..(1504): n is a, c, g, or t
  misc_feature (1521)..(1521): n is a, c, g, or t
  misc_feature (1536)..(1536): n is a, c, g, or t
  misc_feature (1540)..(1540): n is a, c, g, or t
  misc_feature (1597)..(1597): n is a, c, g, or t
cctttaagaaggcggagacgccccagtggcggcgtcttcgaatgcggcctaaggcgcctgccgccagtctcctggcgactttccctatatcgcagagactcatccctctgaccccagcccggaagcactgtccctcggagtccgagacttccacctgggtcgtgtccaaggccccggcgactccccggactcggggtgccgggccaacctccccgccgaggcccacccgccgtcgctatggcgtgcagtttgcagaagctgtttgctgtggaagaggagtttgaagatgaggatttcttgtctgctgtggaggatgcagagaaccggtttactggctcactgcctgtgaatgctgggcgcctgagacctgtctcttctaggccacaggagactgtgcaggcacagtcctccaggctgctgctgttacaccccactgctccctcagaggctttgggcctgccagacttggacctctgcctccctgcctccagcacgcccagtgctgacagccgtccatcatgcataggagcagctcccctaaggcctgtctctacttccagcagctggattggcaatcagagaagagtgacagtgacagaagtgctcagagagccagcaagacctcagtcctcagccttacaccccctactcacctttgagagccaacagcagcaagttggtggctttgaggggcctgaacaagacgaatttgataaagtcctggcaagcatggagttggaggagcctggcatggagctggaatgtggagtcagcagtgaggccataccaatcctgcctgcccagcagcgggagggttcagtattggctaaaaaagcccgggtagttgatctgagtggatcttgccagaaggggcctgtgcctgccatccacaaagcgggtatcatgtccgcccaggatgagtctctagatcctgtcatccaatgtaggactccacgaccccccttgagacctggtgctgtgggtcaccttcctgttccaactgccttaacagttcccactcagcaactccactgggaagtctgtccgcaacgctcccctgttcaagcacttcagcctctccaagctgctagagggaccattcagagcagccctcaaaatcgtttcccttgtcagccattccagtctccaagttcctggttaagtggcaaagctcatttacccagacctcgaactcccaactcaagctgttctactccctcaaggactagctctggattatttcctcggatacccttacaaccgcaagctccagtgtcttccattgggtctcctgttggtaccccaaaaggtccccagggagctctgcagacacccatagtcaccaaccacctggtgcagctagtcactgctgccagccggacaccccagcagcccacccatccctccacccgagccaaaactcgccgtttccctggcccagctgggatcctgcctcaccagggagaagtctgaggcatcatgttcgggccccccgccggggggncgccccccccccccccnacccaaaaaaaaaanaaantccctttcttcccccccaaaaaatacccccccccccaaacttagggggggtttgggntctttcccctcggggggcttataaaaatttcccagacagagattgttgctagttcccaggcatctgtggaggaggattttgggcgagggccctggctgaccatgaaatccacgctaggcctggatgagagagaccctagctgcttcctctgctttgtctcttcagacctgtggttgctctgctcatccatgcccaaggttcccaggtgcaggacagaggtgtggcctattgtaccttgttctgaaataaagcatctcctgcttaaaa

SEQ ID NO: 210812 - DNA, 2438 bp, Homo sapiens
aacatacacgccatgtgcctgaacagtaaaagcagaggggttcttgatttccagatgccaagacctaccatctctgcttccttgtaggatttcttgtctgctgtggaggatgcagagaaccggtttactggctcactgcctgtgaatgctgggcgcctgagacctgtctcttctaggccacaggagactgtgcaggcacagtcctccaggctgctgctgttacaccccactgctccctcagaggctttgggcctgccagacttggacctctgcctccctgcctccagcacgcccagtgctgacagccgtccatcatgcataggagcagctcccctaaggcctgtctctacttccagcagctggattggcaatcagagaagagtgacagtgacagaagtgctcagagagccagcaagacctcagtcctcagccttacaccccctactcacctttgagagccaacagcagcaagttggtggctttgaggggcctgaacaagacgaatttgataaagtcctggcaagcatggagttggaggagcctggcatggagctggaatgtggagtcagcagtgaggccataccaatcctgcctgcccagcagcgggagggttcagtattggctaaaaaagcccgggtagttgatctgagtggatcttgccagaaggggcctgtgcctgccatccacaaagcgggtatcatgtccgcccaggatgagtctctagatcctgtcatccaatgtaggactccacgaccccccttgagacctggtgctgtgggtcaccttcctgttccaactgccttaacagttcccactcagcaactccactgggaagtctgtccgcaacgctcccctgttcaagcacttcagcctctccaagctgctagagggaccattcagagcagccctcaaaatcgtttcccttgtcagccattccagtctccaagttcctggttaagtggcaaagctcatttacccagacctcgaactcccaactcaagctgttctactccctcaaggactagctctggattatttcctcggatacccttacaaccgcaagctccagtgtcttccattgggtctcctgttggtaccccaaaaggtccccagggagctctgcagacacccatagtcaccaaccacctggtgcagctagtcactgctgccagccggacaccccagcagcccacccatccctccacccgagccaaaactcgccgtttccctggcccagctgggatcctgcctcaccagattgttgctagttcccaggcatctgtggaggaggattttgggcgagggccctggctgaccatgaaatccacgctaggcctggatgagagagaccctagctgcttcctctgtacctacagcattgtcatggtgctgcgcaaggcagccctgaagcagcttcctaggaacaaggtccccaacatggcggtgatgatcaagtccctgactcggagcacaatggacgccagtgtggttttcaaggaccccacgggagagatgcaggggacggtgcacaggttgctgctggagacgtgccagaatgagctgaagcctggctcagtgctgctgctgaagcagattggagtgttttctccttcacttcgaaatcactacctcaacgtgacacccaacaacctggtccatatttacagcccggattctggggatgggagcttcctcaagccatctcagcccttccccaaggattcagggagcttccagcatgatgtggctgcaaagcccgaggaaggcttcagaacagcacagaacctagaggcagaggcgtcccctgaggaagaactcccagaagcagatgacctggatggactcctgagtgagcttcctgaagacttcttctgtgggaccagtagttgagactgccccaacgcaggacaacccaccatgagcaggcagctctgggcatgtgtctggtcacatccaagggggagaagaaggccagcatgattggagagtggacacagccggggggcttctgtggttgctcccaccctgggtgttttccctgagagccccctcatctctgcgctgccctcactttgggccttcctttgccgttggcaccagaatccggccggagactggctctccagccaacaagaaaggcctgtcaccctcgccttgggtgtccctctcctgcctcagcttaattttagaggatattgggcctggttttcttgtcccttcataccctagtccctggacagctgaggagatgaaaggagccacaccacaacaatggcggcctgcccctccacacaggggagaagcacgctcaggcttcctctgctttgtctcttcagacctgtggttgctctgctcatccatgcccaaggttcccaggtgcaggacagaggtgtggcctattgtaccttgttctgaaataaagcatctcctgcttaaaa

SEQ ID NO: 210813 - DNA, 2585 bp, Homo sapiens
cctttaagaaggcggagacgccccagtggcggcgtcttcgaatgcggcctaaggcgcctgccgccagtctcctggcgactttccctatatcgcagagactcatccctctgaccccagcccggaagcactgtccctcggagtccgagacttccacctgggtcgtgtccaaggccccggcgactccccggactcggggtgccgggccaacctccccgccgaggcccacccgccgtcgctatggcgtgcagtttgcagaagctgtttgctgtggaagaggagtttgaagatgaggatttcttgtctgctgtggaggatgcagagaaccggtttactggctcactgcctgtgaatgctgggcgcctgagacctgtctcttctaggccacaggagactgtgcaggcacagtcctccaggctgctgctgttacaccccactgctccctcagaggctttgggcctgccagacttggacctctgcctccctgcctccagcacgcccagtgctgacagccgtccatcatgcataggagcagctcccctaaggcctgtctctacttccagcagctggattggcaatcagagaagagtgacagtgacagaagtgctcagagagccagcaagacctcagtcctcagccttacaccccctactcacctttgagagccaacagcagcaagttggtggctttgaggggcctgaacaagacgaatttgataaagtcctggcaagcatggagttggaggagcctggcatggagctggaatgtggagtcagcagtgaggccataccaatcctgcctgcccagcagcgggagggttcagtattggctaaaaaagcccgggtagttgatctgagtggatcttgccagaaggggcctgtgcctgccatccacaaagcgggtatcatgtccgcccaggatgagtctctagatcctgtcatccaatgtaggactccacgaccccccttgagacctggtgctgtgggtcaccttcctgttccaactgccttaacagttcccactcagcaactccactgggaagtctgtccgcaacgctcccctgttcaagcacttcagcctctccaagctgctagagggaccattcagagcagccctcaaaatcgtttcccttgtcagccattccagtctccaagttcctggttaagtggcaaagctcatttacccagacctcgaactcccaactcaagctgttctactccctcaaggactagctctggattatttcctcggatacccttacaaccgcaagctccagtgtcttccattgggtctcctgttggtaccccaaaaggtccccagggagctctgcagacacccatagtcaccaaccacctggtgcagctagtcactgctgccagccggacaccccagcagcccacccatccctccacccgagccaaaactcgccgtttccctggcccagctgggatcctgcctcaccagcagagtgggagaagtctggaggacatcatggtttccgcgccccaaactccaacccatggtgctctggctaaattccagacagaggcagccctgaagcagcttcctaggaacaaggtccccaacatggcggtgatgatcaagtccctgactcggagcacaatggacgccagtgtggttttcaaggaccccacgggagagatgcaggggacggtgcacaggttgctgctggagacgtgccagaatgagctgaagcctggctcagtgctgctgctgaagcagattggagtgttttctccttcacttcgaaatcactacctcaacgtgacacccaacaacctggtccatatttacagcccggattctggggatgggagcttcctcaagccatctcagcccttccccaaggattcagggagcttccagcatgatgtggctgcaaagcccgaggaaggcttcagaacagcacagaacctagaggcagaggcgtcccctgaggaagaactcccagaagcagatgacctggatggactcctgagtgagcttcctgaagacttcttctgtgggaccagtagttgagactgccccaacgcaggacaacccaccatgagcaggcagctctgggcatgtgtctggtcacatccaagggggagaagaaggccagcatgattggagagtggacacagccggggggcttctgtggttgctcccaccctgggtgttttccctgagagccccctcatctctgcgctgccctcactttgggccttcctttgccgttggcaccagaatccggccggagactggctctccagccaacaagaaaggcctgtcaccctcgccttgggtgtccctctcctgcctcagcttaattttagaggatattgggcctggttttcttgtcccttcataccctagtccctggacagctgaggagatgaaaggagccacaccacaacaatggcggcctgcccctccacacaggggagaagcacgctcaggcttcctctgctttgtctcttcagacctgtggttgctctgctcatccatgcccaaggttcccaggtgcaggacagaggtgtggcctattgtaccttgttctgaaataaagcatctcctgcttaaaa

SEQ ID NO: 210814 - DNA, 2200 bp, Homo sapiens
cctttaagaaggcggagacgccccagtggcggcgtcttcgaatgcggcctaaggcgcctgccgccagtctcctggcgactttccctatatcgcagagactcatccctctgaccccagcccggaagcactgtccctcggagtccgagacttccacctgggtcgtgtccaaggccccggcgactccccggactcggggtgccgggccaacctccccgccgaggcccacccgccgtcgctatggcgtgcagtttgcagaagctgtttgctgtggaagaggagtttgaagatgaggatttcttgtctgctgtggaggatgcagagaaccggtttactggctcactgcctgtgaatgctgggcgcctgagacctgtctcttctaggccacaggagactgtgcaggcacagtcctccaggctgctgctgttacaccccactgctccctcagaggctttgggcctgccagacttggacctctgcctccctgcctccagcacgcccagtgctgacagccgtccatcatgcataggagcagctcccctaaggcctgtctctacttccagcagctggattggcaatcagagaagagtgacagtgacagaagtgctcagagagccagcaagacctcagtcctcagccttacaccccctactcacctttgagagccaacagcagcaagttggtggctttgaggggcctgaacaagacgaatttgataaagtcctggcaagcatggagttggaggagcctggcatggagctggaatgtggagtcagcagtgaggccataccaatcctgcctgcccagcagcgggagggttcagtattggctaaaaaagcccgggtagttgatctgagtggatcttgccagaaggggcctgtgcctgccatccacaaagcgggtatcatgtccgcccaggatgagtctctagatcctgtcatccaatgtaggactccacgaccccccttgagacctggtgctgtgggtcaccttcctgttccaactgccttaacagttcccactcagcaactccactgggaagtctgtccgcaacgctcccctgttcaagcacttcagcctctccaagctgctagagggaccattcagagcagccctcaaaatcgtttcccttgtcagccattccagtctccaagttcctggttaagtggcaaagctcatttacccagacctcgaactcccaactcaagctgttctactccctcaaggactagctctggattatttcctcggatacccttacaaccgcaagctccagtgtcttccattgggtctcctgttggtaccccaaaaggtccccagggagctctgcagacacccatagtcaccaaccacctggtgcagctagtcactgctgccagccggacaccccagcagcccacccatccctccacccgagccaaaactcgccgtttccctggcccagctgggatcctgcctcaccagcagagtgggagaagtctggaggacatcatggtttccgcgccccaaactccaacccatggtgctctggctaaattccagacagagattgttgctagttcccaggcatctgtggaggaggattttgggcgagggccctggctgaccatgaaatccacgctaggcctggatgagagagaccctagctgcttcctctgtacctacagcattgtcatggtgctgcgcaaggtaaggattctgggtgctgagacccaaaggaaagaccatttttctccctctctctgacctactgccctactccaccttaggaaggggctgtttgctccctcgtaccctatacaagtagcagcacgaagcccctttggttgtatcttccacttacctaccttttcactgtcatccataggattgggcccaggtggaaggagagagtgggttatggtatgcctctgcacttccaggccctgggtggggtggggtgagcacactgccaccctcaaatctccctagtggttaagggttgtgtgcagagacatgccagtacatgtgccaacatatccctgcctgtgactgttatgatggaacattgtgtaaacacatataaacaaaagaaagtgctggacacagtggctcacacctgtaatcccagcattttaggaggctgaggtggaaggatcacaaaggtcaggagttcgagaccagcctgggcaacaaagcgagaccctgtctctacaaaaaaata

SEQ ID NO: 210815 - DNA, 1263 bp, Homo sapiens
cctttaagaaggcggagacgccccagtggcggcgtcttcgaatgcggcctaaggcgcctgccgccagtctcctggcgactttccctatatcgcagagactcatccctctgaccccagcccggaagcactgtccctcggagtccgagacttccacctgggtcgtgtccaaggccccggcgactccccggactcggggtgccgggccaacctccccgccgaggcccacccgccgtcgctatggcgtgcagtttgcagaagctgtttgctgtggaagaggagtttgaagatgaggatttcttgtctgctgtggaggatgcagagaaccggtttactggctcactgcctgtgaatgctgggcgcctgagacctgtctcttctaggccacaggagactgtgcaggcacagtcctccaggctgctgctgttacaccccactgctccctcagaggctttgggcctgccagacttggacctctgcctccctgcctccagcacgcccagtgctgacagccgtccatcatgcataggagcagctcccctaaggcctgtctctacttccagcagctggattggcaatcagagaagagtgacagtgacagaagtgctcagagagccagcaagacctcagtcctcagccttacaccccctactcacctttgagagccaacagcagcaagttggtggctttgaggggcctgaacaagacgaatttgataaagtcctggcaagcatggagttggaggagcctggcatggagctggaatgtggagtcagcagtgaggccataccaatcctgcctgcccagcagcgggagggttcagtattggctaaaaaagcccgggtagttgatctgagtggatcttgccagaaggggcctgtgcctgccatccacaaagcgggtatcatgtccgcccaggatgagtctctagatcctgtcatccaatgtaggactccacgaccccccttgagacctggtgctgtgggtcaccttcctgttccaactgccttaacagttcccactcagcaactccactgggaagtctgtccgcaacgctcccctggacagctgaggagatgaaaggagccacaccacaacaatggcggcctgcccctccacacaggggagaagcacgctcaggcttcctctgctttgtctcttcagacctgtggttgctctgctcatccatgcccaaggttcccaggtgcaggacagaggtgtggcctattgtaccttgttctgaaataaagcatctcctgcttaaaa

SEQ ID NO: 210816 - DNA, 342 bp, Homo sapiens
aagagctggagagatgctgggggcaatctctgcatgatgactgcatgctggttatatccaacaaggctgcattgcaagggaggagtgattcaaaaggacccagcaccagctaatgactgttaccgaaatgagttcctgaaaccatggggaaatgaaatcaacagtccaccaagtccagaaacccggcccaaagggctagatctgttccttacttgctccgaagccatagcagctgccttttctgtaaaatggggacaatttctcagggttgttccatggattatataggacagcatttatgaaagaaagacatcgtaaattatataataatactcaactgca

SEQ ID NO: 210817 - DNA, 709 bp, Homo sapiens
ggcgggtggatcacgtgaggtcaggagttcaggaccagcctggccaaaatggtgaaaccccatctctactaaaaatacaaaaattagccatgcaccactgtgaccaatttgattttctatcgtcagctatttgtgtactttaattggaagactgagtaaagaatggttattttataagggaaatgcacattttgtttttattgaatagtactctgtagccatgtattgattgaaaataaggaaacccccattgagtgatgtcaactgggtactttctacaagtatatctggctttatttagggactaaaccggtagaaataattgggggaatttcctttcctaaatttgacaggtaaatttgcttttcatactttctgttttagttgcttatatttaaactattttgagaaggagaaggatcaattaaaatgtattttatttagtgctaattgaatagtaccatatttaaacttataccaatttccaaagtacttgatgtaactatatataattagtattgaatttcggacccggattgcatccggtacttagggtagtttctcggtaacagggtttaaaaccttagaagaacccttacaagtaacagggctccaaaaagcggacggacaaaggccattagggcacggggccaaaaccggggaatccacaattcggcccagggcacccaagataacgacatggcacccc

SEQ ID NO: 210818 - DNA, 493 bp, Homo sapiens
tgaaatatcaaataaatatctcaaatatcaatatcaaatatatttatcaaaaaatatctatacatacacacacgctaagtacatatttggttgatcctgaaatactgttgtctaacaaaatacaactttaatatacgtacatacaaaagagtaaaaaatatccctttaaatgacttcttaatttgatcaaggcatattagaaaagaaactgggccaggcgcagtggctcatgcctgtaatctcagcactttgggaggccaaggcaggtggatcacctgaggtcaggagttcgagagcagcctgaccaacatgccaaaaccccatctctactaaaaagacaaaaattagctgggcatggcagcaggcacctgtaatcccagctatgcaggaggctgaggcaagagaattgcttgaaccagggtggcggaggctgctgtgagccgagatcgtgccattgcactccagcctgggcgacagagcaagactccgtctc

SEQ ID NO: 210819 - DNA, 323 bp, Homo sapiens
ggattacaggcgtgagccaccgtgctgggctgacttttatttttagatattatttgaatttcatgacaaattatgtaatttccatgattgtcaataaaaaaaagaaaaaagaaaacactggtgattttccgtaactaagtggattcaatgaaactaaacttctatttagtgtgtccttgctaatattttcctttaaaaagtcacagtgctacaaaactgtcaccagctgctgcttattaggaatgtggttagcagatgtgggttttcatagtcatgctgtatgagatcgttagtccatttttgcgggtttcagatggttagtg

SEQ ID NO: 210820 - DNA, 288 bp, Homo sapiens
tcctcagtggcatatgtgcccattcatgttaaaataaatgaaaaaattcataacctcctcacaagagccatgctagaagttcccagttgccaaaagtctactcttaagagagcatctccattctcccagaatcacctgggaagcagctgctgtgagtctggcccaggttctgttctctgcacccacctaactcagtgcatttgcatcaaggctggaatctcaggttctcagatttatagatatagatgaattaatataagaatgtgatgattatgtgtatggtgtgtg

SEQ ID NO: 210821 - DNA, 227 bp, Homo sapiens
cacctgtaattctattaattaatattttcctgcccttctttctggtgtttttttcagtgtattcttgtttttgtagatgaggtcattcttaacatatacttttcgattctccttttttcatttaaccgtaggcgttcccatgttgttcctgactctttacaagcaccttttggaatgtgtgggcatcaggcttctcttagctgttgctctagtgttggatgttcgag

SEQ ID NO: 210822 - DNA, 738 bp, Homo sapiens
  misc_feature (15)..(15): n is a, c, g, or t
  misc_feature (22)..(22): n is a, c, g, or t
  misc_feature (64)..(64): n is a, c, g, or t
  misc_feature (82)..(82): n is a, c, g, or t
  misc_feature (92)..(92): n is a, c, g, or t
  misc_feature (98)..(98): n is a, c, g, or t
  misc_feature (191)..(191): n is a, c, g, or t
  misc_feature (195)..(195): n is a, c, g, or t
gttcggaggatcccntcttcgnccatcagatctttcttaccactctgactctgaagtcattatnggctccattacttggaangtatcacttnggtttntcaggtataaagtcccgcctcctcgaatagatcacaggttccgggtcttcttactctcttctctgtatcctagatagcacctagcatgtgccntggnatacaacagtctgatgggagcaagacgcggtcttctccagtcatcatgtagtacccccactcccaactcacaccctgtttgagtttcctcatcagtacccatgaaatgcttattctcacctgtggcatttgacccatgaactcttctgataatctatcccagacccttcgtgtgtaaatcaaagtgtaatattcatcacatatttatatagtctctcatgcttttcaaagcgctttatgtcactggagccccctaataattctttactgaaggtagttagggtgttaaacctttatctaatattattctaggccagcctgactttgtctacatttctctaagacctatagtcagtaccatttaccttaatgcgattatgtgttttatagtgctttgattttgattgtcttatacttatttgtctgactgtcccagactaagctggaagacccagatcaatcttccaaatattaagggagaattaccttgctacactgagacaggcactgtggaggagagctagtgatacggtttggatctgtg

SEQ ID NO: 210823 - DNA, 419 bp, Homo sapiens
tttttctttctccctttcaacccaggctcttctatcatccaagattccataaacatcacacccatgatgatgcagtggttaccccagggaggtgagcaaagattcaagtaagacagggattcatcagctggtcccgttctaggtgtgagaaaacaaatgtgaaatgaaatccagccactgtcagcgtgctttcacacagtcctgaactctaacacgcagtatgctgggatgcagacaggcttcttgggtaacaagatgctttctccctcttttggtttccagatcaaaaatggtttctggccgggtgtggtcgctcatgcctgtaatcccagcactttgggaggccgaggtgagtggatcacttgaggccaggagtttgagaccagcctgggcaacatagcaaaacactgtctctagta

SEQ ID NO: 210824 - DNA, 348 bp, Homo sapiens
ctaatttttgtatttttagtagagacggggtttcaccatgttagccaggatggtcttgatctcttgacctcgtgatccgctggtctcagcctcccgaagtgctgggattataggcgtgagccactgcgcccggccaaaacttttttttttttaatacacatttcacataccgtaagagtcacctcaagggaggtttttgacaatagttgacttatatgtaacaaattaagaagaataattccttagagtaacatttaggaggaataaggaccctacaaatatgtaaacctcctatttatccttaaactctgattttggtttgtacatccttttgagaatcttaaaaaa

SEQ ID NO: 210825 - DNA, 574 bp, Homo sapiens
cttgtccagttttatctttggaatcacttatttgacacttacactccttctgtcttgaactggtaattacatgatccatttgtgcttatcttcccaacacggctgttagagggcagtggcttcatgctattaacaaatcacctccatcagcattgagcatagtactatggcatagcacaaatgcagtgggggtgtctaattcttctgaaaatgtgacagctcttcgacctgacagcccttctgccctgactggtcacatgtgagggaatgtgtgtactgtctggtgactgctaaatgtggcccaggcattcacttacccagtgcacaagacccagcagcatcaccagcaagcttgtggagtaaatcagatgaacagtgtgtgagaattggaaaacgtgtcccaaagaataagcacaacagaatggcgtaccttctttcaacccagttcagtttaacacaagagacttcacacggttaattccatgtggaaaggacattttcttgctggaaacaaattttaatctttgtgagtctggaattcactaggaagaacacaagatatgataccaagaat

SEQ ID NO: 210826 - DNA, 465 bp, Homo sapiens
catatctcacatgctggcagagaagagagaatgagaatcaagtgaaaggggtttctcctcataaaaccatcagatctcatgagatttattcactaccaagagaacagtatgggggaaatcgcccccatgattcaattatctcccaccgagtccctcccacaacatgtgggaattatgggagctacaattcaagatgagattcgggtagggacgcagccaaactgtatcagtatccgccaaagaatacaaactattttgctaccgccaaaaggccccagcctcctctgcctgctgaaagctttcttctctaccttccttgtcaattaattgtcactcctagttggcatcattatgtcaactcctggctattcctcctcatccagaaaaaaattttttaaaagctgtttctaattagctatagactgggaaacttgataaaccaatatgttatgattgtgactaaac

SEQ ID NO: 210827 - DNA, 419 bp, Homo sapiens
aattaaaattagaacatcaggaaaagaattaaaatcctcaggttgcaaaaccaaaatgttaaccaaaacaaatactcatgagattcaactttgttcacctatagaatagtacttattaacaacataaaatctaccctgtgagattgtatggaaactcagagtgtggcttatgataaccatctgtttatgatatttcatataaaacaatcttgtgatccttgtagttcctaccattaattttgtaggaaggaatctctgacattcctatggagctagaaccacatctgtcaatgtttaagtacctaagcagaacttaagaggaaaatgcataaatatatttggaaattgtttcatttttttctatatgtaagaagaccctaaaaagagcctttcagtaaagtttgtgcttcagaactaca

SEQ ID NO: 210828 - DNA, 709 bp, Homo sapiens
cgcatcttgctcccatcagctaattgtcattaggtgatgggagcaagatgcgtgctcccatcagtagtgccctgcgggaccttttgaaaatctccccagtaaagacattcttgctttcatacaacctggctgctggagcacctggctgaattttatcttattgttcacctttgagttcgtggcaaatacttagcagtatttaatttttgctttctgatttaagtgtaatacgaaaaaaaatcatgcaaatcaattaccagtatctggtgtttgaaattgtaagatgctgaaaagaactgttaattatactctgtatctgccgggggaatgtaaactgactttaggattcgaagagaccttgctgatgggagaagatgccatcttctccacccccttttccctttttaccaggtaaggggttctcttatgttgaaaatcaactgaaggaaagatgaaggtgcctagaaaatttcgatacgccctaaagccaatgtcactagcctggagatcttggaggtgacttgaccattgtggagccgctcccctcaccccttcagaaggtctctagagaactaagtagtacagggctcccggtttcctaaccacaagctccagaatctagagaagggcttccttagacagtaggaagtatcgttctccctcagagatgggacaacaggggagtctgggacagaccttgggtggatag

SEQ ID NO: 210829 - DNA, 776 bp, Homo sapiens
aagaatcgggtggatctctgctgtggtgtctgcttttaatgggtttagaagaaaaagtcatcctccacaatttcagcaagaaagatgagttttctgatgggagcaagatggccatcttcggctcccatcagtagtgccctgcgggaccttttgaaaatctccccagtaaagacattcttgctttcatacaacctggctgctggagcacctggctgaattttatcttattgttcacctttgagttcgtggcaaatacttagcagtatttaatttttgctttctgatttaagtgtaatacgaaaaaaaatcatgcaaatcaattaccagtatctggtgtttgaaattgtaagatgctgaaaagaactgttaattatactctgtatctgccgggggaatgtaaactgactttaggattcgaagagaccttgctgatgggagaagatgccatcttctccacccccttttccctttttaccaggtaaggggttctcttatgttgaaaatcaactgaaggaaagatgaaggtgcctagaaaatttcgatacgccctaaagccaatgtcactagcctggagatcttggaggtgacttgaccattgtggagccgctcccctcaccccttcagaaggtctctagagaactaagtagtacagggctcccggtttcctaaccacaagctccagaatctagagaagggcttccttagacagtaggaagtatcgttctccctcagagatgggacaacaggggagtctgggacagaccttgggtggatag

SEQ ID NO: 210830 - DNA, 458 bp, Homo sapiens
ctttctattccgccatcctgctctgttgcacctctcgagctcagtcctttcaaccggaaacactagagaaaccctaaaccctaggccctaagtccataacgcaggtggtatggaggtattcccatttcagtgaaactgtgtaaacacttagaaggtcagccttggatttggtagcagtatgtgaaatgctcagagataaaactgatcagagtggggaggtgatgttacttctctgcctggctccacattggagaaaggaacatggggttaagggaggaggaaggaagacagcgttgaggctcattctgtcatccaggtgaggtttaatggatgattgttggccaaggagatgtcgctagaattgtgatttacatttggtaaaggagcagctagattttctaatgcggtcggtaaggacatgcaagagggtttcaggtatgacgctgggggttttttgt

SEQ ID NO: 210831 - DNA, 791 bp, Homo sapiens
catcttaagaaaaaaaatagcctggaacatttccccaggctttcagtcttctttataaatagtgtatctcttctatctctggattattcattatgtgatgccgtttggaatctgaatcctgggctcagatggctgatgtggttccttctgattttgtcattcagaattgtctctatcctcctaaagaaggtgaaagagacatgctgtttgtcattgggggcacagtaataggtgcaggctgtagtctgttttacagaattacatgcatgttgcttgaccttggtctgggaccccactgaccaaaacactgaactcagccttctggatcatgaagcctggtttttgcaattttgatttgaacaacagtgttttgaccaggtttgacaatcaactgatgtgtttggaaaagactgactgatgagccagaatactaaccacccatttacaaggaaagaggcacagacatttagggaagatcaagagctttgcagtcaaatctggcactcctgcttagtagtttgtgactttagatgagcttaactttatggaacttttatttcttcatctttaaaatgaagataattatgaagtgatttgcctgaggtcagtagtcactctgcatcatttcagcttagtttacagttttcaaaatctccatccaaacctctttctcaagagcatgcttattttcttggttaaatccatgtttcttctgtttatttaaaaatgctcaagaaccgatatttagctcaagagcttctcctttcagctgttagattctgttagaggca

SEQ ID NO: 210832 - DNA, 408 bp, Homo sapiens
aagtgatctgcccgccatggcctcccaaagtcctgggattataggcatgatgtttttttctattcaagtctttaggtctgtatttattgagttacttggtacatgccaggcacagctttcaggtagctctacgtacattatgtcactttatcctaataacacctatgaattatcctcacttgacagatgagggaattgaggtacacagaggtcaagcaatttgcccaaagttgcacagctaataagtggtggtgctgggaactgaatcaaccagtctagctccagaatctatgctataccttgtaactaactggctatggggtaaaatagggtggaaaatattctggttttaatcctgggttactaagagcttggttaggtcattaatagaaattttgaagtcagacg

SEQ ID NO: 210833 - DNA, 352 bp, Homo sapiens
taataatcattcaccccatggggaaagctatacttaatcttaagtcacttaggagttccagttgtgggtaggatggatcagggacactcttccctccaccactgaacagagctataaaacctagacagaatgcatgacgcagctatttgaaaactctacaaggaaaaaatagcaggtggattcagagagaagtaacactgaacagtggtgagtttactaatgtttctccctctggtcctcctcccaattgtaaccagatgcagaagcagtcaacaaggtgggcagcagaatgggcgccagctttctggtcaggcaacgaaacaggagaactccaggagagcagacagtgagt

SEQ ID NO: 210834 - DNA, 421 bp, Homo sapiens
gcatattggtgcaactgctgcagagagcagtttatcagtatctatgaaaattgcagtgtatttaccccatgactcaacaattacacttttaggaatgtgccctaccaatatgctcaaagttgtacaaagttgctcattgtagcattgactgattataatggcaagggagaaacaaacgtttatcagtaggttactggttaaataaattgtagttcctccataatttagaataacatccaactgaaaaatcagtgaaaatatgtaaagatctctaaaataactttagatgatgaacagaagattcagaaaaaatatgtttagcatgctagcattttgtaaaagggatgaaaataatatatctattggttatacacaaacattttataggaatctaagcaagaacttacgaataatacttacc

SEQ ID NO: 210835 - DNA, 799 bp, Homo sapiens
  misc_feature (26)..(26): n is a, c, g, or t
  misc_feature (35)..(35): n is a, c, g, or t
  misc_feature (38)..(38): n is a, c, g, or t
tcatacgccgctcttgaggatccacngacttgctnccngcacttactttagttctgcctcactggagtcaacaatttttcacttgcccttggtgatggcacattgggatttttttatagattataaaaagatttttataaatgtctcaaattgagttttctgctcaatatttttgtgcaacttctccatgttgaagagttattcactcattttcaccaatatattccactattcatttattcatactttggtcattgaattttaggttgtttccagttttcactattatgaataatgttgctataaacatctctgtacatgtctgttggtactctagtcaatacctagaagtggaatttctaaatcatacggtacaattatgtttcattttacctgataatgccaaattgttttccagaaagatgccagtttacttgccagtagtgtatatgagtttctgtagtgccatatcttcaccaatatttgggactgttagacttcttagattttgccaatctagtaggtctaatatagtattgatttatattttcctaatgaataatatggttgaaattttcatatgtttattagccattaggtatttttgctttattgtcatttaagcattttgtatcagatttctgttgtctttttacttgttgatctgtaagaactaattattcatatattctggctactaatctctacattttgcaaacattttctactcaatcgtgtcaattttctttctttcctttttttgttttttgagacagcatcttgttttgtcacccaggct

SEQ ID NO: 210836 - DNA, 404 bp, Homo sapiens
gaaagctgttttgtgggggaaactcagactgaccaaaagagccgaggaggtcctttgtggcctgtctgctccatgggaatagctccaggagagggaagaccagctgccttcatcaggaactcacaggtggcatttctatggggaatcagcacaagggaaaaggagacatttcatttccaagttatggtggcatcgcaattacaccattattgcatggactgaagtgcaagtggaggacaaggggttgggagaggaagtggctttggcaaattgtccttaagctggtaagaagcagatctccaagactttctactgggatatggagttttggggcaaaaaggagagtggagatcaacactaatatttatttattcatttttaaataatacactttcagatagaag

SEQ ID NO: 210837 - DNA, 468 bp, Homo sapiens
ataggaatggaatggagtgttctggaaagaggcaagatttgtgctgaaatcctggggtcatggtcttagaaagtcttagaaagctaagtgggttatatggctgggggcagatccctgaacctccctgggctatggattctttctacaaagtgctgatgtccctccctcctggttgtggtcatagaaattacatggaagcgtgcactgctgtgctcaggtcatgatcaagaacacaggtgctggtgactttcatgatctgttgatgtggatccagtggctcttctggtaggagggtcatcaccctgctggaagattacagcactgtaaccagagttcacagttcttttgttcactcgtgtacataaacgtaggtgctcctcaatttaaaatgggattatgtgccagtaagcctgtccacaactgaaaatatcataagttgaaaatgcatttaatacatctaacctagca

SEQ ID NO: 210838 - DNA, 427 bp, Homo sapiens
tggacccaaaccaagaagaaatccctgatttacctgaaaaagaattcaggagtttagttattaatctaatcagggaggcacaagagaaaggcaaagcccaatgtaaggaaataaaaaaaaagatacaagaagtgaagggagaaatattcaaagaaatagatagcagaaataaaaaccaatcatgccaggtgtggtgtctcgtgcctgtagtcctagaaccttgggaggctgagatgagcagatcacttgaggtcaggggtttgagaccagcctgaccaatgtggtaaaaccccatctctactaaaaatacaaaaatcagccagatgtggtggcacgtgtctataatccccactattccagaggctgaggcaagagaatcatctcaaaaaacaaagaaacaaagaaaccccgacaaatcccccccacc

SEQ ID NO: 210839 - DNA, 783 bp, Homo sapiens
attattatatccattttagagataaagaaattggagctcagaaaggttaagtaacctgcccaatgtcacacagctgctaagtggagccatgattgcaaatccagtcagttggtatccagagcccatgcttttaatcactttgctcttgtttctctcaacataaataccacttctccagaactctccagtccacatcccccctgactgtggcaaaccagggcgagaacagaaatcagtatttgcttacttttatgtcatagtctaaacctacatatacattccaatatctaacttgcttttcatggttttttttcccttctataaataaagaagggaaaaactggcctgtgtaaaacaaagtgaataagagaaagaagaaaagaaaaattgttggtaattctatcaatcagacataaccactggtaatatataggtatatagacatctagccatcatacatgtttctccaaatgcattatacttgaactttaaatgtaatagtctatcttggagagttttccagatcactagattttcttagcagcatcatttttaatgtccctccactatgacattttatttgtgtaagataatgtatgtattcatatattgttggactttggcgctgtgcaccatttttgttattcaaaatagctctgggatcataattgtgtaggtaaatctttatatccatccatgattatttcctgagaaaaaattcctagaatttgacacactaggtcaaagggcaaattatgtttacttaagaaattaaattaaaac

SEQ ID NO: 210840 - DNA, 926 bp, Homo sapiens
gtattttctaactcattttcaattctgtgactcttgtgatttcttccttgtgaaagagccaaactgttgggaaacggaatctcatacatacagtcttttaactcctactcagttgtttgagagtgggccttgggcctggaacacttcttttgaagagactaggagtccacagagcctgtgctgaacttaccaccccgtatagtaatatcttcctctgtttcagagtcaatgtgtagtcctttgccctgcttaagtgtgtgcatcatatggcatctgaccaaccccactgctctgtctcctgtgggggaggggatgggggtccttcagcacaagaggagtgtttgcaggccacctgccctgtgtcagctgccaagagggaccctctggtcatgggagactgaagtccactagggaagctgatcttgctctgtctcttctgtatgtgagtaatgtgtgttccacccagtgtttcactgcattgttttccttggcgactttgaaacaagatgcagtggacagaagtgctcagacttctgctcctgacaaataggcaacagatgccacttgctccacacaaacactttctgataaccaagttgtctttggagcaagaaagactcatagaaaattaactatagtgacactacctggttcatttttagcacaactgaaatgaaaactgaaggttttaattttgtcttgtcaacacaagaggttttatttgattgaaactagaattgtatgtgctcatgagcattctcaagtgttttcacagtgtctttgatttctaattatgtaacatttcttctagaccagggaaaaacttgcctattaaatgtgcttcatatgtgaaaatgttagccttcaaatggttaaaagtatacatgaacaagttccaaaagttctgaataaaagtctccttccta

SEQ ID NO: 210841 - DNA, 200 bp, Homo sapiens
aagtattgatatcagggatttcaatggatatgtgtatatcagtgttcacagcagcattattcacaatatctaaaagctagaaaccacccacatgtccatatgtggaagtatggataaataaaatgtggtagatacaggatgccttgttttattgtgctttgctgtattgtacttcacagatatttcattttttaccaatt

SEQ ID NO: 210842 - DNA, 2797 bp, Homo sapiens
gaagccctggcaggtcagtggcaggcactgtcacgctgagtcctatgctggcagcggggaaccttggggagaacacgggacaccgcggaagccgggaaatgattgtgcggctgtaaccggcacaggttcgcggtccgagtcactgcaccgagactccaaggcctgcagcagaaacagtttaatagggggagaggagagaagaccccagttccgcctccatgagaggtttggggatgggggtgtttaggggtctggacaggggcggctgaagtgtggggtcgctggttggtggggaagtgacaggcgaatcctgggacgggaggtgaagaaaccgcattctcctgctgagtgggttccctcgtggggttttcaccctgcttggcgccagcctttccgttggaattcaagatctgagaaagaacttgggcaactcgagcagctctccgagatcttatccccaggcacaatgcagaagccggcggtcagtgtcttctgtgacctgactctcaggaaggcggcccccgcgaggcagtggggctcaggtttccattccttggggacacacggctggtcagccagttgaatgattgtatttgggggagaagacagaagtgatctcttccttcctgactctcagactaatgaagagagaaaacaatatgattcagtagcctttgaggatgtggcggtgaacttcacccaggaagagtgggctttgctgggtccatcacagaagagtctgtacagagatgtgatgtgggaaaccattaggaacctggactgtataggaatgaaatgggaagacacaaacattgaagatcagcacagaaatcccaggaggagcctaagatgtcatatcatagagagatttagtgaaagtcgccagccagatagtactgtgaatgaaaaacctcctggagtagatccatgtaaaagcagtgtgtgtggagaaatcatgggttgttcattccttaattgctatatcacatttgatgctggacacaaaccagatgagtgtcaggaatatggagagaagccacatacacataaacaatgtgggacagccttcaattatcaccactcctttcaaacacaggaaagacctcacactggaaagaaacgctatgattgtaaggaatgtgggaaaaccttcagttcttcgggaaaccttcgaagacacataatagtacaacgtggaggtggaccttatatatgtaagttgtgtgggaaagcctttttttggcctagtttatttcgtatgcatgaaagaactcacactggagagaaaccgtatgaatgtaagcagtgttgtaaagccttccctatttacagttcctatctaagacatgaaagaacacacactggggagaaaccatatgaatgcaagcactgttccaaagccttccctgattacagttcctatgtaagacatgaaagaactcacactggggaaaaaccctataaatgtaaacgatgtggaagagccttcagtgtttccagttcccttcgaatacatgaaagaactcacactggagagaaaccctatgaatgcaagcaatgcgggaaagcatttcatcatctgggaagctttcaaagacacatgataaggcacactggagatggacctcataaatgtaagatatgtgggaaaggctttgattgtcctagttcactgcaaagtcatgaaagaactcacactggagagaaaccctatgaatgcaagcagtgtgggaaagcgttatctcatcactcaagctttcgaagtcatatgataatgcacactggagatggacctcacaaatgcaaggtatgtgggaaagccttcatttatcccagtgtatttcaaggacatgaaaggactcatactggtgagaaaccctatgaatgtaaagaatgtggtaaagccttccgtatttctagttcccttcgaagacatgaaacaactcacactggagagaaaccctataaatgtaaatgtgggaaagcctttattgatttctattcctttcaaaatcatgaaacaactcacactggagagaagccatatgagtgtaaggaatgtgggaaagcattcagttgtttcacatacctttctcaacatagaaggactcacatggctgaaaaaccttatgaatgtaaaacatgtaagaaagccttcagtcattttggtaacttaaaagtccatgaaaggattcacactggagagaagccatatgaatgtaaggaatgcaggaaagcattctcttggctcacttgccttctgcgacatgaaagaattcacactggaaagaaatcttatgaatgtcaacaatgtggtaaagccttcactcgttctcgtttccttcgaggacatgaaaaaactcacactggagagaagatgcatgaatgtaaggaatgtgggaaggcactgagttctctcagttccttgcatagacataaaaggactcactggagagatactctataaatgtggaaaagcattcattaattttatttcatttcagaaacgtgaaagaaatcacataggagataagcctcatgaatgcaaacacatggtaaagccttaagatgtttcttttgaatatggttatcccctaaccatatgcaggggattggttccagaccccctaagcatacctaaatccacagatgctgtgttccttttataaaaggacatttgcatgtaacctatccacatcctcctgcatcccataaatcatgcctagattacttaatttttcaccaacccaaagcttttgtaaaagtaaaaataaaaagtaggttactaaaatacctc

SEQ ID NO: 210843 - DNA, 2183 bp, Homo sapiens
gaagccctggcaggtcagtggcaggcactgtcacgctgagtcctatgctggcagcggggaaccttggggagaacacgggacaccgcggaagccgggaaatggattcagtagcctttgaggatgtggcggtgaacttcacccaggaagagtgggctttgctgggtccatcacagaagagtctgtacagagatgtgatgtgggaaaccattaggaacctggactgtataggaatgaaatgggaagacacaaacattgaagatcagcacagaaatcccaggaggagcctaagatgtcatatcatagagagatttagtgaaagtcgccagccagatagtactgtgaatgaaaaacctcctggagtagatccatgtaaatttgatgctggacacaaaccagatgagtgtcaggaatatggagagaagccacatacacataaacaatgtgggacagccttcaattatcaccactcctttcaaacacaggaaagacctcacactggaaagaaacgctatgattgtaaggaatgtgggaaaaccttcagttcttcgggaaaccttcgaagacacataatagtacaacgtggaggtggaccttatatatgtaagttgtgtgggaaagcctttttttggcctagtttatttcgtatgcatgaaagaactcacactggagagaaaccgtatgaatgtaagcagtgttgtaaagccttccctatttacagttcctatctaagacatgaaagaacacacactggggagaaaccatatgaatgcaagcactgttccaaagccttccctgattacagttcctatgtaagacatgaaagaactcacactggggaaaaaccctataaatgtaaacgatgtggaagagccttcagtgtttccagttcccttcgaatacatgaaagaactcacactggagagaaaccctatgaatgcaagcaatgcgggaaagcatttcatcatctgggaagctttcaaagacacatgataaggcacactggagatggacctcataaatgtaagatatgtgggaaaggctttgattgtcctagttcactgcaaagtcatgaaagaactcacactggagagaaaccctatgaatgcaagcagtgtgggaaagcgttatctcatcactcaagctttcgaagtcatatgataatgcacactggagatggacctcacaaatgcaaggtatgtgggaaagccttcatttatcccagtgtatttcaaggacatgaaaggactcatactggtgagaaaccctatgaatgtaaagaatgtggtaaagccttccgtatttctagttcccttcgaagacatgaaacaactcacactggagagaaaccctataaatgtaaatgtgggaaagcctttattgatttctattcctttcaaaatcatgaaacaactcacactggagagaagccatatgagtgtaaggaatgtgggaaagcattcagttgtttcacatacctttctcaacatagaaggactcacatggctgaaaaaccttatgaatgtaaaacatgtaagaaagccttcagtcattttggtaacttaaaagtccatgaaaggattcacactggagagaagccatatgaatgtaaggaatgcaggaaagcattctcttggctcacttgccttctgcgacatgaaagaattcacactggaaagaaatcttatgaatgtcaacaatgtggtaaagccttcactcgttctcgtttccttcgaggacatgaaaaaactcacactggagagaagatgcatgaatgtaaggaatgtgggaaggcactgagttctctcagttccttgcatagacataaaaggactcactggagagatactctataaatgtggaaaagcattcattaattttatttcatttcagaaacgtgaaagaaatcacataggagataagcctcatgaatgcaaacacatggtaaagccttaagatgtttcttttgaatatggttatcccctaaccatatgcaggggattggttccagaccccctaagcatacctaaatccacagatgctgtgttccttttataaaaggacatttgcatgtaacctatccacatcctcctgcatcccataaatcatgcctagattacttaatttttcaccaacccaaagcttttgtaaaagtaaaaataaaaagtaggttactaaaatacctc

SEQ ID NO: 210844 - DNA, 372 bp, Homo sapiens
aagcacttaatatacagccaacctgttaaaaaccatactttgagaggtaaaatgattactttttgatagcactttaatagtagaaatagaatatacaaacagggaagtagacactcaattgcagtactttgacatttgagtttcaaggagagaggctgcctgtgagagtgactttgtgatagtttgtctactttgttcgcttctcaggacctctttgccccaagaaagtaaagcaaaattttgctatagccctattagtgagggaacaaaacttctcttcctccttcttcctttgtctgcttctgccatttgtaacacttagttcagcttgcagttggcttgcactgtaataaaactgtaaatgtcaccatg

SEQ ID NO: 210845 - DNA, 602 bp, Homo sapiens
  misc_feature (410)..(410): n is a, c, g, or t
  misc_feature (511)..(511): n is a, c, g, or t
  misc_feature (515)..(515): n is a, c, g, or t
  misc_feature (546)..(546): n is a, c, g, or t
ctaatttcaaggtttcccaacagaaaaataattacgatagataagtatttcacttcaacagccttggatacatttctaagaccacagtggaagtgtggagtaggcagacaaatagcttgaagtattatcttacatattgctgctcacacaattaaaaagttaatttttttgtgtgttcttccctgaagatacctgataatacaaaaatatctttgtacaagggtattaactgctgcattatttgtaactacaaatattggaaacaacctaaatgcccacatataggagatgggttgaattcactgtcgcacatccacagatggagtactagaagctgttttaaaaaagagaataaggaaaattcctacaaacatggagtgacatccaggatatacagctaaatgaaaaanaaaaaaaggccaaaagaatgtatctagtttgctatcttttgtgagggaaaaaaagaaaatacccacctgcttttctttacaaaaagaaacacggaagatcnatcngaaattaatcgaaattggttgtctacagggnggttgggtcaggagtgagccggagcatctgggacggggatccctcttgagtcgacc

SEQ ID NO: 210846 - DNA, 366 bp, Homo sapiens
caggcatatgatttcttttggaaatgctgagaagacagtagttgcctgtttgatgaggacagactggttgaatttgaccacttttcctatgctacctttctgtacaaacatggattgcttttccatatcagaactctgccattcatctccagttaggaaaaaaaaaaaagcctgctggagagtgtaatatttcataagatgtttgaaaacttgagcccagtttcagtggcatgttaacataagttgggttttttgtttgtttatattagattttgatatgcttctgtgctcaagtgatttaagtatgtgatttcttttttttgcaaactttgaattaatgagaaaaggattcatgaggctagttgt

SEQ ID NO: 210847 - DNA, 255 bp, Homo sapiens
aatgataaatgactgacagatttctagattctttattgcctctgtatctcaattttctgtggtctattttaaaatgtagatgaataagctatcaagggataaaatggagtgccatgatttcagttttaatttcccactctgccactaactcactctttaatcttgggcaaaaatctctctggacctcagttttttaatctaataaatgggtatcttatgatttgttatattctttttgtctagggtattgacaac

SEQ ID NO: 210848 - DNA, 501 bp, Homo sapiens
atacctaggaatccagcttacaagggatgtgaaggacctcttcaaagagaactacaatccactgctcaaggaaataaaagaggacacaaacaaatggcaaaacattccatgctcatggataggaagaatcaatatcatgaaaatggccatactgcccaaagtaatccattttataataaccataatataataaaaacattcagatgtatattctcttatttagtagtcatctaattaagatttcttaaatatctgcccatgaatatgtaaggccttttactaggcagtagagatacatctgaataagaagtaatccctgttctgaagaagtttacatctttctaattttccgtttcaaactgcagaagacttaggaaaatgctacattacataaatttagtgttctccatagttttagatttttgtttttggtacagtacagctttgattctgactttccatattttagctcttcgtttttaaataaacagccagatgata

SEQ ID NO: 210849 - DNA, 331 bp, Homo sapiens
gggttctcttttctccactcccaacaagacttacttatctttcgtctttttggtaaaagccatcctgacaggtatgagatgatgtctcattgcggttttaacttgcattttcctaatcatcagtgatattgggcattttttcatatacctgttagccatttgtatgtcttctttcgagaaatgtctattcagatttcttaccatgttttaattgggttttttgttttcttgctgttgagttgtttgagctcctggatttgttcttagtgagtactaatataggctcctaatgaacaatacattattttctctcttgttgggagcttttttg

SEQ ID NO: 210850 - DNA, 291 bp, Homo sapiens
gacctgtcagtccattcaggctgctataacaaaataccatagactgtgaggcttacaaagaatcgacatctatttctcacagttctggagcctgggaagtctaaggttgaagtgacgtcagattcgatgtctggtgaggacccgtttcctcattcatatataactccttctctgctgtgtcctcaaatggcggaagtagtgaggggtctctatggggtctcttttataaggtcactgatctcattcacgagggctttgcccccatgacctaaccatctcccaaaggtccta

SEQ ID NO: 210851 - DNA, 288 bp, Homo sapiens
tcactttactcccatcatgcgtacagcctattcagagcatttggtagtcatcatttaccattgtaagttgctgttaggtttttccaactggcatgacatgctctcaaagtgtacggactgtatgtaacatgtgtttatatttcccatttttatgtaatctcgaataagtttttgctgtttgataagaaaagtgacctgactacattcagaccagctcccaagaatttaaaaagaactcctgacttttcaaaactacaaagcagtaaacaaactgaatttacactggaa

SEQ ID NO: 210852 - DNA, 433 bp, Homo sapiens
cagaacaggaattcaagcccacaaagctctttattgcttccccaatgacattgactttatccactctaattagtggacttaaaaacagcaaataagtgaaatacttaacaatatgagtcacgttttatatttcatttgcattgtccctcaaagcactattagtggagaagcatgatcacaaaattcctgacactcttaacaaatttatcaacttgcgagctagaaaatgtttctaaaaaatgaatgtaccaactaattagataattatataaaatactttgaagtcctaagtcacgcctgtaatccagcactttgagaggctgaggcaggcagatcacttgaggccatgagttcaagaccagcctggccaacatggcaaaaccctgtctctatactcaggaggctaaggcagaagaatcgcttgaaccgtggg

SEQ ID NO: 210853 - DNA, 405 bp, Homo sapiens
cagtcatatacagtgcaccatctactatatgtatcctacaggagagacgttccatttcaaataggcaaaaatgagaacctaattctctacttacagttttatattttttatgattggaagaatcttccactgactagtttgaggtttcctacattccaaacctggttcctcctccacttcccacatggttctagggactgatgctctaggcacatctgtgtcatgatctacaccctctagccttgcccactttgtgtcagaatgtctggtgagttagcacaggatgtctagtgcaggatgccagcactagaacagctagcaatcatttgatcatagacaaaagtgattgcaaaccacataaaaatcccattaaattcaaactaaatgtatgtgcaactagcttcc

SEQ ID NO: 210854 - DNA, 291 bp, Homo sapiens
tccccaaatggaatcctccccaaatggaagtcctcccaaatggaatccccccaagatgaatcctggatgagatcctgggacagagaaacttcattaggtgaaaactaaggaaatctaaataaagtagggaatttagttaacagtcacataacagtcattggttccttaattatgacaaactgtgtactaatgtaggaagttaattgggaaactggatgtgaagatatgagaactctctgttctaccttcagttattttagtaaatctaaaactgtcctgaaaaatagttta

SEQ ID NO: 210855 - DNA, 872 bp, Homo sapiens
tacaaagtgtgtgcatgcctatgtgtatcactaatatgtagtatatgcatactaaatatgcacatgggtatttcaaactctgttggcttgactctaaatgttcagctatcgatgttattcttggtatttagaggttttatttatatatttatctttcttgactttcccactgggaggtgtcttctgatatttcagcctctagcatctcagtcccatacattcagccctcactgggaagtttaattccaggttactaatttcagagcatcccaaagatgctgtttagctaggtagtgccttaatatatcttagaattaaaagaaaatactttctgtctctcagggcatttgaaagctcaaactctcctctttgaacttccctctctcattatattgccatcacaaatctttgtccatcactaggtggtacaactccccctcccctcacctgcctcacacacatatgacctacagtggaaaactgagctccagatggttcatggacttgcccaaagtcacctgtaccattgctgacttggaacttgaatgtccaagccttctaaatcctcatctgcatttttcacattagagaattttgatctctgacttccaacagttatttcaggagaggaaaatgcatggcttcactatccaatggactaaaaaattgagtaagggatagaacatattttacactccaacttgaaaacttgtcgtaatgatgctcttccagcatgaagaaattaaaattggccttcctcttcgttctcctgaattgttcactgtaactgagtggagatattttaggagggttcttactgtggcttctgaagacctttttcagaataaggtctttttttcaaaaacaccaca

SEQ ID NO: 210856 - DNA, 525 bp, Homo sapiens
attagctgggatggaagcattatggccatagcaaatggttctcttttagaggtctagacagagccagaggtgttcttgtcttccagaaggcagatgttttcatcgattgtcagtggaaagcaaagccatggtggtcctcatggaagacaaaagtcacatactccattttatcattggtttttgttgatcataggcttttggtaggaggaaactaacaggattatacttggaaggggtttgaaaggccttttaaaatggtgacaaagacaaataatagggtaaccatctatcctggtttgcctgggatagctgtggtttatacttacagtcctaattattaactatttattacagtcctaattattacaggcctaattattaacagttctccatcttttcttgtcaatgtcctagtttggatgatcaatggtatgataattctaagtaggagctataaagtgcaggtctgtcaatgcatgacacccctgtaaatcacacagggctggcctaatctatacaaggatg

SEQ ID NO: 210857 - DNA, 460 bp, Homo sapiens
atattccaacagttataaaggcaatatgttggtagtctgaggagagaagacaaaaaaaatcactgtatttcaaatgcttatgatttaggtaggagaggagataaaaatgaatcaatatataaatgactatactctgacatggaatgtaataaaagcaacaagaagaactgtgacaatatagagaaagaaaaaattacttctaagataatcaaaaagattcaattgtaggatgtagcatttgaactgttctttgaaggagagaaattggacatcagaaaaaaagtgcatagctttgaatgaagtattaaacagattgtctcaattgtgttgagtgcctccagaccaaggagtatatcatcaagactttgtccagtgcgaagagaccaagaaataaagctccccccccccactaatctgtacataatggcctcggtgattacatagatcaatgactaaaata

SEQ ID NO: 210858 - DNA, 195 bp, Homo sapiens
taacatgcagttcccaacgtgcacattaataacagttgttatttgtctcctggcctggaatttcgacttgtatgtaatctatattatctctggttactatttagaagcctgttagcttgctgtgtgtgacttctgcaagatgatgtgggataatttggtaactctgatgttcaagtgcataaagatgaaaatgtt

SEQ ID NO: 210859 - DNA, 214 bp, Homo sapiens
gcagggtgtggtggcacatgctcgtaatcctagcttctctgtggctgagacacaggaatcgcttgaacccaggaggaggggtttgtagtgaggcaagatctggtactgcctccagcctgtgctacagagcgagatcctgtctcactaaattaaattaaattaaaataagtattgattatctacttagtgctaagtatggtatgagcttgtggga

SEQ ID NO: 210860 - DNA, 433 bp, Homo sapiens
ctcttggtaagagtcccagcaaggcagtgggagaggcgggattcaatgcaagtctcctaatacccaaatggaacccctcttttctaccccacggcctcctcggtcctttttggcaatcctgtgggggaggcagaagagtgtagctatgaaggctgggtgcggtggctcacgcttgtaatgccagcactttgggaggccaaggcaggcggatcacctgaggtcgggagttcgagaccagcctgaccaacatggagaaaccctgtctctactaaaaatacaaaattagccaggcgtggtggtttatgcctgtaatcccagctgctcgggaggctgaggcaggagaatcactcaaacctgggaggcagaggttgtggtgagccaagatcatgccattgcattccagcctgggcaacaagagtgaaactctgtctca

SEQ ID NO: 210861 - DNA, 423 bp, Homo sapiens
tctctcgtgttgtatgagtctatgaagtactgagttggcaagtgctgcaaaatggtaatacagagttgggtgaggctgattataattagttgtagcaatgctcactaaagctttcactgagtcaatggttactaaagatttactctgtgctggctacagtttccagtgctaggaatataatgattaagatacagtaaccctatccttgaagaacttactgttaagaagaggaacagatattaaactgagaaagttgctataatagatgtttacatgaagttcagtgaggacacagacaattgtgtttcagtctaatattcctagaaagaaagaagcaaccatacttgatgaattctgcttcataatatttatcactagctggtagaataaagttgggcagtgatttaaaaaaaacaaaaattt

SEQ ID NO: 210862 - DNA, 319 bp, Homo sapiens
cagggcaccaacttagtatgctgaaaactgatacataaggaagaaaattcttccaccttgccattaaaaactgtggttccaggtaaccaaatagccctggcaggtaaagcaaagttcttctatagaagttaattccagacactctatggataagaaagaataagacacaatacacaataacatatggatatataataagaaaatccccattttgcagcccttaatggaataaagcaacagcaacggtcttcagcgaagggcaaaacctttagttttaagagacctccgtcccttgccccttcagccaagtgaggacata

SEQ ID NO: 210863 - DNA, 1177 bp, Homo sapiens
  misc_feature (958)..(958): n is a, c, g, or t
  misc_feature (968)..(968): n is a, c, g, or t
  misc_feature (1069)..(1069): n is a, c, g, or t
  misc_feature (1074)..(1074): n is a, c, g, or t
  misc_feature (1077)..(1077): n is a, c, g, or t
  misc_feature (1100)..(1100): n is a, c, g, or t
  misc_feature (1104)..(1104): n is a, c, g, or t
  misc_feature (1143)..(1143): n is a, c, g, or t
  misc_feature (1153)..(1153): n is a, c, g, or t
  misc_feature (1174)..(1174): n is a, c, g, or t
tatttgtattatcctcccacggctgagcattaattcacatatgacaaactttctctgtctccgtttattcctatcttcatcgtgatcaagtttctgagaagcggtctgcccagatactttggtcataatgctcatgtctttgaaactgtgatacacacccacaaaaatacctgtatttgtttgtttttttgtaatgtcttttactttttcaaagcatctttatgtctcatctttgtttgtcctcaaaactccatgaagtattacatagatattatttattttcctgctacttttgtagaaagtaaagccagaagagtaaatgatattttgacatctaacacctctttgtgtgtagtgtaaatttgcttatctagaattgctgtctaggtatgcttacagttcttatagatggtgaagcctgggctatgtcctcacagttcaaaaacctgggatcccttactctgagctgaaaatcagggcaaatcaaatctatagtgaatcacgaaacacaagaagcattccctttttaaaaagaaagatataaatacccccaccaactttttacttcattactctttcagttgctattctacaaatactgaacacctgctgtgtgccagggagtgttctagcttctggagctacaactgtggcaaaaacagataacaattcctgcccttaagaattatacctactaggcaggggtgacagcaggtagggcatcagacaataaagaaaataaataatgtgtatagtgtattaggagatgtaaacagagtcatcaaatacagttgtgcagattgctcactgcccaactctgtgtccagtaatgccaatggaggtcttggccttccaaagtgctgggattacaggtgtgagccactgaacccagcctaatttttcagattaaaaaaacaaagggacactggttagttcatagaatgtctggagggcctgncagcctgtgnttgtagcacccagctaccctatggggctgtctccaccggaaacacctctacctctgcttctacagccaggacactcaggacctaacatcatgaatgtggcngcttncanccctaaacaactacatagcttgncatngtggatggcaaaagaattgagttccctaattaaacttgntgctttttanaaatcaagtgcttgttaagcntta

SEQ ID NO: 210864 - DNA, 496 bp, Homo sapiens
tggttcacctcaggaggtggccttgggtgttcaatacaggacagggaagtgccaaaaatgatagagggtgtcttgggggatgggatgcagatagctgacatttcctattcttaatatctctcagcataaagcaaagaacatacaatgtcagtgggggctcacctgaggcctgttagttcagaagttctctgcatttttcagccggccacactctgataaccttcaggaaaggtattctcacatttgtacctacagttacctcctaggtaaagccaagctgggtcatgggttatttgctccctgcttacagctggaacgctcttccttcttccactggcctgtgatgggccaacatgacagaaccttaacactcattgggatacctagtgcagcacctagcacaggtgggcatttggggaatgtttgtggaatgaatgaatgaaacaaagggcaagagggaggatgaatgagagggaggaagagaagtaaaggaaag

SEQ ID NO: 210865 - DNA, 408 bp, Homo sapiens
tgtctcgctctcttgcttaaaactgggacatgaatcatccttttgtccaatgtatccacactgtatatgctaacttaattgttctattttgttattgttcatctcttgttcccagtttataaattaaactttatcataggtatgcatgtataggaaaaaaacagtaaatataggattggggctatctgcagtttcaggcagcagccgctggggggtcttggaacatttagctcatggataaggggagactattacattgcaccaagagaaaaacagtttcatatatttgtagtacattggagaatataagcttcatgagagcagaagcttccttgtgctctcagcacataatatgagtctggcataaaggctttttatgattgtttaataaatgattgaatgaataca

SEQ ID NO: 210866 - DNA, 388 bp, Homo sapiens
tgtttttgtcaaaagaattgtaaaaggttttagttatttattttatcttaattgttcatttccttttatataaaatcttcataaagaaacccctcaagattaattgctaaaaaaaattactagtttaaaatgaaaatgtcccctcttattagctaaaatgcaatttttataaaccgttgtatttattttatagatttgcctgttttgtgtttgcttggctgccagggagctcaacaacacttatccttaacttagagtgtcaggctagcatgggagtcagggcaatgtttttcaagcctgttgactctctcttgactttcattaatagatggacatattctaattctcttcccaataatatcaacatcccttataataagtatttctt

SEQ ID NO: 210867 - DNA, 439 bp, Homo sapiens
tgctttaaaagaccccttttcccctctatgtgtctaaaataatttcttaataatttcttaataacttctataacgatagtacacaatattgtgaaaatgtgagtgctttctatgtgcaaagccttgtgctagaattatagacagagtaccctctaagaaataaggttggaaaggagggtgggagtaaactgggaaggaaagtaaatgctgtgctgtggagttgggacttcatccagagggccagtacttctcagactttagtgggcattacaatacctggtgagataataaaacctgctttgctgggctccatttcctgagtttctgattcagtaggtctcaggtggtgcttgagaatttgcatttataatgagtgctatggactgaattatgttcccccaaattcctgtgttaaacccctaacacccaatgtgactat

SEQ ID NO: 210868 - DNA, 713 bp, Homo sapiens
ttctgttcagaagaaacagtaagtacaaaggccagagagaaccaggtgtgttggaagccagcatagctacaacagaatacgtgagggatagtggtgggagatgaggttagagaggtaagggcttggggaccagacagagaagggccttgtaagccactgtaatgactttggctcttactctgcagggggtggaattgctgttagaaggtttttaaaaagcaaagtaggaacagtctatcttgtcttttaaagggccctctttggctgttatgttaaaaacagatggtagagcagcaaggagacccatggaagaccattgtaggaatcccagtgaggggtgatggaggcttggaaaatttttcattctatgtccatttggtggtaatataaaatctacaagaagacaaaggaggaaacagaatagaaatatttcatcacactagcccctctatctaccttttagaatactttttaaaacaactatcaccaattatcccattgtagcttcctgcttggttcaaatagcccctatctattatttataatatagaaatggacactgtagaatattgctgctcccccaaaatataatgtgaactacatacataatttaaatttttctaatagccacattttaaaactaaaaagtaataggtgaaattaattttaagaatgtatttaatttaatcttgtgtctgaaatatcaccatttt

SEQ ID NO: 210869 - DNA, 185 bp, Homo sapiens
caagtaaaggcatctttacaagcacagcgtgttcaaagccctcaacaaatagtacatcccttccttcagatggaaggtcatgttattcaaagcaatggtgatcattctcagcagcaactccatcctcaaaattctgaagttatgaaaatggacctctctgagtcttcaaaaccattacaacaaca

SEQ ID NO: 210870 - DNA, 337 bp, Homo sapiens
tgttgatcaaagatggaactctgattggatattataacttgaggggcaggtaaaggagatcctcatgctggaaaaaggaagaacagtcagaggggtaagaaagccaagagagagtagtgataaatgctaaaaaagaaagaaaggagtggtcagcagtaaacatcagttgcgcaataagaagaccaaaaagtgcccagtttggtcaagcggtcactggtgaacttacagcagtttcagcagagggagcagtaagcacagaagacgactaaaatgttgccaaataagcagacaatgggaagcagtgaaacagtagactgctgctcaggaaaaaaaaaaa

SEQ ID NO: 210871 - DNA, 512 bp, Homo sapiens
tgcactccagcctgggtgacagagcaaaactccatttcaaaaaaaaaaaaaagttcccttcctcttctagtcacaatgttcttagaactcgtaccaaaaatttagtaattatctactactgccttgatcatattcaaaggatgtcacgtggctgctcaatcattatagccaggtaatgagccccttgggcctctcccttataattactataaaaatcattattctaataaaaccaggcatggtgttaagtattccacaagcattatctcatttaatccccataatgactctatgaggtaggtgctaacattttcctcattctaatgaggctcagaatgattaggttacttgtcaaagaccacagctacaaaaagctgtctcatgtattgcctagtcataccataggcttgctatggttataggtccatggtggatgctcagtagactgtggtggttacccatatgacacgcggcagagaaggtctgcccaaaaaagtagctaaagaaacatt

SEQ ID NO: 210872 - DNA, 707 bp, Homo sapiens
atgcttcacggcatgacagcagactgacgaggggcaaagggcatttccagaaggaggagcggtcagttctatcaaagggtgctgaggaggaaataaatatgcagaactgaaggaggtatcagaggaactcagcgttactgttggcccctttttcttgcaaaaatagagcagatgtaagagatgccaggaggagtgagtgatgtgcttcgtgtgggcagagctggggggaaatccctggaagaatgttaacaacactgtgagactagtaagtgaaggaccattccatatatagggaagttttattgtagtggcaggtataagcaaagtaggttgtcaaaggcatttgggtaaaatgccccaatgtttacaggctgtgtttctgctaataattttaacaaaaataacagtaaataaaattaagcacttcctttgtgccaggcagtgctctgttattttgaattttcacaacattcttgtatagtgttttccccgtttaaataaaaggaataaataggaataaaggagatcttagactagttttagttaaggaatttgcaggtttcacagctttcagtgatggaattgtatgtctgattctattctgactccaaagctcattgccttacaacaagaaccattgtagcaccagtcatgtactgccagcttgctttagatgaatgactatccctaatggaacatagcatttt

SEQ ID NO: 210873 - DNA, 442 bp, Homo sapiens
ggcagggtaaaatatatctgaaacagttttttaataataggggcggctattattagattggttggggtgggagaaatgggggtgaagaacaaaaaagctagcaagagaaaaactcagagaattgaagtaggctgctttaaaacgttgcttaactgggaagcttgaagaagaatggaagagtctgccgacaggtcacatacatgctgttgttcattagaacctcattataaattttcatttttaaatagattttacatggatttaggcatactaatcaaatcacatccccttcataagaataacaagttttgccctttgaacaatctgtttatacttaatataaaattggcagctgggatggtgtggtaggtgtgcagcctctgataaatcttataaaatgagtattgtggaatgccataaagttgatttagtaaatgtcttt

SEQ ID NO: 210874 - DNA, 1293 bp, Homo sapiens
gtgtgagacgtgcctttcacctcctgccatgattctaaggactccccggccacgtggaactgcttccagggctgtggggccaaatgtgccctctcctgccctcatggcagcctcagttcctgagttctcatcatttcttccttgctacaatcagaactgagtctagcacccttcaggacaaatccagatccccaggagagacagcctgatgagttcagcttggaaagggtctgttcctgtcctatcagctgtggccagcgtgccagggtcacgtaccagtgcgactgccacagcacggcccatctgtccaggagtagttctcagtcaacgggctccagctgggactcaggctgaatagatgcccacaaggatgtctgctaccacatgtaaagtgccccaaagcaggacaagtgctcagcaagtgtggcccgtatgattaagggaattctgtgtctgtctgagaagaaagtggcgatgagcaataacaaggcctgtcgtccatctggaagaactccagccaccccccaaactttcaggtgcatagaaccacctggacataagacacaaacattgttaccccaaaaaggaaaaaaattatttggactatattaaaataaaatatttgtttatcaaaatacatcattaagagtaaaaaggcaagacagcaagttgaagaagatatttgcaatacacatagccaggaaaggacaagaacccagaatatataaagaactcctataaatcagtaagaaaaagacaatctgattaaaacattggcaaaagatctgaagaggcacttcacaaaagaggatgcccaaatggccaataaacataagaaaatgtgctcaacatcattagtcatcagggaaatgcaagttgaagcataaaatggtatcactccacacccacaagcatggctgggatgaaaagagagatgcgcccagtgctgacgaggatgtgcatcaactggaactctcagacactgcaggtgggtgtctaaattggtacagccactttggaaaattgttcagctgtatttgttaaacctgaacacaagcaaatcctatctgtgatgccacaattctgctgatcgacatatctccatcagaaatgtatacaaatgtccacagagatacatgtcatcgaattttcatggcagccctcttttgatatcccaaagctggaaacaacccaatgcccatcaacagcagaatgcatacaaattgtggtacaatcataggctggaatgctactcagcattgagaataaacaaaccacaactgcatataatgg

SEQ ID NO: 210875 - DNA, 414 bp, Homo sapiens
aagaaacttgtggactgtactttgtctttaatgatgttttaagggaaaattacacataaacacacatatgtatacagaatattttgagtaaatttaattgaactctttttaatgcagattcaaaacatcgtgttgtaaaactttgtggtattggttgttatgagagatagtatgtccagctgattgatgcgtcttaaagaaaatggaagtttggcatcagttgggttaataagttataattcacctcttattaggctgaaaaaaaaatctctgaggaatgaactgaaaacattctggggagacaagtgtctgtgccataagggtaactaggcatattttagtcactaaatattccttggatggacagatggatagatgaatgaatgagaataggtgaaatatgacaattctaaa

SEQ ID NO: 210876 - DNA, 591 bp, Homo sapiens
tctgaacctcactttccttctctatagaaaggagcttgttataaccacttcatatataggtattacatgatgctgtgaaaattgaaggtggtgactcatgcaatgtgccttgcccagaattgacactcagtgggcattttgtaaacatttacttgtaggccccttccctttcctcaacccccatccccagcctcagctttaccttgttttctttttactgggaaacatggtcctttttgtgaacactgtcaatagatatcttttgaacctcagaattctctcatctctactcccttcttttctttccttcctccctccctgaagtaagtatcccaactccttttgcttttcctgggccaaaacccttccaagggtgagaggtgagggaataggagatggccgagaaggtaaggatggcactgcagtcacagacacaacacacatcagtatttctccttatccagttcctctccaatcctcccaaatgggcgtgggaattccaggttcattatgactattctattagcattccccctggttgtcttctctttctttgatttactgaaaggagaaagagagtaagggtttttc

SEQ ID NO: 210877 - DNA, 200 bp, Homo sapiens
acacaaagatagagtgaattggtaacactgacacagaatgatacgtacacacagattatggtgtcactcacagtgttacgtgtagaccaaagtttctcagctttggaactattaacattttggggccaggggcagtggctcatgcctataatcccagcactttggaagaccaaagtgggaagatcacttgaggtcaggag

SEQ ID NO: 210878 - DNA, 1039 bp, Homo sapiens
ctgttacccaggctggagtgcaatggtgcgatctcggctctctgcaacctccgccccctgggttcaagcgattctcctgcctcagcctcccgagtagctgggattataggtgcccgtcaccacgcctgactaattttttttgtatttttagtagagacagggtttcgccatgtcggccaggctggtcttaaactcctgacttcaggtgatccacctgcctcggcctcccaaagtactgggattacagacgtgagccaccgtgcctggctaatgtctctctttttcgaggtgagaaacacatcttttgagctttcccaggggctcaactggcaaattccaaagttaattcaaggtcaaaagactgaatttagaatttgattttaggaagtttgtcaaaaatgtaaaaaaagatttaaaacacttgatgagtgcttgctttggcagcacatatactaaagttggaatgatgcagagaagattagcatggcccctgtgcaaggataactcacaaattcatgaggccttccatattttttgaaattaagaaaagaaaaaaggaaaaatttgattaataggatctcaggtaactattaatttaggtcactaataattagtctggttaccagagtgattattgaattatatagtgatctgggatcctatttaatcaactgttcattttataatcatttaatattttatgatttaagtatttaatgagcatttaatatttattaatattcatttcataatcaccagggtaattattaaaaggctttgaaggcaaataaagttatatagttgtaaaaatatatatattagttctcttaataggattttattttcttggaaagtaattgaaggcctgataaaagataacatgaaagagaaaattattttgataagacataattttttaaggcagattacttaaaaggtgaaaaagaaaatctttcactcttttttatcaatactacaagaaaatcttgcattttaaaagataatgccaaattctagttttgcatcaatgtacccttga

SEQ ID NO: 210879 - DNA, 866 bp, Homo sapiens
aggaggaagtgatgctgaggcatgtaggtgatggagtggccctgaaacatttgaagcatgggggcacttactggcaataaaatctggagtatatcgaggcactttataacaaggttcctgtgcattcagaataccctggttagaagttcagtagagttaattcatgtacctcacttctacctgttaaatgcaaaaaccactgctagaaattttctttaaaggtataggagttgatagaaatgataaatgaacatagctttttttttggcagtgaagaaaatatttcaaattatcctttaggaacttttttcaggtatggttcattagagtaggactctgttgggattatatggtttcttatgccatataggtgctgtcttttgctttggccaattccctagagatgtaacactttcatctttgcattcaaaatcgtaccttgttaaggagctatgtttctacaattgcttttacattgctgtttcattatttgcttttttttttgccctgaaagaaaagcaattctagaataaagattttctgtcttgatgatttaaaaaattagtgttttttgagattaaataaagatactgaacagaattttaagggtaaaacttgaacttaattttttttacattgtggaattgtacttggagaagccagcaggtggcagtatgatgtataaagtgaaaggtttcaaatgggtatgaaggctgcttttttcatcagaaaatgttacttgcatattaaataattcatatcactttattattcagcagaacttttttatcctgtccctttgttgaacacattgcaattatgattttatgggctattattttaaattatatatttagtactttttt

SEQ ID NO: 210880 - DNA, 204 bp, Homo sapiens
aagagttcctagagaaactcttcaaatacttttgtccactatcttggcttataacccaagagccaagagctgattaaaaaaagatgttggccgggtgcggtggctcacacctgtaatcccaacactttgggaggccgaggtgggcagatcacttgaggtcaggaatttgagaccaagcctggtcaacatggtgaaaccccatct

SEQ ID NO: 210881 - DNA, 128 bp, Homo sapiens
cccagcttcactgcgtactgacacggaacaggcccaggctggcccgagcttcaggccccctttctccgctgtgtcatgagccaccatgacaactgcagcccccagtgcccagcgcagagagaagtcat

SEQ ID NO: 210882 - DNA, 356 bp, Homo sapiens
agccagaccaggtgttttggttcctcattgctgaaaccataagtccagacttgggccatctactgtccttgggagcctgttggaagctggcttcctaaaaccatgataacattacctgtcattttattgagtacctgctctgtgccctgtgtgatgtagacactattttatttaatccacacaacagtccttcagagtggagatgactagccattatttattatctttattacagattaggaaacagaactagcaaggttaagtgacttgcagagtcacagacagcaaatgacagaactcaaacctccagccctctggcctcagagcctgtacatttctggccagccctccagaag

SEQ ID NO: 210883 - DNA, 284 bp, Homo sapiens
aaaaaaaaaaaaagagagagagagagagggagatttatataacatttaaattaactgcataaacctgggcaatgttcaaaactccatctctacaaaaaaacacaagaattagccaggcacggtggtgtgtgtctgtagtctcagctacttaggaggctgaggtgggaagattgctagagccaggaggtcgaggctgcactgagctgtgattgcgctactgtactccaccctgggtgatgaagccctaactcaataaataaataaataaataaataatacaaata

SEQ ID NO: 210884 - DNA, 443 bp, Homo sapiens
ggaactatttctaaaccctcctagctggaggcaatgtacaccagaccagtgggatgggagcaataaagaagaaatgcagtaaagaacaaattcttttcagattagctgattggcagttgtgaataatgcagctccagcactaaagcaagaaagagcagcctcaaccttggcactcattatttagctgtaagccttttttgctaggaacatttttctctttcaagtcttaaactaggttaactccttatgatccagctattcgtccaaaaaagtgaactctaaagaccctttgttgaaacttccaagtcctggatgtgaattgatagcaagaaaccacggcatcctcaagcaactttcttacctgcactgaaattatgacagaaaaaacttacccagtgagttaaatagcatgcgttctacatcagacctgacaggcattaaaa

SEQ ID NO: 210885 - DNA, 520 bp, Homo sapiens
actgtcagcataagtaatttctatagtccttctatctttaaccttttattgttctagatgttaactggttgtttaaattcgggacactggattccaaggaagcaaagcaagagctttaaacgcattcaccccaataaatatttaatgggttctctgcagctagctatacattttaagaactctcaacctagaaagggaatgggtagattggagtggtccttgaaaatgagcatcattggaaggagggtttggggctctcttgtgagcaggatctatcactgacatttgaagccaaatcccacctgctacacaattcacccagatgcctggaccaatcccaggggtactggagctcatttgttggggattatttctgtttcagttggtttttatttacctgtcttctgcagaagctcacagccattatttgaagtgattgtatcattttgtctcaaaagagtatcttttcccaaaatattagaaactataaaatcattatttagataaagaaaaataaaat

SEQ ID NO: 210886 - DNA, 455 bp, Homo sapiens
gcaaaaacaaacaagcaaacaaccaccacggcagcaaagcacatggcaggcaggggaaagacactgaccagcaggaacattcccatcaaggaaatgcacgagtgtttttggacaaagtgtacagagaaaatcaaagctattcattgttttaattaagagataaaactaaggtcactgtttcacttaatgttgagatataagttaaaagtatcatctacctctaggggtatgatatgactgctgaccaaggttacttaataagaaatccttgttctagttaaatacactgtttatctctatctcctgtccttcatccctccctttcttgccacccttccctccatttattccagtccagcagctgactggggatgcatttcttcttgggaaggcaaacaaagccatcattctggggcttaattaataaagctcctagtttcatagttttcatgctc

SEQ ID NO: 210887 - DNA, 302 bp, Homo sapiens
cgggtgctagtgtttaagtcaaaccagtgcagaaataacatgagcattgcaagccccttaacctgcgagttgaaagttagaggaattcaggctggcacagggcttactccttttgctagagggcctttctgttcagagtttttctttttcaagaaccacagacatttattttattgccactctattctgcagcacagtttttccttgggctaagaatggaattactaacattgcttgttccatactctgaaaatcgctgtcaggtgtgaattaaatgctttatttgaagatttaagctcctt

SEQ ID NO: 210888 - DNA, 791 bp, Homo sapiens
  misc_feature (753)..(754): n is a, c, g, or t
aaaaaaagaaagaacagagaatacaatactagcaaggatacataaaagtatgcatacaggatgcccactgtagcattatgtgtggtggcaaataaaagcacttactagaaaattaaaaaataataataataacagcacaatgccaaattggggaatgccccaataaaggtattaacaaaggactgtgtgagttcagagaaacataatggctagttttgacctgggacttgaaggaccagtccagtttcaacggacagatttggtgagaagatgggggtaatctaagcagagagaaatatatgaggaagtgtacagttaggaaaatgtaatttagaatgatacataaaagggggccatgagaaataaaactggaaagagaggtcaggggttaatcatggaggctctccaataccatgctagagaattaggaaacaggcctagcactgtggttcatgcctgtaatcccagcaacttgggaagccaaagtggaaagatcgcttgagcccaggagctcaaggctgcagtgaagcaggtcacccatgccccaaccgggcgaagaggagcccggcccaccacaacacagaaattgacttgggtggcattgaccgtacctggcaacaacacgatcgtttccagtacgagtggaaacaggtatgcacatgcacaaacatctcttaaagtgggagcaatccagacttgtcaccccacggctggtaccagtgtgccatcgggctttcaggattgataagtccnngggatgacgccacacagagatatgcagatatctgcgg

SEQ ID NO: 210889 - DNA, 553 bp, Homo sapiens
agtcatccatgattttattacccaaagacaaatattggtaatattttacttcatttcttcctagaattttgtctttgcatgtatatttgaatattaaagatgatgctacatgtacagatttataccttttcctcttcacaaatcatacacatcctcacaaattgttcacttagaagatatagtaagatgagttttatgtctgcctaacgtttatctaaaagtgatttaaagaatcaattaagacaattatgaaaacgattaaaaaatctattcatttgaagaggattttttatttacaggaattctatgtgaatcatctcatgtacttccttctacaaagatggagtttggcagaagaagtattattcccactttatagctaagacatgaaggtgttgggccacattctcttacaggcccatttgttctatgcaagatcatagtctgtggaaactttttctgtcattgaaaagattgaatcagatctgcccatctaaattatgtaattgttaaagggtatgagaccatttttataaaagtgtgttatatatat

SEQ ID NO: 210890 - DNA, 357 bp, Homo sapiens
tagttattattattatatatatttttcgagacagacaacaacaacaacaaaaacccatattccattgcggcatagagcaatagttaatccactggagattactatcaggttaacttctttgtagctctcagaatagaactatttctgagtatatgtgtacttcatacaaatctccatcaactaagaaggtggttgttctacactagcattttaaaaatagtctgtatttatacttatgtataattgtacagtgaagtataagactgtggagctgggggcagtggctcatgcctgtagtcccagctagtagggaggctggggccaccctggatgatacagctgggacccaacttgaaa

SEQ ID NO: 210891 - DNA, 519 bp, Homo sapiens
ccaggtgctatatcctgaggttactcaggagggaacaggagagctacaaatccagacacgtgttctccagctcctctaagttgaatttatcaaggagacaaaacaggacccaggatcactacctgcaactcccttaattgtaacctactttccgataaaaattacatgcttttgaaaccagcaataataaactgaaatgcacgaacagtcaacacaatgacaaaatgtactctgcagcgattgaggagacattgttacatcttttaaaatcaatctgtgatctgcctctacaggagatgaatgaaagtgcatagaagacaaaagaatgtgataataacagagataatactcagccccagtacatccaatcttttgttgggtcaataaccatttgaaaaggaactatggattttgtgcctaatagaaatgagaggacagctccaagataatttgaatatttctttcccttttttccttttccttcctatgctggaaataaaaaggttgatgtcaacatat

SEQ ID NO: 210892 - DNA, 465 bp, Homo sapiens
taaagtcttgctgctctaaactattcctataaagtccatcagagactgcacatcgttcaaggtcatgctgcaaacagattcggaatgggcaagatgcttttgtgatgaaagttattgcatcaaacaaaactcaaaatttattccaggtgggatccaccacccctccccatgctatcttaacatcaaacacaaaactgacacaaaacaattctgtcctcctgatatactgaactttgggcacaagtagagggtgcattacaaagacatggtttcatacttgagtacatgtgttggggaaaaagttttccacttaaatgtgatccatttaaggatagctaaatatatgctctcctgcttattatatttacaatcatttttatctcagcaaaagatgctgttatggtgaaaatatattacacatgtcctttgctgactgagagagttaaaatgaatagaacaataaag

SEQ ID NO: 210893 - DNA, 281 bp, Homo sapiens
tgccagttgtcaaatagcttctggaaggttgaactgaaatggtttgaatgctgcttttcacagaatgttaagtttagtcaggctctctgcaggtagctaaaccttggtaaatgttaaagagaaagccctctttaaaaatactctgtttaaaaactgcttgttgtagaaaatccaatgcagaaggaataaagaaagcaaaaatctccttaaattcttctaccaagattggctgatttgcctctctctttttctcttctctatcatctgggtacacaaataca

SEQ ID NO: 210894 - DNA, 397 bp, Homo sapiens
gaatgtggcattatgcagttaagaatactgacaaattgcgatgaacaactaatctcttgagctcctctctctgtccctcctgtgttctcattccagtctggtcatgtattgccccaagcctagacttagcagtggtctcctatctcctctccctgttgacaatctctcttctcccttgctccagagttgttttttccaaagcatcgcttttaacgggtcattcaccatcatgctctatcactacaagatgaattcttgaccaagagaaatggatttcaagacactttgcagccccgtccaatccaaatgcagcatctagtagcttctctagcatcttctacctcttattttttcttttaactgaattccagctacattcactccattgctgttctat

SEQ ID NO: 210895 - DNA, 304 bp, Homo sapiens
caaacttgaatgtgtatatgaattgtgtggggatgatgcaaaaatgcagattctgattttgtagggtagatggggcctgagactctgcatttctgaccacttcctagactatgtcaagactgctagcccttagtccacactttgaatcgcaaggctggtgtagctatgtctttctttatatatgagattttgtttgcaggtggcacctaacctagtagaaaatagtagaatcgtcacctcccaaaatataggtgtaatacttctattaacatagcccaacattgtattactttggggggaaaag

SEQ ID NO: 210896 - DNA, 774 bp, Homo sapiens
gaggacccaggggggagctgatgttctcctttgagtgctgtgcagctggagacccggggggagttgatgttccgtttgagggccgtgcagctggagacccaggtgggagctgatgttccggtttgagggtggtgcagctggcgacctgggcgggagctgatgttctagtttgaggactgtgcagctggagacccagcggggagctgatgttgcagtttgagggccatgcagctggagacccatgggggagctgatgttgttttgagagccgtgcagctggagatccgggggtgagctgatgttcccgtttgagggctgtgcagctggaggcctagcgaggagctaatgttcctgtttgaggtccttgcagctggagacctggggaggagctgatgttcttgtttgagggccttccagccggagacccggggatgtgctgatgttcccatttgagagctgtgcagctggagacccgtgggggagctgatgttccctttagaggaccgtgccactggagagcctgcggggatctgatgttccagtttcagggccatgcatcttgagactcggggaggtactgatgttcccgttggagagccgtgcagctggagacctggggaggagctgatgttcccgtttgagggccgtgcaggtggagacctggggaggagctgatgttgttctagtttgtgtgttgtgcagctgcagatccagggatgagatggtcctgcggttcaaatatgagggtcccggagctggagtctatgtgaggag

SEQ ID NO: 210897 - DNA, 529 bp, Homo sapiens
cagatcaactgtccaggttactgccgtgcagctggagatccgggggtgagctgatgttcccgtttgagggctgtgcagctggaggcctagcgaggagctaatgttcctgtttgaggtccttgcagctggagacctggggaggagctgatgttcttgtttgagggccttccagccggagacccggggatgtgctgatgttcccatttgagagctgtgcagctggagacccgtgggggagctgatgttccctttagaggaccgtgccactggagagcctgcggggatctgatgttccagtttcagggccatgcatcttgagactcggggaggtactgatgttcccgttggagagccgtgcagctggagacctggggaggagctgatgttcccgtttgagggccgtgcaggtggagacctggggaggagctgatgttgttctagtttgtgtgttgtgcagctgcagatccagggatgagatggtcctgcggttcaaatatgagggtcccggagctggagtctatgtgaggag

SEQ ID NO: 210898 - DNA, 620 bp, Homo sapiens
cctttcaagctgtaattcaggattcagaatgtatcgctgtattttctttacggtgatctcatctccttttaaagcttcaccttgcagagatagcaaagagataaagtgaccaagaaaataacatacatgggtgaatgggataaaatgcatattgtcgttctgtggcagaactggacagtgagcccacttactcatacaccagtgtcatcactggccaaagctatcacatgtgcagttttcgaaatccttcgctcatcagggaaaagtaatgagtggatttggctcacaagccccaagttttagacccctaatatttaggctgtgggctctcaaatttatatccttgagtccagacctctacgctttgctccagacctgatttttctgttcactgtcttcatttggatgtcttttagccacctaaaacttagtagtcccaaaactcctcttattatcccttccctcatgcacaaacttggcccttttttgttgtttttctttcacagtgaataactctgtcatctgcctatttgtacaaggcagaaaactaagcatcctcttattgttcatctttctacttccctaattatcttggatatttctcattcctttaatttgcc

SEQ ID NO: 210899 - DNA, 470 bp, Homo sapiens
gagcatgcatatgaatatgtgtgcgcatgtgcacagatgcacgtgcacaccacgcccaaccagccaacctccagcctgtctaaaaaggtattgtaaccttgtggaagggacagaaaggagccctacactggggaacttgtcaaatgtaatccagaaaagttggggctggcacctttgccaagcagcgcacagttggtggaaggaaagaaccaaggtgcagggtgccaggcaaaggcaccaggcagagaagtctcctggcctgaaaccatcaggcctagtctgctgagtgtgagggtgacctgtgatggttaccatcaccagtgcttgcatccagaggctccagccctgaccaagccttactgagtatccaaagatgggcctctgtttgctaaataatttgctccctcacctgctcaccccacaaagacaggtactactaataaaattaaagtcatcatcaccctcatcat

SEQ ID NO: 210900 - DNA, 388 bp, Homo sapiens
atatgggggtctcactttgttgcctaggctggagtgtaatggtgattctgacaaatgatcatagcacgctacaacctctacatcctgggctcaagagcttctcctgcctcagcgtcccaagtaactgggactacagatttcagtttaggtttatccgtggaaagatggaggaatgagagctagagaacaagagagcaagtgagagtaatggaaagtccaaaggaaaaagatggacaagacgaatgaagggaaacaagaaggaaaagagagaggcagagggagagggagacttatttgaggatttattttttaatcagtagttgatgttgattttttcaaataattcttaagtctttagctttttgtgttattaaaattttaaaatata

SEQ ID NO: 210901 - DNA, 269 bp, Homo sapiens
gcaattctggaagcaaggtttgtcaacattgcagaaagaagtccggtggatgtgagcaaaatccccctgccccgcttcaaactgaaatgtatcttctgtaagaagcggaggaaaagaactgctggctgctgtgtgcagtgttctcacggccgctgcccaactgccttccatgtgagctgcgcccaggctgccggtgtgatgatgcagcctgacgactggccttttgtggtcttcattacctgctttcggcacaagattcctaatttgga

SEQ ID NO: 210902 - DNA, 224 bp, Homo sapiens
agaaaaaggacactaagagaggggagggcacacacccaaggtcttacagctaaagccaggtaattcacactttctgcaaactagccttcatccaggagccatttgagttggatcctgagggatgtgtaggagtttgccatgcagaaagtttaaggatttattctgacactcaccgtccaacgctttgttgggtgttgctgggctcaagaggcatctaggggtgc

SEQ ID NO: 210903 - DNA, 725 bp, Homo sapiens
  misc_feature (1)..(1): n is a, c, g, or t
  misc_feature (15)..(15): n is a, c, g, or t
  misc_feature (17)..(17): n is a, c, g, or t
  misc_feature (34)..(34): n is a, c, g, or t
  misc_feature (41)..(41): n is a, c, g, or t
  misc_feature (90)..(90): n is a, c, g, or t
  misc_feature (112)..(112): n is a, c, g, or t
  misc_feature (164)..(164): n is a, c, g, or t
  misc_feature (169)..(169): n is a, c, g, or t
  misc_feature (174)..(175): n is a, c, g, or t
  misc_feature (189)..(189): n is a, c, g, or t
  misc_feature (198)..(198): n is a, c, g, or t
  misc_feature (224)..(224): n is a, c, g, or t
nagatggagtttctntntgttacccaggctggantccagtngtgtgatcccggctcactgcaagctccgcctcccgggttcacaccattntcctgcctcagcctcctgagtngctgggattacagatgccagccaccacgcctagctaatttttgtatttttancaganatggnntttcatcatgttgnccaggctgntctcgaacccctgacctcaggtgatncacctgtcttggcctcccaaagtgctgggattataggcgcgagctgctatatatttcttggcactttcagtaatagaggctgttaagccacaacacctcaagggctgggccagttcaaggaccgatgagaatgcagaaaggaactcagataagggtactgtactttcttgttggtttactatggaaccagcacacaggcagcagaaaggataaatatgagattaagaacacatgatgttaaaatagatgtggctactagggcctcccatttccctgacagaggcacacctcaaggctggggcctgtgcagtgagaaatccaccagcagaatgaagcctagaaccttggtccactgtcttttaggctaggggaagaggggagaagtgcctacattagtccatgcccaagtgtggggatcctattttcttgtcccaccacaatacatataacttccttgctaatacaatatttttctttcattgacattgggcctacttaaga

SEQ ID NO: 210904 - DNA, 249 bp, Homo sapiens
agccatcagtgtgttgggcaattgtatttaaagccacaggatgggcttacctagagaggacaatgtccacaggtgatgggagagatgctgagaaagggtggccagtgagtgaggaggaaaaccagaggagtgtgtatcctgggtgcctggggatgagtattgggtaggaggagagcagccagttgaccatgggctttgacagatgtagttggttgagaatgttctatgggatgagtcccacctggagta

SEQ ID NO: 210905 - DNA, 975 bp, Homo sapiens
gacggccgctcatccctgctccccgtgtgtccctcggtcctctctgcagctcccagccctcaactccttaccccagtttgggcaaccagctgccccgctgtttggcccaggcctgggccatgacggatgggtgggcgcccggggccgcgagaagggcggaacgctgtgcccagccggagactacgctgggtggcggcggcagcgccgggagtctgcagtgcgcgagggagaagtgagcgcacagcgcccagcgagcaggtgcctgcggcgcggagagcgcacacgctagccagcccgcagcggccgaaagtgaccactgttcctggaggatttgcattgctggagaagtgcattctaacagtggaattcaggcggcgagagtcggtcaattcaccgtaccatgtggactccccagtgtggagcagaatctgaggactgacttgctaagaatctctgggcaccctggatagaaccttccctttggctctgagcatggtggctcacacctgagatcccagcacttcggaaggccgaggtgggagaattgcttgaggccaggagttcgagaccagcctaggtaacgtaacgagaccttgtccctacaaaaaattaaaagaaaattacccaagtgtattagtccattttcacactgctatgaagaactgcctgagactgggtaatttataagaaaagaggtttaactgactcacagttcctcatggcaggaaaggcctcaggaaatttatgatcgtggcggaaggggaagcaggcacgtcttacgtggcggtaggtgagagaggatgtgtaggaagtgaaagggtaagagccccttataaaaccatcaaatctcatgagaaatcactctctatcatgaggacagcatgggggaaccacccccatgatccaaacacgtcccaccaggtctttccctcaacacctggggattacaatttaagatgagatttggtggggaca

SEQ ID NO: 210906 - DNA, 404 bp, Homo sapiens
ccagcactctgcctccagggcctctgttcctaatcaataaccaatgctaccctgcaaatatctgctgagatcctactatgtgccacccactattgcaggcacagggaatgagtgatcagatgacagtgggaatggggagaggaatcgaattatccacgtcatgactttctctgcacctggatgttctcatctacacaacggagttaactgtcccaccttgcagagctgttgtgacactcataaactccttggccccacagaaagcagtccatccatgtcactcctgatcagctactagcctcgaacccttcctctcaattattcgaagcctgaagacggacccaggtctcctcaattccaaggcaagcagcactggccccagcctctctgcaagccccacttcc

SEQ ID NO: 210907 - DNA, 87 bp, Homo sapiens
ctccctaagtgtatgatgcctgcatggagtgagcgttggaaggatggaagcaaggatgaaagaatgaattcctggaagatccctgac

SEQ ID NO: 210908 - DNA, 518 bp, Homo sapiens
acttattaaacaaattaatagattaaaacttcctaagtctagcaagagatttagacatccagatacagaaagcctagtgacccccaatcacatgcaatgtaaaaaggtttctccaccccacattatagtgaaattgcctaaagtcagtgacacatagaaaatcctaaaaattgtaagagaaaagcgtttagtcacctataaaagagccccatcagactaagagcagctttctcagtagaaaccttacaggtcagcagagaatgggaggatatatttaatgtgctcaaagacaaaaaccctgccagccaagcataccttatctagcaaaatgattcttcatgaaggaaggataaataaagtcttttccagacaagcaaatgctgagagaattcatcactactacacctatcttacaagaaatattcaagggagtcctaaacctagaagcaagcaaaagggtgacagttaccattatgaaaacacttgaaagtataaaactcactggtaaagcaacaaat

SEQ ID NO: 210909 - DNA, 498 bp, Homo sapiens
agaagatacaaagaaatggaaatgttagaactgaaaaatacaataagttaggggaaaaagaccactggatgggtcaatagcagaatgtaatggcaggaaaaaaatcagtgaacttgaagataaatcaatagaaatttttaaatctgaacattagagaagaaagaattttaaaaaattgaacagagccttaggatattatgggaaaataacaaagtgttagacatttaaacaagaaccaaaatttcataacaatatttttagacatccaggttgtaatccaaaatctaacatatgaagaaccaggaagatttcaactcacaatggaagaggtagtcaacatatagaaagaatgtagttttgagaaaatatttgaagaattaaatggctaaagacctcacaaatttattgaaagacacaaacatacagattcagagaatcagaaatggaataaatccaaataaatttatgcccagatatgtcataattaatctgaaaact

SEQ ID NO: 210910 - DNA, 391 bp, Homo sapiens
tgcaagaaatatcttctttcatacttacacttttaacatttttgtttatttaacagggatttttcatagcgtatattgacttttttatacagtgtggaaatcatggtgttttaattgtagtagtcagtctgttcctttcttacattcctactgatatatttgggtataaacctattgttttctatttgcactacctgttctatattctttatttccttttatcctcttttgggttgagttatattgttatttaatttttctactgttattaactggggattttctttcctgttcctttgatggtaacttcaaagattaaaacaagtattcttactaaagtttaacataaatgaacatgttaattttatttattcctcttctgacttaacaa

SEQ ID NO: 210911 - DNA, 255 bp, Homo sapiens
  misc_feature (140)..(140): n is a, c, g, or t
  misc_feature (169)..(169): n is a, c, g, or t
tagatttcggagcctatccacaaaaggtcaaaagctcaagaatgagtgacatcacccagggacaatgtggagtgagaagaggagagggaggaatttggaaatgtggggaatactaagatgaagtgtggtcagaacctgtngggagggtgccgggtcttggaaccaaggnccttcaggaacacgtgtccagaattggggtgatgctgagcagtgtcagttgcctaagagcatttcagttagatgaggactgaaaag

SEQ ID NO: 210912 - DNA, 360 bp, Homo sapiens
tgtctattccctttgtgtttcacaaactagcttattcagatgatgtgaataccggctaattattgcaacgatgtttgcttccaagcattaaaaaaattgccagtgttatgggcaaggacttcatgactacaacaccaaaagcaatggcaagaaaagccaaaatagacaaatgggatctaagtaaactaaagagcttctgcacagcaaaagaaactaccatcagagtgaacaggcaacctacagaatgggagaaaatttttgcaatctacccatctgacaaagggctaatatccagaacctacaaagaacttaaacaaatttacaagaaaaaatcaaacaaccccatcaaaaagtgggcga

SEQ ID NO: 210913 - DNA, 164 bp, Homo sapiens
taacagtccttaaaaggggagatttgtgtgtgtttctgtttaagttctcaccaacaggaaagaggacagaagtgctaaggcactctggtctcagagtgcaatctgctagaaaagatctaatgaaaaacctactggaggagcccaaatctcagggtgcctattca

SEQ ID NO: 210914 - DNA, 598 bp, Homo sapiens
aaagaaaaaagaaaaaagtcgtaagagaaaatatatttcctatttatgcagtggaagcggatcaccataaagagcttcatcctcatggccttcaccttgagtgggctgaggaggaggacgaggggctggtcttgttgtcttgggtagcaggggtggaagaaaatccacgtgtccgtgatcatacatagctcactcctgtgttgctgaagggtcacctgtcatagaagagggaagaattgtgtggcctgtgcggattctgcattcagccttgtgtgttgtgttacggttaaccagggacgtgtgccccactaataactctgattcctggaaggaatggcatggcagcctccgttgtcatggttcctggagggaatggcatggcagcctccgttgtcatggttcctggaaggaatggcatggcagcctccgttgtcatggttcctggaaggaatggcatggcagcctccgttgccatggcaaggcaaagccatggcagcttcctggttatcactcctggcatgtggtaggtgcttgtccagtgaaatcctagtcgttgctgcattggcaggtgccctggcgtgaggaagggcaggcagtc

SEQ ID NO: 210915 - DNA, 567 bp, Homo sapiens
acactgttgttgaagccagatcgttgccccagggcacttcagctcagaaagctgaactcattgctttaattcgggccttagaactcagtgaaggtgactcttaaatttgagaaacattggaatagtggattaattcggagtagcggtttttgtgatccacagatgaagcacagagaaaaggatagagatggagacacaaaaacattgatctcccaagctgtagagactgggtctcctttgggaatatctacaactaccaactgcacaacaaagtagtaagtgcagcttcgaatttgtcttgtggtaggccacgatcctgtgcccacaaggacagtgcacaggtcatccgagcacacggctgagcccggtaggcaaaggaaggaaggtccaggtcacagggcagcgaggcccagcacaatgaaggagaatggaaacacaccacacctcaattagaatgggatccaattcttttacaaaaatttttttctgattacaaaatttaagggaaaaagggaaagttcttccttcctacagactgacatgtaataaatggagatggaacacaca

SEQ ID NO: 210916 - DNA, 386 bp, Homo sapiens
ccagtcttaggtatgtctttatcaggagcttgaaaacggactactacgcacacgttaattatataattaaaattcatggcaataataactcaagacacagagattggctgggcgcggtggctcacgcctgcaatgccagcactttgagagggtgaggcgggaggattacaaggtcaggagattgagaccatcctggctaacacggtgaaaccccatctctactaaaaatacaaaaagttatccgggagtggtggcaggcccctgcagtcccagctactcagaaggctgaggcaggagaatggcgtgtacccgggaggcggagcttgcagtgagccgagatcatgccagggcactccagcccgggcgacagagcgagactccatctc

SEQ ID NO: 210917 - DNA, 260 bp, Homo sapiens
ctttttttccatgtaacattaaatacattgtgcatttttaattcaaatcaaatacatatatgactgtccattttacaaggctcttatgcagaaatttttattaaaaacaagcattaatgtcatatttatttataaagtttattatatttattagaattaaaataatgctataaatctctgctaatttaaaaattactaaaattttctttttagcacttattttcaaaggacctctcaaagattattgaaagtgaattaca

SEQ ID NO: 210918 - DNA, 900 bp, Homo sapiens
atggcacaatcacagctcgctgcaatgttgaactcccgggttcaagggatcctcccacctcagcctccagagtaatggagactacaggctcatgccaccatgcccagctatttttaaaactttgtagagatggggccttgctacattgcccaggctggtcttgaactcctgggctcaagtgatctgcctgcctttgcctcccaaagtgctgttattacaggtgtgagcccctgcgcctaaccttagcactgccattttgactgaaaacaggtgcccagcagcaggggctactcccagaattgccactgcatcaggcccgtgggttgttttcagctgccagtgataagtatgtgccctgggccacctctcggacaaggtgtctgaattggtgccgaccagcatcacatgtaattgccatctcgcaggtgctgctgagggtaattccgcacacctgtagctccgggaagagcctagtggggaggaggaaacgtggctctgaggtttatagggtcagacggtcagtatgttgggagctggcatgtggaggggcacagacaagggaagaatgggaggtggcatcagagcaagttttgatggaggaataggaattcaccaggtggaaagggcattcctggtggagggaacagcctggccttcaatagcttgtggtgttcagaaagcaggcagggaaagggaggcccagggagacaccagttaggggatgggggtggaggcagacgagggtggaggaagccatggctggagtctgcacggcctctgactggggtccctgctgtggtcagccctgtgctgggtgaggctggggtcacagctggttcaggccctgacaggaggggcccccagctgaggcccagcctctaatttggcagggcaggtgga

SEQ ID NO: 210919 - DNA, 699 bp, Homo sapiens
atggcacaatcacagctcgctgcaatgttgaactcccgggttcaagggatcctcccacctcagcctccagagtaatggagactacaggctcatgccaccatgcccagctatttttaaaactttgtagagatggggccttgctacattgcccaggctggtcttgaactcctgggctcaagtgatctgcctgcctttgcctcccaaagtgctgttattacaggtgtgagcccctgcgcctaaccttagcactgccattttgactgaaaacaggtgcccagcagcaggggctactcccagaattgccactgcatcaggcccgtgggttgttttcactggcatgtggaggggcacagacaagggaagaatgggaggtggcatcagagcaagttttgatggaggaataggaattcaccaggtggaaagggcattcctggtggagggaacagcctggccttcaatagcttgtggtgttcagaaagcaggcagggaaagggaggcccagggagacaccagttaggggatgggggtggaggcagacgagggtggaggaagccatggctggagtctgcacggcctctgactggggtccctgctgtggtcagccctgtgctgggtgaggctggggtcacagctggttcaggccctgacaggaggggcccccagctgaggcccagcctctaatttggcagggcaggtgga

SEQ ID NO: 210920 - DNA, 479 bp, Homo sapiens
gaggacttgggtcatggggcggcagccccaccatctcctcatccagcttcccagggttcagtccagggtccacctccacagaggatcgcagcccctccatgacactgcagtcccacacggccaatagtgggactgagatcactgttttaacttggtcaatcaagtcagcttcaactgaaattaaaccattaaagatactctgctacttctctgagaaccttgccctgggaatcttgttaaaatgcagattctgatttcctttctcagggaagaggcctgataacctgcatttctaagaagctccaaggtgctgccacagggctctgcctagtaaccatggattccacagccacaacagacaccagagaacaccccaccattctgcctgtactcaatcagcagtgggcatcctggattggttaattttatgatcacttagagggagaaatttgtaaataaaatctacttgtctcaaaaaa

SEQ ID NO: 210921 - DNA, 442 bp, Homo sapiens
cagagccttaaaaatggactttattaattattttctataattttgcttaattctttaaagtaaactcttattgacttggatctaaatagtttgtgaatacaaagtctgaggaaaaaagtgtttgctaaaaataaaaacaacacttgaatgatgtttgtaaggcagttttaatttcttagaaaagctgaacaaatggcacaatgcaaagagcagaagttttggaataaatagattgaagccattaaattattggataaaaatagtttcaggttgcttttggcctaggttctcccctccccccatcactatccacttcaggaataaacattctgaaagttaattttacccatatagtgagcacttatttctaagttgccttatcaaataccatctatgttatgtcatttaatctcgcagttacttgtgcatcagagattagcat

SEQ ID NO: 210922 - DNA, 633 bp, Homo sapiens
ccaaagcccagagtcactgttaatgtattaagaaattattatcattaatgtcacgtcaaagtgagtttgttaaggataagtctataacctgaagggttgaatgcagaatgcgtgggtgtgataccactagagaaaagtaaaatgagtttcttaaatgtgttgtgtgtgtgtgtgcatttgtgtacaattattatataatcatgaactaataagacaaagtctttcctacacaatgggaagggtacacacataaaatttggtattctgatatgtactcataggtatttttctctttgttatagttaagggattttcctgcacactcatttgtggaggctatgaaaataaaatccatccttagggctattgtgtaagatctataattcacaacttctgatatttttaactcttcaaaggcaaatgacttctggaattcatttcttaggttacagagtaggattgataggtggacaggtatcatgggaggagaaaatgcccagctcaaaagattgaatgagagttggcaataggaccagcacttatttaagcatatgggcctctgagtgaccttgagaattctgaatgactttttacaacatgatgatgacatttgaaatgctttccaagaaatgc

SEQ ID NO: 210923 - DNA, 905 bp, Homo sapiens
tacttgttagcttaaaggtgcaatattatctagcagcaacgctggttgctgctagttctgggagaagccctcagaactaacacttgaaaaatgaataagactttgtcactaatccaacttcaaatggatcaaatgattcaaaattacaaaaatactaatcattttaggctcaatctttagctggaaaatagagataattcacgtgtactgttcaacaagcaattattcatatagtctctcaagtactcaattctaaccaagaacatggtgtcctgtggtgtctacagtagaataaacagtaaagccttgtacttcaataatagatcctccaggggaaaaaattattctaagtggatttatgtgtagagatggttttaagtgatgttcctatctctttagcactaaatcagtggcagtaactattgaggaggaagcaagaaagaagccaagatccacagtggctgcttccaagttgcatatggactagttgcttgtggcagggagagacatgggttccgaaatccagtctgttctttggaggggcctgaccatggctgtgactccacggtgctattctagatagattaattcagactttgcttggttttgcatcctaagattgcgttatagaaagaggagaatgaaggccaggcacggtggttcacgcctgtaatcccggcacttgggaggccaaggcgggcggatcacaaggccaggagatggagaccatcctggctaacacggtgaaaccccgtctttttactaaaaatacaaaaaattagccaagcgttgtggcaggtgcctgtagtcccagctactcaggaggctaagtcaggagaatggcgtgaacctgggagtcagaggttgccgtgagccaagatcgcgccactgcactccagcctggg

SEQ ID NO: 210924 - DNA, 430 bp, Homo sapiens
tgattggggtgtgatggggaatgtacccaaattgcagatgtggaggagcaagccagggaaagaaagggagaaaggagtctcagcttgggggagcgggtatcacagctgagagggcagagagaatcttcatttatccagggactccaatttcactcatttcccggtgtcccttgggctccatacgggacccagtctgtccttagggagggagggctgtgtctgcccccgccctgctgtcatggggctccacttgtaatgaaggggagacagtcaagaaagtaaacctatggttgagatgatttctgggctgggcacggtagttcacacctctaatcccggcattttgggaggccgaggtgggaggatcacttgaggtcaggagttgttagagaccagcctgggcaacatagtgagatcctgcctctattga

SEQ ID NO: 210925 - DNA, 574 bp, Homo sapiens
ctgttcttattccgaggatcagggcaggtgctttcacagctcgcacacgtacttgtttttctgtggctcccctacttggtgtggggcatctgctgggcctgccactgctcccccttcctctagatgcttcttgggcttctctgactgctgggtcaggagtgtgtttagctccacgacgaaaggtaccctctttctgcaggacactcacaccatcaaggctgacgagggctgaccgggttccagagtccttgtgggtccgggttgatgctcatgagttctagttgagcttgtggtaggttgcttccctgtgctctccctccatgccttcttcccatggatctgtcccttcctaactctctgcccagtggacttctaactccagcatcagaagtgaagaaaacagcttcacacagtttaaccagctctacaattaagtaagctcaaatccctgtaaactgtgtgtgtatacatcatggttttgcttctctttgaaccctgacacagatagatagatataaacgggttgaaagcttgaatccaatgaaaacattacctttcattggtaaggtctcat

SEQ ID NO: 210926 - DNA, 516 bp, Homo sapiens
gaggtgctgactaagcggctgttcatcatagcaaggtgcgttatcagtcccagttcctcaagtaattaatcccccccatgaagcttttttgttcacagcgagtgttaactgtgaccgctcctccaccatccggacagtgaaacttactctcatttttctggagggtaaaacagaggcagagagagttgaaatgctttgcccagaagccctgcaagcagagagtgctggaactagaattcccagacctggactctcgagtttattgcttaccttctttaagtcatgttcttcttcccccatagctcaattaaaaacaaaataagacaaaacaaaaagcaatgtttcctgaacagaaaagcacagagccagttaggacaaaagtcgatttgttgtggctggattgggtttctcctgcctcagacggctcaaatgctttcacaaatggttttaaaataaattgggagataaggtaacaatagagtttctcaataatgatgacaataaaaagaaaacaag

SEQ ID NO: 210927 - DNA, 432 bp, Homo sapiens
aacataactctaaccatgacaaaatatgatctagccacattaagaaacattctattaaaaaaactagcctgcaatttccaaaagtatacaaatcattaaaatcatggaaaggctaaggaactattggagattgatggaaacttaaagagatctgacaacaaaatacaaagtaccattctgaactggaaccttgggttttaaaatatgttttgggggcaactggaaaatctctaatggtattcaaacattagatagcagtaatttatctatatcaaattttttgatgttgagtgttgtggttagtagagaatgtcctttttatagaaaatactgaaatattcagaatgggacggcatcatatcagcaatgtactctcaaaggttcaggaggaaaacgttagtttactggcatatcaactcttttgttagtctg

SEQ ID NO: 210928 - DNA, 532 bp, Homo sapiens
agttgctacctaatatgttagtttccccaaataaacacttatttaaaggttcatttgttaatcaagtatctggaacttgaaatacatttttatgaaaggaaatacattttaggtgatgattaggtttttatcaagagctgaagtttttaataatgaacagggagagatactgtggcaaaacagtaattgaataaaacatacattcaataaaatgatatgaaaaatcaatgtttcacatttatcctgagtcaaatatagagagaattaaattgaggacgacaaagtgtagtttctaatcattgttccaccactatttgaccttgagcaaattgcctggagaccatatttggtagacagatgaggatgtacactttcttttaaatacttgagaattagcttaagtgctctcatttgacaacttgctcagtatttcataaatgccaggaaattagctcaaatcctctgatgagctgcattttctgtgttcaatttgtataaattcaataaatatttattgagggtcttccatatg

SEQ ID NO: 210929 - DNA, 365 bp, Homo sapiens
ctcattttagcagaaattggcttacattataatagatgtgcctatttataattctgagagactccctaaggagaatcatattgaactagatggcatttttaccagacggaattcgtttccacagaaataaaagtgaatgttaatgtgtatgactccaatcatagtcacattaataatttcaaaacatttttaacaaacaataataaaaaatgtttacccatcttctcatgccgggtcaatagtaaatctagaaatctttcatcactgattcaaaatctttaatatgaaacagcatcaatgtggacaaaagtagaaattttcagcattgaaagtgctggtataaatgcaaacatcaaaatatagtt

SEQ ID NO: 210930 - DNA, 855 bp, Homo sapiens
agaaaagaaaatggaagaaggttactggagaatctcagagcgtggtcagggcaggcctttctaaggaagtgacagggacaggggcagaaagggctgcagacaccaaaggggcccagcctggaagtgtgagtgtgaattggtgggaagccttgcttttcaggccttctctcatatgtgccttccccccagctttcgtgccttttccagctcaaaatgctcctccagcctgcaggcaaccgcagcccccgctccgtcccagggactctcatcttagctccactgttctgagataagcctgaggctcctgggccaatcctgcccccaggggctcattcctcaaattcaggacacagctgccagggaaggaatcaggctcaaaagactagagacttagagatagcccagggtttctttgcctcattttctttcctctttttttttttggttgttgttgttttgagacagagtcttattctgtcacccatgttggagtgcagtggcgcgatctcggctcactgcaacctccacctctcagattcaagctattcttctgcctcagcctcccgagtagctgagctaacaggcacccgccactgcacccggctaatttttgtatttttagtagagatggggtttcgctatgttggccaggctggtctcgaactcctgacctcaagtgatctgccagcctcggcctcccaaagtgctgggattacaggcgtgaaccaccgcacctggctgctttgcctcattttctgattttccggtgttgttggacctctggcgcccctgctcaggactcagctgcctgggtctccctggggctgtcaagagctgccccagcgttcccctgcc

SEQ ID NO: 210931 - DNA, 181 bp, Homo sapiens
agaggtgtgtgcagatatgaggactcaaaatgcaaatgggacattttacctattcctcgattttatatgaaaatcttggaataaagagttaaagtatgcaaagatattattatctttagagaaacaacagatacagtgtgaaataggatataaaactggcatgcgttttcaactgagtgtg

SEQ ID NO: 210932 - DNA, 575 bp, Homo sapiens
tgatggcttcaggagctgtagtgtttatcagatttgctccatgggtggccaaagctgggtgatggggtctcaatggccaggactgggcgccccaggaacctcaggcctttctgcatcagcacagatgcttatccattgacttccagtcacttgtgacctcggggtaaaggaacatgaattaagaaaacctcaggctcagtttttccccaaagtatgttgcatggaatacagtttcatgggttgtcataggtcttctgcaaaaaataaaggagtttcgtgaacagacacgtttggaagcttgtgacttaaacagagttaagtgggcttcaccgctgagtgcaacgtggtctccccagcatctttacaatgctgtgttcattacaaatatgtatatgagaaaggggcatttcccaaaccggtgcttctgcagatgggtttgctatgctaggttacccacactggagcaacagcctttccaggggaggattgcttgagcccaggagttcgaggccacagtgacctgtggttgcaccattgtgccctagcctgggcaacagagacagacccggtctcga

SEQ ID NO: 210933 - DNA, 567 bp, Homo sapiens
cctggagaactggacaagtgtcaggcttgggcagctgcaagcctgcatgttccctgccagctctgctgtccccagccaggccatagcgacagtcctctttcgtctatacttcctttctacagctgtggaagtaaagcactgatagctgcctttaagggtttgtttgggtgggaggagggggttatgaaatgaaggtatttgtgaaccgtcctataaactttataaactctctggtatttggtagaggctcaataaatgtcatggtccccacccttcaccctccagcctttccacctatataaatgcaggatctcatttaatcctggttcttaaagtgtcctgtgaagcttagtgtgccagccggctattgctctggcctgacattctgcccccaaattgtgtgtgtgtttgtgtgtgtgagtgcacgtgtgtgtgtgtgtttagatcttttacaagggggaaagtgttcattatgtctaatataaaatacagaagctttgcagcagtggcagtatcgtagccaatgaggtctatccgaggcgcgattattgctaattgaaaaaaaaa

SEQ ID NO: 210934 - DNA, 360 bp, Homo sapiens
tgttgctggaggagtcctgaactccttagctcaagtgatcctcatgcctcagccttttacaaagtgctgtgattacaggtgtgagctaccgtaactggccagtaaatgaaatcttgtccttttatttatatgggtcctacgtttcctgttaaatttattcctagttattttatattttgtttttgattgttgtagtgaatagacttcttaaattgtatcttgtaactagtacttacttattatggaaaagctgttgggtttttcacatttattagtgggcttatgaagcccatttactgaattgcctgaaaatggaaccgatgttacttgcatttgttttgtgaacaaaggaaaaaaaaa

SEQ ID NO: 210935 - DNA, 520 bp, Homo sapiens
tatcgtggcaggcccgcggtggtggagagaggggcagctttctgcagacccaacagtctgttttgttctggagagagatcactatctgtacccagtccgcaaagaggtttgctgtgcaccatctatgggcaaaaggtgagatgtttagtgggtacaagaaagggcaagtcatggccatttaacaagacacaggaagttgtgtcattctgagagagcgccacccctgaccatggccaggtgcctggtttacgataccaaatggattgccccgctctgccacatgttatgggaggtcagagtaagacctgggggtatcataatgttccgtaatgagaggatgatcatccccttgcacaaagggaggaccaggattcattattttagaagtatgaggaagagtagggtgtaaagtgggtgtgacctgtatatcctattccaggcccttcccccatggagcagaaaaaccaaaccatcagggactggtttgccattttcagggccatgtaatgatgtgcttgct

SEQ ID NO: 210936 - DNA, 586 bp, Homo sapiens
agcctgggcaacatgacgaaactccatctctattttaaaaaatgaaaaagaaattttaaataagtaataaaaaataaaatttaaaaaaaaatggcctccagttccattcaagtagttgcaaaaggtattattttgtttttgtttatggctgagtagtattccatggtgtatatatatatttcttttatctactcatcacctggtgggcacttaggttagtgacacatctttgaaattgtgaattgtgctacagtaaacatatgcatgcaggtgtctttttgatataatgacttcttttcctttgggtagatatccagtagtgtaattgctggatcgaatggtaggtatacttttagttctctgagaaatctccatattccatacttgagaaatttttcatagagattatgctaatttacattcccacctgcagtgtataattgttcccttttcaccacattcacaccaacatatattgttttttgactttttaataatggccattctggctgggtaaggtggcagatatctcattgtggttttaatatgcatttacctgatgattagtgatgttgagcattttttc

SEQ ID NO: 210937 - DNA, 754 bp, Homo sapiens
cttcctcacagatggccatcttctcactctaacaaaacagcaaggaatctctcaggcctcttcaaaaatggcattaatccgtcaatcccattcatgagggctcctccccagtggcctaatcaccccccaattctccacctcctaaaaccatcaccttaaggaccaggatgtcagattgttttgttttagagacagagtcttgccctgtcacccagactggagtgcagtggcacagtcacagctcactgcagcctcaacctcctgggctcaaaggatcctcctgctcctgtgtgtaaatctcccacctgctgagagaagccagctccccaaaccacatgcacatcagactctatctccagattccatgtgaaatccaccaaacgtgggccacccaggcggtggagcaccgaaggagacacacatgaggaagacacaggaaggggctctgtgtcacctgggactggctctgggaggatgctgcagcattggctctcagggacacagagcaggcagggacaccctctgggacagggacaggacagttagagtgtggaaagatggggagggcagaggacacaccacacagaagtgtggtacaggcaaaggcatcgagagagaccctcccagggcaggaggggacagaaatggtccagacagaaagacagcctggagggagccagccacactgatgatgatggataacatctgtggaaggtttggaaacaggaaatgacaagagcaaaaaataaaaaat

SEQ ID NO: 210938 - DNA, 398 bp, Homo sapiens
agcgggacgatcctgcatctgcgtaatgtgcacagggccagcctcttaatgctactagagctttctgctctttaaaacacgcataaaagcaagctcttgtcccggggtcatggcaagagaatttgctttcggcttgaatcttctgagctgatggactgtggtggcagtaacagggcaaatacttatccttacataagtaacacactttcaaatagtatgtttttgtggaaagaatgcgtactgtttgccataataggaagtaattactctaagtagcgtggaaagaggaactcttggcttatataagagatgtctgaatattcagggcagttccttgttgtatagactgtgtctactaatgttctatcatcattatcattaccatgtctacagaaaag

SEQ ID NO: 210939 - DNA, 148 bp, Homo sapiens
atatccagtatgaccaaatttgttaaacataggttttcttctatgcataaagatattttgaaatggtattttaaaatgtaaaattaaagcaggaaattattccagttgatagttttcccaaaacagttttgcaacagcatattgagct

SEQ ID NO: 210940 - DNA, 322 bp, Homo sapiens
tgctcaaaaagttccaaattttggagcatcttggattaaggatactcatcctgtggtggtagtagtagtagtattgctgttggaaatgggagttggtggtttttggagattgcccttcagcctttcgtaagaaggagtttgcttttttttgagacggagtttcactcttgttgcccatgctggagtgcaatggtgcgatcttggcttactgcaacctctgcctcccaggttcaagcaattttccttcctcagcctggcgggagaagtttgttaaactttccgaaccccctagtgaaggacctctaaagaaatatgcaacagg

SEQ ID NO: 210941 - DNA, 334 bp, Homo sapiens
cataatgtcctcaaggttaatccatgttgttgtgtcaattttcttcctttgtaaggcaggataatatcccattgtgtgtatataccgcatcttgtttatccagtcatctgtcagggacactgggttgcttccaccttttggctcctgtgaatagtgctgccatgaacatggctatctcactgtctcttttagcatcatatcccatcagtcaccaaattctggtatatcctcctctctcccttgcactgctaaggctcgggccctcatcctttctcacctggactgtggcagaagcttcctaacaaccaccttactttcccttccagtctgtcac

SEQ ID NO: 210942 - DNA, 852 bp, Homo sapiens
atgggactggcaggaggtggctggggttacgctgtcttttctaacattcagcattggctcaggggccaggtcagggctcacagactgttgctataaagggctgggtggctttcttccccacagctactcagcctaatgccattgcagagcacatgtagccatggacaacacaaggggcgtatccgtgttccaggacagccatattgacaggaataggcaggaggccagatttggtcctcaggctgtaatttcttggccccttgtctagggagaggtaaacgaggggaggagagatcagtcaaggatgacgtgagggtttgctgggagcaccaggaatcctggagaaggtagtggcaagagggtgcagcaagctcagctgggcggggatcaagtctgaggacttaatgtctcctctgatctccagacccataagggagatgctgagtagacaactggggcttatgggtctggagttcagaggagagatcgggaaggtgtccatttggagtcatccacgcagagatgtgtgaaggctgctcaatgattttgaggtttaaagaaaaaaagagatgtgaaaccaggggccctgatgaggctgcccaggtggtaaggaagacagaagagaagccatgggacagctgagcccgggcaccctcaagccttggaggcatgaagtttggtggggatctggcaaagaacacctgggagcagccagcgggcagcagaccccagagtagcagggaagacaagcacttcaaagaggcagcgtcagccaggggcagtggctcagctgtaatcctagcactttgggaggccaaggatggcagatcacctgaggttaggggttcgaga

SEQ ID NO: 210943 - DNA, 818 bp, Homo sapiens
ctattgtcaaataaaaacaatacggagggctgggcgacctgcacattcagtcccttagaaccagaagcttgagcagcccagaggccagtgcagaccctgcttgcctggcgctttgctgtgacctctgcttgacaatgcttgctgccttggagctgacgggctctcgtccagctcagctggggcacaaaaccgtgtagctttgtctaattaagagccacagatgaagtgcaccttggatgtgtttcttattatttcggatgaaaggttggcctctccagaaatcacccccaagattactgtgcctcaaacctcgcttgttccagccgatagggaaatgacgttttaacgatcatgttaaatgaaactgtaagcttgaccttattagctgcctcttcttaattagctgcttatgcaagcattctttcccccctgtagatacaaatcaacaatttccaagccatctttgaaccaacccactcttctgtccccttgccaattccctagctccagggttaataaacttcacatatgctcaagagcaattgcgttaagaaatgttgcttccacgtaattactagcaaagtgcagcatcagcagccattcatccctcacacatgtgcaaatttactgcagggtacattcctaggagtgtgtgtcatggaggacggcttggcagctagcattctgtgtgctctcctcgctgttccttcaaaggctggaaggtgagccactgcttttcccgcttcccttgccgctagagttctaaatgtgaaatgggttatgcccggtggtcaatgtttaacaaccagctctcaaaa

SEQ ID NO: 210944 - DNA, 825 bp, Homo sapiens
gagtctatagagtcgatacagcacggtatggagggttgggagaggggacattcatataacttagagactggaggcttgagcagcccagaggccagtgcagaccctgcttgcctggcgctttgctgtgacctctgcttgacaatgcttgctgccttggagctgacgggctctcgtccagctcagctggggcacaaaaccgtgtagctttgtctaattaagagccacagatgaagtgcaccttggatgtgtttcttattatttcggatgaaaggttggcctctccagaaatcacccccaagattactgtgcctcaaacctcgcttgttccagccgatagggaaatgacgttttaacgatcatgttaaatgaaactgtaagcttgaccttattagctgcctcttcttaattagctgcttatgcaagcattctttcccccctgtagatacaaatcaacaatttccaagccatctttgaaccaacccactcttctgtccccttgccaattccctagctccagggttaataaacttcacatatgctcaagagcaattgcgttaagaaatgttgcttccacgtaattactagcaaagtgcagcatcagcagccattcatccctcacacatgtgcaaatttactgcagggtacattcctaggagtgtgtgtcatggaggacggcttggcagctagcattctgtgtgctctcctcgctgttccttcaaaggctggaaggtgagccactgcttttcccgcttcccttgccgctagagttctaaatgtgaaatgggttatgcccggtggtcaatgtttaacaaccagctctcaaaa

SEQ ID NO: 210945 - DNA, 370 bp, Homo sapiens
tgaatgttcacagctgtgttttttattaaagaaattcagtgagaagagttttaacgtcgcactatagttgagaatcttaaggtgtataacattggcaattccaaattagagctcccctggcaactgtcactctatgacatcacattttatctaatgaggcataaaaatgtacattgtgcactccgcagctccttaatgtgcatggggaatgagagtcaaggggagattgggagccatctctttgaattcttagctgtaatgtttcacctatgcagttttctttatttgcagctatattttccacttctcataattcagtaattccaaggcattgcagaccctataaatgccatgcagatattggttaatt

SEQ ID NO: 210946 - DNA, 542 bp, Homo sapiens
aggttaaagcataagtttgcttagctatgctgtgactataatcactcctgtctcttaaagacttgatttgtttcttctgtacttaatgtgctattcaattcacacagaatatctgtcacttattataataagtagttttagcctttaggactaaggctgagaattttgttaactgccaagagcatacgttagagaaaatagctcagtatctgctttctttaaaagaaaaaattactttgtatactcatttaaattgttacttataacttgttactaaaaataacaattataatgtacttaccataacatttataaatatctctagagttttgtaatgtcatagaagcaccaaaaaagaatgataaatagggtggatcaccaaacagtaaaggaaagccagagacaataaaacatattgacaaaaatgctggcaatattgcaagaagtgaaagaaataacagtaggaaagagtgatggaagtgctcaatgatgatgaaatatttctttcttatatttcaggaatgggatgtaaaaagatgaac

SEQ ID NO: 210947 - DNA, 417 bp, Homo sapiens
tggtgggaggaggagtattgaggagtgggcacaggtgaaaccccatcgcgacggccaccattacaacatcaccccttgaacccttaagttacattaatatctaagcctgacttggctttatagttaacaacattgagtatgtctgattacaaaagaacaaacaatttgggggcagatgttctctaactggtgtgagcagaagtttcacttgtagggatggatgggttacatgttcaaaatacagatctctaagccttcatccggaattttctgattcagaagatctagggtagtgatgctaagccaaggacgattttgcctaccaggggacattgggcagtatctggagacagtttgcattgtcacaacggaagcctgggatgttcctaaacatcctacattgaacaggacagcccc

SEQ ID NO: 210948 - DNA, 410 bp, Homo sapiens
tgcacaactattgaaatattgactatggttgccgtcatacatgttatattgctcacaacattgatttgactttggaacatgtttgtgtcccagggaacaggtctatgcctcctttggctttggctttctgcagccaaatctccatggccatagggttttcaggcctctgcttatatccttaagatagtctcaggctgagagccaaaaactttgtgggggaaagttaggtcattaactagcaggagttttgaaaacagttctcccaacctaagaaagtgtgattataaatactattctagaacagtttacatgcctgcatcctgatagagattaggcctttgtgtgtttttaagactacagtctcacttaatgatatatttgtttttaataaaactcggtaaatatattat

SEQ ID NO: 210949 - DNA, 536 bp, Homo sapiens
tgcacttgagttttctcatgttcgtttttgtggtatcgagtattttataatattcttaatttaattgcattctcttcagtcaatatagcaaagtccaaatacaatagcagaaattttgtttgttttacttgaggaaagggttgttctgtcttcaattttatgggtctattttgccttgcaggacactaaatatttcccctttttcttcttttacccttcaccactcagttgttaaagcatgcttctctcttcctttttgctttttctttcctctgcgtttcaacaaatgcttatttaacacttgtctttttaaattgcacctgctgtcttaaaccgtgccttctgctttaaattaaatgtactttaaaatctcttccctgtagtctgtgctctgatctgcccagatacttttccagtgttttcagatacggtgtggatttaatctttctgggagtcactccaaatcatttttagcccccttcactagcctttctcctctgtcttttctgcagtttttcttagtctgcctttgcttg

SEQ ID NO: 210950 - DNA, 328 bp, Homo sapiens
ctaaatggtgcaaatctcgcctttcatcagcagacatctgcagaggggcccctgcgtgctggatccaagccgagtgctgcaaggaccagagaaaccccagcacggcagctgcctgtgtgggctcccaggccagctcaggagcccgatgtgggccatgaacacttacgtcataaagcacaggttaaatggatgcttaatatcctacagaagcagggacagtgcacacgtgtctcatggcccaactgagagtacaaactgaagacattacagaaaaggggccgaagtcctgagctcggaggaccctgacggtgtccctctcagaggaagg

SEQ ID NO: 210951 - DNA, 152 bp, Homo sapiens
gaagctttgttgactgaggagcttctcccagacatatagatctgtaatactaaattgcttacttactgtcttctaatgttaatttgttttgcattagagctgtccacagtttggcaaagacaataacttgaattaaaaccaattttaaccta

SEQ ID NO: 210952 - DNA, 415 bp, Homo sapiens
tcatttttgcgggttttatatgaggtttctgtgacctattaaattaagaaagattagtgggggcagaacatatatttttgtgcagaaaaagaataaggaaatatttaaatggttttaaaaagtatattaggctgggtgtggtggctcacacctgtaatcccagcactttgggaggctgaggcaggcggatcacaaggttaggagattaagaccatcctggctaacacagtgaaaccccgtctctactaaaaatacaaaagaaaaattagccgggtgtggtggcgggcacctgtagtcccagctacttgggaggctgaggcaggagaatggtgtgaacccgggaggcagagcttgtagtgagccgagattgcgccactgcactccagcctggacgacagagcgagaccctgtctca

SEQ ID NO: 210953 - DNA, 242 bp, Homo sapiens
tgtttccctgggttctggagatgggtggagagcaggcactgtccctccaggggctgtggtccgtgtctttctgaacctgcaccagggaggtgcccgggagagcacggtgagctggaggctcctccatggggctgtttggaatccacagtactgggtctcagattacatgtgttaccctcagttctttctcagctgccagggagaaaggggaagtgggccgggcagggctgggtaccgagctc

SEQ ID NO: 210954 - DNA, 679 bp, Homo sapiens
cacacccacacacatacacacacacacgtgcgcatgcactccaagtgccagaagacaactgctaacatgtttggctgacaaaggaggaagagtccttcttggggatgtgtcagagcaggagtgaagctatttggggtcacgttctaaaagctgaatggatttctggatccgtgcttcctgtctattttcagccaaatgccaacccatttaaaatagcatgtttactcacaggttctcctctacactcaagtcaagaaaaacgtttaccccccacgcttcctcccccaactcattaagcacttctgcttttccctgccttcagaccgccaccacccgttcagcgtgacttccttctgaggcagtggttctcagacttcaaggcatactagaatcacctggaaagttttaatactctctaccctataccagttacatcagagcgtctagaagcaggactaaggcacctgtatttttcgaaacttcccaagggatcccaaggtgcagccactatgaaaagcatgctttggacctgccagggcagcaagagcttaaattaaagggatggttctcatccttctcaagctcaagagaaccactagggaagggacctggggcaatagaagcgtttctgcctccagcccagggatttggtatgcaagcctgaaagttggaaaggaag

SEQ ID NO: 210955 - DNA, 502 bp, Homo sapiens
cacttcccacagggcctttgaaccgtttacctaagtcaagtgtaatgagaaacataaccaaatgcaccatggggtttattgttagataataaaaggcttaaaaagcccctagaccctaaagatgcctgggatggatgatttatgttcatatgctacttgagcatgtagttttggagtgcatggtgaggcccatggctaatggcagtggtgctattcaacaagattctgggtctttagaatagttcaaagttttaccacttctctctggataagccatctttttgacctttgagtaaattataaacttcttttcagattgtgtccaaatggtcacaggtactttgacagtttttactgtaactgccaataagtaatactcatctttaaaaagacatcattctggcagggcatggtggctcacgcctgtaatgccagccctttgggaggccgaggcgggcggatcatttgaggtcaggagttcgagaccagcctggccaacatg

SEQ ID NO: 210956 - DNA, 933 bp, Homo sapiens
ggcctggttaccgggagtggggcgcccctcctccttatcccctcccctcttccctgtcccctttcacagctggctgtagctggccaaggagttctcgattaaagaggaaggggcagtgctcacatttctgggcagggccgggctcattagccctctgagtcctttgaaccctctgggcccaccgacgcccctgcctccacccccacccccacccccaggcctccccacctatgagcaggcgctggcagcctctggggtacacgacgcacctccacccccctacaccagcctcaggaggcctcactgaagagctgctttcgagacccggctctccgaaccgtgcccctgattcataccggattccggaagccgctaggcctcatagacgccgaagctggacttggagtggggaatggtgggagtaggggtcatccggcccgaggcctgccctggcacacgcgtttccgccgcgtatggatatacacatgttttcggcaacgtgttcccgtgtcctggcccctcacgggcccccacactctcctgaccgtgagggcactggtcagttccgcccccgtggtaggcagacgcgcggggaaattcggacccaggagcccagccccggctgtgccatcttgtgtatgggcagatatgacctgacagccccctccagtgccacagggtacgcacacgcagagccccgcctgtgcacacgcgtgtcttcgtgcactccccgtgcggtacaggggcacttcgtaacccagggaaagggcggggggcatatttgcaagcgcgctcggtgcgggcaggctcgcattgcacccagggagctggagttgagctgttcccctaaataaaaacccttcggaaaggagaccaaaaaaagcagaaataatgcaaaaaataataatgaaatgaactgcgatcccgggcgca

SEQ ID NO: 210957 - DNA, 1317 bp, Homo sapiens
ttgcggaagtgcctcgcctggcttgctcaagtcctctcttctctttctctctccggaaacctggctgtagctggccaaggagttctcgattaaagaggaaggggcagtgctcacatttctgggcaggtgtctggaaaatatgaggggccacccctctctgctgctgctatatatggcattaaccacctgcctggatacttcacccagtgaggagacagaccaagaagtcttcctgggtcccccagaggcccagagcttcctgagtagccatacccggattccaagagccaaccactgggacctggagctgctcacaccagggaacctggaacgggagtgtctggaagagaggtgttcctgggaagaggccagggagtattttgaggacaacactctcacggagcgcttttgggagagctacatctacaatggcaaaggagggcgtggacgagtggatgtggccagcctggctgtggggctgacaggtggcatcctgctcattgtcctggccggcctgggagccttttggtatctgcgctggcgacagcaccgaggccagcagccctgtccccaagaggccgggctcattagccctctgagtcctttgaaccctctgggcccaccgacgcccctgcctccacccccacccccacccccaggcctccccacctatgagcaggcgctggcagcctctggggtacacgacgcacctccacccccctacaccagcctcaggaggcctcactgaagagctgctttcgagacccggctctccgaaccgtgcccctgattcataccggattccggaagccgctaggcctcatagacgccgaagctggacttggagtggggaatggtgggagtaggggtcatccggcccgaggcctgccctggcacacgcgtttccgccgcgtatggatatacacatgttttcggcaacgtgttcccgtgtcctggcccctcacgggcccccacactctcctgaccgtgagggcactggtcagttccgcccccgtggtaggcagacgcgcggggaaattcggacccaggagcccagccccggctgtgccatcttgtgtatgggcagatatgacctgacagccccctccagtgccacagggtacgcacacgcagagccccgcctgtgcacacgcgtgtcttcgtgcactccccgtgcggtacaggggcacttcgtaacccagggaaagggcggggggcatatttgcaagcgcgctcggtgcgggcaggctcgcattgcacccagggagctggagttgagctgttcccctaaataaaaacccttcggaaaggagacca

SEQ ID NO: 210958 - DNA, 508 bp, Homo sapiens
tctatacctgtggggaggttgcaggggtaggttctggccttcagctccctcctccttggtgtctcagaaatcaggatgggctagtttgggggtgtgaacctcccagctgaattcctgctttttccccttcttttccactccttccccctcaaggagcgcttttgggagagctacatctacaatggcaaaggaggtgagtgaggggctgaagccatcttgttctgtgcagctaaggtagtcccttcccagcgaggccaaaccaacgtcctccaccccaaattaggtacaagaatcgtctgccccccaattctgtgctctctgaagctggctgctaaaggagttccctcccttaagaccccagcttgcctgaggagccccccacaccttattttatttttaaatatttatttttgctttttttttttttttgagacagagtctcgctctgttgcccaggccggagtgcaatggtgcgatctcggctcactgcaagctccgcctcccgggt

SEQ ID NO: 210959 - DNA, 857 bp, Homo sapiens
  misc_feature (824)..(824): n is a, c, g, or t
  misc_feature (827)..(827): n is a, c, g, or t
  misc_feature (857)..(857): n is a, c, g, or t
ggcctggttaccgggagtggggcgcccctcctccttatcccctcccctcttccctgtcccctttcacagctggctgtagctggccaaggagttctcgattaaagaggaaggggcagtgctcacatttctgggcaggtgtctggaaaatatgaggggccacccctctctgctgctgctatatatggcattaaccacctgcctggatacttcacccagtgaggagacagaccaaggtgagtgttgggggaagtggcatccagacacttggcgttggcctccccctgactcaggaatgtctctagtccttcctcttccaggagtccaggacccagccccttcctccttcagacccaggaatctggattcccagcccctgctccttcctccaggaccccactgctttccatccccctatgactccagccctagggaccctccatttttctgtccctcatgtctttgggtccagaagtcttcctgggtcccccagaggcccagagcttcctgagtagccatacccggattccaagagccaaccactgggacctggagctgctcacaccagggaacctggaacgggagtgtctggaagagaggtgttcctgggaagaggccagggagtattttgaggacaacactctcacggagcgcttttgggagagctacatctacaatggcaaaggagggcgtggacgagtggatgtggccagcctggctgtggggctgacaggtggcatcctgctcattgtcctggccggcctgggagccttttggtatctgcgctggcgacagcaccgaggccagcagccctgtccccaagagcnggntcatagcctctgagtctttgaccttctggn

SEQ ID NO: 210960 - DNA, 1374 bp, Homo sapiens
ttgcggaagtgcctcgcctggcttgctcaagtcctctcttctctttctctctccggaaacctggctgtagctggccaaggagttctcgattaaagaggaaggggcagtgctcacatttctgggcaggtgtctggaaaatatgaggggccacccctctctgctgctgctatatatggcattaaccacctgcctggatacttcacccagtgaggagacagaccaagaagtcttcctgggtcccccagaggcccagagcttcctgagtagccatacccggattccaagagccaaccactgggacctggagctgctcacaccagggaacctggaacgggagtgtctggaagagaggtgttcctgggaagaggccagggagtattttgaggacaacactctcacggagcgcttttgggagagctacatctacaatggcaaaggagggcgtggacgagtggatgtggccagcctggctgtggggctgacaggtggcatcctgctcattgtcctggccggcctgggagccttttggtatctgcgctggcgacagcaccgaggccagcagccctgtccccaagaggccgggctcattagccctctgagtcctttgaaccctctgggcccaccgacgcccctgcctccacccccacccccacccccaggcctccccacctatgagcaggcgctggcagcctctggggtacacgacgcacctccacccccctacaccagcctcaggaggcctcactgaagagctgctttcgagacccggctctccgaaccgtgcccctgattcataccggattccggaagccgctaggcctcatagacgccgaagctggacttggagtggggaatggtgggagtaggggtcatccggcccgaggcctgccctggcacacgcgtttccgccgcgtatggatatacacatgttttcggcaacgtgttcccgtgtcctggcccctcacgggcccccacactctcctgaccgtgagggcactggtcagttccgcccccgtggtaggcagacgcgcggggaaattcggacccaggagcccagccccggctgtgccatcttgtgtatgggcagatatgacctgacagccccctccagtgccacagggtacgcacacgcagagccccgcctgtgcacacgcgtgtcttcgtgcactccccgtgcggtacaggggcacttcgtaacccagggaaagggcggggggcatatttgcaagcgcgctcggtgcgggcaggctcgcattgcacccagggagctggagttgagctgttcccctaaataaaaacccttcggaaaggagaccaaaaaaagcagaaataatgcaaaaaataataatgaaatgaactgcgatcccgggcgca

SEQ ID NO: 210961 - DNA, 362 bp, Homo sapiens
tttcagactgagtctcactctgtcacccaggctggagtgtagtggcgcaatctcggctcactgcaacctctgcgttctgggttcaagcgattctcctgtacaggcacgccaccaccacacccggctaatttttgtatttttagtagagatgaagttttgccttgttggccaggctggtctcgaactcctgggctcaagcagtctgcctgccttggcctctcaaagtgctaggattacaagcttgagccactgtgcctggccagcatcataattttaatgcaggataatccaacaggctgagaaacaacagacattaacatgtagtttgtctaagaaataccaatctcaccataaacttacag

SEQ ID NO: 210962 - DNA, 407 bp, Homo sapiens
gtatgatcaccaggcagtgttaagggctcatttgaggctaaaggttctgagttaaaagtgaggccagtcagcttggttttgtgcttttttttctccagccaccttcactttaggagtaggagaatagttgaatttacccagcttgtggttctgcaaagtgagtatgtccaagtgagagaggagcaagtgattataatgatggaccatggaacttaagctggtaaggagggaagagaggacttcacagggtgagaaacagtgaaaagatagtttgaagataggctgggtgcggtggctcacgcctgtaattcccagcactttgggaggctgaggcaggcgggtcatgaggtcaggagatcaagaccatcctggccaacatggtgaaaccctgtctctactaaaaatac

SEQ ID NO: 210963 - DNA, 355 bp, Homo sapiens
tatttccttgtcacccaagaaaggaagtcaagaatggatgtcaccctttagaagaaattagaaatcatgacctaaatgttcatcaaccacttccttagaataaaggatactagagaatagaaatcacaaataaataagagtctagagtgaaaagtaaaattcatttttatcaattttatggtacgttactaagcacagccagtaataaacaaatactgagtagagcatgaataaatcttcaactgtagcatgtgagctgtttggttaccacagttccccagaacttcttcccttctttctcaggatctacttctcttcatgctttgacgttaggcaaagattcacatcccaaaga

SEQ ID NO: 210964 - DNA, 533 bp, Homo sapiens
cagtaacgagaattacaccccatcctggcaatgaggtcagataccatcaatgggaggagagcttggagaagcctcagcaggtctgctggcagaggagactgcagggactccaggcttacagcagtgcaggagaactttcaagcactttggatcttgccaataccttgcaaaaacttgtccctagttacacaggtggatctctgctggaggatcttgccagtggtctggagcactcctgccccatgccccaccttgcctgctcttcagatgcggtggagataattcctgcagagggagtgggtatctcgcagctcctctgcaaacaatttctggtcactgaggaagatatcaggaaacaggaagggaaagtgaagacagtcagagagagactcgcaatagcactgattgcggatggactcgctaatgaggcagagaaagtgagagaccaagaaggctgtcctgaaaaacgctaagaaaaaaagggaagatagtgcagatgaaataaagtgtaatcctttattaacatctcaaaa

SEQ ID NO: 210965 - DNA, 224 bp, Homo sapiens
tcatcctgtttattttcttcctagtaccttttactgtttgaaattatttatttattcattgacttactgtttttgtgttacattagggaggctctatgaaagcagggatcttgctgagtgttcactgcttcatcccctaagtctagtataaaaatacgcccaataaatgggaatcacttgttgacttcccatgtcaattagtgcaagccacaggaacttgcaaa

SEQ ID NO: 210966 - DNA, 421 bp, Homo sapiens
tcttctctgctctttaactggcatagaagtggtaggaaggaaacccaagcaggtgtctcattggcatgccattgtggagtagagagaggcagtgttcatagaagtacagcagctgtgtggacttctgtcatggggagcagggcccagcagtcaggatatccttggggactggttcctggcatgagcaaattcttgagtaactgtaattctagctagatttctaaagacaagatcttcatacacagagaagctgggaagcagactgtatttcacctcaggggcctgtggttatagacttgaggaaacatgaggaaccagggtaacagcaaatgggacttatccttggatgccagagtatttggccagtgctactcactggtctggttagggctggtctggaagtcatgggcagaccccaggg

SEQ ID NO: 210967 - DNA, 365 bp, Homo sapiens
aggattcttgttttcttcattttttgacagtctctcctccccatcccataccctctgtcttatctgcccttaccccagtcatctttggcccggacttcctgacagccttctgctttccttactttcattcttgcctctggctgatgacctgcttttgttcagcctgtgaactaagaatggcttttacatttttaaagattgttaaaaaacaaaaaaacaaaaaaacacacaaagactatgtgagagacagtacatgccatccacaaaccctaaaatatagactatttggccctttacggaaaaagcttagcaactcttgctttaaatatgcaaagtacctatctataaacactccttttgggcac

SEQ ID NO: 210968 - DNA, 272 bp, Homo sapiens
gacaaaggatgtcagagaattccttccttctttcctccctcccttccttcctcttcctttccttcctttccttcccttccccttccttcccccctcctctccgcttccctcccctcccctcctctccacttcccttcccttccctcccctccttctctgtcatccaggctggagtgcagtggtgtccctctggaataaaggacttagacctacaatcagacaaactatgtcagagaatttcttttctttccttttcttttattttcccctcc

SEQ ID NO: 210969 - DNA, 565 bp, Homo sapiens
aactctttttactattaatgtttttttgtttttgtatatctagaattgtttccaaataagtatagaatgaaagaataaggcaaatttcattggtaaagaagctttgcagtgtataacttgagtaaatatatctaaatttttttcgatatatcatctgaatgatgtttaaaatctgtcatagattcatgtcacaagccattcctacccagtacactgcagtagcttctggaagcctttttacacctccactctttcagagttgtcatatgcaattaatattttcataatgtagctttcaaattgtgactaaaatgcacatgattaaaacaaatcaatgactactaattgttttttatggaaagtaagctcctcctgtctcagcttcagccattcactagccttcatctctaaatgcattcatttggactcctatagaaatttactagatagtcctttcttacccctaaatactgtgtctttaagaatatttaggttaaaatttttgacaagatcttttggctttcttccatgataaacagattactttcacctttttacaccacat

SEQ ID NO: 210970 - DNA, 356 bp, Homo sapiens
tttagaaaagtgctcctacggttttctttttcaaatgttgcctaaatatttatcttacacccagcctcttaagtaaataagaacctagcatgccaagcatggcatgggaagctcaagattctgggcctttttttacactacaaacttctcctgagaggtgggctttggaatcagattacctgggtctggaccccatccatgaccttgagcaaggttcttaaacccaccaaggctcgtttcctcacttacctaccttacagggtcattgggtggattcaatgaaatacagatatgaaagtttctaccacagaaccttacacaaaatcatctttaataagtgttagtttctccttctg

SEQ ID NO: 210971 - DNA, 330 bp, Homo sapiens
ttgtattattgccataatttttatgtaggtctaagacgattctaaaattaaaatgtttatttttaaaactttgcataagacaggtctgcattacaccttagcctgttaacccagggtgtctccaggaagtagacggggtgggggtggggagctgccacttcgagcccctactgtgtgcagggttaggggctggagagattgaggagaatgaaaggcacacgcttgccctcacagcgtttagagtccagcagggaagggcttttgatacttctataatatttgaatttttctcccacggacatgacctactttcaaaatctgattttttat

SEQ ID NO: 210972 - DNA, 412 bp, Homo sapiens
catatcaaatctttaaatataaaatctgtagagatttacttcttaaatgtcttatcaaagctaattctgtttatatttcctgggcctatagcacctagactagtgaagaaagtattcccacagtctgctgcatgcaagccaggctggaattaacaactatgaatttctaaagtaggaacaatcaatagtttataaaattaatacaaatacatataatatataaaagcaacagactatgctacattagcaaaaataagaaacaaaattaggtgtgtaaaacaaaacctaatattcttgtataaacataccaggactgttattttatacagacaagtactgttacaagaccaaacacaaactgctaatggattaaaatttaattaaaatgtattagatatttaatatgacatag

SEQ ID NO: 210973 - DNA, 506 bp, Homo sapiens
ttctggtacccagtaaatatttcattacttaatatactctcccccctgctcctgcgaacctcactccatcctaagaacaatcttcgcatctgcctttctggactttctgctatgaactaaatatttattcaccagagaaactgctgtatactaggtgttatgaaatataattttttttatatcaaagacattgtataattacatgaagaccaatggagtaattcatcttaattctaagtattagaaaagctttgttttccttgaagaatggacatatttttttccttctaaaacaatgtaagcaaatgaccttctcattttggttgccagaatgctcagtttgtatccctaactgactgcctgtgtaggttatcataacttgtcctgatctcctagtgctcatttgtatgtgttgttttctattttactgtatcttgttcgccatcttgagtcatttttttacacacaatggagttataataaaatagctattgcctattatgata

SEQ ID NO: 210974 - DNA, 463 bp, Homo sapiens
aatattatgcacatttctgggtttgtgtttaaacacatatccagaacgtggtaaataggttagttgttgttttttcaggcagagtcttgctctgttgcccaggctggagtgcagcatcatgatctcgactcactgcaacctcaagcagtcttcccacctcagcctgctgagtagctgagactacaggtgtgccaccatgcctggctaattttttaatattttgcagagacaaggtctcactgtgttgcctaggttggtctcgaactcaaacttgtggactcaagcaatgcttctacctcagcctctcaaagtgctgggatgacaggtgtgaaccactgtgcctggctgtaattaggttttggagagtgtctagtaactgttatttgaacagtggtccaaaaacaataggcgtcttcaccttagtgtaaaagctgagagactttcaatcagatgaggtccacag

SEQ ID NO: 210975 - DNA, 435 bp, Homo sapiens
agctggaaaacttttgtattgagcacattttacactaatatttaatcattttccctgctatatcccttcttatttggtactctagattgcagtaatatccctcctatacatttttgttctttgttaggaattttgtagtaaagaatgaatctggccgggctcggtggctcacgcctataatcccagtactttgggaggccaggacgcgtggatcgtgtgaggccagaagtgcaagaccagcctgggcaacgtggggaaaccccatctctataaaaatacaaaaaattagcttggtatggtagtgcacacctgtaatccctgctacttgggaggctgaggtgagagaatagctggaacccgggaggtggaggttgcagtgtggagattgtgccactgcccttcagcctgggcaacagagcgagactgtctaaaaaa

SEQ ID NO: 210976 - DNA, 81 bp, Homo sapiens
aaagaggaataaatgaaaatgtgaaagttttagactcgccaattatttgaatggaattgcttcttacaagataggggaaaa

SEQ ID NO: 210977 - DNA, 312 bp, Homo sapiens
gcatgtttgttccccccaaaatttatatttgaaaccgtagccctaatgtaatggtattgggagagggagcatttgcgaagtaattatgtcaggaggttggagccttcattatgggattagtgttcttataagaagagctagcaccatcctccaccccctgctccaactctttgccatatgaggatacaatgagaagaccgccatctgcaaaccaggatgcaggccgtcacctgacaccagatcctccagcatattgatcttggacttcccaccctctagaactgcaataaataaatgtttgttttgaagcca

SEQ ID NO: 210978 - DNA, 359 bp, Homo sapiens
gctgaaagcccagctccgcaggagctacaggcgtgagacccaccgggacccgcgagcgggatcagggctgggggattagcagagccgcttgcgaggctgaccctctccaggatgccccatcattccttccttctgagtacggggcaggactctctctgggatggaggggtcttaggacctgcaagcaaacaagggggagatgcattagagtgcagtgatacgatcacagctcattgcagccttgacctcctgggctcaagcaatccttccacctcagcctcccaagtagcgccactgaaatctatgttcttactcagcccacctgcactgaggtgaaataaacagctttattgctcaaa

SEQ ID NO: 210979 - DNA, 321 bp, Homo sapiens
atctttttatcggattttcgtgattattagttgttatttattagtatttgtcaaatcatgattgaatgggagaaaaaaatctgaaccaaagggtaaacaaatccaaagagaaaacaaaaattagaaaattaaaaactggtttaaaaaaggttttccatctgtacagatgctgataatatattcccaaagtagtttcccattcattgcttaatttggttttctcaataagtgtcacaagtgtgcaaatgtacattttaaacatgtaagattaaggtattgttattactattatgtgtgaggcacatgcataggtcctgctcc

SEQ ID NO: 210980 - DNA, 298 bp, Homo sapiens
aaaaaatacttggagaggtaacaactgagaacttttcacagacaaactataaatataataaactgaaagaacaccagctgggaaccctacacaaatatacctagacacgtcatattcacactgtagaaaatcaaagacaaaatcttgaaagcagctggggcagctgtgggggaagaaagcatattacatatggaggaacaaagataagaattatagcagatttctcttcaggaagtatataagccagaagacaatgggacaatagctttaaagtgctagaaaggccaggtgcagtggc

SEQ ID NO: 210981 - DNA, 305 bp, Homo sapiens
aacctgacacataataattgctcaataaatatttgttgaatgaataaatgaataaaggatgcaccgagctgctcaaaaaaataagggctaaacaggtcacaaatatgtatgaggaactaatattactacatctaataaagttcagatgagagtggaaagcatttatgggaaaagataccacaatgtttctacagtttgctttaggaaaagttgctatccttgctcatttcacgtattttggaaagaatctgtcctttgccaaaggctctagcttccgaagagctgacaacaaactctgggagttg

SEQ ID NO: 210982 - DNA, 462 bp, Homo sapiens
aggtcaaactcgcaatgattcggtgtgttttgttccgtgcatcctggcatgtgaaagaagtgaggtaaagagtataatttacttccttgttttaaagctagcattgcccgtgccttccacgcgggactgttgtggatatttgaccactgcaagaaaactcacagaagcagaaacttagggcttgctttaaatgttatcagtgtgaattgagatggtgtcagcattatttttttaaagaccaaaacaacaatagtaacaaacacacacaagccactgttagattttacaaaactttaaaaagtaattatcttaaagatatctaagatagtgatctggttacatagattatcagagatacttttttttttgattatcagagatacttttaaaaaagcaactacaaggtaaggattatcctttaatttagtgtttttctattaaactcaatttgctttaaagttt

SEQ ID NO: 210983 - DNA, 498 bp, Homo sapiens
caggctggctgcccactcgctttctctcctcacaagactcgcttccccggccttcgaggatctcgaacggactatagtctggactcgctgggctggaggaaacttggccgctggccacccggaggagactgagaagcctttggtcaacagggcgcctttccttgaaccaaaacaaaactttccgaagccggaaaggaaacgcccagtgtcgcctgagagccctggagctgcgcgagacccaggcactgagtgcggcctcggcctctgacctctaacacgccgggaacaaaccagctggggcggcccgcaggcctgcgggagcggaatgtgacccgaaaccgacggacttcctgacccatagtccatagttctcttcagcaacttgaacattttggaaaaagaaacaagtcttaacatgccacgacctaatggaaaaactaaatccccttcctacaccttgctttccaaaagttaaaaaaaaatagttaaacgctatta

SEQ ID NO: 210984 - DNA, 716 bp, Homo sapiens
caattttatatttaagcagtgatttttactatattaatagcttattgaagataccatttactttgaagtttatagtacattgtctatcaaataggaaaagttttaatagttttagtataaaaaagatttattgaatttataacttgtctttgagactctcttatacattaaagttatttacacatatgctgcagataagataggtaatatatttggctttaaaagttcaagcaagctgttattttagttatcataagtaggttatatttttcagcataaaattgtgtatatatatatatatgtatacatgtcactgatatgttcagttttggatatcattaaatgtgaattaaattgattactaaaagtatagttatcctgattgactatagaaagaactggcactgtataatatttctgtcattcttagctacattatgaaaaccagggctctgagacacattagtacctgaaaatagtcgttgaccacattctatactccttcctcagctacactggttgcagaattaactcctataaatatgtactgaaaattaggccttacaatagatattcaggtttcattttattacagggttaataaacctattagaagttgctgtgcaaactgtgctctcaaaaagtatataagctatttgatgtaattcagaataaattatttttatattttttaaagttttttggtttattaaaaa

SEQ ID NO: 210985 - DNA, 109 bp, Homo sapiens
gtcatccctctgtctgtgtctgtgtcctcatctcatcttcttatgggatgtcttagtccatttcaggctgctatcacagaacaccatagactgggtggcttagaaacaa

SEQ ID NO: 210986 - DNA, 96 bp, Homo sapiens
cacttggtgaaagaggagatccaaacagccaatcaatatatgaaaaagtgctcactgcactccagcctgggtgacagagcgagactctgtctcaaa

SEQ ID NO: 210987 - DNA, 370 bp, Homo sapiens
agaaaatgctaaacgagaggtgatcctgtccccattgtaatgggtgcaaatgaagggccaactttattaaaatggaaaatccaggatttgtagttctcacattttaatgggcctaagcctcatctgaaggtgcctgctaaaaggcagatttctgggtgctggttccagaggttctgtgtggggccagagaatccgcattttaaatagcaccctcaggcattccacggcatgcagtttccagcaatccctctgagagcccagctctagattgcaataggggaccaccactcataattgggaattttttccttaaatatccagatttctagttctttcagagaatctgaagtgttggcaatcctgggcctgc

SEQ ID NO: 210988 - DNA, 265 bp, Homo sapiens
gaaactcttatttattgctggtgggaatgcaaaattgtacaaccactttgggaaacagtttggcagtttcttccaaagctaaacatagtcttaccatctgattcagagacttcactccttggtatttacacaaatgaattgaaaacatgtcctcacaaaaacctgcacatgaatatttacagcagctttattcataattgcccaaacttggaagcaaccaacgtgtttttctgtaggcaaattaataaataaattttggtacata

SEQ ID NO: 210989 - DNA, 418 bp, Homo sapiens
tttaatccacagccaaccccaggagatcaacagggtgtagactgtgaggcctagagaggtcaagggaccttcccagggtcccagagggtgttggtggcaggactggcccctaacccactgctgttctgcttctcccattcttgcatagagtaatggagttagtgaaaatgggctttcttttacaacacaaagtgttgctcttctttctcctagggagaaagtagtaagctctgtgggtgtaggaggaggaaaatagcaggagcttagccaaggagggtgctgcagcacatgtgggtcttcatagtccggaagggtgagtgacacccaaggggctgaggagctggcattccagagtggcatgcactctgccctcagagagggaggcattcacctgggaccttgccgtcctaggacctta

SEQ ID NO: 210990 - DNA, 418 bp, Homo sapiens
atgttggctcactgcaacatccacgtcccgggttcaagcgattcttctgcctcagcctcccaagtagctgggattacaggtgcctgtcgccacatccagctaattttttgtatttttagtagagacagggtttcaccgtgttccccaggctggtctcaaactcctgagctccggcaatccacccgcctcggcttcccaaagcgctaggattacaggcgtgagccaccgcacctggcccctatctcttaaaaatatatttttttgcccaacacacatttccaagttgccttgggggaaaaaaaataaatgaagctggcacaactgaaaaaataaaactggggccttggccaggcacagtggctcaggcctataatcccagcactttgggaagctgaggtgggaggatcacttgaggtca

SEQ ID NO: 210991 - DNA, 154 bp, Homo sapiens
actggagatccaatgatgatgtctttatacaatttataggtctttctataagtgtcaagataaatgtcatctctgtacctgcctatctttcagaggtaggcaagcttctatgtaaagtgctagatagtaaatattataaacttttcaggactca

SEQ ID NO: 210992 - DNA, 547 bp, Homo sapiens
atcttgggagactcagtacaagtagatcaacccatctcctctctacattttcagggaaatttggctcagagtccaaggctgaaccttgtgatgaggaaaccttgctggaagctgacctttactgtaggggccctgattcaatatcctatatccacaaaaaatgcacatacagggcagcgaggttctagccttcccctctgccatcttgatctgtgagggtctccttggaaaagtctatgtgtctcctacagtgccaagcaggggaggaatcagaattagtccaggtggcagcatccttttatgatatgatataaactcaacaaattaggtatagaaggaatgtaccacaacacaataaaggccatatatgacaagcccacaggtgatatcacacttaacattgaaaagttgaaagccttttcctgaagattaggaacaagacaatgaatgatgcccacccttgccatttctattcaacatagtactggaagtcccagcaagagcaattaggcaaggaaaataaataaaaaacatctacattggaaag

SEQ ID NO: 210993 - DNA, 224 bp, Homo sapiens
aaatatgggatgccatctgaaccagtgttagcacaatgtaaatattcagtaaatggtagctatgataataaacgtaatacattagttttcaataagcacattataaacagagatgtggctaagagatccaccacagctggtaaatggagagggtgcagagatcctgctgtcacatgctttgccatacattgacacattctggagtaactgactgcaaagctgaa

SEQ ID NO: 210994 - DNA, 225 bp, Homo sapiens
gtgcctgacaagcctgatatatttttttaaatgatcattagtatttgatctctactctttttctctcaagcacccaactcccggtttacggtcaggaagaattataaacagagatgtggctaagagatccaccacagctggtaaatggagagggtgcagagatcctgctgtcacatgctttgccatacattgacacattctggagtaactgactgcaaagctgaa

SEQ ID NO: 210995 - DNA, 154 bp, Homo sapiens
acgaaaagagaaaggaaattgatggtcttaaaatgcagtaataaaagccataattaaagaaacatgttcctaaactgaggaaaaacttctcttgggaagcgaagagggcatctttggcagtgtctcctggcgatctcttctggggccccgaaga

SEQ ID NO: 210996 - DNA, 533 bp, Homo sapiens
gaaatgaccaaggaggtccttgaggggttttctaggcttgtatgcctaggtggcattttcttaaaattcctacacatgttttataatgtaggtctgacatttttcagtctcataaagtcccccaaaagaatgctaaaaatgccacagtgggggcagttctcccttaaaggtccattttgaatattcaaatttcaactgaaattcttcattcactgtcctggacagagaggcagcctggccccctctgcccttgagggatatgcccttggtccttcctccgatgatgccccgtctttgtgtttgtaggcacctacatagggctgtttttaattcgtataaacatgaaagtgtttaagctctcccttaatggtggccgcctttaccagcccagaagtcccacatgtcagcatggactacacctcaggaaaccctctccatcctcagatgctttgggtggagtgcagacacagcagcttcccctgcaaaggcacccctgccaggtcagataattacttaggttggtagtctgtcac

SEQ ID NO: 210997 - DNA, 416 bp, Homo sapiens
agagcccatttccgccctgactgcagcacccagggccgctggggacccaggctgtctggatcccagccgatctattgccagtcctggcccaaggtcattttttccgggaagaaaggcagcttctcagtctagcatgtcccgccctccctggctgagctgggagctggggcgaggctgaaggatgtttctggtgaaagcagattacctcgtaagggggctggctgggtgggatggcactgtggtggcaggtccatcagatgtatctccatggggatgtttcctaggctgctggtgacaggcccccacctcaggctgtggaggaactgctgctgaggtggagacagtctggccccatgcctgggctcggcctgcctcctctgtggcctcacgggcaggggcccagcctctctgatgcc

SEQ ID NO: 210998 - DNA, 755 bp, Homo sapiens
agaagaggaaagcattacattttagctaagagaaaacaaaaggtttatggaatgagtgatactcacttcagatgattgttgatgcataaaatttcagaagacagacaagaggaaggtcattcaaagcagaggcaatatttgatttgtgtagagaaataatatttagaaggctatttaaagagtttgaaggacatattagaaatgcatttaggaaaatgcagcttgagagacattttttggaatttaggaataagaaagatgtaaagaggaaaagaattgagtcaaagtcaaatgttggtgaaatataaagcagagtggagactgagagcaatacattggatttgaacagatgagtagagaaagtcagtgtagtttcattagaattataagttcaggaaagtgcaggaagacaggaaagtggcagcaaatagtccaggctagtttggaaatgtttattggagaaagaaaacatatatgcaaaagtaacttagctcagtgctttgggaggcagagacggaaggactgcttgaggccaggacctcaagactagcctgggcaacatagtaagacccctgactctacaagaaaacaaaagcaaaacaattgtccaggtgtgatggtgcgtgcctgcaatcccagctacttgggaggctgaagccagaggatcacttgatcccaggtgtttgaggcttaggagagttgtgatcataccactgaactccagcctgggcaagagagaaagatccaatctctta

SEQ ID NO: 210999 - DNA, 223 bp, Homo sapiens
gactcttgctttccttatcagcaaaatgagatttgctgtacatgaaggtccccatgtcagtctggtctgaggagacaagctacaacacaaacaaaaatgggatttgctgtatgtgaaggtcgattagaacaaaggcctttttaatcttaaaggttaagtgcatggaaagaacctctgatggaaatcaaggagtactgacagcacgatgtggaaaataagagag

SEQ ID NO: 211000 - DNA, 629 bp, Homo sapiens
ggacaaatggagattattagggagaaagacttttccttatccttctgagcccttggttgtctatgggtactgttgcttgttttcatttttaaggatagtaaacatacttaacatttcccaaggaatctgtcttgacctgtgtatgtgtgtgtaaaagctgcattgtggactttttgaaaaagaacatataataaccagttcagttgaatgcaacgtgctctgtgagattaagggctcacaagaaactgctaatcacagttttaaaaagacaatcttttgatgtctcatatcttagtgttactatgagtttatagcctgttattttgtttagtgtttactctgtcttgcctttcttttttccttccttcctttccttttctttcttttcttttggaagggaacttaagtacatcttctggttctttctgcctgatctcttcctcttaattttagaaatgaagatgtagaagtccaaagaggatttacttgatgatttgactagaaaagctaggtttaaccaggtcttctatggaaatgaattatagctgtagtgaaaaaataagggaaatgtgctatgtttggattctagagacagttctctagaatagaaaatcttctaaacccaagac

SEQ ID NO: 211001 - DNA, 626 bp, Homo sapiens
aaattgtaggaaattacaatttgtacagcatagtttgtgtatcactcagattaatataagatgattaaatatggaaaggaagagaggctgaaagctcctgagggatatcattagggcaaattgccaaagaatgaaacatgagccagttaggagagtctggaagctgcaataatatcaggggacttgaatgttcgacagttggagcttcagtaatgtgtgaactgcgggttacggtatcaagagactctgttcactgacacatagaatgtcactattgaccagcaaactgcccaagcttgacagctgtactacaggaagccaagtatatcataatttcatatttaaactgttcattccagattaacattttgtttcctagctttatatcacaacagctgtaattacactgttgctattttaaaggtaattgccattttaattgttttgttttggtaagcagttaattaaacattttttagtacttaacaaaaggatatcacttttttctcccatcttctgaccctcatcagaattcttttaatgtgactttctttccattttaaattatatttctgtagatgtaaagtcatttttatgcataaagcaataattaaatcagcattctt

SEQ ID NO: 211002 - DNA, 209 bp, Homo sapiens
atgcttttgctaatttaataggacaaatatagtcattcactactgtttggtttgcatttttaaaattattagcagggccagatattttatcattttatttactggtgatctcttattctatctgtctgtccataccttctgcccatttatctactgaggtttaacaggtttttctatttatcaattttagcatttaaaaaaacattaat

SEQ ID NO: 211003 - DNA, 612 bp, Homo sapiens
gaatacaagagtgaaaaaagcctataagatttatggaacaccattaagtgaacaattaagaagagataaaaatggcatagaaaaccagtaacacctgaaaaattcccaagcctgggaagaaatatggacatctagatccaagaagctcaaaagttctcaaatagattagactcaaaaaggtcctccccaaggcaaacaaagtcaaattgtaaaaagtgaaagacagagacaattctaaaaacagcaagagaaaagcatcaagttacatataagggaatccccattagactaagaacagatttctcagcaaaaaccttataggccagtaaaaaatagatattttcaaagttctgaaattttgaaagaaaagaattgcctaccaaaaatactacacccagcaaagctatcctacagaaataatggagaaataaagtctctcctagacaaggagaaactgagggaattcatcaccactagaccaaacttacaagaaatgctcaggagagtcctgcatgtggaaacaaaaatgcaataatcaccatcatgaaaaaatgaaaaagtataaaactcactggcagaccagatacacatagtagaaataaaaaaaaaaat

SEQ ID NO: 211004 - DNA, 206 bp, Homo sapiens
  misc_feature (197)..(197): n is a, c, g, or t
tgccgatttggtaggattgtaatttttccgacaaattgtatgatcgctacacacgttatccttcccattgtgtgtgattttcccagtacccaagggtaaaggaactggaaagaaagactcactcaagtgcatcacataaatgggaatctaatagtaatggtgccaaatcggcaaagtgcaggaattggcggggatcntctagagtc

SEQ ID NO: 211005 - DNA, 125 bp, Homo sapiens
tgccaagtctgtctctgcctaactctatccaagagatattgcccactcccaaggttctaattagcatctaccagtcttcaagtacacatttccgaccctgacctctctctcttgagctccaggat

SEQ ID NO: 211006 - DNA, 468 bp, Homo sapiens
tccacagtgaatgagagcaagaactcccacgggcagagacggctgacggggtctcaacacagcccattaggaaacatccccagagccatctgataaaccgtccagtgtcagaatgagccatgtctctgggcaacttacccctgcccactgccgagaagataagaattcacccctgccgcacatagaatttattgcttttaatgacaaaatgctatggatgctgcttattggcttattacaattttatatttatccaaactttcttaggttaactcaggaacaatctaaaaagagacttcctcccccagagaagtgtgcaaacagagcaccgctgttttcagggcatattccatgtagtagtcagaaatcttttctgatatgtatttcctttctacctcctctctttctcctgaatcttactgagcatgaaactagagaaaacacctataaatataattatgaaaatca

SEQ ID NO: 211007 - DNA, 495 bp, Homo sapiens
atcatgaatgcataatatacacacatgcacgcacacacacacacccctcatcatatagaaaaggatcactgggttttggtcattgttatactaaaattgggtcataccatacacactttcatgcatcttacttttcccactcaataaatatcatatgtcagtacttcccctggcagagctctaatttatttcaagttttatttctttatgaacttaattatttatttatgtacttatttatttttgagacagagtcttgctctgccacccaggctggagtgcagtggtttaatctcggctcactgcaacctccaccatctgggttcaagcgattctcccacctcagcctctcgagtagcagggattacaggcgcccgccagcacgcccggttaatttttgtatttttggtagagacagggttgtgccatgttggccaggctggtctcaaacacctgacctcaggtgatccacctgccttggccttccaaagtgtt

SEQ ID NO: 211008 - DNA, 369 bp, Homo sapiens
gagtaggggaccagaagtgcctttgtcccaccccactcagacctcagtcctcccagatgtgatttccactctgctttccatacaccactccctgtgccacccttttgaattctagaaggatccaaatatggtttctaccgtggaatggaaatgaagattaaaaagccacttacaaatatgtttcttaagctcgaaatgtccattggaggaaagtctgcatagaccaacattgtattaaatcataattcctttatatcaacaagaacaagtggttaccactttggagaaagagtatgtatttcagaatatttcttgggttctatttacagttcattctcttgacaagctgagtaaattgcttgacctctg

SEQ ID NO: 211009 - DNA, 277 bp, Homo sapiens
aggagatgctgctcgtttcccaggctgaggtttgagctcatcaccattgccagccaatctgggcttcagggttttaccctttcagccttctcagaaagcagctgtctgccttccccatcgcagccttgcaatttattgccattaccattaggtagcagtgacattccagagcttttcctgaaagggactcctgaatataagctctggcagagcgagggggtgggggcaccccgcaccacccgccccacccaaaacacacaacccagaagcacgcacc

SEQ ID NO: 211010 - DNA, 580 bp, Homo sapiens
tcatcaaaattgtcataagtaggtcataagtatgtgggcttcatgttcactggtagcattcatgcagattgtaaatgagcactaacaatctcagcattttagggctagaatgtgtctaaagatcctcttattggccggcgcagtggctcacgcttgtaatcccagcactgtcggaggccgaggcaggtggatcacgaggtcaggagattgagaccatcctggctaacatggtgaaaacccgtctatactaaaaatacaaaaacattagctagggtggtggtgggcgcctgtagttccagccacttgggaggctgaggcgggagaatcgcttgaacccaggaggcggagcttgcagtgagccaagatcgtgccactgcactccagcctggtagacagagggagactctgtctgaaaaaaaaaagaaagaaaaaaagatcttcctatttaagcctttcttaatagctgaagaaacagatctggatagtttaatcaagatagtttgtggtagaatctagatgttttcctttaggccaatgggacttctagcttgtcgcatttgttctcttgggagtgggagta

SEQ ID NO: 211011 - DNA, 91 bp, Homo sapiens
aaaggaaacaaaatttcattgcctttcataatgaatttccttgttacaaaacttttataaacttcataatgtaaactttaaaaaaaaaaag

SEQ ID NO: 211012 - DNA, 167 bp, Homo sapiens
cagtcccagctcccaacaagagcgaaactccgtctctaaataaataaataaataaagttcgttctttggcatttgaaactgggctaggatttgaaaaactaatacatagtagcataagcttaaactaagtttgtcactaagcttagaataaatcttgttgggagctt

SEQ ID NO: 211013 - DNA, 616 bp, Homo sapiens
tttatctccgcaggatagaagcccaggcccagcacctcaggtggcctcatggtcagagacgggatggtgggtcatatgtgtcttgggggggtccgtgcgctgcagcgtctccttcccgttctccaggtatctgcggagccactccacgcacgtgccctccaggtaggctctctgctgctccgcctcatgggccgcctcccacttgcgctgggtgatctgagccgccatgtccgccgcggtccaagagctcaggtcctcgtttagggcgatgtaatccttgccctcgtaggcgaactggttatacccgccgaggaggcgcccctcgggcccccggtcgcagccatacatcctctggagggtgtgagaccccctctccaccgcttcccagctggtgcccctgggctacggtatccggaagctacagattcagtctgtggtggaggaccacagggtggggacagacttgctggaggaggagatcaccaaatcttcgaggagcacgtgccgagtgtcgatatcgcagctttcacacaacgatctgaagcctgacgtgtgtgtacgtgcgcgccgtgcgtgaggccctgcccccgattaaagactggacccccgtctccca

SEQ ID NO: 211014 - DNA, 263 bp, Homo sapiens
tttatctccgcaggatagaagcccaggcccagcacctcaggtggcctcatggtcagagacgggatggtgggtcatatgtgtcttgggggggtccgtgcgctgcagcgtctccttcccgttctccaggtatctgcggagccactccacgcacgtgccctccaggtaggctctctgctgctccgcctcatgggccgcctcccacttgcgctgggtgatctgagccgccatgtccgcggtagcacatataaaaactggagtttcag

SEQ ID NO: 211015 - DNA, 838 bp, Homo sapiens
gtgtactcttgtccttttgatggcatgataacagaaactaagggaacagtgttgataaagactgatgaagaattgatgaatttaagtaagggagaagaaaatctcatggatgcataagtcaaagctattgctgatactggtgcaaatgttgtagtaacaggtggcaaagtggcagacatggctcttcattatgcaaacaaatataatatgatgttagtgaagctaaactcaaaatgggatgtctgaagactctgtaaaacagttggtgctacagctcttcctagattgacacctcctgtccttgaagaaatgggacactgagacagtgtttacctctcagaagttggagatactcaggtggtggtttttaagcatgaaaaggaagatggcatcatttctaccatagtacttcagggctctacagacaatctgatggatgacatagaaagggcagtagatgatggtgttaatactttcaaagttcttacaagggataaacgtcttgtacccggaggtggagcaacagaaattgaattagccaaacagatcacatcatatggagagacatgtcctggacttgaacagtacgctattaagaagtttgctgaggcgtttgaagctattccccgtgcactggcagaaatactctggagaaaactctggagttaaggccaatgaagtaatctctaaactttatgcagtacctcaagaaggaaataaaaatgttggattagatactgaggctgtagtccctgctgtaacggacatgttggaagctggtgttctagatacttacctgggaaaacactggtctatcaaactcgctgctaatgctgca

SEQ ID NO: 211016 - DNA, 737 bp, Homo sapiens
ccaaccctaccaggtgctctgccctgtgttccctgctccttagctgaggacactactgagctccggtgaagaatataagttcctcatccccaatgcagtccttcctggtctccccgatttcatgttctcccacctggagtacctgaggactgccttccctcccccacagggatatggaggtggcacactaggttaccacaatgccagaagccaggattccctggggctagcaactctgccaggaatggtcagatgcactgtgatgtgctcaacccaaatataaactatgaccacagccccagaatagaaggctggaggaagaggggctgagaatagggcagagacagggacatcagagagctgagcaagggggagcagggcccctccttgcaggaaatgtcaacagctggttcctcccgtagtcctataagtgggtgccccagagtcacagacatgactcaggcctgtcttgctggccctctagagggaagaggtggcccagaaaccagggcatccctgtcccaagctgtagggcagaaataagaggaaggggttctttactcattgcttcgtcctatgtacagttgtccagcagaggacaggacacagccaagtggcctctgtcctcctctgggtactggccccgggtactggccctgatcatcccagcagatgacccccctccctggggatgtacagaggccagcctgctttctccctgggactccacccacaca

SEQ ID NO: 211017 - DNA, 362 bp, Homo sapiens
gagattccaaggattttaggacttgtatgccaggaaatggggagcaagactaaatatatatatttcacacatatttcacaatatcacagctagaacttgggagattttcttatcagtagatgaacttgcaaaagatcatgagaaagttttacatcaaaaagaaaaggttagcctgggcaatatggcaaaaccccatctgtacaaaaaatacaaaaattagtcgggcatagtggcaggtgcctgaagtcccagccacttggaggctgaggtgggcagattgcttgcacttggtaggtcaaggctgcagtgagctgtgatcctgacactgcattctgacagagcgagaccctgtctcagggggg

SEQ ID NO: 211018 - DNA, 489 bp, Homo sapiens
agcagttattagggctctcttattgaaagggtttaatgaataggttaaagtagtcattcgggtgagtgccatatgcacaacatggtctttattttgtgtttgcttgcagtgaattagtatgtactttacagttttcacacttcagagagaaactgcattgtacatttcaagttgagatgctactgaaatatagtgaaaatggcctctgtagacaggtttcactataaaattgtaaattatgcatacatatatccaaatttcttattttgaaatattgaatatatgaatatttaattggaatgttcctttagtatcttcatatgcttgccttaaaggaagtgttttcctttgatttatatacatggatttagaaatgtgtgtgtcatacatatctgtgtcttttctggagatgaacaaccacagatactattagatatggcattttctttttaaatgtgcttcagtaatgccaatgtggtcttcttttga

SEQ ID NO: 211019 - DNA, 295 bp, Homo sapiens
cataacgaattactgaacctagacactgaacagcatgactataaacaccagagacaaggaaataccatgtgcctcctcagggagagcacagcacccaccacctgtgaagtagttgggccaaaaaattgaacctaaattgaattaagtatatactaattaagtataaaccaccaatttacaggaaatagagagggcagaggaagatgttaagtacaccaggggaatacaactgaaaattcccagagagtggtataatactcccaggaaaaataatccaatttctggggctggacat

SEQ ID NO: 211020 - DNA, 435 bp, Homo sapiens
gctgatgaagagaagaatcagctactagttggtccttgctctgagggttccgcgtggtaaggcaggtttgtccacgcctgtcctctggggaagttgcatccatttattaaaatcacaggattttggtttgctgctgtttttcctattaattactttgctgagtagactgctaaggaatatagtatatgcataagctgatgtgacactttcagcataaaacatttaaaaaataggaagtcagctgggtgcggtggctcatgtctgtaatcccagcgctttgggagacccaggcaggaggatctctggaggccaggagttcaagaccagcctaggcaacatagtgagacctcgtctgtacaaaaacaaaattagcttgaggccaagagttcaagactagcctgggcaacatagtgagagcctgtctctactcaaaat

SEQ ID NO: 211021 - DNA, 265 bp, Homo sapiens
cccctagcttaccaccatgatcccaagcaaggtcctctcccctgtctggccctctttcaccatctgtgaagtagagatagaccaccaccaccaccgtctctactaaaaatacaaaaattagccgggcatagtggcacatgcctatgatcccagttacttgggaggctgaggcgggagaattgcttgaacctgggaggtggaggttgcagtgagccgagatggcgctactgcactccagctgggcatcagagtgagactccgtctc

SEQ ID NO: 211022 - DNA, 711 bp, Homo sapiens
cttactgacattttgtttaggatttttgcatctatgtgcatgagtgagattggtctgcagtttttattttattgtattaaccttgcctggtttggggatggcagtactggcctcacagaacaagtgtccactctcctgctagctccctggaagagtttgcagaagattcgaattatctgttctttgagtgtttggtggaactaacctgtaaaatcatccgggcttgggactttctttgtgggaagatcttaaatggcccattcaattaattaatggttatggcactctccagatatctatttcttctttaataaatttagtgagttataatttttaaaggaattttcccttttctgctttcaaatgttttgccataaagttatgcctgtttttttcattcctaatgttacttgtgacaactccctttcttcttggtcagtttcaccagaggtttaacgatgcttatagtttttttgaagaaaccaactcttggtttcattaatcctttttattgtatgttttaaaattttcttaattctgcccttaaacaatctctgggtttcttctattgttcttttttatgtttatcttgttatgttggatacctagttcattaatatttagcttttcttattttccaattagcctttagatggaggtcccctaagggttaagtttaactacacagagatctaccccttcgtctggggg

SEQ ID NO: 211023 - DNA, 410 bp, Homo sapiens
ccaatcacgccacgatgaagtcttctctgtgggcagaagacgctccaacattcaattccactgaagagtcagattgctggtttactatcttcaagtctgtgacttgcaagatataaaagaatgtaacactggtgctttgttttccatagaaagtaataaaaaatgtacttctctaacattctaagaaatctaatatagtgaccatctatttttctatcgtgtgtatcattttcacacgccactttaagaataaacccaaggcctaatttgggaatgttgccatagctgtaaaattaaatttaaaccaaaggattctatcaaaaagtaagtcttcaaactgtcaagaggctagctgaatacctgcagttgcttcagaattcttttccttcttcaatatgcttcaactcttg

SEQ ID NO: 211024 - DNA, 414 bp, Homo sapiens
aagaattcggcacgaggtgagccaccatgcccagccttcatggtttccctaggatcaccagctgtcatggactgatttgtgtctctccaaattcatatgttgaatacttaacctgccatgcgattgtgattggagataattcctttagggaagcaatgaaggttaaatgaggtcataggtgggagcttaatccaatgggactggggtccctacaagaagaggaagacaccagagctctctgtctccacacacagagaaaagaggctgtatgaggacacaagagaaggtaatagctgtctacaaaccaagaagagaagcctctccagaaaatgaaccctgctggaacttggtcttggactttccagcctccagaactgggagaaaataaagttcaaaataaagttctgttgtgta

SEQ ID NO: 211025 - DNA, 586 bp, Homo sapiens
gcctggcttctcttaatacttttttaaaaagaagtagacatttaaaaaagaaaatctagctatttgagtcttctgaatgggtgctcatgggtgttcagccaagactgggtagaacatagtgacctaattcaccaagatggtagtagaaaggcacaagtgtagggaagagatagagatgggtatgggagataaagtttgaacttgaccttctggtcaagaagggtcttgagaaaggacttataacctagcaggggctccctaagaagttgtccaaggtgggtccaagtttccctggttgggccagaacccaaggatggctcactgatgcgggtaccttcacttccagatgccaggggattcagggttggtcagtgccagccaagccttggcaagggatgaaaagacttcctgggtgctcttaaagtaaaagtgagacctctccctgccttacttcccagagccttttcacttgttttcatagagtatattcacattttgccttcacttagttacctgggtatatcattcctattccagatttgctgcttcttaggagctgggtaagctgggcacccctggggactta

SEQ ID NO: 211026 - DNA, 668 bp, Homo sapiens
catgagctgagtatcaacctggctgtattcatgggccagactcatatctggtatgtggatccgagtgcgccagtcagattacctgatagggagaacgagtcttgctgtccatcagctgtgtgatagtgtccacagaaagactggccctccatttacaaggcatctatgccgaataccaaggacagcacatatataaaccatgtcgtatccgtggacatgggtggggatcccttgatgggcaccttggcacatacctgagagcctggtgagaaagacagagaagctgaggaagaggaggaggaggaggaagaagaaggaggaggtgctgctcgcagagcagctgcaggctggggatgaggagagagcccctggggagggggttggggttgggcagcaaagctggacaggagctgccagatctcagcatccatccgtctctgagcctcgtccacctgggggaccaggagccgaagagcggcagaagggagcagagagggacagaaaggacgtccgtgaggcttcacctccccacgggcccagccagccacccgctctgcactgtctgctcacaagtgctgatacctggcactctggcccttgtacccactgccctcttgttcctcctgagctaggcggggatatcccgggatgggtttggctgcctatgg

SEQ ID NO: 211027 - DNA, 479 bp, Homo sapiens
atatagtttatttggaggtcagtcatcaacacttacactaaaacttttctcacctccctataattttgataactgacctttagtcagtaagatataagtatgtagaatatgtctttaaaacaactaattagactatattctgttattttgccttgagatcaggaggaaagatgtaagtaaagtcaaatctgaattaactcctccccatataccaatcagctgctagttctttgttacctaagaatgccttccacattgtatcaggatttcagagaaagtcccatgagggcagaggccaccttttcttgctcaccattgcatcctctgacctaacacagctcccgtcacccagtaagcacttagcacatattgggaggatgaatacagcatgagaccctcctcaaagcgatcttttctacattctaaaatcaaatctatattagcacccctcctctgacttaataaattatttatagaaa

SEQ ID NO: 211028 - DNA, 203 bp, Homo sapiens
gtttcacagttggttttgtgtttggcttcagtatttatctgttatgggttgaattgtgtctttctcaaatttatatgccgaagtcctcacctccagtatttcagaatgggactgtatttgaagattgggactgtaaagaagtagctaagataaaagactgtcagggtagcctcgatccaatctgactggtgtccttatttaaa

SEQ ID NO: 211029 - DNA, 571 bp, Homo sapiens
  misc_feature (554)..(554): n is a, c, g, or t
gctgaggtgatctagaggatccctccttctggccacgcccacgcatgttatattaatccactcatgtgacattcacctacaacaacataaagaaacaacagtttgagattccgcctcatttaaacggtatcatgtagtttggcaagagatggggaagaaaagagtgtttatcaacatgaacttttacagatttatgttttaaaccataagttaaaaattagtactagaataatttatatttgacaaatatttagactcagaggaggactgtggaaatgtctgggagaactgaggcttaaatcaacattttctaatactgcacattccaaattctggagtacagttggccctccatacccatgggttttgaaaccccaagggtacccgaatacccggggctgattgtattctacttttaggaaattgtttctaaattagaaatcaattagaatctaattgattctaaaatgttacttctgtcaaaggcagagcaaccagctggatctgacagcaggaaggtctgcactgcccccgcgtggccagaaggagggatnctcatagtacagccatg

SEQ ID NO: 211030 - DNA, 623 bp, Homo sapiens
ttttttaaggttaatgctaagttttcttgaaaattttaattcaggggatttttgatgggtttttttttaacctttaactgccttgtagaaagtgaaagtagggggtcctggcagggccaaagccagtgactgagagttgaaaccgtagtgcatggcagattcgcttgagcacaaaatgccccacttagatccacagcctttggactctggaaaaaaaaaaagtattaaattcttctccaagtggctaagattgagggagaaaatagatggcaaggggaatcaagtaagaggagtgtgtcctcttttgacttaaactggcttgcatgctactgacttgacaagaagccaagatcccagttgcagttcgacttgtgtgaagcaggcacctgctttgcttgcaaatgcacatacaaaagagagcttcattcacaggaaaaaaaaatagcgggttcactaatttagccttccagggccttcgtcccttgatctgtcagccccttagaattcaaaggcagcgtgtaaaggaatttcctatttacaacatgatgacttttttgatgtcctgaattcgaatataactcgagttgaagttgtctgctagggctattgctttgttgtttaat

SEQ ID NO: 211031 - DNA, 234 bp, Homo sapiens
ctgactgttctgaccctgttcctcatttctgtcagttaaaccaagtagctattcagataatatagaatcatgtttactctaccaaagttaatttgaataatcagtccgtcctggataaggaaatatctcgtcagtactctggtcgtgatgttatctgaaagcacatgtttaaaagggagatgttacagataattcagtctaatttctcaggctgatatgaaccagggaaaacct

SEQ ID NO: 211032 - DNA, 481 bp, Homo sapiens
ataagcctcaatcctagcactcatagatgatcattgttaactttctgatgtgtttcctttcagttacatagttatttaagctaataaatttggaatgctgtaactatagctttttatcctgtttttttaacctaacattataccatgagcatttcctcgtgtcttttgaaaccatgatattgaatgttccatgctctagttgtaccataattatttaatctgttattgtcaaatatttagacactggttttttgctattctgagtaatgccataaacaaacatctttaaatgtatctgtcactgtttccttagggtagatttctagagccggtgactgggtcaaagtgtttgaatattttgaggctcttgatatgtggtaaaagtgttgctttctacaataacagagtttcagaatatgttccactgcatttgtcttgggtgttaatacttagaaaatccaattgggtggccgggtgcggt

SEQ ID NO: 211033 - DNA, 405 bp, Homo sapiens
ctctctggaatttcccttgcgtgaatgtccatgatacattgacttctgcaaaggatgttgttcaatatgttgtctccactactggggaggccacagcaaatgcctgttctgtccgtgaccgggtgacaagacttttctttgtactctcttgtttatgtttcttcacttgcaccctattattgggcatcctgcctttgggtcctaccttcatttctctactctagtctctaacttttccagacttggacttggatggagctggctctgacaactatttgctctgtgactttgggaaagttactcaacatctctgagcttcagtttctttgctatgaaactgtaataataatacaaaactcataaaactattgtaaaaataaatgagactctaaaatccagtacctg

SEQ ID NO: 211034 - DNA, 809 bp, Homo sapiens
cataaatctattcacatcttcaagagtcacacgactgaggtggaatggaagagggggagaaaggcagcatgacagttccactccattcaacggccagggactacagacccttggactaaggctatagtttcgacactgtttccaggtgtccacattgaattaaggatctgaaacaaggcttcagaccacctctccaggaaagtgcacgtttgcaaaggcttgaccacaggttctgggggcccacagcccccacgggtgaaacaaaccccttctggctctgacagccagcaaaactctggggcctgtctctagggacatggcagaggccccacccctctgcccagttggccttgctcttgggactgcccaaccacaaacagatttgtggtctggtaacaaaaaaagaaaagacaaggaggccagcaaaagtgggaggctggagggtgggttaaaaagaggtggaaaggccaagaaagcaggctgaggggaagacttctgcctctgcagacactgtcccctcctctcctctgtgaaaggctcccctggaaaggtggttcttcagtaggtaaaccatccgctggatggagctgcaatgcctgagctgaaagggactgtttacgcgggcgtttcccaaaatggtctattggtcttttccatagttattttgcattaaaaaaagggtggggctaggcatggtgctcatgcttgtaatcccagcactatgggaggcagatgcaggtggattgcttgagcccagcagttcaagatcagcctgggcaatatggtgaaacaccatatgcaaaaaaaaa

SEQ ID NO: 211035 - DNA, 417 bp, Homo sapiens
ggacatgaatgaatccaagttgggcttctcatctttcacatgggctggcaagcaacttctctcctgttccttatgtgccctggggacaacagaactttttctaacttgtaatatgaagaatgctacttagagtaaagcaaaagtcagcttcctttcatcaaggctgagagatataaacggaagcttgtgatgataagattttttaaaagcctactaatattgctatgtttagtgtacagagaactgcttctggtaggcaattaggagttggtcagcagaccacgggggccccgtggagaaactgggagcatagcaattgactaaaatcactctcctttcccaagaagtccttagcaatacgtggggtgctatttctgttatggtacatatgtgcaaaaattcattcactctctcatt

SEQ ID NO: 211036 - DNA, 472 bp, Homo sapiens
gtcgtgatttcattcattatccatggcttttagaacgtctgagttgcctgttacttgtgaatcaatttttctagtcccggtaagtgaactgaggaaccatcttttcagttgcttattggacaactccctctgaatatcccagtgctaattactttccctctcagagctggttttcttcctatgttaccaattgacccagtcacttgagccaggggctgggagccatcctagatttctgtctcaccctccacatggagtgtcatgtggctgccttttttacacctgccctctcatctccattcacactgctgctgcttctgctacagttaatctgtagtttatctttcactaagactgtaagctccatgagatctggggccatgtgtgttttcttcatcactgtctgtaatgcttggtacattgcatgttatgtaagtaatatttgttgattgaataaatgaattcacaaatg

SEQ ID NO: 211037 - DNA, 413 bp, Homo sapiens
aatctcagacagttcctcagtttgtctttcataactgatacttttgaagagtactggtgggatattttgaggatgttcctcagtttggatttatttgatgtactcagatgccttgaggttttgcaattttgaagagaataccacagaaaatgcatcatatcaagaggtgcattctagtgtgtcatttcaagttccttattttggtgtatcagtcttaatcacttggttaaggtggtgtctgccaggtatctccactgcaaaattactgtttccctttgtagttaatatcttgggagagatacatgagacatgaaaattcttttctcctccaacttatgctaagttttgcattcattagtggatcttgtctgtaacagttaccgctgtggtgtttgcctaaaggtgattttctg

SEQ ID NO: 211038 - DNA, 322 bp, Homo sapiens
atccaataaaggcattgttcagagtggaaatgtgtagtacgaccaatgcagtccttttttacagctaaccaattatgggctaaaagaacaatgcgaagtctcttttccaattgttcgtaggagtgtgttcattccaagccattaccgcatgtgtctgtcagagggaatctctgcatcaggctgtaatgagtcacattagctttttttccgcaacaaagcattacatggcctggctctatgacagctcagagattatggttcagggagcagctttaaatctagctctctttctttctagaaaatccaacgaggctgcagttat

SEQ ID NO: 211039 - DNA, 282 bp, Homo sapiens
aaatttaaaaaaaaaaatgaatcctgctactgatgggtatatagcattaatctcccacccaaccccccaaaaaggacttgtctggcttcttgtaagagagggtgatatttcataccttaatcttgtgattaattccaagtattaagatctgtcttctgatcctaagtgttcgtaaagacatataaagcatttttatgaactcttatgccctcctatgtgtaaggaagaaagtcttactatgaagtatagttttaagtatactaaattaaaatgccttacata

SEQ ID NO: 211040 - DNA, 525 bp, Homo sapiens
cagtagtatgtcctccaggctctgggttgcagtgacagaaacccactcaaattaagtaaaaaagagaaatcgattattataaagacatgggagaatgtcacatcgttccaatgtaggcaaatggtggcagactcaccattgagtcatcgtggttcacagagctaaccagagaccacctgtagccaaggggtattgggtcatgcagaatagccgcgattggggaacccacttatgtgggtgggggcggtttcctggagaggaagagggctgaaaacacatgccaaaaaggagtctactccacttgagccctggagttcgagtccagtctggccaacatagtgaaactccctctctactgaaaatacaaaaaattagctgggtgtggtggtgtgcacctgtaatcccagctactcgggaggctgacacaggagaactgcatgaacccaggaggcggaggttgcagtgagccgagatcatgccattgcactccagctcagggtacaatgtgagactctgtctcaaaaa

SEQ ID NO: 211041 - DNA, 417 bp, Homo sapiens
aaacaaaaagagtcataattaagcagaagctgggcaatgaggttgatgatccttttcccttaaggttatgatcttagaatgtttgtaaattcatgactgtatttgatgccttgtctaaaacgtggcctgaaatgctggagctgcaagtaaccttagcaacaaagcaagtaaggagaatgccttattgtggaaaacaaggattttaacagcttaagagttcatggtggtccctttgtttgaaagacaaggaaactgagcaccagagatgctagataaattttccttagatacccagcgcattaaggtagaactggtatgcttcccagctgtaagtccagggctttcccattatgtcctattattttacttatggtttcttttcagaggttatatttgcttaattgcttatttatattt

SEQ ID NO: 211042 - DNA, 356 bp, Homo sapiens
tcttccctcctggtcagaaaacacgttgttatccaaacacacccctcgcttccccacctctagatctctactcatgctgtttcctgtgcctggcatatcatctactctccttgtgcgccaaaatcctactcatgctttagagcccaactcagatgtcacttcctccctggtgccttcactatgtggaatgtatccactgtcattgaatttcatttattcatttgctcatcatagagacccctgggccaggctgtgaccatttccccttcacatgcctctggtttgtctcctgtttcagtcctgccttgtggttttcacacagctgatgctcaataaatgcgtgctgagcaaactca

SEQ ID NO: 211043 - DNA, 305 bp, Homo sapiens
tcaccttcatcagagcccaaggtctgaagacactgaaaagaagatctggccaccaaatgccctcaacaaggggttgtccagaccctgcttcaacattgtcagcagcagggcatgctccacctcagcagacagccacttttgttttcaagtaactctctaattgcaaaaaatgtactttgtattcatccaaatcggtgtccaggtagcattcacaagtatttgggaggcagaggcaggaggattcctagaggacaggagttcgtatcctctgaaaacatgtagaataaatccaactcctttcccat

SEQ ID NO: 211044 - DNA, 450 bp, Homo sapiens
tggggttccagccaggccacatgtgtttgcaggacaaccccgggtgccacatcatagcaactgaattggttgactatgcctgaccagcacagagctccagcaaggtggcccctgtggctacacaccagcctgcgtaattcttccctgcactgcagcttcccccaggcccatggcatctccccacatcattttgctagcacatggtcacatggacaggttttgctttccttgcccttccagcgtgcaggagtgcagttcatctgttcccctcccctgcacaccaccattgcagacggagccttggctgggatacagccaggcagccccatccccaccagcatcctgcccttctgggcattgccccccgccttaaaatccttcagaaatgaagccagtcagctgaatccaccttattccacaatcaaaccctaaagatcttcaaataggaaa

SEQ ID NO: 211045 - DNA, 338 bp, Homo sapiens
ttacaataaatgctgcgttccatgtgctaagtactgaagttattaccatgacaacaagaccaccttcttgcctacagttcggagattaataaagggctcctgagataaccacaaggcacatgaaataacccaggaactataaattgcaaaagcccccgagtctccctggcaatcaataaagcacagaagctttgttcagattgccaaccacccggttcagttctggacaacctcatactgccatccacgtaagtgtctatgctgcattgtaacttttggaaaaacatgcacacacctggtgccacctgggtaggtgtgaccagaacctgcctgttgga

SEQ ID NO: 211046 - DNA, 382 bp, Homo sapiens
aacagacttggggaaggggtcttggggtgcacggagcaggcctggaggtggagaggccgctatgactctgctgaacgctccagcaggaggccacgagcgcagggagggagaggcaggctagactctagagacagggaagtaggactcaagaacaactctggggcctttagcctggggactggtggagcccctcactgagacaggggacactgaagatgtgagcagattgggaatgagggcaggggtatggatgagatcacgaattctattttggctttgagtttttgctgactaggaagacatgcagcagggatatttctctctcagttacgtacaggaggcaaccgacattctcaaggttccactgaacagcagaggtggc

SEQ ID NO: 211047 - DNA, 1425 bp, Homo sapiens
gatatttggaattgcaattgaaaacttttaagacaagctttatgtttttatacatattgccacattgttcttcaaaaagagttattaatttactttcctttgacagcatatgagaatgcctatttctttgcaacctcagcaaagagggatattatcagtcttttacattttcagcaaatcatgatagctgatcatggttattttatttttctaattactagtgagattgaatgtcttttcatatttactggtcatttgtatattttcttattgtggaatatggacaaagtacatgaaacatatgtatgcatgtacacaacagatatgtacacacatacatatatattttttaacatatcataatgtgcataccatatgaccaccgggtcaagaaatagaacatctccagtacctcaaaagctccatatatgtccctccctaacacaaccctctgtccactttaacatcatccctactctttgctttgcttttcttcatagttttaccacccatgtatatgtctctaaagaccatatttagtttctatttttggaatttatatgaatcaaattatactgtacacttttgagactggtttcttttgctaagcattatgagattcatccttatcattgtatgtagccatagtgtgtttattccattgtatgaatgtattacattacatatacttttttcattttactcttgatggacaatttggattttttccactttggggatatttcaaacagtgcttctatggatattttgaacatgtcttctggagtttgcatctttaaaaggacatatacataagagtggaacctagatcatgccaactgtttcccgaagattctcatactgatttacattcttcccagggtgtattggcttttccccagccccccagtctggtagatgtataatggtatcatattgtagtttaaatgaccattttccttatatggaaaaaaaatatgaaaggtgttcatgaggctgatcacatttcatatattttttgaccatttggatttcatctttggtgaatgaagtgtgttaaagttctcccatttttctcatgaatttgcaggtggttctttatatattctggctactactcctttatgagttgtgttgcagaatcttttcccactttgtggtttgtcttttcacaatgtttataaatatagtaacattttaattttaatatcttcaaataatagttttcctttatggttagctcggttttttttatggttatgttaaaaatatagttaatattctcttgttacatgctttgtagttttgcctctcacattttggtttcatcccacttggaacaatcttcaacatatagtatgaggtaatttttttgctgctatagggctagtctgttgtgccagcactgtttattgaaaaaaaaca

SEQ ID NO: 211048 - DNA, 324 bp, Homo sapiens
atagacgtgtggaagaatagtgaatagtgtcagagatagttaaaggtccatacagaagttgagaaggtaataagtaatagtggcttggactacaatatttgttgaataaattttttaaaaaaacaggctacctacaatttgtgttgaagatatgagtgaatgaagtttccacacccttatgtggagtcctgctaagtaagcaacaataaggaagggtccccaggttggggagagccccaagttgaggagaataatgaacaattattgtatgaacaattgttagagacagctaatcacaaacaacctgcgggcacaatgacctca

SEQ ID NO: 211049 - DNA, 647 bp, Homo sapiens
gtctgtccttgatgcaaaaatcccctctgcttcctctgcagctgcagatcatgcttgctactacagtctctcttcccgacccaagaagaactatctgtagggtcagaaaaacaccccagcctcttcctgcttctagccttcctgctctgtatccacacagctgaagccacaaaacaagcaagcaacaaacaaaaacagaataggccccaccctgacagcatgaaagtatatgattatcttttcccagatagaagagaataatcttccacccagctcttaaaagagaaaactttctgtctccagccacagctgttggcttggtaaaagttgaatacaatcaacaacccttgtcccagtccctagaaaccttcaaatgttaacaactgccttggttgagagtgagagatcacttcagaaaacctagtactaaggaagtatttctgtaagtgcttgcgagtaaatgcaaataaaacaagattttttaaactgagacttaaagcaattttactatgtacctgagtcaaggttctactcatctttctagtctcaggtggaagacctcttcttccagcaagccctcgagatgttaggactatgtttgttgtctctgctatgtgctcccatatcctcctcagtgtctcccgtca

SEQ ID NO: 211050 - DNA, 467 bp, Homo sapiens
cctcaagtaataactcaagtactatctcatatttatatacttactttcttttttctttttgagacagtctcgctctgttggccaggctggagtgcagtggcgtgatctcagctcactgcagcctccacctcctgagttcaagcaattctcctgcttcagtctccagaatagttggacacaggcgtgtggcaccacacccagctaattgttgtatttttagtagagatggggtgaaactatggagacatagtttcaccatgttggccaggctggtctcaaactcttggcctcaagtgatccactggcctcggtttcccaaagtgctgggattacaagtgtgagccaccccagcctatatacttactttctgtctgggaggtagtttctaaaaccaaggttttctcattcttattactgttgactgactggaaataaaatttttgatataaagtattatgtgtaaaaaa

SEQ ID NO: 211051 - DNA, 510 bp, Homo sapiens
ctggttttgataattagggaatatgctttgcagggcaggaagctcacatttctttgtgtccccatggcatctggcacagcacttttcactccaaagacctgcatgactgtgtgttgcttgagaggtctgagcagctcatgttcactttgtgctgataacctggagacaggaaggaaaggaacttcttctcctgctgtaagggcaacatggcgatacacagcacatctcaaactctgtgcatcccagtctcctggaggacttgttaaaacaaatcgctgaacctacccaccagtttctgagccagtggttctgcatggggctggataatttgcacatctaccaagatcccagctggtcttggaccccactttgaggatgactgtcatactgggaagtacaacccaaattcgaatcccatctctgtggcttactaaccacgggcaagtttctagaactctcaggatccagtagcaccctctgtaatgaaagcataataacatcaacaagttg

SEQ ID NO: 211052 - DNA, 311 bp, Homo sapiens
aagaaaaaaattacaattaaaaaaattttgctctctgagtccctgaattcaatggactaaatccaaaacccagcctagggaacatgaagacaaagtacctattttctctcgcagggattattgggcacatcagtgtcgctggcagcccctccctgacacaccaatatctactgcctccaccttctggagctatgtgagggctggggtccaaggtcagggtgaagctaatctttctcctatcttcccttcctagcacacacaagattatcgtccatagaataatctcactcactagatccatagaaagatct

SEQ ID NO: 211053 - DNA, 328 bp, Homo sapiens
aatgtggttgagtgaggcctttgatattcacgcacagtccctcgtgagcacggggtttccttccatcacagtttggatgacggatcactgatttcaataatcaccaacgccaaaaatctgaatgtgggtggtcagttccatcttccacatgtataaccctgtctcttgttcttcttttctcatattttccagaatctttctcgacttgtttcaccctgactcatatcactgatttgattttccatggcatttgtgttgttttctgtggctgttctaacaaattatcacaaacttggtgacttaacacaacagaaagtcattccctcag

SEQ ID NO: 211054 - DNA, 440 bp, Homo sapiens
cctttctgagtttcttcctagcgaggccgagagggtctttgaggaaaatcccgcatccggacacgccttgagggatggcgtcaaacccagaggcttggaaaagtggagacggagtttcaccatgttggcaaggctagtctcaaactcctgacttcaagtgattcgcccacctcggcctctcaaagtgctgggattacaggcatgagccaccgtgtccggccccactacattcttaaagaagcaataaattgaccttgtttaaatacacaatctgaattactggggtcttttgaaactaaacctttgttcattactaagatttctattttccttcctctttttcagcacttatttctatagcagtctcccagctgatgccacttaacttcattgaacaaaaaatgaggtttagaaaatcacaataatcattgtgaaagtat

SEQ ID NO: 211055 - DNA, 361 bp, Homo sapiens
aaagacgaacagcaaagagaattagaatgcaaatactctacaagacggacaatactgggctgggtggtggctcacccctgtaatcccagcacagtgggaggccgaggcaggcggatcacttgaggtcaggagttcgagaccagcctgggcaacatggtgaaaccccatctctactaaaaataggaaaatcagctgggtgtggtggcgggtgcctgttaatcccagctacttgggaggctgaggcaggagcattgcttgaacctgggaagcagaggttgcagtgagtcaagatcataccactgcactgggtgacagagccagactccgcctcgagaaaaaaaaaaaatgtgtagcccaggat

SEQ ID NO: 211056 - DNA, 469 bp, Homo sapiens
tggggagcaaacagtcctgggcagaggggaggcacaggaacatcatctctaagaaggtctgcattacagcctgcagcattatcttcataagtaattagttaccctactgaactcatttcataatttgataatttagagaatgagctagtttatatctgtagaaaaaatttttaccaatttcataaaattcaatatttctgcagaatgcctttaatctttgaccaaaggcattttctgacccctgaattttgttgtcaactacttgcatcctaaattactcacacttattagctctttatttcctgtcccatcagtgtccagtagattgtgtatatccccatttgttgtcctgctatgctgatgtgtactgactctgttggtagcatgtcccattattacccagtattatcgggtatcagtttttcattaaactctggttgactgttgatgtaaccattatttataattg

SEQ ID NO: 211057 - DNA, 651 bp, Homo sapiens
agtgtcaaataggcggaagccacccccgaataattatttcttcaggacttataaatgtgtcagcttgtgtgcactttttgttgtgggtgtgtaagacagcccagcatattgatagattttaggttttctccacaaaatgcaagtttcacccactcttgggtgtgtctcactcagcactagcccacacttgctttaagtggaaattatggactgtgattggctggggtgtccccattcctgtcacccaggaccacatgagcacagtggagggagcagggccggaggagggctggccctcaatgtgcccagcagctccctcccatgtctgaggcacacagtctacacacaactcccacttgtgtgtacatttattcttatgggcacaggggcagtcttgcctgttcatggacttggtgtctgcccttgaatttggcctgtcaggtcctctttgttaagcaggcacgcactgcctagtgctgggtgttaaggatcaaaaaatgggtgtgactgtagaaaaacagattgcatcacaggacaggtaatgcacatgggcctggaccaaggtgtgaatgatgctcagtctttctaatataagaatcctgcacgttggagcaccaccaagacatttctgggttggcaagcacatggagt

SEQ ID NO: 211058 - DNA, 1209 bp, Homo sapiens
  misc_feature (2)..(2): n is a, c, g, or t
  misc_feature (5)..(5): n is a, c, g, or t
  misc_feature (7)..(8): n is a, c, g, or t
  misc_feature (11)..(14): n is a, c, g, or t
gnacnanngtnnnnctggattttcttatttaatcttcattacctgtgaaatatgtatttgtattcttactttacatatgagatcagaagttcattttcaagcagaatggaaaggtggtaaatggactctgaattaaaatatgtcagtattttaaaaggttatcttctgcctagtatttttatggaatctgacaagttctcagatcacacttgtttccttaaatcttggtaagtctgaagcattcttcattttgtttatattatacacgttagtaaggtgggagttcttttgttttttgtgttttttggccagttgataacatgaaagtttaagagaggaggccaaagtatataaaaagtcttaaactcctgcttctaataaatgtccaatatgtgttggctcctgggttgagtgtttattaatgggtctgtactaactctaaaacattaaataagaatggtatgttctgaccagccctcaaagttcagccatttctaaaagttcaaaaaatcattgtaaatattttttaaatgaggtacgagattgtacctgtctatggccagtaacacaagaaatctaggctcatgcagagttttagcatagttgaccctcagtatcagtggagggattggtaggaccctcagtgcataccaaattcttcaggtgctcaagtcccttatgtaaagtggtgcagtgtttgcatgtaaatctatacatgtcttcttgtatgctttaagctgtctatatattgcttgaataatctggtaaaatatcttacatattattcatgtagattcagtatagtatttgcgtgtggcaaattcaggtttggcttttggggacttcgtgagattttttttcctgagtattttcagtctgtttgtggttggatgcaggaaccacagatacatagggctaacttaagtaagtgccgacataaatgcgttagtcatagaggtaaataacaaagacctgagtttggtagtaagttccccgaaatgaaatgttagtatactcctaagtgattagtaattagatctcaggttgaatatactaaatccttaataactgcatgtttacttttaagacctagatttgtcagtatattagtagaggtgagcatgtactaattgttcacacttgtttataaaagcatatatactgtgaatttttagtacgtttaatgttgacttcaacttacatagactg

SEQ ID NO: 211059 - DNA, 608 bp, Homo sapiens
atttaaaagctactgtagtatcttttggaggaaatgactcacccaatatcatgcaatagttatagacaggtatagtaccagaatgcaagtctcccagcactcaacatggattactctttatagtaaaccatgctggctatttaacgatgtgggataataactagatacttttcacaactattcatcttcattctcagtcttatatgcattattatcatcatacatgtcctttaatgtaaaatttcctactcgcaacaaggaaaggagagttcactgagatttggaatagccaggtcacaacatggaggacactgggcatttaaggggcaagggaatgggagtaggtgtgagttaatagttttgtgggttttttttcccaacctggacaacatagcgagacctcatctttataaaattttaaaaaatgcatggaatcaaatctaaaactattggtataacatgttttcttcctgataccccatgaacatacactgatgggagaagactggcgcatcttcgtcccatcagcacccccacttacagcaaaagcagagaaaacatctacaatgaaatcaaagttactatcttctgctcctgtgagcaactca

SEQ ID NO: 211060 - DNA, 560 bp, Homo sapiens
gtggggccagccaggacctgcccgggggctactgccctctgaatcaatacctccagggaccctacgttgacacccatggcctcccactctccacccctcagtcctgcgtgcggcacgtagtgctcactgggcgtctgtgtagggggttgaaggctgaggctggaacaagggcgtggcggtcgcaggctccagggcacgacggtccttcctcttccccttctcagccacatctggggctccgtccctgcagccaaggctccctggcgctgtccttggtgctgacgcggttctggaagtgcggtgccagggtggctggtgcggctcccgatggaaaagccccaccaaccccacaaagcagactcgggagagaacacgccaccgtctttagcgaatcttaccaacccagggccagagcgccctgcaccccagagcagcactcgtggtgggaacacaggctgatgtaataaacagaaaagtgactgcgggggatggggaaggcgggatgtccttagcgtcccatggaaaaaacatatttcctccagatgggatcatcgataact

SEQ ID NO: 211061 - DNA, 186 bp, Homo sapiens
tcacttctggtcaggctccatgcactcaatcagccctgcctgccaggactgtagtgcccacttgatgagaaatcacctgtgaaaatgccaggcatggtctggcacacagtaggtgctcaagaaacaaatgttaatgccccagcttccttctgtcttgtgtccactaatttggcatttggagcatat

SEQ ID NO: 211062 - DNA, 319 bp, Homo sapiens
caaatattaagtttgcaaacttattcacttatgtttattttatgaaagtgaagacaagcttattttatggcaaatgttaccctactttcttgaactgattaagaaaaaagtgatttctttctcattagtatagtggtattaaaataaaaagaagaaaaaagaaaataaaattatttttcaagtgatctcctcattaaataaaaatgcaaagtatttcctgttcagtgcagagaagacctcttaaagtatattgtccaaaaaggaggagaaaactttttacgtctaggtttcccctttggggatttctcgttgtttcagg

SEQ ID NO: 211063 - DNA, 188 bp, Homo sapiens
ttcctggcctcaggtgatttgcccttcttggcctcccaaaggctgggattacagtcatgagccacggcgcccggccttattcaccactttggatcctccagcctcctctatctgttattttagcctccatggggaggctacaaaggaaaagtctctagtaggccaattcaaagatttacctgtatttg

SEQ ID NO: 211064 - DNA, 449 bp, Homo sapiens
tatgtcctaaggcaactttgtcaacagagggtctctagatgtcaagaatcatcaaaggccaggtcatttgagctggccctttactaggggtgtgtgtggggtactgagcctaactttcaggatctctggtaaatgagacactcactaaatgacttccagccaaaggcagccagaaatgttagtcatgggaaaaattaggcaggtgtggaagaaagggcatgggatgaagtgaggaagccttgcaaaacgatgctaaagctagctccactttctcatctacaaaacagataggtgtaaaaattttaattttgcagaaaaaattcaagtaaatgaattggaatttaagaaaacaacaaaacagctttccctttgtccataaaggtgttcaaaccctagttataaatctatttgctcaagaggactgactttctagattgaatatgccctgt

SEQ ID NO: 211065 - DNA, 568 bp, Homo sapiens
tcccctcttcctgcagatgcactcaagggcagcaacagaaaagccccagaacacttacagtggctgaatcttagtaccagcccaggttctcagaatggagaactcagaatttaagaagccccaggcctcagagccttacagctgcaaggttccttggcattcaaccaatccattctctttccaatgaagaaccacccagaaagcatctggccatcctctgctgcttgcacactgccaatgacaaggagctcactacctcccaaggcaaggcagacagctctggagccatgagtcgtttggcattatgtgaacaggctgtcactgagtcattcacattgtctcctggttgtcctcagagccagggacagaagttcttagaaccactcatagggtgttgggtgggtaagggaggcagctgagggctggatgaatttttctatttaaaacaaactggctgtctgggcgtggtggttcatgcctgtaatcccagcactttgagaagccaacacaggcagattacctgagatcaggagtttgagaccatcctgccaacatggtgaaaccccgt

SEQ ID NO: 211066 - DNA, 460 bp, Homo sapiens
tcagaacttgtggattgtgctgaaagcagtatggcctctggcagtgaagtaaaccttggcccagatactgccatgaggtggctatctagctgaacattttagtacaattctgagacttgcatatttattctctcatttcctagaaaataccggccaaaaaaagtatgaggtctataaggaggaggaaaaacatgaagtttaacatgcctatagaaaaatttacatcccatgaatgtatataatttgctgctgttttacacagcaaaagcacccctgtgactagcacccagatcaagaaatagaacaccacctagctctggcagcttttaacaattttattctggccgggcgtggtggctcacacctatgatcccagtactttgcgaggctgtggtgggaagattgcttgcgttcaggagttcaagaccagcctgggtaacatagcaagacctcgtctcta

SEQ ID NO: 211067 - DNA, 231 bp, Homo sapiens
ggtctccatgtaagcgccgtcctgcaggaagactagaagggtaacctgggggtaaatctgaaggaccactgtctaagacaacacttggtttgtgggtctgaaatacacgtagaatttacaggcatgataataacagcacaaagactgataaaataatagcacaaactaacaataaggaaagaagaataattaggccaggcacagtggctcatgcctgtaatcccagcactt

SEQ ID NO: 211068 - DNA, 475 bp, Homo sapiens
tcaaagaatatcccccttttttttttggtagagatagggttttgccatgttgttggtagcaagccctaaccctgtcataaacaggccttaaataaactggccataaacaggatttctgcagcaatgggacatgctcatgatggctgtcatgcacactgcgaaaagttgttggtttactggagcagggcaaggaacacctggccccgcccggagcaaaaaactgctcaaaccacaaacgatagcaggaaaggcctgtgccttggcagcatgtttttgctgcagataatcagccagagcctgtttctctgctcctcgctgagattgctttgtttcccataaagattgcttttagctaatctacaatctatagaagcaatgcttatcactggctttctgtcaataaatgtgtgggtcaagctctgtttgtggctctcagctctgaacgctgtcacccctgatccccactttatactgt

SEQ ID NO: 211069 - DNA, 348 bp, Homo sapiens
tctctcagacatcatcttttaggatcctggaagaattactgggtataggaaagcctggtctaagaaagtagattttcttacagaggccagagacacagttataactgggattgatgtcagcatcataaaaacacaagcaggcaggacctctgtcttagtatctgaagaactgatatgacaaaagaaagatgtcttatatatcatgaggtatactagaaatgagcatagataaatcctagaattatttttaaaatgcatttggcaggccaaattttatcaatcactatctaaaattaatgttagtttctccaaattatcaagcagttgtactagactataatgtcacta

SEQ ID NO: 211070 - DNA, 356 bp, Homo sapiens
tgcgctactcccacactgtcacccaagctaaagcaaaatcacccgctgtccagcgccaagagaaggtgccgcagacaaagctcaacttgagtctcctggagagagttaaaggcactccagtgtatggggagatcaggtggggtcagagagcaataaggtaccaggcaaaacaagaaaacttgtacttgaatagtggtacactttagtgctgagtgaggcagactctattgaacataagagtctttgaagcaagtgaaggcaagcaactccagtgtcagcctcagctttagttggtggtagaggacgtcgaagaagcagtactggagagtagaatcttctagttatggtgtgtacct

SEQ ID NO: 211071 - DNA, 487 bp, Homo sapiens
catgccctctcccaagattctccataaaattagttggttgcttcttgccctgaggcagcccagtgaagtctagggtgtggtgatcccatgttgttgatggggaaaaagggagtgatggggtgcttgagggcttcttaagccatagttcaagcatagcgagtgccccctcttcttctgaaagggccagatacctggcctcatcctctccacaaagaactctcttgggatcctcaggggatccaggttagggcagagccctagggctcagagaggggggtcagtaattaacctgggccctagcactgtaaaagtgacagtttgatctccccactgtccttcttcccctgcccaccagggacaaggcttccagaaagaggggaccactgggaaattctgcctcttgttcagataaagttcttcccgctgcaaggctccgagcttcattcttcatcctcagatctagaatgggatggagggcagttaattt

SEQ ID NO: 211072 - DNA, 366 bp, Homo sapiens
aggagtaggaaaactttctatataatgaggagactaattggtcaaaactgattcacaactggcacagatgttagaatttttggaggacgttaaaactgttaatgtaactgtattctctgtgttcaaaaggttaagtagggagactaattggtcaaaactgattcacaactggcacagatgttagaatttttggaggacgttaaaactgttaatgtaactgtattctctgtgttcaaaaggttaagtagcaatatggaagacataaaaaaactaaagcttgtagagattaaaatgtaatgaaaactacactggatggaatatagcacacaactgtgaaggaaactataccaaggcacatcataatca

SEQ ID NO: 211073 - DNA, 378 bp, Homo sapiens
actcttccactagaaaccttagtgtccccacatgaggaaagcacttcattatgtcctgaggaacagttggttatagaaaggctacaaggagaaaaggaacagaaagaagattctgaactttctactggattgatggactctgaaatgactcctacaattgagggttgtgtgaaagatgtttcataccaaggaggcaaatctataaagttatcatctgagacagagtcatcattttcattatcagcagacataagcaaggcagatgtgtcttcctccccaacaccttcttcagacttgccttcgcatgacatgctgcgtaattacccttcagctcttagttcctctgctggaaacatcatgccaacaacttacatctca

SEQ ID NO: 211074 - DNA, 287 bp, Homo sapiens
gctatgaatccagaaaagatgctatgaatccagaaaagatggagactgaagattttcaaagaaactctcaataagaaactgaaaaaccacaccctgtccagtccttccaccctctcagttccctccctcccaaaggcttgcccccatctcctcctccactttgccatgccttccgccatgggatgatgcagcaagaaggccctcaccagatgccagcatcttgactgtggacttcccagcctccaaaactgtgagaaataaatttctgtacaatataaattacccag

SEQ ID NO: 211075 - DNA, 490 bp, Homo sapiens
cactcaggaaacaaactaggagtaggtgcttgcaagtaaattgactataggagaaagaaaagaacaacattagaaagagaagatcacacagaggaaaagtgaattataaggtgaaacgcccagcaaatatcctgtaattcctctgcactgcacaagccagaacatgattctaattcttccatgctagaattgacaacacaatctactgagagaggttctttagcatttaaaaaatatgagaataaagatttatttggcaaaaattttcttattattaaaaaaattttagataattttttacagccctctgtgcagaagacacgtatctcataaaggaaagacatttatatatacacacgccttgcattttaagcctcaaatgattcttctaaaaatacaaagtataaactaggtatttggcacgaaaaatttaaaagaagaatgtacaatgtctctttttttaaaataaaatatttatttcaactttgca

SEQ ID NO: 211076 - DNA, 475 bp, Homo sapiens
atcatcttcagtcttacattgagaagagtgaccttggctgtctttagtatatagagctttgcaaaatcattctacgaccaggcaggtataatattccataatctactggtgggagtgttttttaaattgtggtaaaagtatagaaaatatgccatcttcatcatttttagatgtgcagtttagtaacattaggaatgttcacattgttgtaccaccacactccataagcgatgtatttactagtgaatgcaccaagtgatgatttgttgtttttatttttattttcactttctggttcttttaattattttttttattaacccttatctatgtgatggaatgtttttctttttatttttttttttttttgagacagagtctcctgtcacccaggctggagtgcagtggcgtgatctcagctcactgcagcctttgcctcctgggttcaagcgattcttatgcctcagccttatat

SEQ ID NO: 211077 - DNA, 479 bp, Homo sapiens
atgaagcaatcagtcatcaatccctgggtgggtagtgaggaccctagaaagccttcctctctactcttgaatttactgaatgacctaagaaaaatcacatcaaggaactgttgccagtctgtcacttaagcagctgctaggtcacctccactatccaacacggattaagggaatttctgtggctggtcagctgctgccttgaacagcgcttggagaatcggcctatgagcagctggttaaggaacaggctgcactgggaagggtttatattaatagataccaatctggagaaagatttattattttatccttaaaagtataacagtatagtatagtatacagtatagattatatacagcttattttccacttgtttctacatctatgaaataaagtagtgatctattttcactactctttccaaaaatgttaagtatggagttttgataccatctctagatgcccttaccttctttcta

SEQ ID NO: 211078 - DNA, 492 bp, Homo sapiens
ataatgatgtctttaatgattttatggactctgcagggaagctttaataaatatgaacttagaaatactttgtatttttgatagataccattagcccaatttccaaagaaggtctataattttaattatgaagtgatgataaatgttcttatatgcctttcaacttcagagggattttttttcctgctattagtggaatatacttcatttacagattagatttctgagaataatttaatagtaaattattgttttaatatactgctattcattttcctaatagtttctttgcttcagttttcaagtgatattattatagtttcctttgattatagtatcactttctagtttgtggttagtgttctgctagctttatagaatgaattaaggatatttggggctttcctatattctgacacatttaaatagctgagaagttatctatttcttgacatttgtagaatttcacagtggtatttttaagcaaagtac

SEQ ID NO: 211079 - DNA, 669 bp, Homo sapiens
  misc_feature (579)..(579): n is a, c, g, or t
  misc_feature (616)..(616): n is a, c, g, or t
  misc_feature (647)..(647): n is a, c, g, or t
tgttatactgtacatacctctggctgcccaaagctgtcaataccatgtgtttccaggcctacaatcccacactgcctccctggtattgttacaggtagtgtggagaaagaactggatttataattagtagtctggacttaaaactccaacttttcttattatttatttatttatttatttttcttgagatagagtttcactcttgttacccaggctggagtgcaatggcgcgatctcggctcactggaacctccacctcccaggttcaagcaattctcctgcctcagcctcccaaatagctgggattacaggcatgcaccaccatgcccggctaattttgtatttttagtagatggggtttctccatgttggtcaggctggtctcaaactcctgacctcaggtgatctgcctgcctcagcctcccaaagtgctgggattacaggcgtgagccaccacgccgggcctatttaaagaactcttacagttcaacaacaggccagggacagtggctcatgcctgtaggcccagctacttgagaggcggagctacttgcgctaccacgcctggctaatttttgnattttttgtgaagactgggtttcaccatgttgccaangctggtttcgaactgctggactcaagcaatncacccaccaaaagtgctgggac

SEQ ID NO: 211080 - DNA, 376 bp, Homo sapiens
aggctggtcttgaattcctgggctcaagcggtctgcctgcctcaggattcctattcactctttacaatccagctctgctgcacccctgagcttctggagatgccacagaacacttgtctgtgctcctttgtggcactcaccacgttttgttaaaatgaccaatcgccctccttgacagggttgtgtgctgcttgagggcaggggctgtctcattcacgtggaggttcaacacatgtctgtggaatgggtttcgctgccccaaagctgattctatcttttgctgtgtttgcattggaacaatgggcagaaatgatttcctaattctgcttgcatggggtaggtcagacaacttggatgtgggttttagttctgggtc

SEQ ID NO: 211081 - DNA, 384 bp, Homo sapiens
gaaatcaggagagtataagtggctatactaatatcagacaaaatcgaatttaagacaaaaaaaagttcagttcctagagtcaaagtagaacttttatgataaaatagccaatgtcttctatcaggaagacataattacatgtacttaaaaacagagccccaagattcttgaagcaaaaactgacagaattaaaggaagaaatagtcagttaaacaatgatagttagaaacttcagtactccatcttcaataatggatagaataactaggctgaagatcaacaagaaaacagaaggcatgaacaccaccacaaagtggacctaatagaagtctacaggacatgctacccaacaaccacagaacacattcttcccaagcatacatg

SEQ ID NO: 211082 - DNA, 424 bp, Homo sapiens
ggaaagtgatgaagaagaaggcagagaagaactccattttcctgagtctggtctgaaagagggtacctcccacctgaggagcaggaggacattcctgggggtccctgagacaatgagcttgaggtgcctgaggggcagccaggggaagatgtccaggggcaggctccaggggagtggtccagagccatcacgtttggagccatccatgtacaggaaggagcaggagctgagccaacgatgtgatgagcaggagagggtgcagagactaggagagatggctctgccaaggagagaagaagatcaaatgctccccagagatcaagcagataatccctggaaagtgagtgttgaatttcacagccccgcagtgcccagagtgtcaagaaggtataggatgggcgtggtggctcaaacctgtaatccc

SEQ ID NO: 211083 - DNA, 211 bp, Homo sapiens
tgttcttgaagcagacacttcctggctgtgagactgcatattagcagttgcccctaaggactggctgcagatgtcatcactcccattgggtctccttggcattggctctcagtgtattccagagcctgttcctcctagcaggaacaactctcagaagtcccatttggtatggctcagagacggtcccaatgtcttgtctactgcaactctt

SEQ ID NO: 211084 - DNA, 512 bp, Homo sapiens
gtcctcactgcgcgtccacacctcgccttggtttcttttgttttattcaagccccggccccgcggtacagcggggagactcgcccaggcccacggaagaagccgagctcctccgaagggagaaccagtgattccacggaccccggaatcccccgggagtgggaccaccaggctgcgggcggaattaaccctgccgcggaggcgctgggcgaggatgagggcggcgagcgcggaggggaccgagtcacacagcagcccggcggcctctgccggcaggccccgctcgctcctttcggcccgacccgggcgggggttccggtgccgccctccctaccccgcacgtaggctcgtgggggcggggacagggggacgaaaacaaccgcgtcctcagcctgactgaacaggctcggactcctccgacggcgccgcgccgcgcacagatgagcctttgtgggaccccgcggaaggaggcgccggccgcagccacattcctttccgggcaagcgcggccgc

SEQ ID NO: 211085 - DNA, 454 bp, Homo sapiens
tcaggtcccataatacacactaataaaagagaattgaagaacaaattaccaaaaaagattataagaaagcatctagctctcataaatatgtgcatttgcagataaaattgctaaagcactatcagtgacctttgaatcatcatataaaatagaagcccctgaagattaaagaaatgaagtcctaattgtcaaaaaaagagaaaggcagatccacaccacagaactacagaagacaggtttagtgacaatgctatacagtaacatcatgaactggtcaggagcagcatatggcactcaactgaagtagacaagggctcactaagcataaaccaaggcctaagccttcatttattctgtgagttatcagactagtaggtgaaatgaatactaaaaatgatatctggacttaaagtatccaccaaattctcttctgataagaggcagggtttctaac

SEQ ID NO: 211086 - DNA, 548 bp, Homo sapiens
tccatcgaacacccctatgagcacagcactcggcacctcccgcaggcctgcctcagtgctgcaaagaaagggccgcgacactctcatgacgagaagctctgcttctccacagccagctcaattcacaagcttgggttacaagtctttgggaggcaaacagagaggtgaagaaaagcaagtgcaaaatgatgcttcatattagcagaggctgcagatctgtgccgagtggggtggagcttcctggcagcctgcctgcctagcaatctgccagcaaaggaggaagccccttccgtcgctcccaggcacacaatgtggtcatgggcgagtgtgccctccaggccaccacggtaggcccagaccaagggacatgcctgctcagcagcatccacaccagaagccagttcgactcggcccagtgcctctgccccatagcccctgtgatctcccaggtggaacctggtttgaacctgctgagacccaagtccccacttataggaggcagagaatgggtagccctccccctccaggcactctggataattaaaaaa

SEQ ID NO: 211087 - DNA, 386 bp, Homo sapiens
agggtgaaaagtagttcccataatacacatggttgactatggtgatccaccttgtgatggttaatattaggtgtctggagaaggttgcttcattggccctgggacttctctctgcaggaggagagaccgctgcctctcctctggattggtctcaggctctctgttggcctttggtcagcgtttccacatcctgctctgctgcaggagagggggctaaggggctggatccaccaaggcagctcacagcgggaaaactctgggactgaaccactgaattcaggggatgggggtgggggggcggttctcgaggtgtgtgccagctacacgtgtgttctgtatgggtccagctgcgtttccatcactcgctaataaatcaacagaaacac

SEQ ID NO: 211088 - DNA, 223 bp, Homo sapiens
ccacaggcgctaaaaaatatccaactcacaaagcaggaattcatccagcctcatatctgtctcaccttgcacaaagcctgccttcacgggttgctgaaataatcccaagatacccttccaggacttaaacagccactggatttttcatgaaaatgcaccctggtatgaacactcacagtagtggccagaaaaataggggtgcgcaagctgggtcttcctctct

SEQ ID NO: 211089 - DNA, 404 bp, Homo sapiens
gccaggcatggtgatgtgtgcctgtggttccagctacttgggaggctgaggcagaggattgcttcagcccagaagttcaaggctgcaggcagctgagatcgtgccactgcactccaatctgggctacaaagcaagaccctgtctcgaaaaaaaaaaaaaatcatcattatgaaccaaataacagcatagaccactaatttacaacttctggactacagaagtactctaacccatgtatggcagtaaaaccttttcttcaaacaaaacctctggtgaacacccacctccccatcaaagggaaccgctccaggttaagggggcccttcctccgaagttagaagacagaagggggtttgtgattgccctcagacaagctctttgccccgcctgaagagtgggacaac

SEQ ID NO: 211090 - DNA, 475 bp, Homo sapiens
atatttataattcttgattagccatattttatctccataaaagtcataaaatattgatgaatataagatttatgtagagatcatctttctattgacattagcagatatatattatagtatctggtttttttgttttaaaaattaagtttaataaatacaacttatttttaccatgtcactcttcagtaccactttctaatatttaacacgtttcaaaatgtataaatacggcctcctatcgaatcaccactgaaggtcaagaatctacctttatatgtttatagtaccttgcatacagaaggagaacaataatatattttgcataaatgattagataaataagtgggtattacctgaatacccacttattattgactcatctaaccaacagaagttcagtctggctgtagcctctcagaacagacattttgcaaaatatatatattggactattaggaagaggaccttcactgta

SEQ ID NO: 211091 - DNA, 393 bp, Homo sapiens
acatgatctcatccaaccctcccagtaaatttcataatgagcatcttgaggccctgtgcaaagtctcacaactagtaaatgccaaagctgagctacttatggagcttgtctctgaagcccacacttgtaatctttttgtgatactgttcctgtggcacagttgtactgttccagtggctgcatctgtttgcattttcttctcaagatgcatgtttcctgatacagggatcaatatattttgattttagatgaaaattgatttacttggcaatttttcttttaggttattcttttataatctaaaaaaggtatattattttcttttccaagtagagtcctcttatttttatatgtatagttgaataagaacagctatataatgcagttaacaat

SEQ ID NO: 211092 - DNA, 107 bp, Homo sapiens
acacacacacacacacggtattcttatgaaaggagtactttgaaacacttcaacaaatgagctaaagacatgaacaagaaattcacacatacaaaaaagagacatgg

SEQ ID NO: 211093 - DNA, 713 bp, Homo sapiens
ctggagtctcttctctaaaatgagatgataatagtactttgataacaccctgctattgtaaacctctaatgagacaaacaatggaatccaatgcagaggttagtgatgatgtaggcagaagccacccaggctgctgattgtgcaatgacacccacaccctatgggaactagcatggctcaatcccaggaacgccactctgagccttggagaagtaactaaaatttactcctttaagaatctcggggcttggagaaatcccagtaaccatagcaacatgactcaggtagggttttaattagcatctgggttgagatcagagttttttcggcccagtttgttatgataaaacccttagattgcatatagctcaagcttgatgggaatcttggaggttcaaggtttcagctcttaaaaaataaacaagttagaggagaaaaaagaattaaaaagaagggccggacttagtggctcatgcctgtaatcatagcactttgggaggccaaggcaggcagactgcttgagcccaggactttgagaccaacctgggcaacatggtgaaacccagtctccaccaaaaaagatatgaaaatcagccagggatggtggcacatgcctgtcatcccagcttctctgggggctgaggtgggaggatggcttgagcccagaaagtggaggttgcagtgagctatgattgtgccactgtactcctgcc

SEQ ID NO: 211094 - DNA, 2801 bp, Homo sapiens
  misc_feature (110)..(110): n is a, c, g, or t
  misc_feature (906)..(906): n is a, c, g, or t
  misc_feature (1790)..(1790): n is a, c, g, or t
gttgcagtgagccaagattgtgccattgcactccagcctgggtgacagagcgagacttcgtctcagaaaaaaaaaaaaaagtaaggtggatatgtgcagtggctcaggcnagccagcctgcaggaccacctttgggaggccagagcaggaagatcccttgaggctggtccctaactcctgacctcaagtgatccgcccgcctcagcctctcaaggtgctgggattacagacatgagccaccacacccggcaaatgtactgtattttagttgttgataaatgtgaaaataaatagaacagggaaaggggataaatagtgggtgaagcggtggaggctgcaattttcagcaggacagggagggcagggtccacggcaaaagtgacagttgggccctagaggaattagaatgtgaggtgaggctgggggacggaacctgtggagcacagaggctactttgaaaccatggaggtgcagcgtgtcgtggaggaggagtgtatcctctgaagcacgccgatctccagagattccttccttactccctctttgctccagccagtggaagtatggctggtgtgagagtttaccttctgaccagaactgtctcaagaatttaggaattcttgttgcaagaatgttgcaagtgcttgtaataagtagaagaggaatagaaggaaggaattaagagctggaagctccctggtggggattctgagcttgtataacacagttaacattgttccccttgaggatattcttcatttatcagcatcatgcagaatgtcaccattcaggagttgaattgtgaattcaattaagtagtgatttgggtgttcctaggtagatatactcacaatatggtagagttgaaaaaatgatggagataaaaacaattttggagggaagtgntctgaaaatacagagcaaagttcttgttttccatttagttaccaggtattttgtaaaccttatgcatgacctttgtatttacagaacaaatgaagcatccattaacttcgaatgatcagatgctagggtgtgaggaattttcaggccaaaatgcactgggttattgtctcctattgacagtgtgatattacagataacctctaggagatcctgaacatattcaggctaaaccaggcaaacaaacattcaggatgttaccagtgtggaaaacccctaggaggtaagtatggcagggaatcagtctgagaaagagggtaaatcgaatgaagctattttggttataaaagtgctgcgaatgtatgagagtacttcaaaactactctctatgctacaaaagccaataagtttagttatgcagttccttttgtgtcattacatttcaatagagtttatttagttttgtttctgtttcacctatgaaatgtgtattagtcaggattctccagagaaacagaaccaatagaatatatgtagatatataaaaagggatttgttataaggaattagattgtgcaattttggaggctgaaaagtcccaccatctgccgtggaaaactggtggtatagtttcagtctaagcccaaaggcctgagaaccaggagaacccgtggtgtaagtcctgacttctgagacccaagaaccaggagctatgatgtccaatgtcccagggcaggagaacatgcatgtcccagatcaacatgagagagataattcacctttcctctttgttctctgtaggccttcaatagattggctagtgcccacctacattgctgagggcagtctctttattcagtctactgattcgaatgttaatttcttcngcagacattctcacaaacacacccaggaataatgttttaccagctacctggctatctgtttagcccagtcaaattgacacatgaaactaaccatcacaaaactcaactcttattttaagatagcagctttaaaaaaatttactatacacatttaattaaatttattttcagtttacctctcagttgtactacttactagctgtgttacaatgagtacaacatttagggtttctgcaccttgatttagttctctagaaaatggtgagtactactattgtctacatcacagaattattttgaggattaaataaaattaaaattataagggctgaggacattacatggcatataatacataattattacatattagctataattattactgttgtgtcatcattattataattaccatcattttctcacagaagcatttcagggctgttattacaaaactctttcccttgtgtttccaatatgccaactatttcaatcaagaaaattaatagcctatggaaagacagtggcctttgtcatcactacgattgattctattaaatgtattaaaagtaatggcaaaaaccccaattacttttgcaccagcataaaatcactaggtgcatgaattttgcataattcttttaatttctcagaaccttgatgtttctcatttgttcaaccaggtagatattattaatcccttcaaagagatgtgaagaacaaagttcagaaatgttaaggacggtaaacgatatcatatttaagggcttggcacttcgttgactcgataaatagtagctactactttgagctattattccctttcatgaaaatcctcctactaaaactatgtgcttcttccaacagagacagccaaaattaagactgatggagaaatttcccccagcaataccacttaaaaatatgtattttttactttaattgcctggtattaagttttctgcaggaatacaaataaaattgcttgtatggctttgagaaactacagtt

SEQ ID NO: 211095 - DNA, 551 bp, Homo sapiens
agtcaccaaccctctacttggtcctttgcaatcctttccagaccttctgtggtctcctgtcacacagggctcacctggggggaccctgatggccagattctcttgaacagtctctagggacatattgggtattgctataccttcatccattgaacagttttccagtggctccataatatgtgatatcacaacagattgaatgcagaaacagaacaaatgaagcatccattaacttcgaatgatcagatgctagggtgtgaggaattttcaggccaaaatgcactgggttattgtctcctattgacagtgtgatattacagataacctctaggagatcctgaacatattcaggctaaaccaggcaaacaaacattcaggatgttaccagtgtggaaaacccctaggagagacagccaaaattaagactgatggagaaatttcccccagcaataccacttaaaaatatgtattttttactttaattgcctggtattaagttttctgcaggaatacaaataaaattgcttgtatggctttgagaaactacagtt

SEQ ID NO: 211096 - DNA, 333 bp, Homo sapiens
atgaattccctttcattgaagcagcaaaccctctggggattccttttgatgaaaatgagcctttgtcacaatatgtccaacacagtgattgagccgaacagagttaaacaggcagcatcaaatgaaccaaagtacttggcagaattacattttccttgaaaaaaattctacattttttttttgcattaaaaaaaccaacctctctatgtaaaactaccagcatcataaaattcactggaaataatgcaaaggaaatatagtataatggcagagggaaacactaatataccaatacaaataaatattaaagttcagagtcaatctcacttgccc

SEQ ID NO: 211097 - DNA, 415 bp, Homo sapiens
atcctcgcgccaaatgtgcaaaaaactgataaagccatgtaaagtctgatgtttaggtagtagtaatatagcaatgttgctttcttatttttgatggatgtactacagtgaggaatatacagaaactctctgtactatctcttaactaacttttctgtaaatctaaaactattccagaataaaaacctatttaaaaataagtttagggccgggcatggtggctcactcctataatcccagcactttgggaggccgagatcgcaccactgcattccagcctgggcaacaagagcaaaactccatctcaaaaaacaaaaagaaaaagaaaatctgttgttcaccaactatcttatgtagatttttctagataacttccttgcagcttctacatcagcacttgcagtttcaccttgca

SEQ ID NO: 211098 - DNA, 529 bp, Homo sapiens
agccaaccacagattgaaagtgttctgtagttgtgtccgtactgaacagttacagacttttttcttttcattttcccctaaacaacataacaattatttacatagtatttacattgtattaggtatcataagtaatcaaaagacgatttaaagtatatgagatggtgtgtgtaggtttcatgcagataccacgtcattttatgtaagggacttgagcatctgtgcattttggtatctgctgggaggtcctggagccagtgtgtcccatagatattgaagagggctgtgtattataatttgtcctataacgaacccgtgaatccatctcgatagtaaaaaaggtagggtgggggtggttctttacagaaggatgccagttgataaaatgtagaaggaatgatggaatcagaaaaaccattttgtaactctcagtgtaaaaattgattcaggcaaaaatcattgatggtgaaaatttgttgggaaattaaatattcattggtttaaaagtatcacctcacaaattatttac

SEQ ID NO: 211099 - DNA, 411 bp, Homo sapiens
acaaaaaaaaaaaaaaaaagccccaagtacccatgcattccaaaacaaggtgctagaccacctatgcagaacctgccagcctagccatcacctatctctgctctataaaagagtgaggggaaagaagctaactgggagatggcgggtggtgtgatgtggatcctgccttgtctgtgggagatgggagttgggttcccccttcatctcaggcccaggggaagcggcatcaagggaatactcagctaatttcacacatcctcatgactggctaactaatttgtgggatccagtacaaaatgcaaatgtggggcccctttttcagaaagtaggaagagatggcattaaaagtaccaaattatttaaaggaaaaaaatcgtgccattactcttgaaaacaaatcctggtgaagca

SEQ ID NO: 211100 - DNA, 467 bp, Homo sapiens
cacgttccttatgagaatctaatacctgatgatctgacatggagcagtttcatcctgaaaccattcccacccagtccccaacccctgtctgtggaaaattgtcttccactaaaccagtccccagtaccaaaatggttggggaccacccatatatattatttcacacatgagcaagtatttctagaaatgggagtgctaggtcaaaaggcacgtgcattttaagttttgataggtgtggccacattatcctatatagatgtttaaccagtttatattcccatagaaatatataagagtgactctttctgctagcttcaccaacaatatgttattaaacttttggttttgtgtatttcatatgaagcatctttttgtttgagagctatttgtattttctgttaactgtctttgcatatcctttgctcattttctgctgtgtcattggtcttactgacgtataggagttc

SEQ ID NO: 211101 - DNA, 227 bp, Homo sapiens
gaaatatgaactggaaaatagtttctcttctaattaatccatttaaagagcttttaaatgtcctattcttggtattgaatggccatagattaaaggtttaattagtagtccctactacttgggaggctgaagcaggaggattgcttgagcccaggaggtggaggctgcagtgagctgtgattgcaccactgcattccacctcgagcaacagagagagatcctgtctc

SEQ ID NO: 211102 - DNA, 591 bp, Homo sapiens
gcggaaaatatttattgagcttcttttgtgtgcaatgaacatattagagaaaagacttctctcatggagactattttctagttggagaggacagatgataggttaaagaagtgaagtaccaaatactacagacaacggagcggggaaggaaagcaggagtgctggggtcactgagaaagtgaacacctgaaggaagcgagggaatgaggcaggagggtatctgtgggaagtgcactgaggcaggggccatcaagtgcccaggctctcaggtcttacctggagatcacagatctccactgtgttggagatcactgtggctggagttataatggcagcgggcaggtagagacaaaggtttgagatggaaaaaagtccagatcatgtcctgtttgtagaccatcataaggacctggctttcctgagtgaggcaggaagtcatctgagggttgtgagcagacgagtcacatgacttgacttgggtttcaacaggactattttggctgctgttgaggagggacaagggcagacacaggacactatgccactacaacacatttcagagatgatgctggcttggactagaatggtgta

SEQ ID NO: 211103 - DNA, 537 bp, Homo sapiens
ggaattgtgaattgaagtttcccaagacttcacgtaggatttggaaactttcaagactggaacagccagaaagtagaatcctcattgaacacttgcaacattcagacaagatccaaggaaagctacactgttttaaagtctcgctctgtcaccaggttggagtgcagtggcgcaatctcagctaactgcaacctctgcctcccgagttccagcgattctcctgcctcaacctccctaggagccgggactacagatgcatggagtcatgggagaagtccatgtgaagaagaagcagagattggaatgatgtatttacaagccaaggaatgacaattgccagcagccaccagaagcaagaggcaaggaagtgttcttccctagagctttgggaaagagcatgcccagtcgacacctcgatttggactttagcctcaagagtatgagaacagatttatattgttttaagtcacccagtttgtggcaatttgttacagaagccctaagaaactaataaatacatactttaaaagtttaaaa

SEQ ID NO: 211104 - DNA, 705 bp, Homo sapiens
tctaattttgtttgagtgtttttatttttaaggcaaaggaatgaatagtacggggaacccaatgtatctgtcagcaaaccatcagcttcatattttatttattcctcacactttttgtgttaatatattttaaaacaaatcccagacactatttcacccataaatatttcattgtttatctttcaaagaaaaggacttgtgtctttttcccggcataaccacagtaccattataaccaaattaataataattccttgatagcacctaatttatatgaactggccaaacagtacatctggccttagggctgtctatagattctaactcttaagtaagatgttatgttttatgtatttactactgcacagttatcattttaataaaattcacggttccaagatggctgaataggaacagctctggtctgcacctcccagcgtgattgatgcagaagatgggtgatttctgcatttccaactgagctctgaagagagcagtggctctcccagcacggtgttggcgccgacatggcaaacacttccaaaggggcctaacctgtgcactacttggaacccccatagggccatgccctctacgggtgccaggccgttcgccatctgtgccacatgtctggccctggaccacaggtgggccccacacaacaacgcggtaacacggtcacacccactgtagccacgacttcct

SEQ ID NO: 211105 - DNA, 226 bp, Homo sapiens
tggggcaggagccgcacgtgcttattaaggttggatcagtggatacactcatcccctggatctgggagcaaactggaatcaacagtgccaccaagtggcagccagctaataagcaagttgaaacactaagactgcaacttctagtgctttgcccaaatatctctgtctcttactctttttctttctaaaaataagatcaagtatattttcctagggtggatataga

SEQ ID NO: 211106 - DNA, 1517 bp, Homo sapiens
ctccctgtggtatctatttacatctatttacagcatggtttactgaatattttaagcccactgtaaaacatactgttcagagattcctttcaagatattaccactgataatgaacctactaaccaagagctcttatggaggtataaacaagattggcgttttcatgtctgctaaccgcagcccatggattctggaataattctgactttcaagtcttattatttaagaaatacatttcataaggctatagctgccactaataatgcttcttctgagggatctggataaattaagttgcagaccttgcagaaaggattctccattctagatgccattaacaacatttatgattcatggaaggaggtcaaaatatcaacattaaggcaggtgtggtggtgtgtgcctggagtcttggctactcaggaggcataggaaggaggatcacttgaggccaggagttcaaggctacagtgtgctctcatcgtgctggtgaatacccacttgtactccagcatgaacaacacagcgagaccttgttctctaaaaaaaatttttttaattaaaaaaataaaaaccaacattaaccagagtttggaagaagttgattccaaccttcataggtgactctgaggggttcaagtcttcagtggaaaaagtaactgtggatgtgatggaaaaaagagaactagaattagaagtggagcctgaagatgtgacagaattgtttcaatctcgtgaaaaaacttgaacagatgagaggctgctttgtatagataagcaaagaaagtggtttcctgaaatgaaatctactcctgaagatgctgtgaacattgttgaaaagacaacagacttagaatattacatcaacttagttgatcaagcagtggcgaagtttgagaggattaagtccaattctaaaagaagttccactatgcgtaaaatgttatcaaacagcgtcgaatgctaaagagaagtttttcatgtaatgaagagtcaatcaatgcagcaatcttcactgctgtcttattttaagaaactgccacagccaccctgatcaacagccatcaacactgaggcaagacctaccacaagcaaaaagattacaactcaccaaagtctcacatgatcattagcactttttggcaataaagtattttaaactaaggtactttacttagacataacacaactgcacacaagagactaccatatgatgtaaacctaacttatatgcactgggaaaccaaaacatttgtatgattcatgttattgtgatattcactttatagtggtagtctggaacaaaactcacaatatctacagggcatgcctgtatcttgtatcaataggtttctcttctccattgcaacatcttatatacttagaaaggcctaaggaaataatgagggctttctgtgttttctacattgtatggccccatggtgagttctcaaatgttggattgtgaccacaatccaatcccttgagaaaagaatgtgtattaacaacgacttaca

SEQ ID NO: 211107 - DNA, 560 bp, Homo sapiens
tgagccaccgtgcccagcctaccgcagttttttttaaagggcatatggttcattttttccctctgccaagagggatgtgcagcatgagtgagaacaaagtctgttttgaactactgaggtttgagtttgttccagcagcataacctagcacatcctgactgataaggatcataaggaccataactgcccttggagttggagaacaggagcagatttgagaggtagaggattagaaggtgatatgttgcatgtgaaggtggggagaaagccagaggtctcacaggcgtgtctggtttggaccactatgtagttgatgatgctgtttacaaaactggaaatggaatccaaaagattcaggagagattacttttgttttggacatgttgagtttttaggggagacatccagtgtgtacgtgtttttacaatgcctggcacatagtaggtgctccataaatcagtgaccctagatcagtgatccgggtcagtaacacagggagataggtcaggtactagattaaagctaggggtgtgaggctgaggagtcttatcataagactg

SEQ ID NO: 211108 - DNA, 949 bp, Homo sapiens
  misc_feature (22)..(22): n is a, c, g, or t
  misc_feature (85)..(85): n is a, c, g, or t
  misc_feature (114)..(114): n is a, c, g, or t
  misc_feature (149)..(149): n is a, c, g, or t
  misc_feature (222)..(222): n is a, c, g, or t
  misc_feature (231)..(231): n is a, c, g, or t
  misc_feature (234)..(234): n is a, c, g, or t
aacgtgatgtctcttcccgggnacacccatttgcagaggcccagcccatccgctggagccactggattctggagcacgccgtggnactgacccgagactctgagcggctgctgnaggtgcggaagcggatcaatgtcctgcccctgggnagtggggccattgcaggcaatcccctgggtgtggaccgagagctgctccgagcagtactcaactttggggccnttactctcnacngcatggatgccactagtgagcgggactttgtggccgagttcctgttctgggcttcgctgtgcatgacccatctcagcaggatggccgaggacctcatcctctactgcaccaaggaattcagcttcgtgcagctctcagatgcctacagcacgggaagcagcctgatgccccagaagaaaaaccccgacagtttggagctgatccggagcaaggctgggcgtgtgtttgggcggtgtgccgggctcctgatgaccctcaagggacttcccagcacctacaacaaagacttacaggaggacaaggaagctgtgtttgaagtgtcagacactatgagtgccgtgctccaggtggccactggcgtcatctctacgctgcagattcaccaagagaacatgggacaggctctcagccccgacatgctggccactgaccttgcctattacctggtccgcaaagggatgccattccgccaggcccacgaggcctccgggaaagctgtgttcatggccgagaccaagggggtcgccctcaaccagctgtcactgcaggagctgcagaccatcagccccctgttctcgggcgacgtgatctgcgtgtgggactacgggcacagtgtggagcagtatggtgccctgggcggcactgcgcgctccagcgtcgactggcagatccgccaggtgcgggcgctactgcaggcacagcaggcctaggtcct

SEQ ID NO: 211109 - DNA, 889 bp, Homo sapiens
  misc_feature (22)..(22): n is a, c, g, or t
  misc_feature (85)..(85): n is a, c, g, or t
  misc_feature (114)..(114): n is a, c, g, or t
  misc_feature (149)..(149): n is a, c, g, or t
  misc_feature (222)..(222): n is a, c, g, or t
  misc_feature (231)..(231): n is a, c, g, or t
  misc_feature (234)..(234): n is a, c, g, or t
aacgtgatgtctcttcccgggnacacccatttgcagaggcccagcccatccgctggagccactggattctggagcacgccgtggnactgacccgagactctgagcggctgctgnaggtgcggaagcggatcaatgtcctgcccctgggnagtggggccattgcaggcaatcccctgggtgtggaccgagagctgctccgagcagtactcaactttggggccnttactctcnacngcatggatgccactagtgagcgggactttgtggccgagttcctgttctgggcttcgctgtgcatgacccatctcagcaggatggccgaggacctcatcctctactgcaccaaggaattcagcttcgtgcagctctcagatgcctacagcacgggaagcagcctgatgccccagaagaaaaaccccgacagtttggagctgatccggagcaaggctgggcgtgtgtttgggcgggaggacaaggaagctgtgtttgaagtgtcagacactatgagtgccgtgctccaggtggccactggcgtcatctctacgctgcagattcaccaagagaacatgggacaggctctcagccccgacatgctggccactgaccttgcctattacctggtccgcaaagggatgccattccgccaggcccacgaggcctccgggaaagctgtgttcatggccgagaccaagggggtcgccctcaaccagctgtcactgcaggagctgcagaccatcagccccctgttctcgggcgacgtgatctgcgtgtgggactacgggcacagtgtggagcagtatggtgccctgggcggcactgcgcgctccagcgtcgactggcagatccgccaggtgcgggcgctactgcaggcacagcaggcctaggtcct

SEQ ID NO: 211110 - DNA, 372 bp, Homo sapiens
tgaccttttccattatacagttccaggttttcacttgtcatgtatctggttttactttggaatgatgcagatatccagttccccatcaaacgtccacataatagttttgccactatttaagtgcaattaaaaatgtagattttcatcagaaaaaaatgttggattgctattccattcttctaagaacctagtactgaatgcagtatttggttcatctgctatatgcctgatgctttttcccttttgaaaaactttagtcctaaaagtcgttggatttttcattcattctataaaatctttttatttcagtctggattcaaagtggtaacagaaaagtcctaggaataaaaaagcctgtagctatccttcctt

SEQ ID NO: 211111 - DNA, 1156 bp, Homo sapiens
gagctcccaccccgccccgcccccagggggcgccccgggcccggcgcgagaggaggcagagggggcgtcaggccgcgggagaggaggccatgggcgcgcgcggggcgctgctgctggcgctgctgctggctcgggctggactcaggaagccggagtcgcaggaggcggcgccgttatcaggaccatgcggccgacgggtcatcacgtcgcgcatcgtgggtggagaggacgccgaactcgggcgttggccgtggcaggggagcctgcgcctgtgggattcccacgtatgcggagtgagcctgctcagccaccgctgggcactcacggcggcgcactgctttgaaacctatagtgaccttagtgatccctccgggtggatggtccagtttggccagctgacttccatgccatccttctggagcctgcaggcctactacacccgttacttcgtatcgaatatctatctgagccctcgctacctggggaattcaccctatgacattgccttggtgaagctgtctgcacctgtcacctacactaaacacatccagcccatctgtctccaggcctccacatttgagtttgagaaccggacagactgctgggtgactggctgggggtacatcaaagaggatgaggcactgccatctccccacaccctccaggaagttcaggtcgccatcataaacaactctatgtgcaaccacctcttcctcaagtacagtttccgcaaggacatctttggagacatggtttgtgctggcaatgcccaaggcgggaaggatgcctgcttcggtgactcaggtggacccttggcctgtaacaagaatggactgtggtatcagattggagtcgtgagctggggagtgggctgtggtcggcccaatcggcccggtgtctacaccaatatcagccaccactttgagtggatccagaagctgatggcccagagtggcatgtcccagccagacccctcctggccactactctttttccctcttctctgggctctcccactcctggggccggtctgagcctacctgagcccatgcagcctggggccactgccaagtcaggccctggttctcttctgtcttgtttggtaataaacacattccagttgatgccttgcagggcattcttcaaaagcaaaaac

SEQ ID NO: 211112 - DNA, 1130 bp, Homo sapiens
gagctcccaccccgccccgcccccagggggcgccccgggcccggcgcgagaggaggcagagggggcgtcaggccgcgggagaggaggccatgggcgcgcgcggggcgctgctgctggcgctgctgctggctcgggctggactcaggaagccggagtcgcaggaggcggcgccgttatcaggaccatgcggccgacgggtcatcacgtcgcgcatcgtgggtggagaggacgccgaactcgggcgttggccgtggcaggggagcctgcgcctgtgggattcccacgtatgcggagtgagcctgctcagccaccgctgggcactcacggcggcgcactgctttgaaacctatagtgaccttagtgatccctccgggtggatggtccagtttggccagctgacttccatgccatccttctggagcctgcaggcctactacacccgttacttcgtatcgaatatctatctgagccctcgctacctggggaattcaccctatgacattgccttggtgaagctgtctgcacctgtcacctacactaaacacatccagcccatctgtctccaggcctccacatttgagtttgagaaccggacagactgctgggtgactggctgggggtacatcaaagaggatgagggaagttcaggtcgccatcataaacaactctatgtgcaaccacctcttcctcaagtacagtttccgcaaggacatctttggagacatggtttgtgctggcaatgcccaaggcgggaaggatgcctgcttcggtgactcaggtggacccttggcctgtaacaagaatggactgtggtatcagattggagtcgtgagctggggagtgggctgtggtcggcccaatcggcccggtgtctacaccaatatcagccaccactttgagtggatccagaagctgatggcccagagtggcatgtcccagccagacccctcctggccactactctttttccctcttctctgggctctcccactcctggggccggtctgagcctacctgagcccatgcagcctggggccactgccaagtcaggccctggttctcttctgtcttgtttggtaataaacacattccagttgatgccttgcagggcattcttcaaaagcaaaaac

SEQ ID NO: 211113 - DNA, 1032 bp, Homo sapiens
gagctcccaccccgccccgcccccagggggcgccccgggcccggcgcgagaggaggcagagggggcgtcaggccgcgggagaggaggccatgggcgcgcgcggggcgctgctgctggcgctgctgctggctcgggctggactcaggaagccggagtcgcaggaggcggcgccgttatcaggaccatgcggccgacgggtcatcacgtcgcgcatcgtgggtggagaggacgccgaactcgggcgttggccgtggcaggggagcctgcgcctgtgggattcccacgtatgcggagtgagcctgctcagccaccgctgggcactcacggcggcgcactgctttgaaacgcctactacacccgttacttcgtatcgaatatctatctgagccctcgctacctggggaattcaccctatgacattgccttggtgaagctgtctgcacctgtcacctacactaaacacatccagcccatctgtctccaggcctccacatttgagtttgagaaccggacagactgctgggtgactggctgggggtacatcaaagaggatgaggcactgccatctccccacaccctccaggaagttcaggtcgccatcataaacaactctatgtgcaaccacctcttcctcaagtacagtttccgcaaggacatctttggagacatgggtgactcaggtggacccttggcctgtaacaagaatggactgtggtatcagattggagtcgtgagctggggagtgggctgtggtcggcccaatcggcccggtgtctacaccaatatcagccaccactttgagtggatccagaagctgatggcccagagtggcatgtcccagccagacccctcctggccactactctttttccctcttctctgggctctcccactcctggggccggtctgagcctacctgagcccatgcagcctggggccactgccaagtcaggccctggttctcttctgtcttgtttggtaataaacacattccagttgatgccttgcagggcattcttcaaaagcaaaaac

SEQ ID NO: 211114 - DNA, 1360 bp, Homo sapiens
gcacacacgcgaggggaccctgggtgggcaaaaacgtgctttcccggacggggttgaaggggagaaagggagaggtcgggcttggggggctgcctcccgcggctcagcagttcctctgaccatccgaggaccatgcggccgacgggtcatcacgtcgcgcatcgtgggtggagaggacgccgaactcgggcgttggccgtggcaggggagcctgcgcctgtgggattcccacgtatgcggagtgagcctgctcagccaccgctgggcactcacggcggcgcactgctttgaaacctatagtgaccttagtgatccctccgggtggatggtccagtttggccagctgacttccatgccatccttctggagcctgcaggcctactacacccgttacttcgtatcgaatatctatctgagccctcgctacctggggaattcaccctatgacattgccttggtgaagctgtctgcacctgtcacctacactaaacacatccagcccatctgtctccaggcctccacatttgagtttgagaaccggacagactgctgggtgactggctgggggtacatcaaagaggatgaggcactgccatctccccacaccctccaggaagttcaggtcgccatcataaacaactctatgtgcaaccacctcttcctcaagtacagtttccgcaaggacatctttggagacatggtttgtgctggcaatgcccaaggcgggaaggatgcctgcttcgtgagtgtccttgccaccactcccagcccaggaaagcatcctgtgtccctgtgccttatttgaccctcatgccaaccccgggaggtggagactgttgccccactctgcagatgcagaaacggaggcttggctgctgccagggggaggaggaggatgtgcacccagtctacccagccccatagcccttcccactctcagcccctcccctgccccactcactctgccccaggctgacctcagccccgctgctccccagggtgactcaggtggacccttggcctgtaacaagaatggactgtggtatcagattggagtcgtgagctggggagtgggctgtggtcggcccaatcggcccggtgtctacaccaatatcagccaccactttgagtggatccagaagctgatggcccagagtggcatgtcccagccagacccctcctggccactactctttttccctcttctctgggctctcccactcctggggccggtctgagcctacctgagcccatgcagcctggggccactgccaagtcaggccctggttctcttctgtcttgtttggtaataaacacattccagttgatgccttgcagggcattcttcaaaagcaaaaac

SEQ ID NO: 211115 - DNA, 1067 bp, Homo sapiens
  misc_feature (1011)..(1011): n is a, c, g, or t
gagctcccaccccgccccgcccccagggggcgccccgggcccggcgcgagaggaggcagagggggcgtcaggccgcgggagaggaggccatgggcgcgcgcggggcgctgctgctggcgctgctgctggctcgggctggactcaggaagccggagtcgcaggaggcggcgccgttatcaggaccatgcggccgacgggtcatcacgtcgcgcatcgtgggtggagaggacgccgaactcgggcgttggccgtggcaggggagcctgcgcctgtgggattcccacgtatgcggagtgagcctgctcagccaccgctgggcactcacggcggcgcactgctttgaaacctatagtgaccttagtgatccctccgggtggatggtccagtttggccagctgacttccatgccatccttctggagcctgcaggcctactacacccgttacttcgtatcgaatatctatctgagccctcgctacctggggaattcaccctatgacattgccttggtgaagctgtctgcacctgtcacctacactaaacacatccagcccatctgtctccaggcctccacatttgagtttgagaaccggacagactgctgggtgactggctgggggtacatcaaagaggatgagggttgctgtctctctccttcccactatcgtccgcacagcactgccatctccccacaccctccaggaagttcaggtcgccatcataaacaactctatgtgcaaccacctcttcctcaagtacagtttccgcaaggacatctttggagacatggtttgtgctggcaatgcccaaggcgggaaggatgcctgcttcgtgagtgtccttgccaccactcccagcccaggaaagcatcctgtgtccctgtgccttatttgaccctcatgccaaccccgggaggtggagactgttgccccactctgcagatgcagaaacggaggcttggctgctgccagggggaggaggaggatgtgcacccagtctacccagccccancccgggctctggcaagctggaagtgaatctcatcaggaggtttcaaagcctctgaa

SEQ ID NO: 211116 - DNA, 1114 bp, Homo sapiens
gagctcccaccccgccccgcccccagggggcgccccgggcccggcgcgagaggaggcagagggggcgtcaggccgcgggagaggaggccatgggcgcgcgcggggcgctgctgctggcgctgctgctggctcgggctggactcaggaagccggagtcgcaggaggcggcgccgttatcaggaccatgcggccgacgggtcatcacgtcgcgcatcgtgggtggagaggacgccgaactcgggcgttggccgtggcaggggagcctgcgcctgtgggattcccacgtatgcggagtgagcctgctcagccaccgctgggcactcacggcggcgcactgctttgaaacctatagtgaccttagtgatccctccgggtggatggtccagtttggccagctgacttccatgccatccttctggagcctgcaggcctactacacccgttacttcgtatcgaatatctatctgagccctcgctacctggggaattcaccctatgacattgccttggtgaagctgtctgcacctgtcacctacactaaacacatccagcccatctgtctccaggcctccacatttgagtttgagaaccggacagactgctgggtgactggctgggggtacatcaaagaggatgaggcactgccatctccccacaccctccaggaagttcaggtcgccatcataaacaactctatgtgcaaccacctcttcctcaagtacagtttccgcaaggacatctttggagacatgggtgactcaggtggacccttggcctgtaacaagaatggactgtggtatcagattggagtcgtgagctggggagtgggctgtggtcggcccaatcggcccggtgtctacaccaatatcagccaccactttgagtggatccagaagctgatggcccagagtggcatgtcccagccagacccctcctggccactactctttttccctcttctctgggctctcccactcctggggccggtctgagcctacctgagcccatgcagcctggggccactgccaagtcaggccctggttctcttctgtcttgtttggtaataaacacattccagttgatgccttgcagggcattcttcaaaagcaaaaac

SEQ ID NO: 211117 - DNA, 1449 bp, Homo sapiens
gagctcccaccccgccccgcccccagggggcgccccgggcccggcgcgagaggaggcagagggggcgtcaggccgcgggagaggaggccatgggcgcgcgcggggcgctgctgctggcgctgctgctggctcgggctggactcaggaagccggagtcgcaggaggcggcgccgttatcaggaccatgcggccgacgggtcatcacgtcgcgcatcgtgggtggagaggacgccgaactcgggcgttggccgtggcaggggagcctgcgcctgtgggattcccacgtatgcggagtgagcctgctcagccaccgctgggcactcacggcggcgcactgctttgaaacctatagtgaccttagtgatccctccgggtggatggtccagtttggccagctgacttccatgccatccttctggagcctgcaggcctactacacccgttacttcgtatcgaatatctatctgagccctcgctacctggggaattcaccctatgacattgccttggtgaagctgtctgcacctgtcacctacactaaacacatccagcccatctgtctccaggcctccacatttgagtttgagaaccggacagactgctgggtgactggctgggggtacatcaaagaggatgagggttgctgtctctctccttcccactatcgtccgcacagcactgccatctccccacaccctccaggaagttcaggtcgccatcataaacaactctatgtgcaaccacctcttcctcaagtacagtttccgcaaggacatctttggagacatggtttgtgctggcaatgcccaaggcgggaaggatgcctgcttcgtgagtgtccttgccaccactcccagcccaggaaagcatcctgtgtccctgtgccttatttgaccctcatgccaaccccgggaggtggagactgttgccccactctgcagatgcagaaacggaggcttggctgctgccagggggaggaggaggatgtgcacccagtctacccagccccatagcccttcccactctcagcccctcccctgccccactcactctgccccaggctgacctcagccccgctgctccccagggtgactcaggtggacccttggcctgtaacaagaatggactgtggtatcagattggagtcgtgagctggggagtgggctgtggtcggcccaatcggcccggtgtctacaccaatatcagccaccactttgagtggatccagaagctgatggcccagagtggcatgtcccagccagacccctcctggccactactctttttccctcttctctgggctctcccactcctggggccggtctgagcctacctgagcccatgcagcctggggccactgccaagtcaggccctggttctcttctgtcttgtttggtaataaacacattccagttgatgccttgcagggcattcttcaaaagcaaaaac

SEQ ID NO: 211118 - DNA, 346 bp, Homo sapiens
caaaatcctccctcacatctcctctaggttaggggccaactaaatgttttgatttaaaagatgtggctgggcgcagtggctcatgcctgtaatcccagcccttagggaggccgaggcaggcagatcacctgaggtcaggagttggaggacagcctggccaatatagtgaaaccctatctctactaaaaatacaaaaattagccaagcatggtggcacatacctgtaatcccagctactcaggaggctgaggcaggagaatcgcttaaacccaggagatggaggttgcagtgagccaagatcatgccaccgcactccagtctagatgacagagtaaagctctgtctc

SEQ ID NO: 211119 - DNA, 467 bp, Homo sapiens
catttagggttttgggcacagcatttgcctgacaccgctgcctggtatactccatttaagcagcaattgttggcttgttagtgagtgcttttggacacttagacactaacaaagaaagcatcagcaggtattgttatattctgacatgtccattcttggatggatcaaaaatgaaaacatcaacaaagaaggtaatgctcagcgagcatccattatttaatggaaatggtatatccaagaaagaagtaaactggacatattattattattgttattattattattatttttgagacggatacttgttctgtcgcccaggctggagtgcagtggcacgatctcggctcactgcaacctctgtctcccaggagaatgatgtgaacctgggaggcggagcttgccgggagccaagatggcgccactgcactgcagcctgggtgagagcgagactccgtctcaaaaaaact

SEQ ID NO: 211120 - DNA, 484 bp, Homo sapiens
tctgaatgttatcaatgtggtggtaataatggtggtgtcgatgttgtgtggggtaaaatttgaatacagtgaaatacccagggcttaattgggttagtttttaaaaattacatttatgtaaccatatttcagtcaaggtgtagactatgtccatcagcacagagttcccatgttttcccttccagtgaatctccatcccccattagaacagacaataactgtcctaattactgtcactgtagcttacttttgtctgctctagaatttcttatgaatggaatcttatgtacttgtactgcatgaagactctttagattcatccatgttattgcattgatttatagtgccttttaaaaaattatagagtagtgttgcattatatgaatacgcaaagtgttttttttttacctgttggtggacagttggattgtttccagtttgggactattgtgaataaagctgtgtagtcttattgtggaaatgt

SEQ ID NO: 211121 - DNA, 200 bp, Homo sapiens
ggacaagggaaggatcaatgtcatcaactcactgaacaaagtcagactggactagggctgagtcgaattatgccaggaaaatgtgttctctaggccaaagggtagggcactggatggaaaaatcagcccctcagagagctgaaagagggtttctggatggaaacagggcattccaggccagactgggctgagccatcaag

SEQ ID NO: 211122 - DNA, 918 bp, Homo sapiens
gacagagtgagaccctatctcaaaaaacaaaatgaaacaaaaagtttctcttattctggtgattttttttttattagttgtcttgcttcccttttccatatttgtattttccagatttggggttattaccttagcaggttttatataatttaaattactggattcaacattataaatgtgaagatggctaagtcatgatggccatattttgtcaaaatgctatttatatgtgaaaatgttggttttacttgacgcttattattgggtattataatttttatgtcaaagttcaggtaataaattgtgtcttactttgatttgcatttttaaattaatgagattgaaatatttggatgtcgtatgttaatttgtttcctaccttttaataatttatccattttgattatttgtatgaatttcttgggtaataatgtatcttttccatatttatcgcatgtatttttttcccattctttgctgttgtttctgttttttggagcaagggacatcgatatttcttaacttttaagtggtgggaacatcaaagaaaggtgggctgagaatacacgagtgctatgtcatgcaaattcttatgtcatatttaggggatttagacttcatcttgaaaaagctgaggaactactaaagattttttacttttaagcaccaagtgatacgatcagtttagaaagattactccaaaagcaatagagaggaaggagtagagagagttgaggctggagggcaggagatcaactaacaggctcttgtggttggtaatcttcaagaataatctgaaaaatgatggcagcctaaacaatggaagtttgaatggagaggagggatgggggtaagagagatttggtagaatagaattgagcacttgccgggaggagtcagcaggaggggagaaggaaa

SEQ ID NO: 211123 - DNA, 382 bp, Homo sapiens
ttttcttcgttattcctccatagatcagagattacttgattttaaaaaacaaaatgctagtgaaaaacaatcacctttcagacaagatcattgttttgccaggaaaaactgaagacgtctcacttcctgaggctgtagatgtgatcatttccgaaccaatgggatacatgctgttcaatgaacggatgctagagagttatcttcattccaaaaaatggctaaaatcaaatggaatgatgttcccgacattcagcgacatccacttggcccctttttctgatgaacagctctacgtggaacacttctccagagccaatttttggtaatgttcttttctcctcccttcctttcccttcaaagtaaaccagtttttaaaactatt

SEQ ID NO: 211124 - DNA, 703 bp, Homo sapiens
ttttcttcgttattcctccatagatcagagattacttgattttaaaaaacaaaatgctagtgaaaaacaatcacctttcagacaagatcattgttttgccaggaaaaactgaagacgtctcacttcctgaggctgtagatgtgatcatttccgaaccaatgggatacatgctgttcaatgaacggatgctagagagttatcttcattccaaaaaatggctaaaatcaaatggaatgatgttcccgacattcagcgacatccacttggcccctttttctgatgaacagctctacgtggaacacttctccagagccaatttttggtaccagcaatgtttctatggggtcaatctgtccagtctccagggtgctacagtggatgaatacttcaggcagccaatagtagacacatttgatgttaggattttgatggctggaacagtcaaatacacagtaaactttatggatgcagaagaggaagatctacacagatggcagtctgggctcatccatggcctggcgttctggtttgatgtggcatttgttggatctctgtatgtataccccccaccaacattttctcagtctgctctaccccatgctatctactatttgtaatcacaattttaaagtgtttaataagtgattttaatgacactaattcttgtttctccaattttcaaggaaataaacaccgatgttaa

SEQ ID NO: 211125 - DNA, 256 bp, Homo sapiens
tgccacagcccagctccaaccccaaacccagaccctgccctccgtgctttgattccgtcccctttctttctccagccgcagaggcggcgctgctcccccaaaacgacacgcgcttggaccccgaagcctatggcgccccgtgcgcgcgcggctcgcagccctggcaggtctcgctcttcaacggcctctcgttccactgcgcgggtgtcctggtggaccagagttgggtactacgctttggcagggtaccgagctc

SEQ ID NO: 211126 - DNA, 3122 bp, Homo sapiens
  misc_feature (5)..(7): n is a, c, g, or t
  misc_feature (2229)..(2229): n is a, c, g, or t
ggccnnncatcctgccacccctagccttgctggggacgtgaaccctctccccgcgcctgggaagccttcttggcaccgggacccggagaatccccacggaagccagttccaaaagggatgaaaagggggcgtttcgggcactgggagaagcctgtattccagggcccctcccagagcaggaatctgggacccaggagtgccagcctcacccacgatcctggccatgagagctccgcacctccacctctccgccgcctctggcgcccgggctctggcgaagctgctgccgctgctgatggcgcaactctgggccgcagaggcggcgctgctcccccaaaacgacacgcgcttggaccccgaagcctatggcgccccgtgcgcgcgcggctcgcagccctggcaggtctcgctcttcaacggcctctcgttccactgcgcgggtgtcctggtggaccagagttgggtgctgacggccgcgcactgcggaaacaagccactgtgggctcgagtaggggatgaccacctgctgcttcttcagggcgagcagctccgccggacgactcgctctgttgtccatcccaagtaccaccagggctcaggccccatcctgccaaggcgaacggatgagcacgatctcatgttgctaaagctggccaggcccgtagtgccggggccccgcgtccgggccctgcagcttccctaccgctgtgctcagcccggagaccagtgccaggttgctggctggggcaccacggccgcccggagagtgaagtacaacaagggcctgacctgctccagcatcactatcctgagccctaaagagtgtgaggtcttctaccctggcgtggtcaccaacaacatgatatgtgctggactggaccggggccaggacccttgccagagtgactctggaggccccctggtctgtgacgagaccctccaaggcatcctctcgtggggtgtttacccctgtggctctgcccagcatccagctgtctacacccagatctgcaaatacatgtcctggatcaataaagtcatacgctccaactgatccagatgctacgctccagctgatccagatgttatgctcctgctgatccagatgcccagaggctccatcgtccatcctcttcctccccagtcggctgaactctccccttgtctgcactgttcaaacctctgccgccctccacacctctaaacatctcccctctcacctcattcccccacctatccccattctctgcctgtactgaagctgaaatgcaggaagtggtggcaaaggtttattccagagaagccaggaagccggtcatcacccagcctctgagagcagttactggggtcacccaacctgacttcctctgccactccccgctgtgtgactttgggcaagccaagtgccctctctgaacctcagtttcctcatctgcaaaatgggaacaatgacgtgcctacctcttagacatgttgtgaggagactatgatataacatgtgtatgtaaatcttcatggtgattgtcatgtaaggcttaacacagtgggtggtgagttctgactaaaggttacctgttgtcgtgatctgaccacgtcccggtgaaagcgtgtgtccagggaagaagtgcacagggtagcccccagtcccaaccttccatccccaacccttagggatgatggaagaatcattttcctcaccctagttccaagtcccaggaaacaccttttaaccacttccttctcatctcccactgtttcccacttctggttccacccaacaccagttcctcctgccttggcacgagctaggctggccctgagtcattagcaccttttctgccttcatgaggccactgaactcaagggacctcaccttgcttccatcccagcctctaagaccagagggccgagggggtagtgaagattggggaacccttgccacctcaactgcccagcttgtgccaagaaacctccctctgacatttaggggaaaatctttggtttgtctgttattaattggctgtgagattttcgtcctgaaaacttgggaggaggaattgtttgattctccctgaaattgggggagggaaggggagttaatacacagaatccaggtaaggctaatagaagcttcagtgtccgctgggtgtggtggctcacgcctgtaatcctagcactttgggaggccgaggaaagcagatcatctgaggtcaggtgttcgagaccagnctggcaaaatggtgaaatcccatctctactgaaaatacaaaaactagccaggcatggtggcaggcacctataatcccatctacttgggaggctgaggcagaagaatcacttgaacccggggggcagaggttgcagtgagccaagattgcaccattgcactccatccagcctggacaaaagagcaaaactccatctcaaaaaaagaagaagtttgagtgtctcagcttatcctgaactttgaagcagtaacataagctagctgaatataggcacaacagaaatttcccattaagcacggggtttttgtttgtttgtttgtcctttcagttaccaatttatggagcatctattatgtgccaggcccagtgctgggtgctggggacatacgtaggggtgatcacaaggtcccccaccctgcagagcccacaggaggttgatgtacaaggtctgagcacacagctcccttccgtggcctctttcccattctgcccccattagcacacgcaggaaatgtcagacaggcgtatcagctgggtttgtcatccaaagaccagaagcgaggtcggtggaaacttgaaaactcgattcattattaaaggcaactcacccgtccctttagtcactccacaatgtttatcgagccacgtcttatgccaggcctcaaagatgaatcagaccaggcactaccctcaaggagctgctagttaggtcagggagacaggccagtcttacattcctgtcattcaggtctccactcaaaagtcacctcctccgggaggccttcctgaattgcccaggctataggagtccacttttggtcatccagtcccgatgctctgttttttgtttgtttgtttttttttaatagcacctattatacctgaaattatctc

SEQ ID NO: 211127 - DNA, 2394 bp, Homo sapiens
  misc_feature (1501)..(1501): n is a, c, g, or t
gtgtggagggcggcagaggtttgaacagttgctggctggggcaccacggccgcccggagagtgaagtacaacaagggcctgacctgctccagcatcactatcctgagccctaaagagtgtgaggtcttctaccctggcgtggtcaccaacaacatgatatgtgctggactggaccggggccaggacccttgccagagtgactctggaggccccctggtctgtgacgagaccctccaaggcatcctctcgtggggtgtttacccctgtggctctgcccagcatccagctgtctacacccagatctgcaaatacatgtcctggatcaataaagtcatacggctccagctgatccagatgttatgctcctgctgatccagatgcccagaggctccatcgtccatcctcttcctccccagtcggctgaactctccccttgtctgcactgttcaaacctctgccgccctccacacctctaaacatctcccctctcacctcattcccccacctatccccattctctgcctgtactgaagctgaaatgcaggaagtggtggcaaaggtttattccagagaagccaggaagccggtcatcacccagcctctgagagcagttactggggtcacccaacctgacttcctctgccactccccgctgtgtgactttgggcaagccaagtgccctctctgaacctcagtttcctcatctgcaaaatgggaacaatgacgtgcctacctcttagacatgttgtgaggagactatgatataacatgtgtatgtaaatcttcatggtgattgtcatgtaaggcttaacacagtgggtggtgagttctgactaaaggttacctgttgtcgtgatctgaccacgtcccggtgaaagcgtgtgtccagggaagaagtgcacagggtagcccccagtcccaaccttccatccccaacccttagggatgatggaagaatcattttcctcaccctagttccaagtcccaggaaacaccttttaaccacttccttctcatctcccactgtttcccacttctggttccacccaacaccagttcctcctgccttggcacgagctaggctggccctgagtcattagcaccttttctgccttcatgaggccactgaactcaagggacctcaccttgcttccatcccagcctctaagaccagagggccgagggggtagtgaagattggggaacccttgccacctcaactgcccagcttgtgccaagaaacctccctctgacatttaggggaaaatctttggtttgtctgttattaattggctgtgagattttcgtcctgaaaacttgggaggaggaattgtttgattctccctgaaattgggggagggaaggggagttaatacacagaatccaggtaaggctaatagaagcttcagtgtccgctgggtgtggtggctcacgcctgtaatcctagcactttgggaggccgaggaaagcagatcatctgaggtcaggtgttcgagaccagnctggcaaaatggtgaaatcccatctctactgaaaatacaaaaactagccaggcatggtggcaggcacctataatcccatctacttgggaggctgaggcagaagaatcacttgaacccggggggcagaggttgcagtgagccaagattgcaccattgcactccatccagcctggacaaaagagcaaaactccatctcaaaaaaagaagaagtttgagtgtctcagcttatcctgaactttgaagcagtaacataagctagctgaatataggcacaacagaaatttcccattaagcacggggtttttgtttgtttgtttgtcctttcagttaccaatttatggagcatctattatgtgccaggcccagtgctgggtgctggggacatacgtaggggtgatcacaaggtcccccaccctgcagagcccacaggaggttgatgtacaaggtctgagcacacagctcccttccgtggcctctttcccattctgcccccattagcacacgcaggaaatgtcagacaggcgtatcagctgggtttgtcatccaaagaccagaagcgaggtcggtggaaacttgaaaactcgattcattattaaaggcaactcacccgtccctttagtcactccacaatgtttatcgagccacgtcttatgccaggcctcaaagatgaatcagaccaggcactaccctcaaggagctgctagttaggtcagggagacaggccagtcttacattcctgtcattcaggtctccactcaaaagtcacctcctccgggaggccttcctgaattgcccaggctataggagtccacttttggtcatccagtcccgatgctctgttttttgtttgtttgtttttttttaatagcacctattatacctgaaattatctc

SEQ ID NO: 211128 - DNA, 1776 bp, Homo sapiens
  misc_feature (883)..(883): n is a, c, g, or t
gggttaagaaattccctcttccttggggggggggcccccaaaaaaaagggtccaaaggtgccctctctgaacctcagtttcctcatctgcaaaatgggaacaatgacgtgcctacctcttagacatgttgtgaggagactatgatataacatgtgtatgtaaatcttcatggtgattgtcatgtaaggcttaacacagtgggtggtgagttctgactaaaggttacctgttgtcgtgatctgaccacgtcccggtgaaagcgtgtgtccagggaagaagtgcacagggtagcccccagtcccaaccttccatccccaacccttagggatgatggaagaatcattttcctcaccctagttccaagtcccaggaaacaccttttaaccacttccttctcatctcccactgtttcccacttctggttccacccaacaccagttcctcctgccttggcacgagctaggctggccctgagtcattagcaccttttctgccttcatgaggccactgaactcaagggacctcaccttgcttccatcccagcctctaagaccagagggccgagggggtagtgaagattggggaacccttgccacctcaactgcccagcttgtgccaagaaacctccctctgacatttaggggaaaatctttggtttgtctgttattaattggctgtgagattttcgtcctgaaaacttgggaggaggaattgtttgattctccctgaaattgggggagggaaggggagttaatacacagaatccaggtaaggctaatagaagcttcagtgtccgctgggtgtggtggctcacgcctgtaatcctagcactttgggaggccgaggaaagcagatcatctgaggtcaggtgttcgagaccagnctggcaaaatggtgaaatcccatctctactgaaaatacaaaaactagccaggcatggtggcaggcacctataatcccatctacttgggaggctgaggcagaagaatcacttgaacccggggggcagaggttgcagtgagccaagattgcaccattgcactccatccagcctggacaaaagagcaaaactccatctcaaaaaaagaagaagtttgagtgtctcagcttatcctgaactttgaagcagtaacataagctagctgaatataggcacaacagaaatttcccattaagcacggggtttttgtttgtttgtttgtcctttcagttaccaatttatggagcatctattatgtgccaggcccagtgctgggtgctggggacatacgtaggggtgatcacaaggtcccccaccctgcagagcccacaggaggttgatgtacaaggtctgagcacacagctcccttccgtggcctctttcccattctgcccccattagcacacgcaggaaatgtcagacaggcgtatcagctgggtttgtcatccaaagaccagaagcgaggtcggtggaaacttgaaaactcgattcattattaaaggcaactcacccgtccctttagtcactccacaatgtttatcgagccacgtcttatgccaggcctcaaagatgaatcagaccaggcactaccctcaaggagctgctagttaggtcagggagacaggccagtcttacattcctgtcattcaggtctccactcaaaagtcacctcctccgggaggccttcctgaattgcccaggctataggagtccacttttggtcatccagtcccgatgctctgttttttgtttgtttgtttttttttaatagcacctattatacctgaaattatctc

SEQ ID NO: 211129 - DNA, 774 bp, Homo sapiens
gaggctgtgtttaaatctggccgaggagcggcagaccacaggcagggcagaggcacgtctgggtcccctccctccttcctatcggcgactcccagatcctggccatgagagctccgcacctccacctctccgccgcctctggcgcccgggctctggcgaagctgctgccgctgctgatggcgcaactctgggcctgcagatgtgctggctgctgctcccccaaaactgacactgctgcttgtgacccctgaatgcctatgtgctgcccctgttgctgctgctgctggctctgcatgcccttgtgcatgtgtctctgcatctatcaagctgtgcactctctgtatccagcttgctgctgtgtgttgtcacttgtgattgtgcaccaaagagatatgtgtgttgctttgactgtgtcctgctggccacttgctggtgcaaagctaattgccaccttgttgagtgctctgacagtacgtgggagattgaaccactcattgcttggctttctttcatgtgtgctgatgcaatgctttcctgacctgtgagcctacatcatggctccttgattggtcacaatctccgagatgattacacacctcatgtggtcttcatgtgacccaccatacctttgccaaatgtgctgcaactgtgcatgatgcaactgagtcttcagtagttatgcatcgatcatgctgtgtccatgtggccctgtatagttggcctggggtgcccccgacagttcctggggccccttgcatgacttccacttaccag

SEQ ID NO: 211130 - DNA, 1495 bp, Homo sapiens
gatcgaagacacgagcaaacataaaggctagtagaggctcggtgttaatcggccgagagcggcagaccacaggcagggcagaggcacgtctgggtcccctccctccttcctatcggcgactcccagatcctggccatgagagctccgcacctccacctctccgccgcctctggcgcccgggctctggcgaagctgctgccgctgctgatggcgcaactctgggccgcagaggcggcgctgctcccccaaaacgacacgcgcttggaccccgaagcctatggcgccccgtgcgcgcgcggctcgcagccctggcaggtctcgctcttcaacggcctctcgttccactgcgcgggtgtcctggtggaccagagttgggtgctgacggccgcgcactgcggaaacaagccactgtgggctcgagtaggggatgaccacctgctgcttcttcagggcgagcagctccgccggacgactcgctctgttgtccatcccaagtaccaccagggctcaggccccatcctgccaaggcgaacggatgagcacgatctcatgttgctaaagctggccaggcccgtagtgccggggccccgcgtccgggccctgcagcttccctaccgctgtgctcagcccggagaccagtgccaggttgctggctggggcaccacggccgcccggagagtgaagtacaacaagggcctgacctgctccagcatcactatcctgagccctaaagagtgtgaggtcttctaccctggcgtggtcaccaacaacatgatatgtgctggactggaccggggccaggacccttgccagagtgactctggaggccccctggtctgtgacgagaccctccaaggcatcctctcgtggggtgtttacccctgtggctctgcccagcatccagctgtctacacccagatctgcaaatacatgtcctggatcaataaagtcatacgctccaactgatccagatgctacgctccagctgatccagatgttatgctcctgctgatccagatgcccagaggctccatcgtccatcctcttcctccccagtcggctgaactctccccttgtctgcactgttcaaacctctgccgccctccacacctctaaacatctcccctctcacctcattcccccacctatccccattctctgcctgtactgaagctgaaatgcaggaagtggtggcaaaggtttattccagagaagccaggaagccggtcatcacccagcctctgagagcagttactggggtcacccaacctgacttcctctgccactccccgctgtgtgactttgggcaagccaagtgccctctctgaacctcagtttcctcatctgcaaaatgggaacaatgacgtgcctacctcttagacatgttgtgaggagactatgatataacatgtgtatgtaaatcttcatggtgattgtcatgtaaggcttaacacagtgggtggtgagttctgactaaaggttacctgttgtcgtg

SEQ ID NO: 211131 - DNA, 2928 bp, Homo sapiens
  misc_feature (2035)..(2035): n is a, c, g, or t
gatcgaagacacgagcaaacataaaggctagtagaggctcggtgttaatcggccgagagcggcagaccacaggcagggcagaggcacgtctgggtcccctccctccttcctatcggcgactcccagatcctggccatgagagctccgcacctccacctctccgccgcctctggcgcccgggctctggcgaagctgctgccgctgctgatggcgcaactctgggccgcagaggcggcgctgctcccccaaaacgacacgcgcttggaccccgaagcctatggcgccccgtgcgcgcgcggctcgcagccctggcaggtctcgctcttcaacggcctctcgttccactgcgcgggtgtcctggtggaccagagttgggtgctgacggccgcgcactgcggaaacaagccactgtgggctcgagtaggggatgaccacctgctgcttcttcagggcgagcagctccgccggacgactcgctctgttgtccatcccaagtaccaccagggctcaggccccatcctgccaaggcgaacggatgagcacgatctcatgttgctaaagctggccaggccctgaagtacaacaagggcctgacctgctccagcatcactatcctgagccctaaagagtgtgaggtcttctaccctggcgtggtcaccaacaacatgatatgtgctggactggaccggggccaggacccttgccagagtgactctggaggccccctggtctgtgacgagaccctccaaggcatcctctcgtggggtgtttacccctgtggctctgcccagcatccagctgtctacacccagatctgcaaatacatgtcctggatcaataaagtcatacgctccaactgatccagatgctacgctccagctgatccagatgttatgctcctgctgatccagatgcccagaggctccatcgtccatcctcttcctccccagtcggctgaactctccccttgtctgcactgttcaaacctctgccgccctccacacctctaaacatctcccctctcacctcattcccccacctatccccattctctgcctgtactgaagctgaaatgcaggaagtggtggcaaaggtttattccagagaagccaggaagccggtcatcacccagcctctgagagcagttactggggtcacccaacctgacttcctctgccactccccgctgtgtgactttgggcaagccaagtgccctctctgaacctcagtttcctcatctgcaaaatgggaacaatgacgtgcctacctcttagacatgttgtgaggagactatgatataacatgtgtatgtaaatcttcatggtgattgtcatgtaaggcttaacacagtgggtggtgagttctgactaaaggttacctgttgtcgtgatctgaccacgtcccggtgaaagcgtgtgtccagggaagaagtgcacagggtagcccccagtcccaaccttccatccccaacccttagggatgatggaagaatcattttcctcaccctagttccaagtcccaggaaacaccttttaaccacttccttctcatctcccactgtttcccacttctggttccacccaacaccagttcctcctgccttggcacgagctaggctggccctgagtcattagcaccttttctgccttcatgaggccactgaactcaagggacctcaccttgcttccatcccagcctctaagaccagagggccgagggggtagtgaagattggggaacccttgccacctcaactgcccagcttgtgccaagaaacctccctctgacatttaggggaaaatctttggtttgtctgttattaattggctgtgagattttcgtcctgaaaacttgggaggaggaattgtttgattctccctgaaattgggggagggaaggggagttaatacacagaatccaggtaaggctaatagaagcttcagtgtccgctgggtgtggtggctcacgcctgtaatcctagcactttgggaggccgaggaaagcagatcatctgaggtcaggtgttcgagaccagnctggcaaaatggtgaaatcccatctctactgaaaatacaaaaactagccaggcatggtggcaggcacctataatcccatctacttgggaggctgaggcagaagaatcacttgaacccggggggcagaggttgcagtgagccaagattgcaccattgcactccatccagcctggacaaaagagcaaaactccatctcaaaaaaagaagaagtttgagtgtctcagcttatcctgaactttgaagcagtaacataagctagctgaatataggcacaacagaaatttcccattaagcacggggtttttgtttgtttgtttgtcctttcagttaccaatttatggagcatctattatgtgccaggcccagtgctgggtgctggggacatacgtaggggtgatcacaaggtcccccaccctgcagagcccacaggaggttgatgtacaaggtctgagcacacagctcccttccgtggcctctttcccattctgcccccattagcacacgcaggaaatgtcagacaggcgtatcagctgggtttgtcatccaaagaccagaagcgaggtcggtggaaacttgaaaactcgattcattattaaaggcaactcacccgtccctttagtcactccacaatgtttatcgagccacgtcttatgccaggcctcaaagatgaatcagaccaggcactaccctcaaggagctgctagttaggtcagggagacaggccagtcttacattcctgtcattcaggtctccactcaaaagtcacctcctccgggaggccttcctgaattgcccaggctataggagtccacttttggtcatccagtcccgatgctctgttttttgtttgtttgtttttttttaatagcacctattatacctgaaattatctc

SEQ ID NO: 211132 - DNA, 3012 bp, Homo sapiens
  misc_feature (2119)..(2119): n is a, c, g, or t
gatcgaagacacgagcaaacataaaggctagtagaggctcggtgttaatcggccgagagcggcagaccacaggcagggcagaggcacgtctgggtcccctccctccttcctatcggcgactcccagatcctggccatgagagctccgcacctccacctctccgccgcctctggcgcccgggctctggcgaagctgctgccgctgctgatggcgcaactctgggccgcagaggcggcgctgctcccccaaaacgacacgcgcttggaccccgaagcctatggcgccccgtgcgcgcgcggctcgcagccctggcaggtctcgctcttcaacggcctctcgttccactgcgcgggtgtcctggtggaccagagttgggtgctgacggccgcgcactgcggaaacaagccactgtgggctcgagtaggggatgaccacctgctgcttcttcagggcgagcagctccgccggacgactcgctctgttgtccatcccaagtaccaccagggctcaggccccatcctgccaaggcgaacggatgagcacgatctcatgttgctaaagctggccaggcccgtagtgccggggccccgcgtccgggccctgcagcttccctaccgctgtgctcagcccggagaccagtgccaggttgctggctggggcaccacggccgcccggagagtgaagtacaacaagggcctgacctgctccagcatcactatcctgagccctaaagagtgtgaggtcttctaccctggcgtggtcaccaacaacatgatatgtgctggactggaccggggccaggacccttgccagagtgactctggaggccccctggtctgtgacgagaccctccaaggcatcctctcgtggggtgtttacccctgtggctctgcccagcatccagctgtctacacccagatctgcaaatacatgtcctggatcaataaagtcatacggctccagctgatccagatgttatgctcctgctgatccagatgcccagaggctccatcgtccatcctcttcctccccagtcggctgaactctccccttgtctgcactgttcaaacctctgccgccctccacacctctaaacatctcccctctcacctcattcccccacctatccccattctctgcctgtactgaagctgaaatgcaggaagtggtggcaaaggtttattccagagaagccaggaagccggtcatcacccagcctctgagagcagttactggggtcacccaacctgacttcctctgccactccccgctgtgtgactttgggcaagccaagtgccctctctgaacctcagtttcctcatctgcaaaatgggaacaatgacgtgcctacctcttagacatgttgtgaggagactatgatataacatgtgtatgtaaatcttcatggtgattgtcatgtaaggcttaacacagtgggtggtgagttctgactaaaggttacctgttgtcgtgatctgaccacgtcccggtgaaagcgtgtgtccagggaagaagtgcacagggtagcccccagtcccaaccttccatccccaacccttagggatgatggaagaatcattttcctcaccctagttccaagtcccaggaaacaccttttaaccacttccttctcatctcccactgtttcccacttctggttccacccaacaccagttcctcctgccttggcacgagctaggctggccctgagtcattagcaccttttctgccttcatgaggccactgaactcaagggacctcaccttgcttccatcccagcctctaagaccagagggccgagggggtagtgaagattggggaacccttgccacctcaactgcccagcttgtgccaagaaacctccctctgacatttaggggaaaatctttggtttgtctgttattaattggctgtgagattttcgtcctgaaaacttgggaggaggaattgtttgattctccctgaaattgggggagggaaggggagttaatacacagaatccaggtaaggctaatagaagcttcagtgtccgctgggtgtggtggctcacgcctgtaatcctagcactttgggaggccgaggaaagcagatcatctgaggtcaggtgttcgagaccagnctggcaaaatggtgaaatcccatctctactgaaaatacaaaaactagccaggcatggtggcaggcacctataatcccatctacttgggaggctgaggcagaagaatcacttgaacccggggggcagaggttgcagtgagccaagattgcaccattgcactccatccagcctggacaaaagagcaaaactccatctcaaaaaaagaagaagtttgagtgtctcagcttatcctgaactttgaagcagtaacataagctagctgaatataggcacaacagaaatttcccattaagcacggggtttttgtttgtttgtttgtcctttcagttaccaatttatggagcatctattatgtgccaggcccagtgctgggtgctggggacatacgtaggggtgatcacaaggtcccccaccctgcagagcccacaggaggttgatgtacaaggtctgagcacacagctcccttccgtggcctctttcccattctgcccccattagcacacgcaggaaatgtcagacaggcgtatcagctgggtttgtcatccaaagaccagaagcgaggtcggtggaaacttgaaaactcgattcattattaaaggcaactcacccgtccctttagtcactccacaatgtttatcgagccacgtcttatgccaggcctcaaagatgaatcagaccaggcactaccctcaaggagctgctagttaggtcagggagacaggccagtcttacattcctgtcattcaggtctccactcaaaagtcacctcctccgggaggccttcctgaattgcccaggctataggagtccacttttggtcatccagtcccgatgctctgttttttgtttgtttgtttttttttaatagcacctattatacctgaaattatctc

SEQ ID NO: 211133 - DNA, 2913 bp, Homo sapiens
  misc_feature (2020)..(2020): n is a, c, g, or t
gatcgaagacacgagcaaacataaaggctagtagaggctcggtgttaatcggccgagagcggcagaccacaggcagggcagaggcacgtctgggtcccctccctccttcctatcggcgactcccagatcctggccatgagagctccgcacctccacctctccgccgcctctggcgcccgggctctggcgaagctgctgccgctgctgatggcgcaactctgggccgcagaggcggcgctgctcccccaaaacgacacgcgcttggaccccgaagcctatggcgccccgtgcgcgcgcggctcgcagccctggcaggtctcgctcttcaacggcctctcgttccactgcgcgggtgtcctggtggaccagagttgggtgctgacggccgcgcactgcggaaacaagccactgtgggctcgagtaggggatgaccacctgctgcttcttcagggcgagcagctccgccggacgactcgctctgttgtccatcccaagtaccaccagggctcaggccccatcctgccaaggcgaacggatgagcacgatctcatgttgctaaagctggccaggcccgtagtgccggggccccgcgtccgggccctgcagcttccctaccgctgtgctcagcccggagaccagtgccaggttgctggctggggcaccacggccgcccggagagtgaagtacaacaagggcctgacctgctccagcatcactatcctgagccctaaagagtgtgaggtcttctaccctggcgtggtcaccaacaacatgatatgtgctggactggaccggggccaggacccttgccagagtgactctggaggccccctggtctgtgacgagaccctccaaggcatcctctcgtggggtgtttacccctgtggctctgcccagcatccagctgtctacacccagatctgcaaatacatgtcctggatcaataaagtcatacgctccaactgatccagatgctacgctccagctgatccagatgttatgctcctgctgatccagatgcccagaggctccatcgtccatcctcttcctccccagtcggctgaactctccccttgtctgcactgttcaaacctctgccgccctccacacctctaaacatctcccctctcacctcattcccccacctatccccattctctgccactccccgctgtgtgactttgggcaagccaagtgccctctctgaacctcagtttcctcatctgcaaaatgggaacaatgacgtgcctacctcttagacatgttgtgaggagactatgatataacatgtgtatgtaaatcttcatggtgattgtcatgtaaggcttaacacagtgggtggtgagttctgactaaaggttacctgttgtcgtgatctgaccacgtcccggtgaaagcgtgtgtccagggaagaagtgcacagggtagcccccagtcccaaccttccatccccaacccttagggatgatggaagaatcattttcctcaccctagttccaagtcccaggaaacaccttttaaccacttccttctcatctcccactgtttcccacttctggttccacccaacaccagttcctcctgccttggcacgagctaggctggccctgagtcattagcaccttttctgccttcatgaggccactgaactcaagggacctcaccttgcttccatcccagcctctaagaccagagggccgagggggtagtgaagattggggaacccttgccacctcaactgcccagcttgtgccaagaaacctccctctgacatttaggggaaaatctttggtttgtctgttattaattggctgtgagattttcgtcctgaaaacttgggaggaggaattgtttgattctccctgaaattgggggagggaaggggagttaatacacagaatccaggtaaggctaatagaagcttcagtgtccgctgggtgtggtggctcacgcctgtaatcctagcactttgggaggccgaggaaagcagatcatctgaggtcaggtgttcgagaccagnctggcaaaatggtgaaatcccatctctactgaaaatacaaaaactagccaggcatggtggcaggcacctataatcccatctacttgggaggctgaggcagaagaatcacttgaacccggggggcagaggttgcagtgagccaagattgcaccattgcactccatccagcctggacaaaagagcaaaactccatctcaaaaaaagaagaagtttgagtgtctcagcttatcctgaactttgaagcagtaacataagctagctgaatataggcacaacagaaatttcccattaagcacggggtttttgtttgtttgtttgtcctttcagttaccaatttatggagcatctattatgtgccaggcccagtgctgggtgctggggacatacgtaggggtgatcacaaggtcccccaccctgcagagcccacaggaggttgatgtacaaggtctgagcacacagctcccttccgtggcctctttcccattctgcccccattagcacacgcaggaaatgtcagacaggcgtatcagctgggtttgtcatccaaagaccagaagcgaggtcggtggaaacttgaaaactcgattcattattaaaggcaactcacccgtccctttagtcactccacaatgtttatcgagccacgtcttatgccaggcctcaaagatgaatcagaccaggcactaccctcaaggagctgctagttaggtcagggagacaggccagtcttacattcctgtcattcaggtctccactcaaaagtcacctcctccgggaggccttcctgaattgcccaggctataggagtccacttttggtcatccagtcccgatgctctgttttttgtttgtttgtttttttttaatagcacctattatacctgaaattatctc

SEQ ID NO: 211134 - DNA, 1276 bp, Homo sapiens
gatcgaagacacgagcaaacataaaggctagtagaggctcggtgttaatcggccgagagcggcagaccacaggcagggcagaggcacgtctgggtcccctccctccttcctatcggcgactcccagatcctggccatgagagctccgcacctccacctctccgccgcctctggcgcccgggctctggcgaagctgctgccgctgctgatggcgcaactctgggccgcagaggcggcgctgctcccccaaaacgacacgcgcttggaccccgaagcctatggcgccccgtgcgcgcgcggctcgcagccctggcaggtctcgctcttcaacggcctctcgttccactgcgcgggtgtcctggtggaccagagttgggtgctgacggccgcgcactgcggaaacaagccactgtgggctcgagtaggggatgaccacctgctgcttcttcagggcgagcagctccgccggacgactcgctctgttgtccatcccaagtaccaccagggctcaggccccatcctgccaaggcgaacggatgagcacgatctcatgttgctaaagctggccaggcccgtagtgccggggccccgcgtccgggccctgcagcttccctaccgctgtgctcagcccggagaccagtgccaggttgctggctggggcaccacggccgcccggagagtgaagtacaacaagggcctgacctgctccagcatcactatcctgagccctaaagagtgtgaggtcttctaccctggcgtggtcaccaacaacatgatatgtgctggactggaccggggccaggacccttgccagagtgactctggaggccccctggtctgtgacgagaccctccaaggcatcctctcgtggggtgtttacccctgtggctctgcccagcatccagctgtctacacccagatctgcaaatacatgtcctggatcaataaagtcatacgctccaactgatccagatgctacgctccagctgatccagatgttatgctcctgctgatccagatgcccagaggctccatcgtccatcctcttcctccccagtcggctgaactctccccttgtctgcactgttcaaacctctgccgccctccacacctctaaacatctcccctctcacctcattcccccacctatccccattctctgcctgtactgaagctgaaatgcaggaagtggtggcaaaggtttattccagagaagccaggaagccggtcatcacccagcctctgagagcacgagcacacagcccacctgtgtgctc

SEQ ID NO: 211135 - DNA, 303 bp, Homo sapiens
aagacaggtgcacagacagagccttctggaatacagtgcggggtatgctatcatagaagtataaactgggcaccctaggagcagagttgatattgctatgactgtctggggacatcaggacagacttcatagagcagagatctgaaactggacaatgtcctgttggaccacgagggtcactgtaaactggcagacttcggaatgtgcaaggaggggatttgcaatggtgtcaccacggccacattctgtggcacgccagactatatcgctccagaggtgagtgcagctgcttgatgcagctct

SEQ ID NO: 211136 - DNA, 3808 bp, Homo sapiens
caccgcagggccgggccgcggaccgcgggccacgcccctggggtccggaaggcgcgggagcggacgcgggggttctgtgaacttggaacctggcggtgcgaggttctcgccggggatgcggcggcggcagctgcttcctggtttgaagctcgccgagtgggggagagcgtgagccttcggaggcgggggcaggaggagaagcaagaggaggcgggggaagagacgcttggggctggggctcaccggacgggtaggtccggctctccagggagaggagctgcccggccctggagaaggggcgagtcctgcgcgagtccccgggaggcgccgcgcgcttggaagggacggtcgggcttccccggcccgctgagggctcggcggcgggctcccctcctttccacctcgggagggagggaaggaggggagggaaaagtcccacggaggaggcagaatggccagtcgaggggcgcttaggcgctggcctttccccagggctgcctcgactcctgcacctgtcccgagggctggcctgagacgggactcccggttctcccgctgcgaagcagcgcggcccccggggccggggcagcggcgccggcatgtcgtctggcaccatgaagttcaatggctatttgagggtccgcatcggtgaggcagtggggctgcagcccacccgctggtccctgcgccactcgctcttcaagaagggccaccagctgctggacccctatctgacggtgagcgtggaccaggtgcgcgtgggccagaccagcaccaagcagaagaccaacaaacccacgtacaacgaggagttttgcgctaacgtcaccgacggcggccacctcgagttggccgtcttccacgagacgcccctgggctacgaccacttcgtggccaactgcaccctgcagttccaggagctgcgtgcggcacgaccggcgcctcggacaccttcgagggttgggtggatctcgagccagaggggaaagtatttgtggtaataacccttaccgggagtttcactgaagctactctccagagagaccggatcttcaaacattttaccaggaagcgccaaagggctatgcgaaggcgagtccaccagatcaatggacacaagttcatggccacgtatctgaggcagcccacctactgctctcactgcagggagtttatctggggagtgtttgggaaacagggttatcagtgccaagtgtgcacctgtgtcgtccataaacgctgccatcatctaattgttacagcctgtacttgccaaaacaatattaacaaagtggattcaaagattgcagaacagaggttcgggatcaacatcccacacaagttcagcatccacaactacaaagtgccaacattctgcgatcactgtggctcactgctctggggaataatgcgacaaggacttcagtgtaaaatatgtaaaatgaatgtgcatattcgatgtcaagcgaacgtggcccctaactgtggggtaaatgcggtggaacttgccaagaccctggcagggatgggtctccaacccggaaatatttctccaacctcgaaactcgtttccagatcgaccctaagacgacagggaaaggagagcagcaaagaaggaaatgggattggggttaattcttccaaccgacttggtatcgacaactttgagttcatccgagtgttggggaaggggagttttgggaaggtgatgcttgcaagagtaaaagaaacaggagacctctatgctgtgaaggtgctgaagaaggacgtgattctgcaggatgatgatgtggaatgcaccatgaccgagaaaaggatcctgtctctggcccgcaatcaccccttcctcactcagttgttctgctgctttcagacccccgatcgtctgttttttgtgatggagtttgtgaatgggggtgacttgatgttccacattcagaagtctcgtcgttttgatgaagcacgagctcgcttctatgctgcagaaatcatttcggctctcatgttcctccatgataaaggaatcatctatagagatctgaaactggacaatgtcctgttggaccacgagggtcactgtaaactggcagacttcggaatgtgcaaggaggggatttgcaatggtgtcaccacggccacattctgtggcacgccagactatatcgctccagagatcctccaggaaatgctgtacgggcctgcagtagactggtgggcaatgggcgtgttgctctatgagatgctctgtggtcacgcgccttttgaggcagagaacgaagatgacctctttgaggccatactgaatgatgaggtggtctaccctacctggctccatgaagatgccacagggatcctaaaatctttcatgaccaagaaccccaccatgcgcttgggcagcctgactcagggaggcgagcacgccatcttgagacatcctttttttaaggaaatcgactgggcccagctgaaccatcgccaaatagaaccgcctttcagacccagaatcaaatcccgagaagatgtcagtaattttgaccctgacttcataaaggaagagccagttttaactccaattgatgagggacatcttccaatgattaaccaggatgagtttagaaacttttcctatgtgtctccagaattgcaaccatagccttatggggagtgagagagagggcacgagaacccaaagggaatagagattctccaggaatttcctctatgggaccttcccagcatcagccttagaacaagaaccttaccttcaaggagcaagtgaagaactctgtgaaggatggaactttcagatatcaactatttagagtccagagggagccatggcactagaaatagttgataatgaaatgagattttatgaagtataccgctccacctatgagcgtctgtctctgtgggcttgggatgttaacaggagccaaaaggagggaaagtgtgaagaataaagtagatctgagaaattctgagccaatcaggcttcttaattcaagagacaaaccaagacgttctgtcaactgtgctgtgctcttctttaagccaatgaaccccaattcctggcagtctacaagaagtctcttaatgctaatgaagaatttaaaggtctttttaaggaaatgaagggctttccaaatagaatgatttactctgaagaaacaaacaatggtatctctgaaactcacaacctaaagcccaatcttgaaaatatgttgtgcaccaagacgactgcttcagcttcttctcttatccttactttctttaatagatatttattaaactgtccagtgaaaaggtgccacaatgcccagtattgtaaacaacaggtttgcattcatgaagctttcattcattctggagtctactaatttacctgaatggtgtttgcattctgtgaaatgcctctccacgttgcatatgtcacacttttgtctgcacataactcttttttcacaagaagggtcactgccacaacagcacagtcagcgggtgaattacaggtgcctgctgcctgcctacctgggtaatctgatcttgtctgtatcgccgtgtgctcatcactgaagaattgcaggccactcatgtcagtgaccagatttgtggcttataaacattagcagtttatttatgttttaagatgcaaagatgtgtgtttgatattcactttaataattagaaatggatcttgtaaacagggcatatatcaaagatgaccttataatatgtacccgaatatacagttcaagaattttgtctgactggaaataaatgcattttgtagcaaaaaaaaaaattt

SEQ ID NO: 211137 - DNA, 2962 bp, Homo sapiens
  misc_feature (14)..(14): n is a, c, g, or t
  misc_feature (30)..(30): n is a, c, g, or t
  misc_feature (32)..(32): n is a, c, g, or t
  misc_feature (55)..(55): n is a, c, g, or t
  misc_feature (60)..(60): n is a, c, g, or t
  misc_feature (79)..(79): n is a, c, g, or t
  misc_feature (91)..(91): n is a, c, g, or t
gcgaccgcgcggtngaccgacgccggcatngnaccgagtgggggccccgcgcggngcctnccctctccgcgccgccaanccggggactgcncgcgggtcgggtttcccgccagctcaggtggatctcgagccagaggggaaagtatttgtggtaataacccttaccgggagtttcactgaagctactctccagagagaccggatcttcaaacattttaccaggaagcgccaaagggctatgcgaaggcgagtccaccagatcaatggacacaagttcatggccacgtatctgaggcagcccacctactgctctcactgcagggagtttatctggggagtgtttgggaaacagggttatcagtgccaagtgtgcacctgtgtcgtccataaacgctgccatcatctaattgttacagcctgtacttgccaaaacaatattaacaaagtggattcaaagattgcagaacagaggttcgggatcaacatcccacacaagttcagcatccacaactacaaagtgccaacattctgcgatcactgtggctcactgctctggggaataatgcgacaaggacttcagtgtaaaatatgtaaaatgaatgtgcatattcgatgtcaagcgaacgtggcccctaactgtggggtaaatgcggtggaacttgccaagaccctggcagggatgggtctccaacccggaaatatttctccaacctcgaaactcgtttccagatcgaccctaagacgacagggaaaggagagcagcaaagaaggaaatgggattggggttaattcttccaaccgacttggtatcgacaactttgagttcatccgagtgttggggaaggggagttttgggaaggtgatgcttgcaagagtaaaagaaacaggagacctctatgctgtgaaggtgctgaagaaggacgtgattctgcaggatgatgatgtggaatgcaccatgaccgagaaaaggatcctgtctctggcccgcaatcaccccttcctcactcagttgttctgctgctttcagacccccgatcgtctgttttttgtgatggagtttgtgaatgggggtgacttgatgttccacattcagaagtctcgtcgttttgatgaagcacgagctcgcttctatgctgcagaaatcatttcggctctcatgttcctccatgataaaggaatcatctatagagatctgaaactggacaatgtcctgttggaccacgagggtcactgtaaactggcagacttcggaatgtgcaaggaggggatttgcaatggtgtcaccacggccacattctgtggcacgccagactatatcgctccagagatcctccaggaaatgctgtacgggcctgcagtagactggtgggcaatgggcgtgttgctctatgagatgctctgtggtcacgcgccttttgaggcagagaacgaagatgacctctttgaggccatactgaatgatgaggtggtctaccctacctggctccatgaagatgccacagggatcctaaaatctttcatgaccaagaaccccaccatgcgcttgggcagcctgactcagggaggcgagcacgccatcttgagacatcctttttttaaggaaatcgactgggcccagctgaaccatcgccaaatagaaccgcctttcagacccagaatcaaatcccgagaagatgtcagtaattttgaccctgacttcataaaggaagagccagttttaactccaattgatgagggacatcttccaatgattaaccaggatgagtttagaaacttttcctatgtgtctccagaattgcaaccatagccttatggggagtgagagagagggcacgagaacccaaagggaatagagattctccaggaatttcctctatgggaccttcccagcatcagccttagaacaagaaccttaccttcaaggagcaagtgaagaactctgtgaaggatggaactttcagatatcaactatttagagtccagagggagccatggcactagaaatagttgataatgaaatgagattttatgaagtataccgctccacctatgagcgtctgtctctgtgggcttgggatgttaacaggagccaaaaggagggaaagtgtgaagaataaagtagatctgagaaattctgagccaatcaggcttcttaattcaagagacaaaccaagacgttctgtcaactgtgctgtgctcttctttaagccaatgaaccccaattcctggcagtctacaagaagtctcttaatgctaatgaagaatttaaaggtctttttaaggaaatgaagggctttccaaatagaatgatttactctgaagaaacaaacaatggtatctctgaaactcacaacctaaagcccaatcttgaaaatatgttgtgcaccaagacgactgcttcagcttcttctcttatccttactttctttaatagatatttattaaactgtccagtgaaaaggtgccacaatgcccagtattgtaaacaacaggtttgcattcatgaagctttcattcattctggagtctactaatttacctgaatggtgtttgcattctgtgaaatgcctctccacgttgcatatgtcacacttttgtctgcacataactcttttttcacaagaagggtcactgccacaacagcacagtcagcgggtgaattacaggtgcctgctgcctgcctacctgggtaatctgatcttgtctgtatcgccgtgtgctcatcactgaagaattgcaggccactcatgtcagtgaccagatttgtggcttataaacattagcagtttatttatgttttaagatgcaaagatgtgtgtttgatattcactttaataattagaaatggatcttgtaaacagggcatatatcaaagatgaccttataatatgtacccgaatatacagttcaagaattttgtctgactggaaataaatgcattttgtagcaaaaaaaaaaattt

SEQ ID NO: 211138 - DNA, 2682 bp, Homo sapiens
gcgaattgtaatcactggccatcgatggctcctgtgtcaggtagttaaccggtagagcattcgcgaaatagtgataatcagtgacaagtgtgcacctgtgtcgtccataaacgctgccatcatctaattgttacagcctgtacttgccaaaacaatattaacaaagtggattcaaagattgcagaacagaggttcgggatcaacatcccacacaagttcagcatccacaactacaaagtgccaacattctgcgatcactgtggctcactgctctggggaataatgcgacaaggacttcagtgtaaaatatgtaaaatgaatgtgcatattcgatgtcaagcgaacgtggcccctaactgtggggtaaatgcggtggaacttgccaagaccctggcagggatgggtctccaacccggaaatatttctccaacctcgaaactcgtttccagatcgaccctaagacgacagggaaaggagagcagcaaagaaggaaatgggattggggttaattcttccaaccgacttggtatcgacaactttgagttcatccgagtgttggggaaggggagttttgggaaggtgatgcttgcaagagtaaaagaaacaggagacctctatgctgtgaaggtgctgaagaaggacgtgattctgcaggatgatgatgtggaatgcaccatgaccgagaaaaggatcctgtctctggcccgcaatcaccccttcctcactcagttgttctgctgctttcagacccccgatcgtctgttttttgtgatggagtttgtgaatgggggtgacttgatgttccacattcagaagtctcgtcgttttgatgaagcacgagctcgcttctatgctgcagaaatcatttcggctctcatgttcctccatgataaaggaatcatctatagagatctgaaactggacaatgtcctgttggaccacgagggtcactgtaaactggcagacttcggaatgtgcaaggaggggatttgcaatggtgtcaccacggccacattctgtggcacgccagactatatcgctccagagatcctccaggaaatgctgtacgggcctgcagtagactggtgggcaatgggcgtgttgctctatgagatgctctgtggtcacgcgccttttgaggcagagaacgaagatgacctctttgaggccatactgaatgatgaggtggtctaccctacctggctccatgaagatgccacagggatcctaaaatctttcatgaccaagaaccccaccatgcgcttgggcagcctgactcagggaggcgagcacgccatcttgagacatcctttttttaaggaaatcgactgggcccagctgaaccatcgccaaatagaaccgcctttcagacccagaatcaaatcccgagaagatgtcagtaattttgaccctgacttcataaaggaagagccagttttaactccaattgatgagggacatcttccaatgattaaccaggatgagtttagaaacttttcctatgtgtctccagaattgcaaccatagccttatggggagtgagagagagggcacgagaacccaaagggaatagagattctccaggaatttcctctatgggaccttcccagcatcagccttagaacaagaaccttaccttcaaggagcaagtgaagaactctgtgaaggatggaactttcagatatcaactatttagagtccagagggagccatggcactagaaatagttgataatgaaatgagattttatgaagtataccgctccacctatgagcgtctgtctctgtgggcttgggatgttaacaggagccaaaaggagggaaagtgtgaagaataaagtagatctgagaaattctgagccaatcaggcttcttaattcaagagacaaaccaagacgttctgtcaactgtgctgtgctcttctttaagccaatgaaccccaattcctggcagtctacaagaagtctcttaatgctaatgaagaatttaaaggtctttttaaggaaatgaagggctttccaaatagaatgatttactctgaagaaacaaacaatggtatctctgaaactcacaacctaaagcccaatcttgaaaatatgttgtgcaccaagacgactgcttcagcttcttctcttatccttactttctttaatagatatttattaaactgtccagtgaaaaggtgccacaatgcccagtattgtaaacaacaggtttgcattcatgaagctttcattcattctggagtctactaatttacctgaatggtgtttgcattctgtgaaatgcctctccacgttgcatatgtcacacttttgtctgcacataactcttttttcacaagaagggtcactgccacaacagcacagtcagcgggtgaattacaggtgcctgctgcctgcctacctgggtaatctgatcttgtctgtatcgccgtgtgctcatcactgaagaattgcaggccactcatgtcagtgaccagatttgtggcttataaacattagcagtttatttatgttttaagatgcaaagatgtgtgtttgatattcactttaataattagaaatggatcttgtaaacagggcatatatcaaagatgaccttataatatgtacccgaatatacagttcaagaattttgtctgactggaaataaatgcattttgtagcaaaaaaaaaaattt

SEQ ID NO: 211139 - DNA, 1911 bp, Homo sapiens
aagacaggtgcacagacagagccttctggaatacagtgcggggtatgctatcatagaagtataaactgggcaccctaggagcagagttgatattgctatgactgtctggggacatcaggacagacttcatagagcagagatctgaaactggacaatgtcctgttggaccacgagggtcactgtaaactggcagacttcggaatgtgcaaggaggggatttgcaatggtgtcaccacggccacattctgtggcacgccagactatatcgctccagagatcctccaggaaatgctgtacgggcctgcagtagactggtgggcaatgggcgtgttgctctatgagatgctctgtggtcacgcgccttttgaggcagagaacgaagatgacctctttgaggccatactgaatgatgaggtggtctaccctacctggctccatgaagatgccacagggatcctaaaatctttcatgaccaagaaccccaccatgcgcttgggcagcctgactcagggaggcgagcacgccatcttgagacatcctttttttaaggaaatcgactgggcccagctgaaccatcgccaaatagaaccgcctttcagacccagaatcaaatcccgagaagatgtcagtaattttgaccctgacttcataaaggaagagccagttttaactccaattgatgagggacatcttccaatgattaaccaggatgagtttagaaacttttcctatgtgtctccagaattgcaaccatagccttatggggagtgagagagagggcacgagaacccaaagggaatagagattctccaggaatttcctctatgggaccttcccagcatcagccttagaacaagaaccttaccttcaaggagcaagtgaagaactctgtgaaggatggaactttcagatatcaactatttagagtccagagggagccatggcactagaaatagttgataatgaaatgagattttatgaagtataccgctccacctatgagcgtctgtctctgtgggcttgggatgttaacaggagccaaaaggagggaaagtgtgaagaataaagtagatctgagaaattctgagccaatcaggcttcttaattcaagagacaaaccaagacgttctgtcaactgtgctgtgctcttctttaagccaatgaaccccaattcctggcagtctacaagaagtctcttaatgctaatgaagaatttaaaggtctttttaaggaaatgaagggctttccaaatagaatgatttactctgaagaaacaaacaatggtatctctgaaactcacaacctaaagcccaatcttgaaaatatgttgtgcaccaagacgactgcttcagcttcttctcttatccttactttctttaatagatatttattaaactgtccagtgaaaaggtgccacaatgcccagtattgtaaacaacaggtttgcattcatgaagctttcattcattctggagtctactaatttacctgaatggtgtttgcattctgtgaaatgcctctccacgttgcatatgtcacacttttgtctgcacataactcttttttcacaagaagggtcactgccacaacagcacagtcagcgggtgaattacaggtgcctgctgcctgcctacctgggtaatctgatcttgtctgtatcgccgtgtgctcatcactgaagaattgcaggccactcatgtcagtgaccagatttgtggcttataaacattagcagtttatttatgttttaagatgcaaagatgtgtgtttgatattcactttaataattagaaatggatcttgtaaacagggcatatatcaaagatgaccttataatatgtacccgaatatacagttcaagaattttgtctgactggaaataaatgcattttgtagcaaaaaaaaaaattt

SEQ ID NO: 211140 - DNA, 3753 bp, Homo sapiens
caccgcagggccgggccgcggaccgcgggccacgcccctggggtccggaaggcgcgggagcggacgcgggggttctgtgaacttggaacctggcggtgcgaggttctcgccggggatgcggcggcggcagctgcttcctggtttgaagctcgccgagtgggggagagcgtgagccttcggaggcgggggcaggaggagaagcaagaggaggcgggggaagagacgcttggggctggggctcaccggacgggtaggtccggctctccagggagaggagctgcccggccctggagaaggggcgagtcctgcgcgagtccccgggaggcgccgcgcgcttggaagggacggtcgggcttccccggcccgctgagggctcggcggcgggctcccctcctttccacctcgggagggagggaaggaggggagggaaaagtcccacggaggaggcagaatggccagtcgaggggcgcttaggcgctggcctttccccagggctgcctcgactcctgcacctgtcccgagggctggcctgagacgggactcccggttctcccgctgcgaagcagcgcggcccccggggccggggcagcggcgccggcatgtcgtctggcaccatgaagttcaatggctatttgagggtccgcatcggtgaggcagtggggctgcagcccacccgctggtccctgcgccactcgctcttcaagaagggccaccagctgctggacccctatctgacggtgagcgtggaccaggtgcgcgtgggccagaccagcaccaagcagaagaccaacaaacccacgtacaacgaggagttttgcgctaacgtcaccgacggcggccacctcgagttggccgtcttccacgagacgcccctgggctacgaccacttcgtggccaactgcaccctgcagttccaggagctgcgtgcggcacgaccggcgcctcggacaccttcgagggttgggtggatctcgagccagaggggaaagtatttgtggtaataacccttaccgggagtttcactgaagctactctccagagagaccggatcttcaaacattttaccaggaagcgccaaagggctatgcgaaggcgagtccaccagatcaatggacacaagttcatggccacgtatctgaggcagcccacctactgctctcactgcagggagtttatctggggagtgtttgggaaacagggttatcagtgccaagtgtgcacctgtgtcgtccataaacgctgccatcatctaattgttacagcctgtacttgccaaaacaatattaacaaagtggattcaaagattgcagaacagaggttcgggatcaacatcccacacaagttcagcatccacaactacaaagtgccaacattctgcgatcactgtggctcactgctctggggaataatgcgacaaggacttcagtgtaaaatatgtaaaatgaatgtgcatattcgatgtcaagcgaacgtggcccctaactgtggggtaaatgcggtggaacttgccaagaccctggcagggatgggtctccaacccggaaatatttctccaacctcgaaactcgtttccagatcgaccctaagacgacagggaaaggagagcagcaaagaaggaaatgggattggggttaattcttccaaccgacttggtatcgacaactttgagttcatccgagtgttggggaaggggagttttgggaaggtgatgcttgcaagagtaaaagaaacaggagacctctatgctgtgaaggtgctgaagaaggacgtgattctgcaggatgatgatgtggaatgcaccatgaccgagaaaaggatcctgtctctggcccgcaatcaccccttcctcactcagttgttctgctgctttcagacccccgatcgtctgttttttgtgatggagtttgtgaatgggggtgacttgatgttccacattcagaagtctcgtcgttttgatgaagcacgagctcgcttctatgctgcagaaatcatttcggctctcatgttcctccatgataaaggaatcatctatagagatctgaaactggacaatgtcctgttggaccacgagggtcactgtaaactggcagacttcggaatgtgcaaggaggggatttgcaatggtgtcaccacggccacattctgtggcacgccagactatatcgctccagagatcctccaggaaatgctgtacgggcctgcagtagactggtgggcaatgggcgtgttgctctatgagatgctctgtggtcacgcgccttttgaggcagagaacgaagatgacctctttgaggccatactgaatgatgaggtggtctaccctacctggctccatgaagatgccacagggatcctaaaatctttcatgaccaagaaccccaccatgcgcttgggcagcctgactcagggaggcgagcacgccatcttgagacatcctttttttaaggaaatcgactgggcccagctgaaccatcgccaaatagaaccgcctttcagacccagaatcaaatcccgagaagatgtcagtaattttgaccctgacttcataaaggaagagccagttttaactccaattgatgagggacatcttccaatgattaaccaggatgagtttagaaacttttcctatgtgtctccagaattgcaaccatagccttatggggagtgagagagagggcacgagaacccaaagggaatagagattctccaggaatttcctctatgggaccttcccagcatcagccttagaacaagaaccttaccttcaaggagcaagtgaagaactctgtgaaggatggaactttcagatatcaactatttagagtccagagggagccatggcactagaaatagttgataatgaaatgagattttatgaagtataccgctccacctatgagcgtctgtctctgtgggcttgggatgttaacaggagccaaaaggagggaaagtgtgaagaataaagtagatctgagaaattctgagccaatcaggcttcttaattcaagagacaaaccaagacgttctgtcaactgtgctgtgctcttctttaagccaatgaaccccaattcctggcagtctacaagaagtctcttaatgctaatgaagaatttaaaggtctttttaaggaaatgaagggctttccaaatagaatgatttactctgaagaaacaaacaatggtatctctgaaactcacaacctaaagcccaatcttgaaaatatgttgtgcaccaagacgactgcttcagcttcttctcttatccttactttctttaatagatatttattaaactgtccactttcattcattctggagtctactaatttacctgaatggtgtttgcattctgtgaaatgcctctccacgttgcatatgtcacacttttgtctgcacataactcttttttcacaagaagggtcactgccacaacagcacagtcagcgggtgaattacaggtgcctgctgcctgcctacctgggtaatctgatcttgtctgtatcgccgtgtgctcatcactgaagaattgcaggccactcatgtcagtgaccagatttgtggcttataaacattagcagtttatttatgttttaagatgcaaagatgtgtgtttgatattcactttaataattagaaatggatcttgtaaacagggcatatatcaaagatgaccttataatatgtacccgaatatacagttcaagaattttgtctgactggaaataaatgcattttgtagcaaaaaaaaaaattt

SEQ ID NO: 211141 - DNA, 766 bp, Homo sapiens
gggaaacaggttattgccttggtttcgggattttaattgcggttcactaatagggaattgtgggccctcgaggtccaaaattttgggcccgagggggctttccaaatagaatgatttactctgaagaaacaaacaatggtatctctgaaactcacaacctaaagcccaatcttgaaaatatgttgtgcaccaagacgactgcttcagcttcttctcttatccttactttctttaatagatatttattaaactgtccagtgaaaaggtgccacaatgcccagtattgtaaacaacaggtttgcattcatgaagctttcattcattctggagtctactaatttacctgaatggtgtttgcattctgtgaaatgcctctccacgttgcatatgtcacacttttgtctgcacataactcttttttcacaagaagggtcactgccacaacagcacagtcagcgggtgaattacaggtgcctgctgcctgcctacctgggtaatctgatcttgtctgtatcgccgtgtgctcatcactgaagaattgcaggccactcatgtcagtgaccagatttgtggcttataaacattagcagtttatttatgttttaagatgcaaagatgtgtgtttgatattcactttaataattagaaatggatcttgtaaacagggcatatatcaaagatgaccttataatatgtacccgaatatacagttcaagaattttgtctgactggaaataaatgcattttgtagcaaaaaaaaaaattt

SEQ ID NO: 211142 - DNA, 2279 bp, Homo sapiens
  misc_feature (2209)..(2209): n is a, c, g, or t
  misc_feature (2212)..(2212): n is a, c, g, or t
  misc_feature (2243)..(2243): n is a, c, g, or t
  misc_feature (2249)..(2249): n is a, c, g, or t
  misc_feature (2276)..(2276): n is a, c, g, or t
caccgcagggccgggccgcggaccgcgggccacgcccctggggtccggaaggcgcgggagcggacgcgggggttctgtgaacttggaacctggcggtgcgaggttctcgccggggatgcggcggcggcagctgcttcctggtttgaagctcgccgagtgggggagagcgtgagccttcggaggcgggggcaggaggagaagcaagaggaggcgggggaagagacgcttggggctggggctcaccggacgggtaggtccggctctccagggagaggagctgcccggccctggagaaggggcgagtcctgcgcgagtccccgggaggcgccgcgcgcttggaagggacggtcgggcttccccggcccgctgagggctcggcggcgggctcccctcctttccacctcgggagggagggaaggaggggagggaaaagtcccacggaggaggcagaatggccagtcgaggggcgcttaggcgctggcctttccccagggctgcctcgactcctgcacctgtcccgagggctggcctgagacgggactcccggttctcccgctgcgaagcagcgcggcccccggggccggggcagcggcgccggcatgtcgtctggcaccatgaagttcaatggctatttgagggtccgcatcggtgaggcagtggggctgcagcccacccgctggtccctgcgccactcgctcttcaagaagggccaccagctgctggacccctatctgacggtgagcgtggaccaggtgcgcgtgggccagaccagcaccaagcagaagaccaacaaacccacgtacaacgaggagttttgcgctaacgtcaccgacggcggccacctcgagttggccgtcttccacgagacgcccctgggctacgaccacttcgtggccaactgcaccctgcagttccaggagctgcgtgcggcacgaccggcgcctcggacaccttcgagggttgggtggatctcgagccagaggggaaagtatttgtggtaataacccttaccgggagtttcactgaagctactctccagagagaccggatcttcaaacattttaccaggaagcgccaaagggctatgcgaaggcgagtccaccagatcaatggacacaagttcatggccacgtatctgaggcagcccacctactgctctcactgcagggagtttatctggggagtgtttgggaaacagggttatcagtgccaagtgtgcacctgtgtcgtccataaacgctgccatcatctaattgttacagcctgtacttgccaaaacaatattaacaaagtggattcaaagattgcagaacagaggttcgggatcaacatcccacacaagttcagcatccacaactacaaagtgccaacattctgcgatcactgtggctcactgctctggggaataatgcgacaaggacttcagtgtaaaatatgtaaaatgaatgtgcatattcgatgtcaagcgaacgtggcccctaactgtggggtaaatgcggtggaacttgccaagaccctggcagggatgggtctccaacccggaaatatttctccaacctcgaaactcgtttccagatcgaccctaagacgacagggaaaggagagcagcaaagaaggaaatgggattggggttaattcttccaaccgacttggtatcgacaactttgagttcatccgagtgttggggaaggggagttttgggaaggtgatgcttgcaagagtaaaagaaacaggagacctctatgctgtgaaggtgctgaagaaggacgtgattctgcaggatgatgatgtggaatgcaccatgaccgagaaaaggatcctgtctctggcccgcaatcaccccttcctcactcagttgttctgctgctttcagacccccgatcgtctgttttttgtgatggagtttgtgaatgggggtgacttgatgttccacattcagaagtctcgtcgttttgatgaagcacgagctcgcttctatgctgcagaaatcatttcggctctcatgttcctccatgataaaggaatcatctatagagatctgaaactggacaatgtcctgttggaccacgagggtcactgtaaactggcagacttcggaatgtgcaaggaggggatttgcaatggtgtcaccacggccacattctgtggcacgccagactatatcgctccagagattctccaagggaaatgcctgtacggggcctgcaantanaactgggtggggcaatggggccgttttgccnccaatnaaaaatgcccctgttgggtccaccccnccc

SEQ ID NO: 211143 - DNA, 2269 bp, Homo sapiens
caccgcagggccgggccgcggaccgcgggccacgcccctggggtccggaaggcgcgggagcggacgcgggggttctgtgaacttggaacctggcggtgcgaggttctcgccggggatgcggcggcggcagctgcttcctggtttgaagctcgccgagtgggggagagcgtgagccttcggaggcgggggcaggaggagaagcaagaggaggcgggggaagagacgcttggggctggggctcaccggacgggtaggtccggctctccagggagaggagctgcccggccctggagaaggggcgagtcctgcgcgagtccccgggaggcgccgcgcgcttggaagggacggtcgggcttccccggcccgctgagggctcggcggcgggctcccctcctttccacctcgggagggagggaaggaggggagggaaaagtcccacggaggaggcagaatggccagtcgaggggcgcttaggcgctggcctttccccagggctgcctcgactcctgcacctgtcccgagggctggcctgagacgggactcccggttctcccgctgcgaagcagcgcggcccccggggccggggcagcggcgccggcatgtcgtctggcaccatgaagttcaatggctatttgagggtccgcatcggtgaggcagtggggctgcagcccacccgctggtccctgcgccactcgctcttcaagaagggccaccagctgctggacccctatctgacggtgagcgtggaccaggtgcgcgtgggccagaccagcaccaagcagaagaccaacaaacccacgtacaacgaggagttttgcgctaacgtcaccgacggcggccacctcgagttggccgtcttccacgagacgcccctgggctacgaccacttcgtggccaactgcaccctgcagttccaggagctgcgtgcggcacgaccggcgcctcggacaccttcgagggttgggtggatctcgagccagaggggaaagtatttgtggtaataacccttaccgggagtttcactgaagctactctccagagagaccggatcttcaaacattttaccaggaagcgccaaagggctatgcgaaggcgagtccaccagatcaatggacacaagttcatggccacgtatctgaggcagcccacctactgctctcactgcagggagtttatctggggagtgtttgggaaacagggttatcagtgccaagtgtgcacctgtgtcgtccataaacgctgccatcatctaattgttacagcctgtacttgccaaaacaatattaacaaagtggattcaaagattgcagaacagaggttcgggatcaacatcccacacaagttcagcatccacaactacaaagtgccaacattctgcgatcactgtggctcactgctctggggaataatgcgacaaggacttcagtgtaaaatatgtaaaatgaatgtgcatattcgatgtcaagcgaacgtggcccctaactgtggggtaaatgcggtggaacttgccaagaccctggcagggatgggtctccaacccggaaatatttctccaacctcgaaactcgtttccagatcgaccctaagacgacagggaaaggagagcagcaaagaaggaaatgggattggggttaattcttccaaccgacttggtatcgacaactttgagttcatccgagtgttggggaaggggagttttgggaaggtgatgcttgcaagagtaaaagaaacaggagacctctatgctgtgaaggtgctgaagaaggacgtgattctgcaggatgatgatgtggaatgcaccatgaccgagaaaaggatcctgtctctggcccgcaatcaccccttcctcactcagttgttctgctgctttcagacccccgatcgtctgttttttgtgatggagtttgtgaatgggggtgacttgatgttccacattcagaagtctcgtcgttttgatgaagcacgagctcgcttctatgctgcagaaatcatttcggctctcatgttcctccatgataaaggaatcatctatagagatctgaaactggacaatgtcctgttggaccagatttgtggcttataaacattagcagtttatttatgttttaagatgcaaagatgtgtgtttgatattcactttaataattagaaatggatcttgtaaacagggcatatatcaaagatgaccttataatatgtacccgaatatacagttcaagaattttgtctgactggaaataaatgcattttgtagcaaaaaaaaaaattt

SEQ ID NO: 211144 - DNA, 2066 bp, Homo sapiens
caccgcagggccgggccgcggaccgcgggccacgcccctggggtccggaaggcgcgggagcggacgcgggggttctgtgaacttggaacctggcggtgcgaggttctcgccggggatgcggcggcggcagctgcttcctggtttgaagctcgccgagtgggggagagcgtgagccttcggaggcgggggcaggaggagaagcaagaggaggcgggggaagagacgcttggggctggggctcaccggacgggtaggtccggctctccagggagaggagctgcccggccctggagaaggggcgagtcctgcgcgagtccccgggaggcgccgcgcgcttggaagggacggtcgggcttccccggcccgctgagggctcggcggcgggctcccctcctttccacctcgggagggagggaaggaggggagggaaaagtcccacggaggaggcagaatggccagtcgaggggcgcttaggcgctggcctttccccagggctgcctcgactcctgcacctgtcccgagggctggcctgagacgggactcccggttctcccgctgcgaagcagcgcggcccccggggccggggcagcggcgccggcatgtcgtctggcaccatgaagttcaatggctatttgagggtccgcatcggtgaggcagtggggctgcagcccacccgctggtccctgcgccactcgctcttcaagaagggccaccagctgctggacccctatctgacggtgagcgtggaccaggtgcgcgtgggccagaccagcaccaagcagaagaccaacaaacccacgtacaacgaggagttttgcgctaacgtcaccgacggcggccacctcgagttggccgtcttccacgagacgcccctgggctacgaccacttcgtggccaactgcaccctgcagttccaggagctgcgtgcggcacgaccggcgcctcggacaccttcgagggttgggtggatctcgagccagaggggaaagtatttgtggtaataacccttaccgggagtttcactgaagctactctccagagagaccggatcttcaaacattttaccaggaagcgccaaagggctatgcgaaggcgagtccaccagatcaatggacacaagttcatggccacgtatctgaggcagcccacctactgctctcactgcagggagtttatctggggagtgtttgggaaacagggttatcagtgccaagtgtgcacctgtgtcgtccataaacgctgccatcatctaattgttacagcctgtacttgccaaaacaatattaacaaagtggattcaaagattgcagaacagaggttcgggatcaacatcccacacaagttcagcatccacaactacaaagtgccaacattctgcgatcactgtggctcactgctctggggaataatgcgacaaggacttcagtgtaaaatatgtaaaatgaatgtgcatattcgatgtcaagcgaacgtggcccctaactgtggggtaaatgcggtggaacttgccaagaccctggcagggatgggtctccaacccggaaatatttctccaacctcgaaactcgtttccagatcgaccctaagacgacagggaaaggagagcagcaaagaaggaaatgggattggggttaattcttccaaccgacttggtatcgacaactttgagttcatccgagtgttggggaaggggagttttgggaaggtgatgcttgcaagagtaaaagaaacaggagacctctatgctgtgaaggtgctgaagaaggacgtgattctgcaggatgatgatgtggaatgcaccatgaccgagaaaaggatcctgtctctggcccgcaatcaccccttcctcactcagttgttctgctgctttcagacccccggtttccggtcccccatggaaaagaagaccaagtgcacagatccatcccagccctacacaatgatactggaaagctgtatgtggaccagaaatgccaaaggaggttccatcaggaagaggggacttgtgctctgactctgctgtacccctgatcatatgttaccacttatttatgctttaaagaaca

SEQ ID NO: 211145 - DNA, 2142 bp, Homo sapiens
caccgcagggccgggccgcggaccgcgggccacgcccctggggtccggaaggcgcgggagcggacgcgggggttctgtgaacttggaacctggcggtgcgaggttctcgccggggatgcggcggcggcagctgcttcctggtttgaagctcgccgagtgggggagagcgtgagccttcggaggcgggggcaggaggagaagcaagaggaggcgggggaagagacgcttggggctggggctcaccggacgggtaggtccggctctccagggagaggagctgcccggccctggagaaggggcgagtcctgcgcgagtccccgggaggcgccgcgcgcttggaagggacggtcgggcttccccggcccgctgagggctcggcggcgggctcccctcctttccacctcgggagggagggaaggaggggagggaaaagtcccacggaggaggcagaatggccagtcgaggggcgcttaggcgctggcctttccccagggctgcctcgactcctgcacctgtcccgagggctggcctgagacgggactcccggttctcccgctgcgaagcagcgcggcccccggggccggggcagcggcgccggcatgtcgtctggcaccatgaagttcaatggctatttgagggtccgcatcggtgaggcagtggggctgcagcccacccgctggtccctgcgccactcgctcttcaagaagggccaccagctgctggacccctatctgacggtgagcgtggaccaggtgcgcgtgggccagaccagcaccaagcagaagaccaacaaacccacgtacaacgaggagttttgcgctaacgtcaccgacggcggccacctcgagttggccgtcttccacgagacgcccctgggctacgaccacttcgtggccaactgcaccctgcagttccaggagctgcgtgcggcacgaccggcgcctcggacaccttcgagggttgggtggatctcgagccagaggggaaagtatttgtggtaataacccttaccgggagtttcactgaagctactctccagagagaccggatcttcaaacattttaccaggaagcgccaaagggctatgcgaaggcgagtccaccagatcaatggacacaagttcatggccacgtatctgaggcagcccacctactgctctcactgcagggagtttatctggggagtgtttgggaaacagggttatcagtgccaagtgtgcacctgtgtcgtccataaacgctgccatcatctaattgttacagcctgtacttgccaaaacaatattaacaaagtggattcaaagattgcagaacagaggttcgggatcaacatcccacacaagttcagcatccacaactacaaagtgccaacattctgcgatcactgtggctcactgctctggggaataatgcgacaaggacttcagtgtaaaatatgtaaaatgaatgtgcatattcgatgtcaagcgaacgtggcccctaactgtggggtaaatgcggtggaacttgccaagaccctggcagggatgggtctccaacccggaaatatttctccaacctcgaaactcgtttccagatcgaccctaagacgacagggaaaggagagcagcaaagaaggaaatgggattggggttaattcttccaaccgacttggtatcgacaactttgagttcatccgagtgttggggaaggggagttttgggaaggtgatgcttgcaagagtaaaagaaacaggagacctctatgctgtgaaggtgctgaagaaggacgtgattctgcaggatgatgatgtggaatgcaccatgaccgagaaaaggatcctgtctctggcccgcaatcaccccttcctcactcagttgttctgctgctttcagacccccgatcgtctgttttttgtgatggagtttgtgaatgggggtgacttgatgttccacattcagaagtctcgtcgttttgatgaagcacgagctcgcttctatgctgcagaaatcatttcggctctcatgttcctccatgataaaggaatcatctataggtgagttttggttgctgccctgtcttctaattcactgcctcttccctctcctggcatgatccatccttccacttctcatgataatcagttgataccttttttggaatt

SEQ ID NO: 211146 - DNA, 2543 bp, Homo sapiens
caccgcagggccgggccgcggaccgcgggccacgcccctggggtccggaaggcgcgggagcggacgcgggggttctgtgaacttggaacctggcggtgcgaggttctcgccggggatgcggcggcggcagctgcttcctggtttgaagctcgccgagtgggggagagcgtgagccttcggaggcgggggcaggaggagaagcaagaggaggcgggggaagagacgcttggggctggggctcaccggacgggtaggtccggctctccagggagaggagctgcccggccctggagaaggggcgagtcctgcgcgagtccccgggaggcgccgcgcgcttggaagggacggtcgggcttccccggcccgctgagggctcggcggcgggctcccctcctttccacctcgggagggagggaaggaggggagggaaaagtcccacggaggaggcagaatggccagtcgaggggcgcttaggcgctggcctttccccagggctgcctcgactcctgcacctgtcccgagggctggcctgagacgggactcccggttctcccgctgcgaagcagcgcggcccccggggccggggcagcggcgccggcatgtcgtctggcaccatgaagttcaatggctatttgagggtccgcatcggtgaggcagtggggctgcagcccacccgctggtccctgcgccactcgctcttcaagaagggccaccagctgctggacccctatctgacggtgagcgtggaccaggtgcgcgtgggccagaccagcaccaagcagaagaccaacaaacccacgtacaacgaggagttttgcgctaacgtcaccgacggcggccacctcgagttggccgtcttccacgagacgcccctgggctacgaccacttcgtggccaactgcaccctgcagttccaggagctgcgtgcggcacgaccggcgcctcggacaccttcgagggttgggtggatctcgagccagaggggaaagtatttgtggtaataacccttaccgggagtttcactgaagctactctccagagagaccggatcttcaaacattttaccaggaagcgccaaagggctatgcgaaggcgagtccaccagatcaatggacacaagttcatggccacgtatctgaggcagcccacctactgctctcactgcagggagtttatctggggagtgtttgggaaacagggttatcagtgccaagtgtgcacctgtgtcgtccataaacgctgccatcatctaattgttacagcctgtacttgccaaaacaatattaacaaagtggattcaaagattgcagaacagaggttcgggatcaacatcccacacaagttcagcatccacaactacaaagtgccaacattctgcgatcactgtggctcactgctctggggaataatgcgacaaggacttcagtgtaaaatatgtaaaatgaatgtgcatattcgatgtcaagcgaacgtggcccctaactgtggggtaaatgcggtggaacttgccaagaccctggcagggatgggtctccaacccggaaatatttctccaacctcgaaactcgtttccagatcgaccctaagacgacagggaaaggagagcagcaaagaaggaaatgggattggggttaattcttccaaccgacttggtatcgacaactttgagttcatccgagtgttggggaaggggagttttgggaaggtgatgcttgcaagagtaaaagaaacaggagacctctatgctgtgaaggtgctgaagaaggacgtgattctgcaggatgatgatgtggaatgcaccatgaccgagaaaaggatcctgtctctggcccgcaatcaccccttcctcactcagttgttctgctgctttcagacccccgatcgtctgttttttgtgatggagtttgtgaatgggggtgacttgatgttccacattcagaagtctcgtcgttttgatgaagcacgagctcgcttctatgctgcagaaatcatttcggctctcatgttcctccatgataaaggaatcatctatagagatctgaaactggacaatgtcctgttggaccacgagggtcactgtaaactggcagacttcggaatgtgcaaggaggggatttgcaatggtgtcaccacggccacattctgtggcacgccagactatatcgctccagagatcctccaggaaatgctgtacgggcctgcagtagactggtgggcaatgggcgtgttgctctatgagatgctctgtggtcacgcgccttttgaggcagagaacgaagatgacctctttgaggccatactgaatgatgaggtggtctaccctacctggctccatgaagatgccacagggatcctaaaatctgtaagtttggcttacccagctagcttctgatgtattgcaaaccagcttgtttcatgtgctgcttgagtcttttcagtacttcccaccagtaaaccactagctctaactaaaatttgtattgttctaatctaaagaatcaaagaaccagagttctgtcaggctgttaccctctcttatgcaa

SEQ ID NO: 211147 - DNA, 422 bp, Homo sapiens
tcttttatgtgtaatgtttagaatacagggaaataagccacctctattgcatcactgttctgtaattattttatacctaatctaaaatatgaattagaagtagtcctgttataaaacaacaaccacaacaaaacatacatacaaaggtttgtatattcatatgtgcctgtgaaactgttgaactatattcctgtgattatgaaatgcttgactctattaaatattgtgctaaagcagagtgcatttttgtttatcctaaatgagtgagactgttaggcattttccattttttaaatggtaagaagagaagttaatagctgtaaaatcaattaaaattatacgttattttataaatgaatttattattatcaaagtaaatagattttcaaaaattatattatgaattagtttggattccccag

SEQ ID NO: 211148 - DNA, 479 bp, Homo sapiens
aaaagaggggcttaaactgcataccaaaacaagagtaggcacacccccgctaaacagcctagtatgctattttgtaacaaatttaaatgatacaatattcattttgcttcaattttcttttattattgcgggtaaacatttttttcaaaataacattcttctctttgtcaatttaaaaagtaatacatggttatttagaacatgtaaaaatatgaaagtataataaagaaaataaaaattacccagaaataaaaatggctagtatattcatatcttttcttccagtttttttgtttgtacattatttatgtacatatataacaattgataccatacagtttgtaaaatgttaaatgtaacattgtgtcatttttccaagtcattactagtctttgaaaactttaaatagctgcatgttacaaactttaataatcatttaggttgtttccatctttttctaaataaaagtgtgcttcagt

SEQ ID NO: 211149 - DNA, 141 bp, Homo sapiens
acatctgttaggtcatcggggataggtgagataaatgaatggaaacattgcacacagaagatggagactagcagggaggactttaggagtaggtgtgagaaccaggaaaacttagcatcctctcggtcaggagactagaat

SEQ ID NO: 211150 - DNA, 334 bp, Homo sapiens
catcagtgtggcttatctcagaaaacaaaacatttcaagctagacatttgagaattatatcagatacctccttatccttcaacctctatatccagtaatcaccaagttctattgattgacctccgaaacatctttccaatgcttccatcttcactttatccaccttagaccatctcaccatcatttccatgctagactaggcagtagcttcctaattgctatccccacatgcacacccgcacctttccaatccattcccttgcttaaaattcttcaatggtggccatgcatggtggctcacgcctgtaatcccagcactttgggaggccaaggc

SEQ ID NO: 211151 - DNA, 540 bp, Homo sapiens
cctgacctcaggtgatctgcccactttgtccccccaaaatgctgggattacaggtgtgagccaccgcgcctagccatttacaaacattttaaacttacatattctgtactaagcactttgcaaatgatttagttatctgccaattttattttactttattttattttttgagatggagtctcactctgtcgcctaagctggagttcaatggagcaatctcagttcactccaacctcctcttcccaggttcaagcgattctcctgccacagccttctgagtatctgggattataggtacccaccatcacgcccagctaattgttttacttgtagtagagacagggtttcgccttgttggccaggctggtcttgaactcctgacctcaggtgatccgcccaccttggcctcccaaagttctgggattacaggtgtgagccaccatacatggcctgattttttaatgacaaattttctttgagctctcattaatctagatagtatgctaggaagtcaaaaattgcagcacttcaatccctgac

SEQ ID NO: 211152 - DNA, 751 bp, Homo sapiens
tactaaatcctcatatagttctgggtctgtttctgggctctactttgttcatttactgtgctggtactgcaccgttgtaattgctgtggctttgtggtatggtatggcttgctctctgctagggcaagtcgaagctcttttgttcacctgctctttcacccaaattttctgtcctgaatccagcacagccaaattatggtcattgtcaccaccaactacagtgggtgttgagcatttcccattgaatctcctgtaagggttttattggattctgtgatagcagtaaaatgggagcctaagaggtattccttaaaggactactaatcagacctggtttcccagatgatgctgaagatgacggggcctgggctagacttttgagggacatatccttggggttgggtgtgatatagaccagcccttacaatttgcttgactcatgggaatcgtacagggccagaaccagacacctgtcatgctaataacttccctcacaattcagaaatcactgtgattgaagatgggtggctgttataatactacccacttaaaaatggatgtaacccattttttaggactcttaaaaacatcaaatcagtaatggccgattaggactttttaatttttactaatctctacttgaaagttttctagtcattcatttcaggaaacctaattcttataattcatatcatttagaatatcataatgctatggatattagctagctaacttctcaaatcttctagtt

SEQ ID NO: 211153 - DNA, 425 bp, Homo sapiens
taaaaacttattcacataggattataaatagtatttttatactagaattttaatgtatttctatgattacttcacttttgtcattcttaattttgtatgtgcatactttatctctttttcattagatgacctagaagaatatctattttagaggtttctcaaagaatctgttcttgggataacttgtcagttcaactggtttttgtgtgcctgtgttcaaattaaataatatctgtctttattgatttctttcttctgctttctttaagtttgttttatggatttgtccatatatgccctattgttattcttctttaataatgaaaatatttcatggtatgaacttgcttctgttcacaattttgactgcattttcatgtgtcttaatatgtggtcttcagaacattaaaatatttgttataagg

SEQ ID NO: 211154 - DNA, 518 bp, Homo sapiens
ccagagctgcatacctgaaggtcacagtgtcttccgggacagctggggacaggtatcttttgttgcaggagatcaattatcctgagaactcaactcagccagtgacatgaacatgggggccagagagcagatggactgaagggatgggacgtagttgacacttgtgggaccctttctattctaaagccagagtgcttggctccttgtttattaaagttcagaaagtggtgggagagtgtagcatgtattacacggcaattctaggactctgcaggaacacctcattgccatcccaggatgcttctggaagcttagcagggcctcactgatgaggaaactgctgacctcaggccatgtccagccatggggaacatcggtttcacccctgagtcagcccttgtgggcacccttccctcactgtttcatgtcagtgagaatgggggagcaggttgtccctagaggagactgggataccacagtttcgtccacaaagcacacataatgataaaaaatacttg

SEQ ID NO: 211155 - DNA, 510 bp, Homo sapiens
gtaccgcctgcgctgaacttgcggctatggaacagttccgaggtggcactgagtctgaagcaatacaagcatgataaggcggtcgactgatggagggacggggctgctcgtccagctgagagagtgagaggcaaaccatggtcatatctgggaaaggacgttttgagcagttcaaacagagggaatgggcatgcggaggccctgaggcagtgattatgtccatgactgagaaaacacggaagctgagttagagcacgtgagtgagaggggcagcgtcctgtgaggcctgtccccttctgtgataagaacattgagggttacagtcagtgagctgagagggccctgagagttggggcagacgagcctccatttccagagggtccctctgctctgctcatggagaggcagctgcagagttgcagcagggaggttggttggcaggcatgctgatacatctgcgaagaggtgaggggaagtgactgggaccaggtgactggtgagaagtggtgg

SEQ ID NO: 211156 - DNA, 271 bp, Homo sapiens
tgtataaagtaatgaaatgcaaacaaaagaagtaactttactttgtcctatctcgccagaattttctttttttcttatcaaggagcaacttggcctacttatgtcaaaaaggaagtctagatgtgcaaagaaagtttgaagtaagggccataaacataaaggttactttttctggttttctcctcaaccttctgctctgctgcttctcaggataaatgctgacatgggtcatctggcctgttcacattcactgacagcacagcacttcccc

SEQ ID NO: 211157 - DNA, 610 bp, Homo sapiens
caatccagttttcttagattatgaacccatgtatttaaggatatgatctttcggaaatctgcctttttctattaaaatctggaacatctcatgttgcattaaaacctttttatgaatttaacactcaaattgtagctcctttgagagagatctgctatatccctgtgtgcacaaagtttgattattcttggaaatgtaaccatggtatatagaactattttatgatgggtttgttgagcagtccacttaaatttgatgaacttaagttataaagtcactgttagattgggggaaagtgattttgagttacattgggatattgggatattgcagacaaaaacaaaactatgtgtctgatccctggtttgcatcctctgatgttccatggtctgaaatttaaatggaatagggaaatgtgaaaatactggttttctgtaatcgtgagaaagtttacttttgtctttttctgtgatatttcagttgctactgaaaacttcctgcttgcagggaacatcagctaattaagagccctccctgcttttataagtggcattttaaatgttttaatgaaataatggttgaaaattcagttttatttttgtctcatttt

SEQ ID NO: 211158 - DNA, 325 bp, Homo sapiens
tggcggatcagcatctcggccgctttgggccagccctggcccacctgcgggaccctgtccttggcagatgggactcggcgggacccttcttactagcctgccttcctgacaaaccagaaagcggtccccttggaccgccctggggatggacccgacctaaccgcatccctaacgatgcgttaggatgggaggatggtggaacccgcagggacgagaaggagactgggcacacactaggatcccagccccggccctgccccccgggacacattggcacttgggcattctcacgggtcacggcaaggccagcttgaccaagaggtca

SEQ ID NO: 211159 - DNA, 378 bp, Homo sapiens
acgttactcacttctcttctgtgcaccggagacacatttatttccatttgcgtaggccagcctttgcctttgccttttcaattagagccacagagtccaccgatggagaaagtgataatgggcactgagggcatttttataccttgcagtgtcttaaagtaaatgctgaccaacaggcctgataaaatcccactcagagcactgtgtataatttggggctctctcctctagtaaagatatataaagcaattagtggtagaaagggtgagttaagcacaactcatttatcgctgccttttaaaagctaaagagggaactttacagcatatgaagggtgagatataagtgaaaaggataagctaacacagtgccttgcaa

SEQ ID NO: 211160 - DNA, 436 bp, Homo sapiens
tgagacagaatcttgctctgtcgccaggctggagtgcagtggcgtgatcttggctcactgcagcatctcgccattgcactccagcctgggtgacagcatgactctcaggaaaaacaaaaaacaaaaaactacacacacacacccctccccccaccaaaaaaaaaaaactgctcacaagagtgcgccctctactggagggcgaagaaacctcgtcattacaggcctggtactgtggcactccgtgaaattagccattatcagacatctactgaactgattcgcaaacttcccttccagcatctggtgtgagaaattgctcaggactttaaaacagatctgccgttgcagagtgcagcttagtggtgctttgcaggaggcaagcaaagcctatctggttggctttttgaagacaccaacctgtgtgctgtccgtcgac

SEQ ID NO: 211161 - DNA, 418 bp, Homo sapiens
gatgttcatcatgatgtttttaataaatgaaaggttgaaaatcttttgcatcttgatatccaagaacaagaattggttaaataaatcttagtatatccatataatggagttctccaaagctatggtcaagaccgatgttctggaagaatttctaaactaccatatcaaaaattctcatgctgcaatattatgataaaaatccaaaacagaattgcacacacagtatgatattaactgtgtttaagtaatatgaacagggagggaaaaaatgggacgtacaccaaaatgttaacagtggtgattgttattcctctctttggttccagttttttcttagacatttttctaggttatcaaaattctctgtaatgggcataaaatacaataaaatttcaaaaattaagatacagaagaaaaa

SEQ ID NO: 211162 - DNA, 532 bp, Homo sapiens
gtttggtggacccttccttgtattccttcacaaatattttgtcatattataattggttgtcatcttggtgctgctaaaatcatagactagctaatccagatagaaagtaagtggaaaataactttttacctgatttttttaagcctagaaagcaaagttttataagttaggtatagtaatgcttctgtcccaagataaaattcaccttaagaaagtagctagtttgcatgtcatttacgtttttgatctgtctcaagtaatcctgataatcctagacattttcttttttttttgagacagggcctcacactgttgcccaggctggaatgcagtggcaccatcatgactctctgcagccttaacctcctgggctcaggcaatcctcctgttccagcctccagagtagctgggataacaggcatgtgccaccactccaggctaatttttatatttatttttgtagatacagggtcttgttatgttgcccaggctggtctcaaactcttgcaaggctcaatggatcctgtaggtt

SEQ ID NO: 211163 - DNA, 243 bp, Homo sapiens
atgcatttttttctaagttactaccttaggaggaaacgaaattcaagcttaaacaactacaaacctccaattaatccctgattacataaccaggaaatttccacccagacactccaaataaagcgactacataactgtacccaattatttaattgtctttgcttcctcacacaccttatacaagcctttctttcaagaccttctagtagccccccaaccacaaaccattgctgagcgctgtcc

SEQ ID NO: 211164 - DNA, 590 bp, Homo sapiens
tgtatcaacctcctgggctcaagtgatcctcccgccttaacctcccaagtagctgggaccacagctgcatgccaccacgcctggcaaattttttgatttttttttttttatttgtagtgaccagatctcactatgttgcccaggctggtctcaaactcctaggttcaagtgatcctcccgctcagcctgccaaactgttagaattataggtgttagccaccaagcccaccctgtacttcaatttaacttaattttttcagatgagcaaattgaggcataaagagattatgtaccttgctcaatacagctgaaaagtggcacagttggtacttaaacccagatactgctaccatggttcatatccttgaccactgtactatacactatactaccttttgttgttgttagagacaggatctttttgtgttgcccaggctggtctccaactcctaacctcaaacagtcctcccatgttgtcctcccaaagttctgggattacagacgtggggtcccacatgtggcctatactgcctttttgataagtcaaaagcagctggagcctcaactaaccaatcctaattgcacactgg

SEQ ID NO: 211165 - DNA, 432 bp, Homo sapiens
aaaaaaaaaaaaaaaagtgataaaagagtaatgcttttcccataaagactaagaagagtaagaatctcttagatgtgggcaggaggattgtcgggctctgtccttctcaggctcaccaaacacttgcttcattttggcattcccatttgagaaggtgtatagagaagttggagagggttcagagaagcattttcattactgaagttttgggaagtaaaagtaattttaatgcagaataaaatctgaagaaataggttatatttaagtaagacagggagtttagagaaatttcccagtggttagaagttttagcaaccaagggaaagggcaaaatgttaatctctcaggtaaatttgattaaaagggaaactgtaatcaggattaggaaaccaagtaactttgcggtgagtaaacagatgcatggttagaata

SEQ ID NO: 211166 - DNA, 1431 bp, Homo sapiens
aagtggtttagcatgctggagctggttttctgcttggtagccctacaactttggcccaactacttggcctctgggactcagattcctcctctttaaaatggtgctaataatagcacccaccctctgtgaggaggatgctgtgaggacaaaatgagatcatccacataagccgtgaaccctgttcctggtaagctcctggaaagaagtctatggattatactcaacctacactccagttaaaggaacatctacacacagaggaaatgaataacatgaagtgaagtcttcatctccattcccaacagtccccattctacttgcagaaaggttgcttacactgaaaatcagtttattttcccctggtgcaaagaacagtcgtttctccaaaactgaagctggaaattatctgaaatatcaggtcctccggaaaagggacgtgaagccccctttgtaatttctgcattagcgtgctctcctggcaagcaggaaacctcatcagagaagtcagccaaggaaagtctttaaatggaaattgtgcaaacgaggagcaaatgcattaaaaagttgctgacgggcatgaaatgctttgatgtgaagacggaaaactccaagcaggaaggattttaacattttgaatctgattgactctgtggtttctcagcacagttattccatgggctaaaataaatgcagaaatggtactttcagaccacagctgcagaggggatcgtggtgaatttcaatgaaaatccatttgaatcttgaggttcagatcttaaaaaagcaaaggacatgagagaagtaatattgttgcttgaaatttcattgcttatatctaaaagaaactcctatttttaagagaaatgttgaatctttgcaacgtggtagacgctcccacaaaactttctcctgaaataggagataaatgttggaaagaggcaatgtattgagtatgctgatagaggtggagttcagagacaggcaagcatacataagagtcaggatgtttttcagtattatctttacaaatgagtttcttacagtggtcaatgacaaaccaatttcattcaaagcttgcttcaataggcaatggtttgatgccaatatgttagctatttactttgaccaccgtatgcattaaaaagaagaaaaattaagaatactcaagcagaacctccaacttagatagcactttccacaaaaagtaatggagggatagactgaagttaaatgggatcaggtatgtgatgagatctcagaagtgtttgcacaataatgcagatactcattttaaacagagtcataaggattggaactaataaaaataatagaataaaataccgatcaagaatgtgtcctcctgcgtatctgggttttgaattctggctccacagaacttgtcagatatatgacattaaacaagatacttca

SEQ ID NO: 211167 - DNA, 363 bp, Homo sapiens
caagatggcggcgccactacactccagcctgggcgacagagtgagactccgtctcaaaataaataaataaagttcacattacaccctcattcttctcaaaatcacatattcacaaattcaggctccagacaaatagaggcaggaatgactggactcatttcttcctctgtaagaaggaaggggttggggatgggagagagcctcccttcagagtcaggctgtttataatctgccatttgcaacatcattattcctcactgtgaggacagttttgctcagaggccttgcaaggatggtgtccccaattcctcatccagtgcagacataatcaaaacatatcaccaccgccaaggtcaggttcta

SEQ ID NO: 211168 - DNA, 745 bp, Homo sapiens
cattttggaagaaatgctaggtcagtttgtgaagctttaaataccaaggtatgggtaagggtggagccaaagtaaatggctgccttctgcctctgagagttacattgatggttaatcaatttcacatatattatgctaaaaatactgttccttttcaggaagtcatccagattggtagaacttaggaagataaagaggaggaaatagagattaaaacattaaaaaaaaaaacccaaacaaaacaaatcttagattattaggtttttaattaaacatgatgaacacattcaaatataacataaaggccccaggctgaactgcacctaatcgaaacagattaagtcacccttccatgcttgggtggttattaattctgtttatttatgcatgcgagctgaaggtagcatttgctgctgttgtgttggtgcttattgcactgggattccgttgccgcttgatgctgtgctcttaattagcattcagctgttgattatggaaatactggggatgctaattgaattctttttaaaattcagggcctgcattttccttgtggagtttggtttgacttgcaagattgtaagattgggtgctccagtgagctgtgcatctcactctttgcttcctatccacttagctgcgttttggtttttaaaattattttcatgttgaattcgctttccgcaacaatccaggtgttgcacaaagtgaaggttctgttgcttaccatgttactacagggtgt

SEQ ID NO: 211169 - DNA, 346 bp, Homo sapiens
aaagaaggaggggagggaaaagagtcagcatgtgtattacagaatgattaggaaatgggaaaggaagtacccagtacagcaaaatcaactatcaaataaacccctcagtgatggggtcaccaaagcccaaaggagctcagtctcctgcagttcaggaatgaggggaagggatcagggaaagaacacacaggtaccctccctctgtccccataaattcaagatttcacacaaagctttggtttctagcagtaaacatggagttatatccttctatctcctattaaacaatcttgtggccactttgacataagtttcttatacccccggaagttccagggtaccgact

SEQ ID NO: 211170 - DNA, 1172 bp, Homo sapiens
ggacagatggattttttctctggaatattgacttcaacccagccacatatggatatgcttagaacagcagggctcagtctgaagttgggaccatatctgttctcaaaacatgtggatccctgaggccagacaccaggtgcccgccattggtgtcagggccctactcctctccctgcagtgcaaggggccagtcctcaaggcaggggttcctcctctctggacacacagagaaagaggaggcggggaaacagcaagtgcccaggaagggtgaggccccagggacttgaagccagccctctgatagcatcgctgtttcagaggaacactagctacgaacggggctcccttgccagtcagtgctcagagagataagcttacctagcaggtccttcctacagctgcagcaatgatgcctggactgtgtctgcccaggggtgggcggtggaaggttctagggagaggagttggcacttccctggtgcagcccttccctctcctccccagccctgacaccaccacagccccttcgtcttctctgtccagaacctcttcccagaggctccctaaggagaccgcggagtctccgcctggggctctcacagccccacaccatcaccacacccagccaggtctgatgagtttttaaggtgaaatgggagtttttcaggctgttgggaagtggtgtccccgctgtaagcatgctggccccacatctgctttgatgcttctcagcccaggatggtgcagcagcccacaatggggagcagctagctctgtctatgagagtttggggagcggggtcttgcagaaaagatgtctgaagagtttttttttatttattttggtttggagacggagttgcactccagcctgggtgacagagcaaaaaaactccgtctaaaaaagaaaaaaaagagaacaactgccccttctagcagcagcccagatggagacacccatagcagggcgccggatccaatctcttcctctcctccctcggccttcctctccccacaaaccccagggtctagaaagtagaaggttctccctcttctctccttcctcataatgaacctcgatggagctggccgagtgcagtggtggttacagttaattgatcacaagacttacagattttttgtccttctccatcccaatggttcactggacgg

SEQ ID NO: 211171 - DNA, 550 bp, Homo sapiens
caccaggtgcccgccattggtgtcagggccctactcctctccctgcagtgcaaggggccagtcctcaaggcaggggttcctcctctctggacacacagagaaagaggaggcggggaaacagcaagtgcccaggaagggtgaggccccagggacttgaagccagccctctgatagcatcgctgtttcagaggaacactagctacgaacggggctcccttgccagtcagtgctcagagagataagcttacctagcaggtccttcctacagctgcagcaatgatgcctggactgtgtctgcccaggggtgggcggtggaaggttctagggagaggagttggcacttccctggtgcagcccttccctctcctccccagccctgacaccaccacagccccttcgtcttctctgtccagaacctcttcccagaggctccctaaggagaccgcggagtctccgcctggggctctcacagccccacaccatgtggcacagcctagggtgtgacccccttgcctgccctgcgtttgcttggctggagggacaggccttt

SEQ ID NO: 211172 - DNA, 691 bp, Homo sapiens
ccaaaaatcccaagaaggggaagccccacgacagctgaaatcctgtcctcatcagaggaactggcagatattccctatctgctatgtattccagtaaaaaaggaaatactcagccactaaatccaggattgaaaagaaaaaggagaaggttcttgccactgtcacacaaccaaaaaactggtggtgatgagaatggtagtacccaggtgggtaaactttgcaaaatgcctagatattaccctactgaagatgtacctttaaagctgccaagccacggcaaaaacccttcagtcaacatccaagaaaactgtgagccagcatcgctcccgagaccctctgaccatcatcactgggcactacagacacaagagggtggcttttctgaagcagctgagctacttgtgactagacctctggtcttcaagcaagttcctctttatagaacacaccagaaattatcattgccacctccataaaaattaatatcagcaatgtgaaaatcccaaataatctcactgatgcttacgtcaagcagcagctgagaaagcccagaagccaggaaggtgagatctttgacacacaaagagaaatatgagattacaaagcagtgcagggttgatcagaaagatgtagacttgaaaatttcatcaaaaatcaaagctatttctcatctccagggctacctgtgatc

SEQ ID NO: 211173 - DNA, 780 bp, Homo sapiens
ggatcacaaggtcaggagttcgaggccagcctggttaacatggtgaaaccctgtctctactaaaaatacaaaaattagccaggtgtggtgggcccctctaatcccagctactcaggaggctggggttagagaactgcttgagcctgggaggcagagattacaatgagccgagatcatgccactacactccagctggggtgacaaagcaagactgtctgggggggataattataatcctgtgcctagaatgctgttggacagcaaacttggagaggtgcttagagaacattgtgcctggcattatgtcagcacacgtagtgctgtggaaacacctgcctgtgcacagcggtgtctagtcccgccaggtcacctccctcttcctactgatgaggcacctgagcctctagcactttctggaattgggcagaaacaagcaggctgcatctggagccacatgctccaaagacacttctccgtggcagcgccgctggccagctgagcagaggatgatgggaagagggttccataccccacaagaccataggcaccctggaggtcccctgggtctgtgttacctgatcttctgaatgcgacagtccttcccactcagcacgctgcccagcagctccatcacggggtcctggaactggttggtgtccagcctggccaaggggagcagtgacagtgagtgtcccacccgcccacgggcagggtgggggccctggcccggggcctctgcctctctccatcccatgcagcgctatcaccgcagctctgaga

SEQ ID NO: 211174 - DNA, 552 bp, Homo sapiens
gtgtatttgggaagatttctgaagaagtttgtctctatggtagaatctgcaggattagggtctaaccaatgccttttaaatcatctccgtcagttgaatctcatgtccactgaagtttgaaagtcattgctaacttgtatatgacattgctaggaggcggtacttcatgaacagtatgattaacagtatttgtttaaacatgtcagaatatatggctatatttctcttagtattataatgtgtaggagatgataaaagtcctatattttatcaagataaacctggacagaataagctaattagatcacattgctaaattggttataagatgtttttaatatattccacatatattgtaaatataattcaccttaatgggagagactttaatgtacacaggcacatgtataacaaggtataaatatttgggccaaaaggccaatctaccacatattccaaaaccatgaaacagaacaaatacagttggccctccctatccgtggtttctgcatctgtgattcaaccaaccatagattgaaatatttgaaaaaa

SEQ ID NO: 211175 - DNA, 497 bp, Homo sapiens
ccaactgtgctgtccataatgtgtctatttcttccacttctgattggtagggcacgctgattggtcccagtgggcccactccacctccctaatttttccaccactcctgaacctccttcactccctccctctttttaattttttttttttttcatttcagttgctttaaggttacagatggtttttggctataaaaatgaattgtgtagtggttaagtctgagattttagtggacctgtcacccaagtagtgtacattgtacccagcgggtagttttttggctctcactccctcccagctttcccgcttctgagtctccagtgtccactgtactgctctttctgcctttgcgaaccgtagtttagctctcacttgtaagtgaaaacgtgtggtgtttggttttctgttcttgtgtcaatttgcttaggatagtggcctccagctccatcgaggttgctgcagaggaggtgattttgttcttttttatggacaccgtg

SEQ ID NO: 211176 - DNA, 411 bp, Homo sapiens
aaccaaacttcttatcgactatgaaaatagcccccacaattactaagaagatcatttcactttatagaagtcattttttttttgctttggataccctcataatggaatttttgtattgtaatatttgattattattataatctagaaagggaaagtgatagagaacagttgcatcatctcagaaaggggcccacattcaccgtgtctgctcttcctaacaaactgttctcaagatgttctcatcaaggagcttcttgtgctatatctttgttaaagagatggagcctgagttctgaggtattctgattatctgaagagattacttaatgacacaatgctatctcaaagaacagaagtagggagattcaagacaattctattccttacagaggtacaaatttctatgctagg

SEQ ID NO: 211177 - DNA, 220 bp, Homo sapiens
  misc_feature (18)..(18): n is a, c, g, or t
  misc_feature (43)..(43): n is a, c, g, or t
  misc_feature (46)..(46): n is a, c, g, or t
tagcaggatccccgcatntgctcccatcagaactcctaacttnttncacctccgggcctttgcaagaaaaagactttatataacaggatggggatggagaagagggactgaactctattcagtgaagtgctgctctgcatggcttagaagggtggggcaggaggtcctaagcatcaggtagtgggtgtgggccaccaaattctgatgggagcaagatgcg

SEQ ID NO: 211178 - DNA, 810 bp, Homo sapiens
aatcataggtagataagagacaaactattgcattcttttgagtctctgattagcctttcacagaatacacaatttacaggtgagaggagggtagaggaaataatcttatgccctagtctggcttagtgaaacaatatggcagaagaagcaatgagatatgcgtttgtctcacatgagcctcagcgagatgactgagttctggctgtccttcatccacaaggaatttccatgtgggcaaattgtgagggaggcatgtaactttttaaaaaatgtttgtagctatcttgtttaggaataaaatgggaggcaggcctgcctgacatagtccccagcttgactttttccttggcttagtgatgttggggttccgagatttttttcctttcacaggatttacagccaaggaacagagcgagtggatcagtggatggaaaattattcatggagacatcaagggcatggaaagtcttgccatactgacttaacaggatttttgctgaaggcaggtcaaggacttagagtgttaatggaaaaagcaaactgtaaaatatttaaagaggtttattcagagccaatatgaacgactatggcccgatgaacagtctcaagaagtcctgagaaagtgtgtgtgaggtggttgggttataatttggttttatacattttaggaaggcaggaattacaggcgaagacataatacgtggaaggtatatattgattctgtctctgcctgaaaactgggaaatctcgaagtgggggggtggtggaatggggagcttatgggtcataggtggattcaaagattttctg

SEQ ID NO: 211179 - DNA, 776 bp, Homo sapiens
ggctggtctcgaattcctgacctcaactgatccgcctgcctcggccttccaaagtgctgggattacaggcgtgaaccaccacgtctggcctatatttgagtttttctgactcatgatcaggcagaagaaagacaatggaaacctgtcttattaaaggggtgctcatatggggcatgaccctatggaaatttgagggcaattcccttccaggtttgaagggttattggaatcataacctggcaagcatttcaatcacttgctaagagtctactatagtggactatctgctaaagcaagtcttgtcagcatttcaatcacttgctaagagtctaccatagttggggtagtctgctagttgctgtgaatacagctaactggggtggacgtggggaataagtgcacaataaaataaataagaaggaagagtactatataggaaatggctgaattaatggtatagaaaggtgtggagaaaaggaagactctgcagaagaggtaagacatgagttgtgccttaaagcaaaggagaggtcatatgaacagaaaggcaactcagttaaagagcaaataacctagctttgccataacatagaatgtgtatgtcagagtttggaaattactagatacgaaaattgaacctaggctaaggaatttggactttcctctgttgaatatgaaatgatccattatacctggcatccattacatttctttccttagctccatatgtctcactccactttgctataacggtacattcgtcccttgagtatccg

SEQ ID NO: 211180 - DNA, 304 bp, Homo sapiens
attaatgattttcttagctttgataatggtgttctggttgaggaggagaatgtccttctccttgggtgatgccagataaagtatttaatgggagggacatatcatgatgcctactaattatttttggagacagaaagagagagagtgtgtgtatgtatagaagagatgtagtttatagtaagatggtaacaactggtgaatctagatgaagatatatggtcatttattatattacgttttcaaccttactgtggatttgaaaacttttgaattaaaaagtattttttaaaaagaaaagttcaca

SEQ ID NO: 211181 - DNA, 305 bp, Homo sapiens
atcaattggagaaagctaaatatgcaccctaaccaatcatgcaccccaaccaatcatgcactgtaaccaatcatgtgggatgctttgcttttcttctcccttctacagcgtccccatgccaacagccaccaatcagggcatatctgaagccttcttttttccactctagcgctttcccagtccctctgcctaactatgagtctctgccaaatgcaagtgacagtggctgattccttgcttattctcatttgagtgttcctcatttattcccacagatgctttcttgaaaaattatgtttctaggc

SEQ ID NO: 211182 - DNA, 374 bp, Homo sapiens
tgtgccccagggcagcttttaatgcagtccaacagaaatttgtaagctgtcttaaaacatgagattttttttgtgattttttttaagctcatccgccattgttagcacattttatgtgtagcccaagataattcttcttccagtgtaacccagggaagccaaaagatttgacccccagtaacttcacacctaaggagattagcaatattccataatctgtaatattcagtctgtgttcatattctcagttgtgttcattcttttcatttgtgtaaacaatgcttttcataggttatttttaaattcaggaaccaaattcatgaattacatttgtgcattgttcgtctcttttaaagtaagaatggcccttcccc

SEQ ID NO: 211183 - DNA, 290 bp, Homo sapiens
cacctcagggacctgtgggattataacaaaagatgtaacatttatgtcatgagagtcctgggaaaagaagagaaaaagggagggactgaaaaagtactcaaagaaataatggctgaaatttctcaaatttggcaaaaaaacacaaacttatagatacaagaagctgagcaaatggtaaacaggataacctcaaagacattcacatcaaagatacatcataatgaaactcctgagaactacgaacaaagaaaaatcttgaaagaaataggagataatcggctgggcacggt

SEQ ID NO: 211184 - DNA, 215 bp, Homo sapiens
tccaaccacgcccccatcagtaatccattctcaacacaacagccagattgatcattaaatcatatcatgacattcctccctcaccccatcaaaacctctgatggttccccatttcattcagaatgatgtggtttggctctatgtccccacccaaatcttatctcaaattgtaatccccacatgttgggggagtggcctgatgggagaagatgcga

SEQ ID NO: 211185 - DNA, 378 bp, Homo sapiens
ctccacaccccatagacataggagagacttgggaaatcatatcccaagaggagcttcccagaggagtagggaacacatacttccctcttgattctagatacaaggggtcatcatcattgtagaattctacttactcagagtattttcatgatgcattaagcttagaaatatgctataatgcccaactgacacactgttgtttttaaaaatactacttttgtaaaaatgcatatgtttatgtaaaaaatactgaaacgttatacgtgaaatgtttaacactgattaggtgtaaaaaagagtggtcatttttactaaagcttctacactgattgtcttttatttaaaaagcatttaaaatttttttgacagagacgactc

SEQ ID NO: 211186 - DNA, 369 bp, Homo sapiens
gacagaggtagagagaggctgctgtggtggagaatgaagaggagaacataatagctcccacctccaggatggcactgtttaatgctgtaaactgatgtagctaacccctcacagctggcaattaagcacgatagagaacgtgtttgcaacgctcctgcagtatttgtgacacatcatctaccctctggttatccaggggaaaaaactctctctggggagtgtcagtacatgaacaccaagttctggaggcttaacccgctggtctcacttctcaccagcgtcacttgcctgttagggtagctgctccaggctgggagatgagtggagtaggcattattcgttttggataactacagctaaaaaaagaaa

SEQ ID NO: 211187 - DNA, 440 bp, Homo sapiens
ctcatgaccttagagcctaacactgttatcctcaattaaggacacaccatgtatcatcttgcatctctgattagttcatagtgtctcacatataatatcagtaaagtacaaggctgcctgtgttctcctttttttatacttttcaaatgaattcaggcttcccctttgccttagtttcactgacactgtcccacttcgctaaatgacattaatcgataaaaggcaggatttgcaagcacactgcaaaatacaacatactccgttgcaaccagtggtatcctaccttaggaacgatatattagggcaaacatcaagaaacatctagaacttatgcaataccagataatctttattttcctctgaaacctgacaaaccaatttcacaattttctcagtacctgaaagtctatgttgccagccaaagtgttcttcccctatgt

SEQ ID NO: 211188 - DNA, 574 bp, Homo sapiens
taggaaatatgatattgcattcttatagccaaagctctatggaaaatataaggaaattttaatgtatcttcttaaaagttgcttataatatggtttgaaaattgataatgtacataactatacattcacatgtaaaatatatataaacaaatatacgtataagatatataaataaaaatatgtataaaaagagatgcttcaaattcgtaagtaagtatggaatgagtggttgaaacagacaataaatgctgtagaaatcccaaggagagagagattgtcagggcccaagagtgtcaggaagagatgagaaatatggggctctgtctaggccttcagaggtgtggggatacctttcagatacctggttaggtacaaggacccaaattaccagcagaggcacatatcctgatgttagaatttaatttgaaatagccaagtcacatacatatatgtttgtatatttcatttaaattatccagagcagtgcctcttttgtcatgtcttgatgaaattatctggaatttataaagaggaattttatgagctgctactaaggatcaaatgggaagggaaa

SEQ ID NO: 211189 - DNA, 303 bp, Homo sapiens
aacagatgaacagataaacaaaatgtggtatatacatacaacgaaaccttactcagccctaaaaaggaaacgaatcctgacatgcactacaaaatggatgaaacttgaggacattatgctacgtaaacaagccagtcaaaaaaggacaaaaactgtatgactccactaaataagacatctagagtagttacattcacagagacaaagtggctgccagagattgggggaaggggaggtggggagttattgttcaatgggcacagaatttgggaagatggaaaacttctggagatggatgatggt

SEQ ID NO: 211190 - DNA, 671 bp, Homo sapiens
gttgcacctatcactacagctggccctccatatctgcaggttcctcatccatagattcaacgaaccatggatggggaatatttggaaaaaataaaatatataaaacaacaatacaacaataaaagcagtagaaaatttaaaatacagtataattatgtacataccatttacactgtattaggtacttagagtatacctgaggctgtatacaaacattatgtcatttcataaaaaagaactcagcatctgtggactttggtatctgcagggggtcctggagccaatcccctgcagacaccgagggacaactgttcactcctttttattgctgagtagtattccgagtagctgggattagaggcatgtgccaccacacctggctaatttttgtatttttagtagagaaggggttttgccatgttggccaggctggtatcgaactcctgacctcaaatgatccacctacctcagccttccaaaatgctgggattacaggcatgagccaccacgcctggcctcactcagcagaattttttttgagattatgctaacatccatgttgttgcaccttataagtggttggccttcaatatctgcaggttcctcatccatagattcaacgaaccatggatggggaatattgggaacacacagaacacgtcgaggggggg

SEQ ID NO: 211191 - DNA, 396 bp, Homo sapiens
tgaggtcgactcttgaggatccccaataccaagcccaagttgtataaaagagaaagcaacaagctcaccccaagggatggcaggaaagaggaagtgaaggtgcttcatgggatttgaaatagtgagtaagggaaagtgtgaaagttggacaaactggcaggacatttcagttagaattaatgtcacaaaaaaggcatgaagaggtgaatgggaataaaggatgtgagtagcacgaggccaaagatgttgtaacataagtattcagggtgcagacatgcaagacttgcgatgacataaaaaggaggttgggatttacaaatgataggcaagctatcacagaattttaagcagaggaaaacaaaattgtatttatgcttctggggcaacacgaaggac

SEQ ID NO: 211192 - DNA, 443 bp, Homo sapiens
agaaaccagaccttagcggttattgtatccttgggctaattatgagcaacaaaaagccactcagtaatttaaactgaaacagaattaattgaaaggatatgaaatggctgcagaactaggcttgcaaaataggcaggaacaagggcaggtagctaaagggcaggaccctggacaaagtcatggcacacactcagtcactctcaacctggtgtgagcacggctgctgcggggtgccacagctggagctgcctgttcccaacacagctgcctctggaccctggatgagaaagctgctacatctactgtttctgctcctgttttattagttagtatctgattcactctgggcaaatgtatgtgattagccaaacccaggtcacagccccaccctggctgcatgggaggcgtttttgcttgtctgatgggaggtgatctcagtaacc

SEQ ID NO: 211193 - DNA, 517 bp, Homo sapiens
aactctgtgtctactttgcacactcctgaatccagtgactaacgtagtgcctgcctgtggccagcgctcagtgaacatttgttgggtgtatcaattgtgtcaatttgtgcagtgagtactattatcctctttgtgtaagtgaagagtctaaatctcgaaaggttcagcaccttggtgaaactcctgagtggcaggagttgcatccaggtctgtaggaccccagggcaagggttctttgctgcctaagaatttagtctagttggggagacagatgagtgagtagaaattggctgtacaccgaggttagcacaatgataagcacagcacagtagggcaccaaggagggtgccaggctgaaccttggaggggaaaggacaggagaagaccacgagggctttgtggaggaggcgatgacccaaccgcatctacatttgtccaaacacatgaattgatccttgggattctagtggggaccagaaagagaatttgctgaagaggagaaggaaaaaaaaaacac

SEQ ID NO: 211194 - DNA, 459 bp, Homo sapiens
cctcaaagtcctgggctcaagcaatcctcctgcttcacccttctaggactacaggcacacatcaccatgcctgcctaattttttctattttttgtaggaacagagtctcactatgttacccaggctggtcttgaactcctggcctcaagcaatcctcctgccttcagctccaaaagtgtaatcacaagtgtcagccactatgcccatccctaagttgttttagtatggttatgaattctctcctctacattctgaaaccaacatgagttatccctttttctggatctctgaataaataactctaacagatgctatttcagctacttcctaattccaatttcccaacagatcatataatacctagaacagctacagttaaagatctcaaacataatgctaatagaattttatcacaaaggcttaatttcaaaagaaatgaatattgtggctcacgcctgt

SEQ ID NO: 211195 - DNA, 553 bp, Homo sapiens
agaatccagctgtagtgatactcagaaactgacaccattattctaattttacccataagacaaacctttgcgaaaaaggatgtcctgcagagtgccctggatcagatgatccaggaaacgtcactatagaaatgccaagcatcttggtagcatcaagcattccaatttctatggggcagtactgctacaaggtttgattaatactggtataccactaggcaacttggatttctatgacatctctcctctcggaagtgtgctggtgtgcaataacttgaggcttacagtgaattaagggctgtgaacttgctgacatacactggcagccaggatgggatcagtccacaggaagagaaagaaaagcaaatcttcttccctgctgtaaatgatccctctgccattgggagttctcaagtctttgttaacccatgtttgctaagacccttggccaatgtcgttaaaaccaaatgctagttaaaaccaaaacccataccctgtttaacccattagtgggtgttcttgaaatacagtctcgcattacctaacaatgaca

SEQ ID NO: 211196 - DNA, 893 bp, Homo sapiens
  misc_feature (873)..(873): n is a, c, g, or t
actcgccagaaatacattgtgagtcagacatccctttgaggacagcgtctaataaaatgactggcacacaggtgatcaattaatgattttaaatcaatgaatgaaatcaagttcttttaaaaaatgctttcctacatgattttaatagcaaaaacaagtaataatagaagctcgtttaagagtattttagtgtatcttcatgatgaaataatatgcagttattaaaaatgctttttaaaactttaaaaatcatgcattttatagcctactcttcattcagcataatactataaatatttccatgtcaatattctagacgtaatgctgcacaacgttagttgtgtgggttaggacatgttattcagtccctgagctttaccttatctttcatctgtaaaatgaggctaacaatttatctctatggtagctcagtgttattgtgatgatcaaatgagatgaagagtcagaaaatcctggcaaagagcatagcctgtaaaagagactcagtaaacatactgtggtgagaaagaaaagaacttttggccgggtgcggtggctcatgcctcccagcactttgggaggccgaggcgggcagatcacctgaagtcaggagttcaagaccagcctggacaacatggcgaaaccccgtctctactaaaaatacaaaaattagccaggcatgatggcacacacctgtaatcccagccactcgggaggctgaggcaggagaatcgcttgaacctgggaggcagaggttgcagtgagccaagatcgcgccactgcactccagcctgggcaacagagtgagagactgtctcaaaaacgacaataaaatgctactcgcaacccactagcttgatttcattaccctcntgaaggtcacatcagcagtg

SEQ ID NO: 211197 - DNA, 868 bp, Homo sapiens
gtggacacatacacttttctccaaagacctccactgattatttacaagaaagatcggctcaggggaaaagaccagagagctcacctctgtagcagaggaaagccacggaaataattttctattgactggaaacacacaaaacacagcacacttctctgagctctttgactatatgaagcaaaagccttaacccactggaaaagaaaggcaaaccttccagctcctgggctacttcacccaggtaagaggtaggaaattatattaccagtcaccagatccaggcaaagatccaatgctaccgtggaatggtagacatagaagtcttctgtcctttgcgagtgggactgaaatatctcttcttctaggatcttgtaccagtataaacaagtttgctagaggtgtggagagaggaaggtaacttactcttgccaagcctgtcacagattgaaagcagaaaatagctgccatgcagtgccaagtgtcaggaatgacaaaagagccttcacaatccccaagtgcataaaaccttcctaagattgtggcttgacgataactgagaacactgtaatagagaagattcatgattatactgatatatagagaaagaacatttgtcaacatataacactatctcaagctaaaaacatctcaactaagtgtaataggaggattctatcttcttcaatctaatataggacatctacttagaaaaaaaataaataactaaagcaaaaatgtcaaatgattctccaggccccaactccaacaaaacaaatcacgaaacaaagatatcctctccagtgatatttatccagtatttaaattggagaacttaaccaatttatatatttttatatttataacataa

SEQ ID NO: 211198 - DNA, 907 bp, Homo sapiens
cacttctttttttctttccttcttccctctctccctctctccctggcttttctcccgtcatctttctagctttggccacagttcccggtcgggctcccccgggcggagggaagcgggtctgcggccgggcggctcttgtgaggtatctaggatgtgccaggacacaggcaccgcagtcctgggaaaggcggcgggaagtagtggggaacgcaggctgacgaaggggacggaaggaacagagagcggccggcgcgtcctcctctctgggtaaagccgcgttggttcctgccgcagcgctgtgcttcggactcctagggggcctctggccgtttgaatgaatcgacaatatcagagtattgtggacactttttaatggggccggggaggggccgccgctgccgagaactgagggcgacagaacaatcccacctcttgtgaggagcaggtctgccattctgcttgtcagttctcaccttcccctcctccacggcaaagagtccctttcacacccttctgagtgtgcgggtgcgcccagttttacaagtcctctgtcctgccagggtagtgggagaagcacgcgatggggctagcgcccagtcctgcgggggcaggcgccaagctcccgggagtccgcaagtcgcttcctatattggcaagcttcaaatgagacattagaatctccggcaaccttccttcaaacctgaaccggggaagagaataagccgccctatggccaaggcgcaattgcgtacccgtgtgtacaggtccatgccctgtcccctacactctaattttctcaaagaaaattgttttgccaaaagtaaccctgagaaatgcagacgctccaaacgccctctccacttcggatgaagccagcatctagtagggtctccggccctcaagaagg

SEQ ID NO: 211199 - DNA, 239 bp, Homo sapiens
  misc_feature (24)..(24): n is a, c, g, or t
  misc_feature (34)..(34): n is a, c, g, or t
  misc_feature (43)..(44): n is a, c, g, or t
gaacaccatgacgaagtgactgtnaggaccctgntgtctatanncctgctattagtagaaaagaaaagaaacctctttccttgtagctggctgcacacaaggtgagtaggccaggctgctgcactttttcgatcattccgccaattctggatgtctcactggatccaggactcagccactgtctttgctgctctctttgttcatgactactgcgtcaggtctgtattccatacctgctc

SEQ ID NO: 211200 - DNA, 554 bp, Homo sapiens
attagctttcatcatacagatctcagcttaaatgcaccgcttcaatctaatgcaatccacaatcaacattacaggtcattcccttacccgttttctttctttatagcagttaacaatatctgaaattatcttgttatttgattatttactggttttttctgttacctgatgggagcaagatgcgatcttgctcccatcaggcagctctctcacctagagtccatgacaaatgcttccttatcacttgctataataaaaacaacatctttgattcaatatatcctactacaaaacatgattttcaggccaggcttggtggctcacacctgtaatcccagctactcagaaagctgaggcaggaaaatttcttgaacccaggaggcggaggttgcagtaagccaagattgcacctctgcactccagcctgggcgacagagcgagattccatctcaaaaaaaaagatttattttatgacccaggttctggtaaatcttgctgaatcttctgatgggacgaagaagtcaatgtataaaatccgctgatgggagaagatg

SEQ ID NO: 211201 - DNA, 570 bp, Homo sapiens
atccataccattatatattcttaaaaacatgatgttaaagtagcatattatagggatatgtcagtactttgctaagcttccattttattgtaaaatatttatactgctcccagtaactctttaataagcatcttttatttctatgacactcccttcaaaatagaattttctgtcatcaattaaagtaaaatctccttgaagccacaactcttgcccaactggtagttgatttcaactacccccaccatattatggatattcaataagaaccactctaagaaatatgtccccaccaattaacattcaataaaaatatttctcctttcaaacactatgaaactgattcacacattcatactactccgagttcctcatagtgccataataaattttgcatgaaaaacttaataattacagctaaatatggccccctctctctggaaattttttctataaaccgtgggactttataaataccaatacaatcaagatacatctataaattcacctgttttgttaaccattgtaatgcctagatgactctgtaacatgaaaagatacggttgacaa

SEQ ID NO: 211202 - DNA, 335 bp, Homo sapiens
tcacacaggccatcttaagcaaaaaacaaaaccaaaaggaacacttctgtaccttaaatgtttgcaaatcatggtaccttaaaagtagaagaggggcaaaaaggggtgatacacaaaaaacaagaattccaagtaaaagatgaatgagctgctctaccatatttatggtgactgagagccatctgctggttacagtttagttacaacagtccaggagggccaactattgcaggcagcttctctattacatgatgcatgcaacatgcttagaaacacaatgcactggttctcactcctgtgaggaagcttaaaaaagtttcctatcggccgggcac

SEQ ID NO: 211203 - DNA, 550 bp, Homo sapiens
ctctatagtagagaaacctggaagacaccaccataatcaagtgatcgggaaaacttaagacacactgacctcagggactcctggtatgactcactgaaaaggacttttgaggtattttgaccaaaaacacacaacctcaatctaattatgagacaacatcagacaaaccgaagtagagacaaattcaacaaaatatctgaccagtgctcatcaaaacatcaaggtcatgagaagcaaagactaaagaactgtcacgattggaagagactaaggagacaggacaattcaaggtaaggttgggctctggaacagaaaaaggacattagtaagaagaatctgaataaagtctgtagtttcattttcaaaacaaaacaaaacagttattcttggcctccactactgccttcaattctgcttcagtctgtctgggaaatctgtattttcttttgaaagctccacagggattcactcagtgatgagtcagatgtgggcatcatcgtccttggggctcacttctcacccccggtgcacgttgcagtcactgaggtgc

SEQ ID NO: 211204 - DNA, 347 bp, Homo sapiens
ccaggtctccttttctgctgcactgctaaaacctcacaaatactgatcactaaaaaagccagcatgaagaagtcacactcacagaaaaatcatttcaaaagaaattgtagcaaattatttggagatattaaaaagttaaaaacctactgtttttttctactttgaaaacaaaaatacttagccacaggagtcccccactggcaattgctcatctattcctgaaagagcatcatcgcttcatccattcacttaaacaacttactgagcatctacaagggccaaaaagcactgtttctagtttacttcataaatgaactagattgaaatgagactttatgttgaggacc

SEQ ID NO: 211205 - DNA, 377 bp, Homo sapiens
gattcaagcttctaatctccatgtttcctcatctggttgctgccaactaatagcgaggtaagcaggaagtaagctgatgacctttaagatcttttccctgatattctaatattcaatgacaaaaatgcccacttttacttattgattccgagctgaccaaactacctcttgaggttactgaagccattcatgccttctccaactttatgctgaatacaaccaaaaagtgtatcagttatttacaacatcacttttaatattggtgatcagttgcttattccctagctcaaataaaaaattttaacatgtacactgattttaaaggaaaagcttttcaagaagctatgagccaagaagcattatatgaaaggcccaca

SEQ ID NO: 211206 - DNA, 301 bp, Homo sapiens
ttagatgtgaagcatcctcagtcttataatgagaaaacccattttgctatttagtttacggccaactttgttaaaatatgtatacttaataaagcaaggactaaacaagtttccctccacttaatatgacgtgtcttttattctaagtcataaatgttatctgtgaggactatcaggagagtgagagcttgttctttttcttcttggagagacattttggatagaaatcttccctctcagtagagtttgtatagaactgtgaatgactaatacaaatatgtgaaaatagtccttttatagg

SEQ ID NO: 211207 - DNA, 446 bp, Homo sapiens
tagtgcagtggcatgatcttggcttaccacagcctccacctcctgggttcaagcgattctcttgcctcagcctcctgagtagctgggactacaggagcctgtcaccacgcctggctaattttttgtgtttttaatagagtcaggttttcaccatgttgaccaggctggtcttgaattcctgacctcaggtgatctgcccacttcggcctcccaaagtgctgagattacaggtgtgattcactgtgcctggcctcagttgaactctttaagattattcaactctttccttaattcttaggtagtcaggattcttcaaaactttatgtttctctgggagtcaaaggaagtttatggacacaatttctccatatagtagcttatttctgaaaataagaaaaatgagtaagttggacctcatttctttttctaacaatgtgtgggttacc

SEQ ID NO: 211208 - DNA, 620 bp, Homo sapiens
aggagaattacacatatgcagttgtgttattggaaagtgcataaaattctgaaatcctttaacaattctgatgtgttttattattttattttattaattggcaatttcaaaataagtaagattacctgcctaacagctttttattttgggcagtcattaaggcaagttttgatggccagcttgtctgacattttttgtgtctaaaacattctgaatttggcctaagattttcactggaaccctcctctgctttggacatctaccgtaagactagagtagcgccgtggctcttgttaactacaaaactcaagacacatttcctattacatctaataacaatcttccaaataatgtggaataatcacagtaaataaacttgaaataaatactatgacttagttttactattgggtataaactaatgagcttagcaaacaatttctgttagtgcagtaaaggaatctgaatttgcctatgagtagactagtactagagaacttgcccaaggattagagttttaaaatagtggttatttaatccctcaaaagaatatattttagatgactttatgcattgttcaatagtaatgataatggccaggcgtggaggctcatgcctgt

SEQ ID NO: 211209 - DNA, 369 bp, Homo sapiens
cgggaatgtgctagtccctgctcatccaagcagatactcactctcgtgatttaaggagcagtggaaatatcacctgttcatacatacttccgtgatctgtgttcataaatccagtattagtgagtgactcagtctttgcctgttcctgcgattgcattcactacttaaaagtgccctgagacctcaaaatgcctgaatttatcagattggctaccactctgattagacaactgaggctgcaggagaggaccagattcctggcagtgggcagtggggtgacagaggaaagtaaacagtgaagaagggagcattaggaaaaccaacagtaaacttcaactgcctcagcattttgccaaggacagccctgaa

SEQ ID NO: 211210 - DNA, 392 bp, Homo sapiens
ccagttgaggcaagcttgccgtgtgttggggtcatctggccagcaacatcttgcaatcccctctttccctctaatgggttagcagattctgaggaaaggattttatttttctgttttgagttgtaaattggatttatatttttgttaaagatgaagggaatggggaatgtgcaaaaggaagggaggccatggaggagaggttggaaacccatggaagatcaaagagaacagtggagtaaggtctcggcaggttcgactcagagcagagctgaccagaggcaggagagcagctcaggcagaggagtttatggaaagatgatgcattggcagctgagcccagctggtcagcctccgtgtgtcgtcagctgagtggcaaggaagggtggcattgg

SEQ ID NO: 211211 - DNA, 491 bp, Homo sapiens
atcccatggcatccgtttgactgcaaggaagctgggaagtgtagttcaaatttgggaggtactgtgcccagaaagagacacacaaatgttggtgtgtgttgtggagcactagtagtttctggcgcaggcagggagaatggctgtgcatcttgtaggggtcgtagtagtgtctgtcctgggctgggttgggagtgtactctctgagaataccttggaaggaagctgatatgagaagatgtgtatgagtggtgcacacccatgtgctttatggctcaacaatcattccattctttcccattctcaaggtctttcactggataagatcttaattctctcacaccttaccactgaaataaccttgtgaatgctttatcctctacaattttcccccatcaaatctaactggatattatagtctaactaatcttcctaagacttggcgtatgtcatgcaatccctgttcaataaaaacaataacaatttcaacagca

SEQ ID NO: 211212 - DNA, 595 bp, Homo sapiens
gcaacaaaaagacaacccaataaaatagggttgcacataaaagtttaataaaaactgtacataaatgtttatagcaccattgttcataatagcccaaaagtgaaaataatccaaatatctatcaagtgataaatggataaattgtggcatatctatacaatgaaatattattcagtgataatatttcagaaatgaattgacacttcaaaataaaagataagcaaatggccaataatcacatattagccatcaaggaaatataaacaaaaaccatgatgaaatacaagtacacactcaggagaatgcctaaattttaaaatgccaaacattgtgaagaatgtggaaaactgaactctcataaaaaaaaaactggtgggaatgtaaaaagtgttaaattttccattttggaaaagtttagtggtttctaaagttaaacataaatctaccctagtacacagcaatttcactcctagatatttacccaagtccacataaagatatatacaaaaatgttcatagcaactttactcatagtaaccaaaaactggaaataacccaaagcccatcaatagaagacttgttgctacatacatat

SEQ ID NO: 211213 - DNA, 732 bp, Homo sapiens
cttttataaggtgggtcattaaagacatatttaaatatgttacatgacaagatttaagctataggacagataatatttaagcatttaagccaatctatctgtctgcaaaaattttagtagtttacatttctttctccttgaattctgtcagacacaacatattttgaatttgtagcgtgtcttagtttatacttccttggaagtgtatacttacgagttttatgaaggtaagttcatgactaactgtcaaagctgtcagcagacttactcaaatccaatcaatgtaaagtggtaaaatctagggccaagaataaaggcatatgaaatatttactcaaaatacaaactatctggaacaaaaggggaactgagtgtttgatcaaacctgtagcttagaagaaagaaaagaaggcttacccctgtaaactcaacactttgggaggtcagggtgggaggatcacttgaggccgggatttttagttctctcaatctggtgtcttgggatgaatagttttctgttatttagatggtaatattaggtaccaccaggaatgtgcaactatgatgctgtagaaatcaacaggtgttttaatgagtatccactgtatctgtagtcctttcctagccatggtaattcgggggttattctggggtaaccttggcgattattaaggccagctgagttacctactgggtttaaggataacttattgaaactcctttgaaggttggg

SEQ ID NO: 211214 - DNA, 184 bp, Homo sapiens
tgtccctcatcaaaagagatgcaaaaatcctgaacaaaatatcaacaagctcaatctaacatcgtatacaaagaattatgcatcacagtcaagtgggatttattccagatacgcaagacgggctcaatattctaaaatgacttaatgtgatccatcatatccacaagctgcagaaggaaaatca

SEQ ID NO: 211215 - DNA, 943 bp, Homo sapiens
gttttcacatttactcccttctagacatacctgtacttatgtacttacaggctgttccaaatgtaatatgttctctaccaaatgtggttaagaaatattcactcacaatttctttctgtgtacaattctgatgcctctgttgtcactgtaattgtcagttgcttttctgttttccaaatgtcttcttgtcataaggtatctgactttaaaaaatgttttcccttttctttttattcttctgtattttccagctgcatgtgtgtgactatggcttttacatatttgcacagaaaaataaaacctttgtttctgtatcttctctttctcatcttctaatggtacttgtacttgtttgccttgactatgtcttgtatgataaaatttccaccagccatgcatacacacacacacacacacacacacacaccacagaagtactggtactgatcttcctgaatcgtgatctctttctgtgaaagtgtcactgtgagtaaacactgtggtatccaagtaaagttgcatgtactctggcaagtaatcctctagttggcattctaaagttgattacaaccctaattgttcttattattggtttacattgtccctgccaaagctagccatagttcaacctggttctaaagaggggctgttttacctaaatgacagaaatttacactaactcctctggaccaagcttctaaaacatagcctatatttacttgaataaaaactaattccattttgctgcgtttttcagatttaacattaaactaaacagggctatgtctctatgtttggccatgcctccttttttgtgtgcgtacgtggcaagtgggtttttatcaccctcccttttgcaaaataggaaaatagagagaataggcaaatttggaaaaatcagtgtttgaggaggagagacaactaagttcaattaacaccactg

SEQ ID NO: 211216 - DNA, 536 bp, Homo sapiens
gagcacttcagcacctgcgtctggtgggcctatggaaatatatttgttacaagaggggttttgattcctcagatcccactgttcagagaacaataagaagagcctcctgaaggggctactgagccaaggccctgagacgcaggcctaggatgaataagtcacccccaccttagagaaaaggaaaagacaaagggcccaaatagaaagggggctggggtggaggaaacccctgtggaagacaactgacatttctgggccacaaaagtgtcctccccttcaaataggaggctggcaaaggcttcatagcagagactgcattggggtaacgtcacatgaaacaggcatttccacagggctgactgccagccttggcaggatgggagggggtcagggaagcagtgggtgaggtatagagacatgctccagaatgacagagttgttgggggtctggagaagctacgcaataactggcccacctctgagcttcaatgacctcctgatggccacaggtggtgttcctcagggcgggcaggtgc

SEQ ID NO: 211217 - DNA, 384 bp, Homo sapiens
tgttgggattacaggcatgagccactgtgcctggccttctagactgttacttaattgggtcttttgaacatatattttaggcaacttctttataaccctgtttcatcttgactgtcgtagtgtgattggcttatctgctttaaatgaagttacaaagcacaaaagaagtcatattttgtttgacatgtacattactaggttttgttaatgctaacttaattctcaggtatatcagcacaaatagcactgtttaccatccaggtccaacaaacttcactcagccacctttgtggggttggggtcatcagtatcactgtcttccatctccacatcgtgttccactggaagatcttcatcagggacagtaacactgcttgtactttc

SEQ ID NO: 211218 - DNA, 590 bp, Homo sapiens
ccacgtgataccgaaagcaagtcctaacaattctatctcctaaacatctcactaatctgtccaggcctctgtctccattgataccaacattctttcttacccagatataaatagctctttctttttaataacggtatacactgagcatggtggcacaggcctgtaatcacagctactcaggaggcaaaggcaggaagatcgcttgagcccaggagttagaggctgcagtgagatatgatggcaccacagaagaaatgcactccagcctgagtaacagagtaagacctcatttctaaataagtatttaaaaataaaaataaatgtacagttcaatgtgttgtgacaaatgtttacacctacgtatctaccctgccaatcaaaatacataacaattccatcaccccaagaagttctctcatgcccctttcgctatcactccctgggaccaagagtcaacctctgttctgatttctatcaccctagcttacttctgactcttcccaaaattcacaaaaacagaattatactgtagcagtatatggcatgcttatttttctcaaaataatgtttgaggccgggcgcggtggctc

SEQ ID NO: 211219 - DNA, 571 bp, Homo sapiens
caggataatttttgtttagtgaactcgactgaaaacaggatcaacagttataacacaagattcagtttggaatactgggaacttatcttcctaccagggaaggcattgatgatagccctgtggagatttcataattgtagatttcatccactggataaacataaagcatgaccacaacccatataattgctaaatgaataaattagtaaatgagtgagcagatatcatttcccttatgtgccatggcagagaaaaaaagttaataattgtctcttccagtatcaagcagcaagaaccatagggaatgctggatcataaactcttattaactatttcccttttgccaaaataaattttaaaaaattctaaccttttttgacatcatgcagataaactcatccagaaatcaggcaattacagagtggatgctagcatgatataaattgcctatatttaaatggcttgctcaaatgaggactagcattaaagattctaccaggagagttgaccctgtctgtccttccaaaagcctcagatctcttcctgttccctttttagaagacttgaataa

SEQ ID NO: 211220 - DNA, 524 bp, Homo sapiens
tctgaccctgccatatctttatttgttggtggctttgactgagttttgaatacttttattgtagagatgggggtcttggtttgttgtccaggctagtctcgaactcctagcctcaagtgatccttctaccttggccttcctaagtgttggattgcaggccagacccattgcacccagcctcagcctcttttttttttttttttttgtgagacagttttgctttgtcacctagtctggagtacagtggtgcaatcatgactcactgcagccttgacctcctgggcccaagcgattctcagcctcccgagtagctaggactacaggcatgctttatttttttgtagagacagtctcattttatggcccaggctggtcttgaactcctggcttccagcattttatatttctttgtatcctctgtagttgtgctagtttcagtaaattcttatgtatgtgagggctcacttgatttatacttgtgtcttcactgttgccatgcttgctcagatgtttattatcttggg

SEQ ID NO: 211221 - DNA, 354 bp, Homo sapiens
tttgttctcaagtagtaggactttccagaatgtcttctctcgttctgctccttgctggcccagttaccccaaagcctccccacccccaagcccactgcgaccaaaacaagcgcaccgaccacagcactgtggccgccgccgccccaactgttgcagcagctgcggggtggcggtagaggcgacgcgggcagggccggacccggaccccgacgctccttgtccaggaggctgggaggctccagtcggccgccctggggcgcgcggtgcaggagagtccctgcggcagctgcctgggctaggagaggtggcgctctcagccgggaccccagcgcagagccagcccgaccgcggccg

SEQ ID NO: 211222 - DNA, 424 bp, Homo sapiens
acatccagccagcaccacaggattaagcagacatgatgagtctttgacacaggggcaaaccaggacccagagaggtgacttgggacagggctgtctcttcagtccttaccacaccgtggacgagatcaaccttaagacagcaccctgggctctcactggaccctggattctggctcacagcacacaaagcaaactgatccctggaaagggtcacttgttgctgcctagcagcattctggtaggttggcatcctcaaagtgacataagcagtgaagcaattcagagcaacatttatttatcaagacagggtctcactctgtcacccagactggagtgcagtggtgtaatcacagttcactgcaacttctgcctcctgggcttaagcgatccttcaacctcagcctcccaaatagttgaaactaca

SEQ ID NO: 211223 - DNA, 301 bp, Homo sapiens
ccatgattacctttaaaataatctactattatttgtgtctttcctgaatatcatagcaccttcttgtcacaaatgcttaggggaaagaaaatcatccaatataccccatatcccacttaccaacatctctacagtaaaatgagacccaagagcatgatttccttaactagctatcaagcaactacctccaacaaacagcagttatcattaatatgttcatgctattttcatttgtgaggtctgtaatccatcagaacaacctgacagtgattaagtaaaatcaaagagactttgtaaacat

SEQ ID NO: 211224 - DNA, 432 bp, Homo sapiens
atggctttctatttatagacacaccttggagatgttgtaggtttggttccagacggttccatgcaaattttttggtttctgagtgcatataaaagttatgtttatattacactgtagccaattaagtgtgtaataccattttgtcttaaaaaaacccaatgtacatataccttaattaaatatacattattcacttgcagaccaaagaatattaagttataaaaaaagaaaaaatatatatttttactaaaaactgctaataatcatttgagcctttagtgagttgtaatctttttgctggtggagggtcttaccttgatatggaaggctgctgaccgattagggtggtggttgctgaaggttgggggccaggggtctctggcaatttcttaaaataagacaaaataaagttttccacattaattgactcta

SEQ ID NO: 211225 - DNA, 596 bp, Homo sapiens
gcttcctactcttaacctgtctctcctacctggaacatgagtgaggaagcacagagccctgatcctaaagcttggaatgaggctaacctgagcatggtagaatggaaagggagaaagaatctgagtctttgatgacaacattgagccactggtttgaactgacatgaagtgtaccccatcccctaactgcaggtttcatgaaccaataacctccctgattgtttaaggcagtttgaatcatgtttgctttatttgcaactgaagccgactgcgttcagcaatgaatgatgataataattatgacactagatctctcaattcacctactacatcctaagtgctttggaacccccagctctccatggttattttcatttaacagatgaagataccatctgggcacagtagttcatacccgtaatcccaacattttgggaggtagaggtgggaagattgcttgaggccaggagttccattctgggcaacacagcgagacccatctctactaaaaatacaaaaattagctgggacctgtagtcccagctactcaggaggctgaggcgggagaatcgcttgagcctgggaggttgaggctg

SEQ ID NO: 211226 - DNA, 343 bp, Homo sapiens
agtgttagctgttccacagctcaaagaggaactaaaattaaagacaggaaagcaacattgtgaaaatgcctatggcagccactgagagttacaaaacagcctcaactatctcctaagaaatgatcactggggatgcatgttttcaaactctcattggatgccctgtatgcacctgttgtaaagtcgagaaatcacaccagcaccagcactgctttcctgatcacctgttgaaaatgtaatggacacgaaataccaaaaacgggattaaattccccaccaagaggacatccttttcgtgtcagcggcttcccagtagcaccaccaatacaggggattctctaag

SEQ ID NO: 211227 - DNA, 406 bp, Homo sapiens
ggagaaagcctcaggtggaacaagcatgaggataaatggagattcacaagcctgttaactcactgtataaacgtattaaggaaatgagctttaatttcaaaatggggctcatcagagattgagaaatatgttgcttcagtactaacgctatcctacttggcctaaacaagtccaagacatgcctctcttctagtaatgactctacttgcaaaaactcagttctgtctacatacctggcaaagtaatgctctgcaatgagaggatattaaattatgcagattattcttgtggagggcaaggctggttaataaaacaaacctgtaccggcaggcagatgttttcaactatttaattagatgacaaacttagtttgaagatactcctctgtgcaatctctcccccagcc

SEQ ID NO: 211228 - DNA, 385 bp, Homo sapiens
ctgctatttctccatgttgttgcaaaacaatcaatagcatgcaaagaggaaaaaaagagtgaatgaacataaaaaataaaaagtgaaagaaagcaagacattttagaaacaaaggcaagaaacaattctagaaaagtaaaaacctaataaatatcgatgtctataaatttcaaagacaaaaccctaagaaatgctgccacagtgtgctttgtgaggattggaataaagtgcaaggaaaaggagctggggaaggtatgtgacaaaaacatcataccagtccttttgggatgcagctaaagcagtgcttagagggaaatgtatagatgaaaatgcctacaatagagaagaactttctcaagtcagtatctcagctttccgccttaag

SEQ ID NO: 211229 - DNA, 381 bp, Homo sapiens
tcactccatgcggtgtgtgtcacctccgctgtgatggttgtgtatggtcactccatgctgtgtcatctccgctgtgacgattgtgagagtgtcacctccactgcaatggttcctgtattcttgcaatgatcatcttggctcaggtcacctcagatctggcatttttccattatgactagtttatattcttaccctgaggtttggcaaaaatattgaatcaattgttcttaattatgaccatcttgtacactttgcattgcaggaacagttcaataatgctttatagtccaaagagccctaggagcactgctcaatatcccagagtggaagactagagttttccttttgttcaactcataaactattcttaaaagtgccata

SEQ ID NO: 211230 - DNA, 314 bp, Homo sapiens
aggatccccgtagtcttgctacatcagccccgccgttacgagtaaaggtgccacagaggagacaaatattttccctgagccctctctcccaatatataggaaaaaatacaagggatacattactggatggcgcatcttcgtcccatcagaaaatggtcatgggccttctacacaaatagtgactccaacgactgcaagaatgtgcatgaaacaaatctcttctctagaatccttcagggcgtgatgggacgcaagtacagtcttgctcccagtcagtcatatactattttaagattttgtgcttaaatttacaa

SEQ ID NO: 211231 - DNA, 304 bp, Homo sapiens
agttgaatccaacttggagactttaacacacactatcagaaatggacagatccagcaggcagaaaatcattgacataactgaactcaacattatcaatcaactggatgcaatggatatctatagaccacttcaaacaacaacagcagaatacacattcttctcaagcttacgtagaaagttcaccaagacagagcaattctgggccataaaacacaccttaacacatttaagaacagaaccgtgtctgctgtcaggctacataaactagaaatcagtaacagagatagctggaaaatcccaaaa

SEQ ID NO: 211232 - DNA, 575 bp, Homo sapiens
cttgggaaattcaatattgttaagatgctagttctccccaaattgctctataaattctatgcaatgtcaaccaaaatctctgcttttaaaaaaattgacaaactgattctaaaattcctataaatgccaaaagcctagaataatgaaagcagttttgaaaaagaaggagaagttggacaagtacaaattttgagacttattataaagctaaaataatccagaaaatgtggtattgacataggatacatatatagatcaatggaacagagtagagagaccaaaaatagattcaatgtatagggtgaattgatttttgacaaaagtggcaaaatactttaatggggaggatggtagtcttttcaacaagtgatgctagaacattgagttctagcaccagtagaactagaatgtggaaaaagtgaactttgggcatatcatgttgaaaaataactcaaaatggatcacagacctaagcacaagaactgaaaatataaaacctccagaagaaaacataggagaaaatccttgcaaccatggaatgagcaaagatttttcagggcccccagtgcatgaaa

SEQ ID NO: 211233 - DNA, 503 bp, Homo sapiens
ggacaaggttgggatcctgcaggggaaagaaccagggagataaaatggtgggaaaattgtgcactccaggcaccccgaaaatgccccacgcctcaggggtgccgaaatggacactttacttctaagtcagaagcagggcaaatttagggaaaagacgttggcctctacaagggcagatcagcatgctatctagcttcctaaaatggtcaaaagaggacattaactgaataaagtaaaagaagaaaaaaaaaggcagccaggtgctttgtgcggcggagcccgctggaggctgggcaagtgatgagtccggacccggggagcaccccaggccaggctttccccaacgccccctgcgtcaccatcacctcatcctgcaggcccagcttaggcgccatctcctcttctgcatcccagagcccctcacgggttctctgagccggtgacgctggatggcctctgactccctcttttcttgctgagtccccgagtgcagggcccagacc

SEQ ID NO: 211234 - DNA, 231 bp, Homo sapiens
cttagttgctccagcccagccacccctgtcccctggagacagtggccccagcctggtccacgccacaggagaaagatcataagaatttatttggagccaggtgcagtggctcatgcctgtaatcccggcacttcgggaggcccaggagggcagatcccttgagcccaggaatttgagaccagcctgggcgacatggcaaaaccctatctctataaaaaatttttaaattat

SEQ ID NO: 211235 - DNA, 437 bp, Homo sapiens
agggataggggagggccgggggtgtccagcagtcagcagagatcctgcgaccccagtgcagcactcatggtcccacctccctctgtctcattccccgtgaatgagcctgaacagcttcagtcctgcccctgccctgcctgccctgtggcacctctatgctttgcccatgctgttcccttgggctgcaatactcttcctagcttatttgccaggctcactcttactaaccctttcaagctctgtccaagcatttgctgcctccagaaggccttattgaagcttctaagtccccacctgggcacccccacacagtgctgccgcagagcactgccctctcggagccccggtgctggtttctgcttatgtctcgctcctctccccatctgtgagctcagttcccagcccaggcgcgtgcccaataaatgtttgctgaacca

SEQ ID NO: 211236 - DNA, 1602 bp, Homo sapiens
tatctcatatgccaccttctcaaaaaggacttccctgatcactctatttaaaatagcctctccagatacgtttgtcagcttgctcctttctgcctgtggatgccaacaaagaagcatcattaaagtctctcttctcccttccgtcgtgtctaagtcagagtctcctaaagagcccgaatagctgaggaagctcttcattggagagttgaggtttgaaacaaccgacgagagcctgaggagccattttgagcaatggggaacgctcacggactgtgtggtaatgagagatccaaacaccaagcgctccaggggctttgggtttgtcacatatgccactgtggaggaggtggatgcagctatgaatgcaaggccacacaaggtggatggaagagttgtggaaccaaagagagctgtctccagagaagattctcaaagaccaggtgcccacttaactgtgaaaaagatatttgttggtggcattaaagaagacactgaagaacatcacctaagagattattttgaacagtatggaaaaattgaagtgattgaaatcatgactgaccgaggcagtggcaagaaaaggggctttgcctttgtaacctttgacgaccatgactccgtggataagattgtcattcagaaataccatactgtgaatggccacaactgtgaagttagaaaagccctgtcaaagcaagagatggctagtgcttcatccagccaaagaggtcgaagtggttctggaaactttggtggtggtcgtggaggtggtttcggtgggaatgacaacttcggtcgtggaggaaacttcagtggtcgtggtggctttggtggcagccgtggtggtggtggatatggtggcagtggggatggctataatggatttggtaatgatggtggttatggaggaggcggccctggttactctggaggaagcagagctatggaagtggtggacagggttgtggaaatcaggacagtggctatggcaggagtggcagctatgacagctataacaacggaggcagaggcggctttggcggtggtagtggaagcaattttggaggtggtggaagctacaatgattttgggaattacaacaatcagtcttcaaattttggacccatgaagggaggaaactttggggcagacgctctggcccctagggtgatggaggccaatactttgccaaaccacgaaaccaaggtggctatggcggttccagcagcagcagtagctatggcagtggcagaagattttaattaggaaacaaagcttagcaggagaggagagccagagaagtgacagggaagctacaggttacaacagatttgtgaactcagccaagcacagtggtggcagggcctagctgctacaaagaagacatgttttagacaaatactcatgtgtatgggcaaaaaactcgaggactgtatttgtgactaattgtataacaggttattttagtttctgttctgtggaaagtgtaaagcattccaacaaagggttttaatgtagatttttttttttgcaccccatgctgttgattgctaaatgtaacagtctgatcgtgacgctgaataaatgtcttttttttaatgt

SEQ ID NO: 211237 - DNA, 664 bp, Homo sapiens
caagactctgtttccaaaaaaaaaaaaaggaagatagatgatcaaagaaaataaactgacaacctgaaaacaaggaagtagaactggataacaaatgtggaaaaatttctagcctcactagtatcagagaaatgcaaattgaaacaaggtgccatttttggactctagttagtgatggtagtgaaaaccagaatggtcctttctaaaacagcctgtgtgtcaaaaccataaaaatgcttctacctctttttaccctgttaattctacttctgagagtttttcctaaagaaataattcaaaataggaaaaagctaaaagcagaaaaatgttgaacatgacattatttatagctgtggaaagattggaggctgggcacagtggcttatgcttgtaatctcagcactttgtgaggccaagttgggaggattgcttgaacccaagagcttgagaccagcctgggaaacgtagtgagaccccatctcttaaaaaaaaaaaaaaaaattagctgagtgtggtggaacgtgcctgtagtcccagctacttgggaggctgaggtgggaggattgcttgagcccaggaggctgaggttacagccaggatcacaccactgcgctccagcctgggtgacagagtgaggctctgtttaaaaaaaaaaaaaaaagag

SEQ ID NO: 211238 - DNA, 503 bp, Homo sapiens
cttagcaacggggcctggccaggccagaccagacgaagaagcctgaagcagtacctggctgatttcccctcccccacagccccatcccagcagctgcctggttgctaaggaggccttctccctagcaaccacacctagccaggctccaggacccaaggccttctgcccactggaggaccaccctccgggcctccgatgccccacccccttgtggcccggttgctaggggtagctgcaccttagcaacaggcctaggtctgggctggagtctcacattggagcctggttgctaggggaggtaactctttcctgacaggcctagcgaggcgtagtggctcctcgaatctacctgaaggtgcccaattcaggaggacctgccttctgaagctgcacttgcgccttttgctaaaggggctcaaaagtctgggggtttactgtggtcagatgtggtggctcatgcctgtaatctcagcactttgggaggccaaggcaggcggatcacc

SEQ ID NO: 211239 - DNA, 106 bp, Homo sapiens
acctcatttgttttgttctttcagggatcaggtttctgtgctgcttcttgtctaatgtccaaaacctttacgtcctatgatatattttggccagttttctagttgt

SEQ ID NO: 211240 - DNA, 323 bp, Homo sapiens
gggttggccacttcactgatgaccaaagattaggactgaaagaatcaagagttgtgcctcacaagggacattactgccactgccaccagggcaagtagtttcagcttgttgttggcatttgcctggcatagggatgagagaatagaaagaactccatcctgcagggatgctgccgccaagagggatttgctgcttagttgctggtgttcacttggagtagggccaaggctgtccaacaagctctgtcccataggggctggtggtgggggggtgcagtaggatctgggctaggaaagtcccaggagctctggcctgcaggggtt

SEQ ID NO: 211241 - DNA, 406 bp, Homo sapiens
acaaggcacaatagacatgttcccctttgagcaacacaattttctaacagccaataggaaataacagttcgaaaatttatcctaaaatttactaaacttttaaaggctatgtggaattaatgcattatcaagcaagagtagataattggaagctaccctttcctattatacagttcttggaatcaagagttacttacagtaactgataggatgtgaaaataagactatagaatcagcacaaaggccaggtgcggtggctctcgcctgtaatcccaacactttgggaggccgaggcaggcatgacccaccaggctcggctgaattacggttttaatttttatctttgtaatttatttaaacattcctttattcctgcttgcttttctatgtatttttacactgttga

SEQ ID NO: 211242 - DNA, 426 bp, Homo sapiens
ccctgccccacgcggctccggacacggaattgcagctgcggtagagatgagatgtagcaacagttctgcagtagtgtggtggtgacttgggtgtgttctcctcctgacattcacctgcacctttttctgcgcttttcagtatgtatgtatttaatagtatcactcaacaaaaaggagtttatcaggccgggtggctggctcacgcgggaggagagcttgagccctgcaggagttcgagaccaggctgggcaacattgggagaccccccccaccaatctctacaaaaaaataaaaaataaagtttataggctgggcgaggtggctcacgcctgtaatctcagcactttgggaggccgagatgggaggatcgcttgagcccaggagttcgagattaacctgggcaacataatgataccctgtctctta

SEQ ID NO: 211243 - DNA, 282 bp, Homo sapiens
gaagaatcaactggctacttcccactggttttcagatcagttagttgctactaggttaccatggataaaggatttgtttataagcccagaagtttaattttatcctcttgattctcagttattgatactagtaaacaaacttacaagaaactaatttgtatgagagaatacaaccccgaaatttacataggaaaatgtacctagaaactggggcttgtggtctatacaggtgtggcagagacggtaatcacttaccttgtccttctcaacatttcctaccta

SEQ ID NO: 211244 - DNA, 448 bp, Homo sapiens
caaaagaaacgtaaacaagcattaagattcagtatttaatcataggcataaaactgtagtacagtatataacttcatagccacctcctgttgctgttgtggggagctcaagtatccgcttaaaacaccatgtgatgccagtcatctccatgtgagcagttcccctctctgtaaattgcatattgcagtaaagagtgatctctcgcagttctcatggatcttgcgtcgtgcttcatgcagtaccataaaccttgaataaccatgggacccatacgaagtgccactagtggtgcttgaagtgctcccaagaagcaaagaaaagtcatgacattacaaggaaaagttgaagtgcctgatatgtagattgaaacctgcagctgatattgcccgccatttcaagacaaatgaatccagcataaggaccattgtaaaaaaaggaccattgttta

SEQ ID NO: 211245 - DNA, 1158 bp, Homo sapiens
gtcaaataaacctctttcttttgtaaattgcccagtctcagatatgtctttatcagcagtgtgaaaatggactaatacacaccctaatactgaaacagactaatagacaccctaataccaaaagcaaggaaggacataatgagaaaagaaagctacagaccaacatccctgatgaacagagatgcagtaatcctcaaaaaaaatactagctagctgaatctaacaacatatcaaaaagataatccatcatgatcaagtgggtttcataccagggatgcagggatggtttaacatctacaagtcaataaatgcgatacactacataaacagaattaaaaaacaaaagtcacatgatcatctcaatagatgcagaaaaaccacttgagaaaatccagcatccttattttattaagaccctcagcaaaatcagcatagaagggacatacattaaggtaataaaagccatctatgacaaacccacagccagcattatactgaacagggaaaagttgaaagcattcctcctgaaaactggaagaagacaagattgcccgctttctccacttctattcaacatggtactggaagttctagccagagcaatcagacaagagaaagaaatcaagggcatccaaagtggtaaagaagaagtctgcctattgctgtttcccaatgatatgattgtatacctagaaaaccctaaagactcatccaaaaagcttctagaactggtaaatgcattcagcaaagtttcaggatacagagttacacacaagtgtgcacaaatccgtagctgtgctatacaccttcagcgaccaagccaagaatcaaatcaataactcaaccctttttacaatagctacaaataataataataataataaaatacttaggaatgttcctaaccaaggaggtgaaagatctctgcgtggaaaactacaaaacactactgaaagaaatcacagatgacacaaacaaatggcagcacatcccatgctcatggatgggtagaatcaatattgtgaaaatgaccatactgccaaaagcaatctacaaatttaatccaattcccatcaaaataccaccatcattctttacaaaatgatgaaaaataatcccaaaattcatatggaaccaaaaaagagcctacatagccaa

SEQ ID NO: 211246 - DNA, 441 bp, Homo sapiens
tttcaaaggagacaactttctaatattctagaaggtgaagaatatcataactgatttatagtccaagaggtctcattagaacagtggaaactatttgctggagctgttgaattttctgttagagtattaaggcagggagaataccattttcagcctcacaactactggcatgcatagagtttaatgttggattctagctgctgtcttgggaagaaagtactttttttgagacagagtcttgctctgtggtccaggctggaatgcagtggcgtgatctcagctcactgcaacctccacctcccaggttcaagcgattctcttgtgtcagcctcccaagtagctgggactgcaggcatgtgctaccacacccggctaatttttgtattgttactagagatggggtttcaccatcttggctagcctgggcttgaattcctgacc

SEQ ID NO: 211247 - DNA, 204 bp, Homo sapiens
ccattcgagaattttgaacaaggaagtgacaacatcagacaagatcagattcacctggaggctagagaggatggtgactagaatcaaggagaccaaaaacccaggatgttatttcaacaatctaggccagagagactgaggacttaaattagagtagcattagaggaatggataatggagacaggatatatgagatattcagga

SEQ ID NO: 211248 - DNA, 519 bp, Homo sapiens
ccactgtgtgctgcagaaactgcagtaaaaataagcttttgtgctaacagtgtaagaagagaagcctttgagggatgatgagattagcactctgtaggttcaaccaggtctgcagctggatctatagaccaagaatcaggaagtcagaggaataaagtaataatgatagctcccatttcctaaggcttttcatggtagtatgtggtgtgcttttcatgggttactcaatggaatatccttaacatccctaagaggtcagtaccatacatattcccagttcaaggaggaaagatgaggctcactgagatggagcaatctgcccaaagttacacagcaggtctgtgacagctccacgtgactccagagctctcaaccactagccaggtcgtctacacacctatctgaggtgtataaactgaggcacagtcagtacgttgcagagcttataatacatttgaacatatatattaggtagaagctgaactacaaaaccattatagtaaaataattatcctttaa

SEQ ID NO: 211249 - DNA, 459 bp, Homo sapiens
atcaagtatcatatcaatgtcagataggtgtagttgattatgtcattcaggtgtactgtatcatttttaattttctacttattctgtcatctctgagactctacttagtctatcatcactgacaggagagtgtattaaggcattcatccctttgttcatttctcctttcagttctattagcttttgcctcatacaggagaattacatcttccatttagaattatgtcttcttagaggatagacctctttattattatataatgtctttctttatccctgacaatattccttcttcagaagaatgctttgtctgatactaataaaactaccccagttggtttgttttgtttttgtttgttgagacagaatcttgctctgttgcccaggctggagtgcaatggcatgagtccagattgcaccactgcactccagcctggcgacagagcaagactccatctc

SEQ ID NO: 211250 - DNA, 526 bp, Homo sapiens
tttacttgttcccttcaaaaagctttgctttgttttgtgttttaaaatataagctatttatttagtatttgacctgatacctacgaagagctcaactgtggaatgaaaaagcagtaatgcatgtcctctaaatcttagttctcttctaaagtaaatatgcttattatctgtctttcgtgcttttcatttatttaaaatttagaatgtcttatttaaaaataatcagacaacttttgagagctgttggtaatttctcacaatagcacacaatctggagtctcaagactgaaaactggacttgggttagttacttaatctttggtgcatttaatccttaaaaaaatacctgacgctatttaattcacagggctgttttaataatcaatggagataacgtatatggaagcattttttataccttaaagcactatataaatattagttttttttaaatcactgttcacatttctgttagatcacatgcaaagcttctaaaaatctgctacccacctaatttacccacagt

SEQ ID NO: 211251 - DNA, 468 bp, Homo sapiens
tcacccttctaatgatgtgataattatgggaaacagcttttggaactgttatttgggatttgtcttcagaggcagttgaaaaatacttgcccagcttaggcaacgtagcaagaccccgtctctacacacacaaaaacacacacaccagcctatgcaatgtagcaagaccctgtctacacacacatacatataaacacacacacacatgccagcctagacaacgtttcaagaccttgtctctacacacacacacatgcacacacccaggtattgcagctaggcaacgtagcaagaccctgtctctccacacacgcatgtgcgcatgtgtgcacacaggcactgcagctaggcaacgtaggaagaccccgtcgctgcacacacacacacacacacacacagccaggagttcaaggttgcagtgatcaccactgcactccagcctgggcaacagaatgagaccctgtttct

SEQ ID NO: 211252 - DNA, 560 bp, Homo sapiens
ggatcaggaaaattaccccagagggtgtgattttgggattgagaccagaagctgagtaggcactggggaaagcatggggggcgtatgggaaatggcttgcagagaaccaggcattcctccagccctgtgtgtaatgaaatcatgattttcattgtgaagtgctttatttctccacctcttcaatctggtctcggccatgtctttctttggtcaacagacagagacttgacaagtccttgcacattggggcttgccctcccttcttgccaggagccttgaagccactgtgaagaaggccactctagggtgagagttggggcaaaaggtaactgacaggagggggcagaaagcgtattacaagcagaggaacggaatgggcaaaatcccagtaagggtgtctatttggggggcagccaacatttctatttggctgaagtgtggtatctagagtgggaagggcaagaatgaagatggtgagtgaactaaggcaagaccaagaagttcgggggaagccgcagctacaagttagggctttgcctttggggcggtagtgagtcact

SEQ ID NO: 211253 - DNA, 485 bp, Homo sapiens
ctaaattatattttcactgcactcatttttaagcagcactttgattagttctgaagaatcacattaagaatgaatgtggataaatataaggaaatgtaatgaaaaggtttgagggagtgattcctctcagctttcccaaggagaaagcttatgcagagacaaaataatggacaatgtgctccctggtgttacaaaccgtttgaaccattgactatttttaaaatgcttcccctgtatgcatgcagtgtcagaaaacacttaataaggaccctgtaaattgagtgttgcttgctagagagaaaacctaacctttcattgctttgtttttcccctggagttaatgttatgatcaatagattgccggtataatttagataaatctggagtttaattgctgtttggaaaaagtagttcctttttaaaatgtgcaaaagcaaaagagattgaggaagttatagggtgtttaatccaagccttaagagaga

SEQ ID NO: 211254 - DNA, 311 bp, Homo sapiens
ccttcagtggtacttctttcctagccattaggaaaacatccaaactcccttacatatagaatggtaagctgctataaattcacaatccccaaaactcaatgaacactccatattgcctgtcagtttctccaacgtttccattctctagtgactacagacggtccctgatgtatgatggttcaacttataattttgactttatggtggtatgaaagccataaacattcagtagaaactgtacttctcagctgggtgcagtggctcaccacacatgtaatcccagcactttgggaggccaaggtgggaggatc

SEQ ID NO: 211255 - DNA, 142 bp, Homo sapiens
gccataatcatttaatcgtgtatagacttaattaatccagaggatcaagcctgttctttcagttgtctaaggaagcgtattttcttttttcccatgttatgatattctggagtttctacttgagattatctgagcataagaa

SEQ ID NO: 211256 - DNA, 495 bp, Homo sapiens
tctctttcttccttctgtctgcaagctggatgggtccagggtcaccctaaaactgcattaaaaatggtggagctacacaaaggaagacatctgagcccccagatcactgcgtggagaagagggtcccactcagaaacccacattaaatagtgacatgagttaaaaacaaatttttattgtgttaagccactaagatatgggtatgtgttaacactgtttatgccaatgaatatatgctgaaaccataatttctacagttctatagtgatagttatatattcaaatggattcaatgctcatgaccagtcttttatttttagaaggatgtcaccattcttgaattctatattttgatttatctgtttttcagttgggtttcatttcaaatcgcttctttcaagtgaggctcatgagtgctctatttcctgaggcattatatgtttgtgaatatatttgtggtgcttttaacaataaataacagcttggctggatatt

SEQ ID NO: 211257 - DNA, 281 bp, Homo sapiens
tggagcaagactccatctcaaaacaaaacaaaataaaacaaaacaaaaaaaaacaaaacacagtaatccactgaattggttccatgaattggttcccactaatggggcacatgagctgttgtttggaaaacacttagcatagtgttcagaagctttagcatcagagagacccagattcagacatcagctctgtctgaatctagcagcacttccatggaactcagtttaaatgtactttttattcaatttttcaggaaattatttatgccaaagaaaaaata

SEQ ID NO: 211258 - DNA, 283 bp, Homo sapiens
agacagagtgagtgggtgggccttctggcagcttccttaccttcaaatctttgctctctgtgaaatggttctgcttcagtatccttgttctgatttttctgggaactagatgttactgggagatgactcagagcaggccaagccctgatcctcactgtggaagcaaaagaggctggtgaaagtcactgtcctgacaacttggaccagaaacctacagacaaaactgaaatgttttcctgccctaggattatctggataacaatgacctttgatgttacaaagt

SEQ ID NO: 211259 - DNA, 221 bp, Homo sapiens
ttaaaatgccaaggataactttctttaaatcaacagagtcatggattttgtcacactgtcagtccactcacatagaaatagcttagcttttacatgaataagactcatatataagaagagtttaaaacaaagacaatgtgttcctcctcttgctttctgagaacacccttctctgtaactgagtagctttcaataaactatctgttctcaatgcactttga

SEQ ID NO: 211260 - DNA, 444 bp, Homo sapiens
aggtgtatatttcttcctcgtgcatgtctaaggtgctttgataggaaagcagtccacacaggaggctggaacaagtaactcctcttgtggtttggagcaggttggtgtaagaactgaaattggttacattttcacagtagtgggaaaatatgtttgtgtttaaggagtagaatagatgcaccttcattcagaaagtggaagtttatgaagtctaagccaaaacacaacttggtgaaaaaggaaatgagagagaactgaatttagaatggccaatgatagaacatttttttatccggtttccaaaatgtagcagatgttgaaggtgatagcagtgagttcagaagaaaaagatgtaagtgcaaagaacgcacttgcatttggtataggagatgaagcgtggggtgacctagatagtgaagatataaagataactcacattgggca

SEQ ID NO: 211261 - DNA, 506 bp, Homo sapiens
caggaaagttcgtgctgctaggcagaggaactgcagcttgttggcaggtgaagggagcctgtttagctgtgtccagcaacaacttacgtggtcctgcttgtgttccaggtgaagcgtctggccgccgagcagaggaatcaagacctgctcattctttcctcgggggatccatccagcaatgacatcatctcatgctgccacaaggaccccaagtctgggctgctggggaccagccacgctccccactgctcattccttcatcctagagacattctgactctcctccgactgcgctgtgcacaggcgtgacaagctcttttacatctcagtctgcacaacttcaggcacttagcagattgatatgcatccaacaaatattgattgaatatctgctaaatacccagtaatgtttcatgagtgattgggtgaataaaggaatgctggttccttctggccatattaactcctgcacaatactaagaaaaataaattgcactagctgtgga

SEQ ID NO: 211262 - DNA, 693 bp, Homo sapiens
caggaaagttcgtgctgctaggcagaggaactgcagcttgttggcaggtgaagggagcctgtttagctgtgtccagcaacaacttacgtggtcctgcttgtgttccaggtgaagcgtctggccgccgagcagaggaatcaagacctgctcattctttcctcgggggatccatccagcaatgacatcatctcatgctgccacaaggaccccaagtctgggctgctggggaccagccacgctccccactgctcattccttcatcctagagacattctgactctcctccgactgcgctgtgcacaggcgtgacaagctcttttacatctcagtctgcacaacttcaggcacttagcagattgatatgcatccaacaaatattgattgaatatctgctaaatacccagtaatgtttcatgagtgattgggtgaataaaggaatgctggttccttctggccatattaactcctgcacaatactaagaaaaataaattgcactagctgtggaaaaaaaaaaatcccaatgtcatctattgaaatattacctgactattaagaggtatttatttttgtatcttttctagcaaagtaaataaaattcttaatacagcatatccccttattcacggggggtatgttccaagacccccggtggatgcctgaaactatggataataccagatcctacatatacc

SEQ ID NO: 211263 - DNA, 529 bp, Homo sapiens
caggaaagttcgtgctgctaggcagaggaactgcagcttgttggcaggtgaagggagcctgtttagctgtgtccagcaacaacttacgtggtcctgcttgtgttccaggtgaagcgtctggccgccgagcagaggttgttgctgcttcacattcgtagaatcaagacctgctcattctttcctcgggggatccatccagcaatgacatcatctcatgctgccacaaggaccccaagtctgggctgctggggaccagccacgctccccactgctcattccttcatcctagagacattctgactctcctccgactgcgctgtgcacaggcgtgacaagctcttttacatctcagtctgcacaacttcaggcacttagcagattgatatgcatccaacaaatattgattgaatatctgctaaatacccagtaatgtttcatgagtgattgggtgaataaaggaatgctggttccttctggccatattaactcctgcacaatactaagaaaaataaattgcactagctgtgga

SEQ ID NO: 211264 - DNA, 565 bp, Homo sapiens
agtatcctcacacttgctgggtaatagtaactgtgctattcctagcaagaaaccctaaggtttctaggcttgttctggaaaagaggatattgccagagttggtaagtagaggaaagtgattagtatttaagaaactgaatcaagaatggttccaaaaatcttaagatccagggaaaccagcttaaggtcaaaggcaagtgctagataatgaaattaacaccatatgagtacaaatttacaaaatactgtacttcaccataggctatggaactcagtggaaagccaaaaaagcactggacaggtggtgggagtgcttgacttgtggtgaatttatttcatctgcttatacatttgtacacagcacagttcttctccagaatgttgtttctgtggctgggaccattggactgtggctccaaaagaacaagagtctgaagatgggatgttgacaagttttggaatgtcaattggggaatcataatttgtatttatttaggttttttttggtgttcataaaatgcttgtgtaatatttacatatgtcaaataaatcttaaaattttata

SEQ ID NO: 211265 - DNA, 519 bp, Homo sapiens
ccaggtcatgtaggacagtatagctcaaggtaagcagtggggatttgaagtgtactgagtaatcattgttttactgagtaatcaaagctttaagtggaggtgtaactttgtctggtttacactcttgctgccatgtgagaataggtggtgagaggcgagaatgaaagcagggaacctattgtagtactccagatgatcaagttagagatgtattttggaagtagaactaacaggctgatgcactgtttttgaggaaattgaaataatctggaatggctacatggcttttggtttgaatggtgggcaatgatgtttattgagaaaaggaaggcttaggaaagaacagactggggatagagtgagggagaatcaagagttctatttggaacaggttaagtttgattttcctgtgagttcctatgagacatttaaatggagatgccagataggcacttgtatgtgtgactgtggagcttcagctgaagatgtggggccatcagctgttccacctctgttagg

SEQ ID NO: 211266 - DNA, 465 bp, Homo sapiens
ttgaagaagctatgacaggcatcgttgtgttgcagcctgcaaaacggtgccccatcccttagaacctgaatacgagcaaacatcactggagaaaagttacatgtttaaaatgtaaataaactagcttttatttttagctttttactgcgaaaaaacaagtgtttggaatgattctttaaaaatgtgtggaggatgggtgtggtggcttatgcctgtaatccaagcacttcggggagggcggatcgcttgagcctgggaagtcaagaccagcctgggcaaacatgcaaaatcttgtctctataaaaaaaatgaaaaaattagccgggcatgtgcttgcctatagtcccagctactctggaggcagtggtgggaagatcgcttgagctcaggagatcgaggctgcagtgaggtgaagtcatgccactatacttcaacctgggtgacagagagataccctgtctcaaa

SEQ ID NO: 211267 - DNA, 812 bp, Homo sapiens
cgcagcagtccccgcaggcttttgagacacacattaggagaggactctgcccgctgtctgtctcacaatctgctcgaaatatcttggtcaggaatctcaggatgtctagtgaccccgagtgaggtgctgccttttattcctgagcatctttggaagcaggaagcagggagcaacggtagcgagaggtattcggatctgagtatcagcaggaagaagaaacagaggaagaagtcccccataaggaaggcgtgaggagcgcaggaagcgctgtttccctgcctgagatctttattctactaggtctttattctacgtagccgatacgctgtaaaattctggaagagaaggctaggggtttaaggttggtaatctctcagaagatctgcgtctcggtgacggaaagaactaagggtaagtgctgagaagcctctctttacagccagagaacgagccagagccgagcttgagaatgacgggatagatctagcagttatgcccaaggaagaccctcggccctttgaatttgaaggcactgaaaatcgtataaatgttttcatataaacgtatgcatctttgatataaataacaaaatggcttttagcacaaattttgttttggaaattttgaaaaacgtcttaataagaggaatgtttactcttaagtctgcagtagattttgaacaccggcagtaactgtacaaatatatcagattagttttaatagccatctccccttcccctacaagtaaaggagagtactacagcagtatgtactctgaattgctgctattgaagaacccctgagcctgtgca

SEQ ID NO: 211268 - DNA, 438 bp, Homo sapiens
aggaaatagagtgatggggtgatggacaaggaaagagagctcaaagctgcctgggtcccagattaatttttcccggtacagtgtcttgtttggaaggaggaaggcagaattcttagatgattttctggtttaaatttaaaatggatctaatttggagacctagtaagtgataatgaagactgatgctgtcacatggtctggcctcatcacaaaaataattgattagtttttagttccttatactctgttcccttagtaagggaaactcatgttttttataaagcagatgctgagtgaattcacagttctcagcttttatgccactttctgactaagtcttgaggatacacacttgtggtcttgagttcaggcatagagggaagcatagaccattttctgttgctccttatggctttatttatgttaagatttgtttga

SEQ ID NO: 211269 - DNA, 466 bp, Homo sapiens
cagaatcatggataagactagcgaacattatgttaagtggaataagtcagacacagaaaaattaatactgtctgtccttacccatatgcaggagctaaacaaatttgagctcattaaagtaaatggtagaattgtggttattagatgttgggaaggatgtgggagcagaggttggttaatggacacaaaattatagctatattggaggaataagttctgttgtagtgctctatagctggtcacatggaaataaccataatttatggtatattttcaaaaagctagaagagaggattttgaatgttgtcaacacaaaagtatgataaatgtttgaggtgtttgaaatgctaattaccctgatttgatcattacgcattgtacacctgtatcaaaatatcactctgtttccataaatatgtacaattattgcatgccaactaacaataaaaggacaagataaagattc

SEQ ID NO: 211270 - DNA, 434 bp, Homo sapiens
ccactacaggcgtgagcactgtgcccggcttgagacacttcattgtcacaacttgagtaaagggttctcggtccacatttaaagtgatattgctttggcagtgtgttgagagccagatgttgggaggtgataaagctgatttccatctggctataatcttggctttgcactaggaggataaacattacatctgtatccgtatttaaaattttgaatgctgcagaagaatggaacatgtataaatgtagttataagtcaatttctaatttctcctgacgatgaatatctctagcagaaagctgtggtttctttaaggttaaatgaaacctttacttttcagtgtttttctgtttttccttgtgaaaaaaaaatcactgtagtaacttcagtagtatttcatagtattttgtagtattcattaggagaaaactcat

SEQ ID NO: 211271 - DNA, 605 bp, Homo sapiens
tacatctgacctcttttaatattacttcctgaccccagaattcttttggcatataatcaatgcagtgatcaattcacatgtgactatagatacaaacagaatgacgaaagtttaatggaggatgaaaaagaagacaaataaatattttatcctttatatggtaagacagattcactatcatactgatgtcagtagcccatgaattaatttacagattctacctaacaaaattctaataaattttgtaaggttttaacatgtatgtgtgaacatacatattcatgctgttacacatataaagaaaattataacaaaagtgacctataccatcagtggtttaacagttttggaaaaatttatcgtgctctatacaacaattcattccatatgtgaaagttactttcaagtgctttatctaaatgtggaacaaacagtgattagaggagtctgtgacacactctaatcatggaatgagactggccttcctaaacatgagattcagaagcctccccacctcctgtcaacaagtcatagatttgactgtataagaactttataaagcttttatatgatcaaagatagtaaaagatacaatattttttaaa

SEQ ID NO: 211272 - DNA, 895 bp, Homo sapiens
  misc_feature (753)..(753): n is a, c, g, or t
aagagttaataactgtcagaaaaaagaatgcaaatcttgactatcagttgcttgacagtataggttattttaaaagtattattaatattaactttccacacctttttataaacacagatatgttcttctaagctcaccaaagataacgccttgtccattatgctttatctgtattccaattaacatcaatctcttcctgaaggcaatcaacacttccaactttcacggagcacctgtcaagttcaggcgcacagggttggggaatgtaacacaaagacaaggccttaagccctcagagtttacattccagagagggcaagaaacatgtaaatgcagaattttacaaaggtgatgtgtattctgatagaattatgcacaaaagggcagagaacactctcttaccccaggcttggcagatcaaagaatttctggaagttaacacctgagctgaatttgaaggaaaaggcgtcaccccctagctgaaagaagagaagtcagaaaaggcacggaacaagtgtctgggtagaacgtaaaatctacataggcaaggaggagacgcctctgcggcagggagctgtgccacattcacagggagcacagagttgaggctctgggtcagtttcccaaacttgaatcattaggatcagctggagattctactcagtagttctggggtaggagccagcaatctatttgaacaagcctaggaaatacggcatgggaaactggtgcacggaagaaccgggttaagcngaactgtgggtcaacctattccaacaatggatccatcactattgggccaaagtggatgaaatgcaaacggcaaaccctggactaaagggagcccaaagtgccacaaggcccctgccactacccgaaccaggggaaggcgacc

SEQ ID NO: 211273 - DNA, 585 bp, Homo sapiens
ttttccctaaacagtataaaagaagcctgtattgttttgaatttgaacgtcggttctgcactactgctgaaagatgtactgcagtcagcttcagggcagcttcctgccacagcagcattaaatgaagttggaatttacaaactggctcaacaagatgttgagattctacttaatttgaggacaaattggcctaatactggaaaataatgtctttcagaaaaaggtttctttggtttttgtttctaagaaagaggaagccaattggatttcaagttatatgatgaaattctgaattaatgaaactggaaaactttatagaattacttattatcttggatttatggtgttattaaaatgctgaccatatttccttcatcctcttgttcctaaggaaacaaaaacagaaaacgaaacaatgaaaactcaattctatttacaagtataaatgctgagtatgtctgttgaagacaagagcagagatattaaattataaccaactttcaatttcctgtgctaattaagggaaattctgttgtggataatcaaacatagccaataaatttttttaaaactcccaaaaaagca

SEQ ID NO: 211274 - DNA, 432 bp, Homo sapiens
ctgtctcaaaaaagaaaagaaaagaaatactgctgacttttgaatgttgattttgtatcttgaaactttactgcagtcattacagttcaggagacttttggtggagttttagggttttctaggtatagaatgatagcatcagcgaagagagattgaagggggccagccccttcacacctgtgggtatttctcgtcaggtgggacgagggactgagaaaagaaataagacacagagacaaactacagagaaagaacagtgggctaaggggaccggcgctcagcatacggaggacccacagcggcaccagcctctgagttccctcagtatttattgatcattatttttactattttagcgaggggagtgtagcagggcaacaggtggggagatggtcagcagggaaacgtaagcaaaggaatctgtatcacgaa

SEQ ID NO: 211275 - DNA, 355 bp, Homo sapiens
aggggaatcctgcttttgctccctacctaccaccatatctggcagttaaataggtcctcaataagtattatttaaaaagaaaaatgagctgtgcaaggatgctgatacaacccctggcatatacgaggtaccccactgattctctctgccccaccctcaggtaatgcctgttatgtacatggtaccctaagcttctggggctaaaattggctcaatttttaacatttgggaaacaagtgattaggttgtgttttctaataagctatctacctcccagaataaggatttttgttttgcccactgacatacatgtagccgaactggtgtccaggccactcgtcgcctgaaagccaaa

SEQ ID NO: 211276 - DNA, 604 bp, Homo sapiens
ctctctctaaagtagcaccaaggggaatggtgggaaaggatgcaactgttgccctgatatcaaccacagtgttaggatatcctcaaacagccttagtacctggtatacatctcttatccctgaaataagttaaagcatttctgcagctgttttagctgtagtctgcatatatttgggagaatgattccatttagtgcctcttttatttcaggccttcatttcaaggcttgtagaccttgttgtatggtgccagcaatgtagtgaagacaactgtggtcactttacccacacctttcatttaaactgcagatttaggcagggtgcagtggctcacacctataataccagcactttgggaggctgaggtaggtggatcacctgaggtcaggagtttgagaccagcctggccaacatgttaaaaccctgtctctactaaaaatacaaaaattagccaggtgtggctacttgggattacacacctgtaatcccagctacttgggaggccaaggcaggagaatcggttgaacccgggagatggaggttgcagtgaccaagattgcaccactgcactccagcctgggcgacagaatgagattccatctca

SEQ ID NO: 211277 - DNA, 555 bp, Homo sapiens
agaagatattatatgaaggtacccacctcgatcctgaaagaaaacacaacggcggcagcagcaattgaacaatcttgagcatagaaaagaagtcaatgtaaacgaagttaagatcaaccacataaaacatttcatgtgcaataagctctcaatcaagtaaataaagtttaagttgtagtcatttttttcccacacttgtgtggaatgaaaacttgccagtttattctggccctgtgtctactgccaggatagcattcttacgtgttacatatagtggacttgtcatccttaaaatgtgaacagaatttattggcagtgtggcaaagaattataaaacatagtgtttaatgtacttggagtttccttgtagtagtaagtatagagtttgatgataagtaaacgtcccttaacaaaaacctcagccttattactatcccattaaaaaacagcaaatacttactgagttcttgtaagagctaatgtcattgtaagatttaaaactaagggcttttatccctttgcaaattattttttaaatgcattcatcatttgaaa

SEQ ID NO: 211278 - DNA, 476 bp, Homo sapiens
tgtcatgtgtcttagtcccctttaatctggaacagtttcttggtctttgtttttaaattgactttttaaaaagaatactggccagggttgggcttagctgatgcttcttcatgagtagattcaggttgtatgtttttggtaggttatatatagtacctaagtgatgatgtatccttttcagtacatcacatcattaggtgattgatgctaattttaaccagttggttaaggttgtgtctgcccactttctccacctaaaagttattattttttcttctgtgattattaagtaatttgtggtacaatcttttgagactatgcaattatcctcctcatcaaactttcacccagtaggttttagcatccattgatgattcttgactgattcagttattactgtgatgccaaatggtgatttttctaactccatcactccttggaaatttattaattggcattcttctgcaaaaaaaaaa

SEQ ID NO: 211279 - DNA, 421 bp, Homo sapiens
gccaagtcatgggcttgtttgctttcagtcactgccttcagaaaaagacaattttacaatgacttacttctaataatcactgaaacagcctcatgaggacatgcaaaactgctgtctatcttcagacctggcccattgtcaaatggcagacttgcagagcaaataagggacctggcctagttcacaaggcagtcagaagtgatccaaagttcaggctccccctcccttttatcactccaccctgcctctactcctccgcctcctattcttccggcctttccatctggaaaccatgagcctcatggattccaggcacaaattctcagatttcagatgtttgggaaatttctcagcttgggtcattcttcaagagtaagaaattgaatttgtgagaaaaaaaaacagctgagactgtttcaca

SEQ ID NO: 211280 - DNA, 914 bp, Homo sapiens
ctcagctcaccacaacctccgcttcccaggttcaaggtggaaaaaactcaaaacttaaatttcctgttgaatgcaatttgaaaatatagccaatgattccacttttcttctctagtaaggttggacattctgatctacttggtgttttattatagaactcctagtgtgcctgagtcttacattgtgaagatacttttctgaaactttacatgtaagagaatatatatgatattggatgagatcaggctggatgagaactgatacctgtagatatactttttagacaaaatctccgattgccactcgttttcttatttaactcataaaaataaaacacattggatggagggtaggagtaggaaggatatttatatgttttaattgcaagtcattgtttcatatcaatacagaacatatggtatccctggctttggacctacagaaggaaacacatttttctacctggcgtatgccagaggttcttgaacacctggagggattactgcagccctggggtggtgagagccccatccagctggggccatggcctagggatcatgccgggtatggggaggctccagccaagagccgaaaaatttgagtccttgttcttctcctgccatagaatcctctagagactgctaaaaatctacaaattgaggccctgccatggacctggggaatcagaatctgaaggttagggcttaaaattttttttcataaagcatcatggatgaaaaccattattttatagattacatttatatggctagctcatgagtctgtttatttccttctgaggttcaagccaacactttcactatttcctggtaatagagttgtgatcttttttttttctttttttgaggtgaggtctcgctctgtgacccaggctggagtgcggtggtgctatc

SEQ ID NO: 211281 - DNA, 383 bp, Homo sapiens
tttagtaaaagtctgccgtggagacacgaaggtgctgagaatgaagagagagggctgtgtctgtaatggaagccgcgtggaaaggaggatgggcggcagccttcgagggtgtgtgctgggcagggagtaaagcgacaggcaagcccgcagatggggaactccctgggaagccccctgtatccttcgggacagacattgtatgagttcccacagaatcagagagggtgactggagccactgaatttggagtgaaagaaaaaggtgagagtaggaggaacgtgcgttttcagtcgtggcaggctagataatttcaaccacatttcccactggataagacctttttgtttttttaaattaagccaacaaagcaaaaagaaaaaaaa

SEQ ID NO: 211282 - DNA, 971 bp, Homo sapiens
ccatcttctcgtatgttctcattacttggcttaagaattctggctgttgatgactatagtatggcatatcatacattttaagctcagtcagcttttaaatatcaccagtcctgtctgcattgttccattatgagacacatagctgtggtttgagaactcaggctttgaagctagcctgcctgggctcgaataccaggttggtgacttactatgtgtatagcattggggaagttactctctgtgccttagttttctcatctgtaaaatggtgataataacaaatagcttctattttatagacttattgaaagattaaaataattaatgtattacctgggcatggtggtgcatgcctataatcccagctactcaggaggctgaggcataaaaattgctaaacctgggaggtggaggttgcagtgagctgagatcatgccactgcgcttcagcctgggtaacagagcgagactgtctcaattaaagaaaagaagaagaaaaagaaatatgctattaatagtatcaactcacagttggagctcctgagagtgtttgtgactatgatgagttctgtatatttgctgagtaacagggcatgattgacatttaatgttatattgctcaggagcttgaaaatatcttgtcttgaggacctgtagggaaagttcttgtgtagcgtgttggatttaaagctaaaggttatcaaggctacaggcccaacttttaaaatctctcttaggaaccacttgttatttgggccgtaatcttaatagttttaatggtttgctatttgggaaaacttaagtggagctagttagtgaattgactttcattcaagaccagatttctttcctttttatctttggtgtaagatatttatttattttatttttctttaacaaacacttatattatcctgtctgatggagttttgaaggggtaaataaatttggagaaataaaacattaataaaa

SEQ ID NO: 211283 - DNA, 747 bp, Homo sapiens
tggagtagaaaaaaactatatgtttaaatgtggggacagcaagggttaaaggcatttttatttgttgcttgaaatctgtggagcctacagaaaacagtggttggtatcctgttgatggaagaactaaaggaatgctgcattctcagcatttcttatttcctgtagaatacagcaactgcagtttttatttgacattctgctagtttccaggaagggctcaatgaagtgactgctgtcagcatcttttttcaccgcgactgatactagagaaggtagaggatgtttaggagcttttaaaggaaattatgtttagtgaaatacttgggttaggaagttaaccaaatctttaagtactgacttaaaaatgcttgtattgagagatgaatggtatcagaatgacatacaagtatcagcaggtctctcagattgttgacctattaactctacagtggtaacacttctaaagtccttggtaagatacaagattcatttgcagaaaatagctccatctgaaaaacagtagctcatacatacttcctttacattttccctattcagatgaaacaaggaggatctggaaaatgtgaagccaagcaataattgtgaaacataagtccttagtaatgctgtcataaaccagttttcatgtagtttgattttcagctgataaagctggtaaatgagttatactacaaatctatgattcattaggaagcaaactccttaggtatacttacagagaagcca

SEQ ID NO: 211284 - DNA, 1458 bp, Homo sapiens
  misc_feature (1366)..(1366): n is a, c, g, or t
  misc_feature (1457)..(1457): n is a, c, g, or t
gagaaaagaaatggattaaagaattaaaaggttgtaggctgtgaaataggtataacaggactggcatgggataggaaaaaggaacaaagactatggtcagaaaaatgttatttatttattattttattttttattcttgagacagggtctcactttgttgccaggctggagcacagtggcacaatcatgctgcagtgagccatgaactcctgggctcaggggatcctcctaccccagcctccctagtagctgagactacaggtgtaaaacaccatgcccaactaatttttaaaaattttttgtggagacagggtcttgctttgctggaccagatgtttgaggcccaggatggcctcaaactcctcgctccaagtgatcatcctgcctcaacctcccaaagtgctggaattacaggcatgagccactgggctggttggagaaattttagacttcaagaattcaaaggcagagcagttctcagctgatatggtttggctctgtgtctccacccaaatctcatcttgtaagctcccataattcccatgtgttatggggggaacccagtgagagatgactgaattatggaggcaggtcttttcctgtgctgttctcttgatagtgaatgggtgtcacgtgatctgatggttttagaaatgggagttgccctacacaagctccctttttgcctgctgccatccacgtaagatgtgacttgctctcccttgccttctgccatgattgtgaggcctccccagccatgtggagcccaagtccaacaaacctctttcttttgtaaattgcccagtgtcaagtatatctttaccagcaccctgaaaatggactaatacatcagtagagaccaggtccaggccagtgctcgtaacaaaaatataaaaaatacaatacaaaccacacaagtaagtaatttaaaattttctaggtcaccagattagaaaaacttaaaactggtgaaattaattttgtgttttacacttacaaaacatctcaatttgcagaaactatgtttcaagtgctcaaaagccacagtggctctaatagcgaccacattggacagtgcagatctagactgtgtccatatagattgctgaatatgtgtctatatacagttgctattgggaggcaaagaatgggaagaaaaaaggatcagccgggtgtggtggctcatgcctgtaatcccagcaatttgggaggctgaagtgggtggatcacttgaggtcaggagttcaagatcagcctggccaacatggtgaaactccacccctactaaaaatacaaaaattagccaggcagcgtggcacatgcctgtaatcccagctatttgggtggctgaggcaggagaatcacntgaacccaggaggtgtgggccgcagtgagccaagatcacaccactgcactccagcctgtgcagcagagtgagactgtctcaaaaaaaaaana

SEQ ID NO: 211285 - DNA, 606 bp, Homo sapiens
ataagctgctggagaagatgcttacaaaacactgaaatgcccaaaatataaataacaaatgaaagaaggacaacaaatactggaaaacttagaaactccaatcagtgctgaaacaggagctgctaacacatggcgtctctcaaattctgggggtgaaggagtgactggcatggcactgaatggatggcaggtgtgagggcccaggagggtgacacgcagcacacaaaaaagaaacagcacttacacttgaggatctcgagtaactttaccctactgagaaaacacaggctttggaaggggccacaccggtttacagggcatggctcatcagtaacacacgcagacaaaaggacaaaggccaggaaaattcagactggtagaatgatttaatgtatgcatctacacaatgcccataaggaattcagtaatgtccacctgaggcctgccagcctgattgcctctcaccctcacctcttctcagaaatgtgtggctggtcttctggcacccccagtttccccaagagagtgcacggtgacaggagatttcatgttggtcacggcagcaagtatagaggaccacatcctagggagtcccaggcaagcccc

SEQ ID NO: 211286 - DNA, 177 bp, Homo sapiens
cgaagacatactacttttggttgggattctttatggaaagccctaaaatattttgtatgcactatatcagcaatgtttacaggctgcactgtgaaacaggtgtgttggaggcagacagactttgaaatttctgtgtatggacttaatttaagtcagacagggagggtaaagagagca

SEQ ID NO: 211287 - DNA, 553 bp, Homo sapiens
ataaaaggactttggcaaatttatgtgcacataaatatattctgttgtcaaagggttcatgtctcaaactctcaaactgagcaagttcatactagtctttcctttaactccagtggcctttgtaggctgaatgactttttgaaaggaattctgtctcatgttgtctaattgttccttcttcagccagtgtttgtgtgctaaatgcaaggtcctgtgctgggtattctgataaaaaaacaaaggtggaaccatctgagtgctttccttgttcaccactttaattgtaggaaactaatatcttttaatgagagtcttcaataaaagatgctctacaaagttgtattgtggatgctgtcttattatctcaattctaggcagtagaatttagctcaattttttacatacaaatgaggaaccaattttcagtaaggttaagtaaacttgttttgtttttcgacatgacctagccctcccctcccactctgaaaaatgcagatatagaccctaggtaggctttctgaaaccaaaactatactgtttctgtagctgcttc

SEQ ID NO: 211288 - DNA, 484 bp, Homo sapiens
agggatcttgaagaatgactatggactataataaacttaactaggtggttacattaactgtagtggcagcccctggaacttgatatgcagctactgacctcactaactcctttttctccaattaacaagaaccactcaaagcaagttgttacctgaaatgacagaagtataccttcgtactcaactaagtatgaatgctttagcactatgctagttctcctgtctctgccataaggtagttgtattggttatctaatatctcacaatttctgtggattcaggaatctgaacacagctcagttgaatcctctatttagggtctcattaggctgcaatcaaggcacttaccgtgctgcattctaatctggatgctcaactgggaagaagcgatttctaagctcacttaggttgatttccttgtggttgtataactgaagcccttgacgtcctgctggctaatggctagagacaaacctcagggcca

SEQ ID NO: 211289 - DNA, 345 bp, Homo sapiens
ctgtaccctagcacccttcctggtacctacaaccttcgtactcaactaagtatgaatgctttagcactatgctagttctcctgtctctgccataaggtagttgtattggttatctaatatctcacaatttctgtggattcaggaatctgaacacagctcagttgaatcctctatttagggtctcattaggctgcaatcaaggcacttaccgtgctgcattctaatctggatgctcaactgggaagaagcgatttctaagctcacttaggttgatttccttgtggttgtataactgaagcccttgacgtcctgctggctaatggctagagacaaacctcagggcca

SEQ ID NO: 211290 - DNA, 192 bp, Homo sapiens
acaatctaccattggcctggctaatcccagggccacatctaaccattaaaggtgtatactcatctcctcagtgaaaatgaaacagaccactatcacctgaatatcctattttcaaaagtttattacaccaagtaagttacgagaaactatgacacttgaaacaagctgaaatgtgcaaatgagccacgctag

SEQ ID NO: 211291 - DNA, 481 bp, Homo sapiens
aagtcacagctccacagggtagagctgagcaagctgtcctcccagctcgtggtcccccagcaaggcagcagtaagactcacagcagagaaaactctgcccatgtttaaacagtgtgtgtctgagcagtaggctaataacttctccgtggcatgcctgttcaaacacaatcaaccacagatcttctgttttccttttgcttctaatcgtacctgtattctctctgtattttaatcttgtttaatttcctcagtatatccctacagatgtagtattggggatataaagacatgagctagtggagcgggagggggtctgatagggtttggctgtgtccccacccaaatcttatcttgaattcccgtgtgttgtgagagggacctggtgggaggtgattgaatcacggggtcaggtctttcccgtgctgttttcatgacagtgaataagtctcatgagatctgatagttttaaaaatgggagttt

SEQ ID NO: 211292 - DNA, 545 bp, Homo sapiens
ctgaagaggagttaatgggaatgcaagcagggtgaaaaaataggacgatggtgtctgtctaccgctttgatgcagacagctccttaattcataaaggcagcttatacgagggcagttgaaacaaaagggctatccagtgtgagctgctgagcaggctctgatggatgtctctgacagggtagtcccatcatgagattgtctctgccagtcagagtcattctgtggcctcttatttatttcatgtagtcaatagctcctaaaactgtgttcctggtttctatccccactgccaccatcacatttcagccctcatttggctaatgttacttaaatattctaggttttctactggttcatgggtgtccagggaacctttctattgttacttatctgatttctcacagctaaaatcactttcctaagcaccgctctcatcatgtcaccattctaccccaaatcatcaattctctactagtctcccaaattagaacaaaactctttgtctgtgcaggcactgcccagacagcacagcctcagtctcccag

SEQ ID NO: 211293 - DNA, 303 bp, Homo sapiens
tcagaatacagttctcattttcctcagctttactgtttagggaagccgaaatgattatgtataaactgtctcatataaacgtgaaattgtttcatcttgactttaaaaaaaaaaaaaagttttcctttaaaaaaaaaagttttcttggtgtgttcaaaaagttcattatacacacccatgtatgtataataatttagtatagataaagatactatttcaattcataagaaaatattctgtaagtggtatgatatgactttttttaaagggagagaagtaggatgacaaagggaggagggagag

SEQ ID NO: 211294 - DNA, 387 bp, Homo sapiens
agcattttagaaacacttccttttgaaggtggaaatatttatatgttagcacttaggctccttatcccatgactaagtgacgcacgggaaaaagagaaaccgaggccgggtgcagtggctcacgcctgtaatcccagcactttgggaggccgagccagatggatcacttgaggtcaggagtttgaaaccagcctggccaacatggtgaaaccccgtctccactaaaaatacaaaaagttagccaggtgtggtggcaggtgcctgtaatcccagctactcgggaggctgaggaaggagaatcgcttgaacccgggaggtggaggttgtagtgagtggagattgcaccattgcactccagcctgagctacagagcgagactccacttca

SEQ ID NO: 211295 - DNA, 254 bp, Homo sapiens
ggcgctttcctctgcatgtcactggttgggggcgggagttcaattccagagtatgaaataggaggcctgtggcattattctttcctgtgttccagaaggcagatttcctcatcccgccaacccctttaaaaggcttcaaagtggggtgattctttaccctgtacacattatactgtggtggtcattagagctgtttgccaaatacttccagtggtacaagagcactttcctggtccccttgtgattgggtgggg

SEQ ID NO: 211296 - DNA, 317 bp, Homo sapiens
ccagtcaggaatgttggccataatccaatgaaaggggaaaataaacagaattctctcaaagtcaagtgtttctgggttatattaaaaaatttttaactttaaatggtaaaaaaaaaaaaaaagtaacagttttaacaaaactttcaattaatttaagttagccatcttagaaaagtagaaatctacttgttttttttgtttgtttgttttgttttttttgagacagtcttactctgtctcaaaaaagaaaaaaagaaagaaagaaagaaaagaaagaaagaaagaaagaaagaaagaaagaaagaaagaaagaaaga

SEQ ID NO: 211297 - DNA, 267 bp, Homo sapiens
caatgctcttagtggtggtcgcctgtcttcagcatccaaagtatcagacagtgtgtgtagttttccgacttgagtagtattttcttttctttgtacagttgtgcatgtgtgacttggaaggagcatatttgactagatgacacatgggcttctctggagttcctgctctgatcgtaatagtgtattatttttctgaggctgtgtctgtattgtgctagaaagcaaatgagttattatggatcattccaagtgtattatcccatgtat

SEQ ID NO: 211298 - DNA, 353 bp, Homo sapiens
gagtcctctagttcagcctgccacatgcttatgaaggtttatgaaggtttaatgagcaaatacttgtgaaagtgccttgaagactgtccagcagcatacaggtgtaaggtagttgcattgtttgaggagtttcacatatatcagacaagactgtcaattacaggggtaggcactgggttggactgaagttggttttcctctttttgtagtaactgattatcttttcatcagaagactgtaggggccaatccttttgtagttcataaacataatggttgggtgttacgtgcgtgtgtgaaatgtgccaccctccagccttgttacgatgttgacacattacccatctgacatgg

SEQ ID NO: 211299 - DNA, 287 bp, Homo sapiens
aaagctacctcatatcagccagcctttcctgtcccctgccaatagagcatgtcgttgggtgtgccattttaattattcacttacttggttgtacttccagatttgaaatagctttgggtttgccttggacccagagggattgggaggactttccgtggatcatgaattgtggtgggggccccggggatggagttgttgaagaggaggtgtgggtctggcggcataccatgggtggagcgccctcgcggcactgaccaacaagtggcttcagaggatctcaacccaga

SEQ ID NO: 211300 - DNA, 289 bp, Homo sapiens
gagttcctctgatttgaatcatgaatgatagtgaagcatttttctatacttttgtcttttaacacttacagtatcactataacatatttatctcctattttacagatacagaagttgacacataaaaagtgaagggtaattcaaaccaacattatcatatctgctaaaacttctaagtgtccaattcttgattgtgaaaatcatgtatttgcaccagtccatagactcaccaaaatggcccctccactgataaacaaaaaaataaataaaaagtgcaggtaggcggtgt

SEQ ID NO: 211301 - DNA, 739 bp, Homo sapiens
agctgggggtggggcgtggcggagtggccacgtgggccgcgcggagaacgcgccaggctcatcacctggagcatcgtgcctcagtttccccctcggcaaatggggcttcagcggctcgcgacgcacattgatggagcgtatgtccaggcgccggtgcaccgcaaggagcaaaacagacacagttcttggtcctagggctcacgtcccggggcgaagaggatcctccataaacgatcagccatagcagctgtgattggacaagagactgatttcagtgactttctcctgataagagaccaccgaccagctgaccatgccgaccagctgacccgttaatagagagagatgatgcacctgcatgcctttgtgtcctgaaaagacgttttgccataaaggccctaattgtaagatgtgtaaatgttaagtctccaccccaaagtgaacatgggtcatatattacatgctttgctcaataagagggcatgtgtcaggaccaccttcatgaatattcatagctcctcctgttacctgttgaatatgtatgtttagccaatcccttcagcatagcgctcctgccccaacccctcctccttggacgtgcctgtctctggccttggctggagacagattcccagcctcagacagatggccgccaccttgcaggctacgaccgtttacaagaaataaagccttctctttttcccaaaaaaaacacaacgaacatttctccagcggcgtg

SEQ ID NO: 211302 - DNA, 479 bp, Homo sapiens
acaagaaataaagccttctctttttccaaatttgtgaattgtgtgtttttaaactaacatgaatgacagaaggaaggatggcctcttcaagcaacgatgatgaggcagttatttatatgggggaaaaatggattctaccgtgggtggactaaagaggaaatgtgaaaaaataaaaagtgagaaaccgctggtagtgaatcggtgcaagcgccctggagaagagacttggcaatatttagtaaagtcaaacagcacgaaccctactactctgcaaagctgctgcaggaactggcggaacgaggtcacgaaggaaaccttgccggaaaggaaattgcagcagtgcctgtgtgcgtgcgtctgttggcaaaacgctgctaataacgtcaatgcccatccgctattgaataaacctgctttactgccactatggaataccaaactgcagaaaaataattaaaagaacgtatctcatattacag

SEQ ID NO: 211303 - DNA, 204 bp, Homo sapiens
catacctgccgccagccccttgtgcccacagcacctgctcctcctctctcagccctcttcttacttgattgtgatgcattgtgttactgccatccagactgcccatttcgagttcccgtgtgcagcctgcctggacggaggccttagcctctgcctgagtcccggttgcatgggaagtcctctgggtctcagtttggatgtttg

SEQ ID NO: 211304 - DNA, 430 bp, Homo sapiens
ttgtaagtgagaaataaatatgacttgggacaggctaggaaaccttctttaggagctaggaagtaagctgaactttaaaggtgatatatagacatgaagaaagaagccaggtaagaattatagaaacggaaataggcaacatcaaggtatacagaggcataaatatcttgcctttgcctctcctcggtcttgtgaaaatgttttccagaactttggtactttgtaactgtggttgttcaactagataaatacaacttggacctaaagataggcagttggtcgtggataaagcctttacgaaagtactttctttttagagaatccttgtaatatttctctaggtattttatactaaggaacaacaacaacgaaatatgttcagactgtagtgcaaaaaaatataaaagacctttcatttccctggtgtcac

SEQ ID NO: 211305 - DNA, 535 bp, Homo sapiens
ttaatatcaggcaaaagggaaattaacacaaggcatattgcttggaatatagagggacattacatatagtcaaaagggtcagtttatcaagaagacatagcaatcttgaaagcttttgcacctaataacaacagagcttcaaaatatgtaaagcataaaccaaaataagtgaaaggagaaatagacaaatttacagttacaagtggagactttcagattcctctatcagtcattattagaacaaatagacagaaaatcagtaaggacatagaagacttgaacaatcaacgtgacctggtcggtacttattgaaacttcaccctggaagtgctcacagaatacacagcaagaaagaccatatttggacccataaaacaaatctcaacaattttcaagtaaaagaaatcatataaaatatgttctctgatcacaacagcacttcctcaaggaatcagtgaaaaaagatgtctgcaaaatttccaaatttttggatattcaacacacttgtaagccctacaggtcaaagaaaaacatc

SEQ ID NO: 211306 - DNA, 364 bp, Homo sapiens
aaaatacttatttttgtgatttttttttctgaaagtggcacagtatgttctaagagtataataggccagctccagagcattaaagcaatgttgaaatgaagcatattggtgtgaatgatgcatagtaggctatttatgaaaaattacttcaataaaaaacttcatgaacatgtaaacatgattttatgtataaacacactataagatttatgaaagataatcatactaatatgagaatatgaagctgaagcaaggtattttttaaaaattacattgttgaacaaaatggtctgaatatttctgcttttaggtaaggatctatgctttgcagctgcctccttcagtttgtttttatgacttaagc

SEQ ID NO: 211307 - DNA, 457 bp, Homo sapiens
tgcctgcttgctcatttacgtaattactttcttaattatagttatcacaaaacaattgcttaattttctgttaactcattttttgtccccactagaatgtaagttccatgagggctggcacctatccccaatgtctagcaaattgccttgtgcagagatgttatttatttaatttacctgttggataaataaatgcatgagtgaataagtgaatgaataaataagtctatctatcttctcttcaaactcccttgaaatctgcacttccaatgctctttccaacccattctggcttctagctcactgctccactgaaattgttctttcaatgtttcccagtgactcctttgttaccaaacccagtggccttgccatttctgtggtgtttgataaaccttccttgaaattttctctgttactggtttctgagacaatacagtgacatggttcttctctc

SEQ ID NO: 211308 - DNA, 373 bp, Homo sapiens
gtggctccaaagaggccacagaagagagctatgtctataccacacacttattctactttaaacggcaatgggagcaataagcacctaccaagaaaaggcagaggacagattcatactcacctgcccaccaggctgttgtattttagagatgatagaaacataagaggaaaaccatggggcccgtgttcttgagggtcttgcagtcgggttaagagcaaggcagtttggagtcagacgggctgcgcctgcatccctgccctcatcacggccagctctttgatcctaaactacacaacctcttccgagactacacgggcccacgatcccttatctccaattccaaagtgaaaacccggaatccctcaagtgtctt

SEQ ID NO: 211309 - DNA, 522 bp, Homo sapiens
ctgttgattgtgttaacacattttaatactgtcaagtagtaactaatactgtatctaaaataattagtaatttaaaagatacctaaaaacttaatggaataaaattagaatgctaataaatgtaaagtccacattaatatttcaggggagacgtataacctctcacacaaagtaactcgtatatagcaaaaatagaggacattaggaaaaaaagtaatgctatcagtggtgctattttcttgctatagttaatggtgtattaacacttcaattataaatgtatactctgaagggtttatcatctacttaattttacatgcatttcctttactaaaacttagattaggtaatagtgaagaacaaactcgaaataaatttctaaatctgaatagcattaaatgtatttcttgttaaaagaggtttactggttttggatgcttttttgcactcagaacagatagaaatggcactgtttttaagaagcattgttactttgcttttgaaggcaataaatgtaaaagt

SEQ ID NO: 211310 - DNA, 497 bp, Homo sapiens
cagggattcagtttaaccttttcttcccccaggctatttgcttcatttctttaacattatattttcagattaatttggacttatacaagtatcacagagataggaagttcctgtttacccttcacccatcttcctgtaatggaacagcacacacaatcatggtgcaatgaacaaaactaagaagttaactttggtacaatacagtagttgaactacaggcctcatttggctttccttcgtttccccactgatatccttttttcattccagaatcacacattgcatttagttgttgtgtctgcttctccttgaagctatgacggttcttcagtcttttcttatctttaatgaccttgacagtttgaagaataccagtcagttatcttgtagaatgtcccacagtttgggtttgtctgatgattagattgatgttatgcacagaagtcatgttttgtcctcagtacatcatttcagggggtacatgatgttgatatgtc

SEQ ID NO: 211311 - DNA, 446 bp, Homo sapiens
atagatagatagatagatagatagatagatgaagcgatgtctaagatatctggaaggatggatggatggatggatggatagttagatagatagatagatagatagatacatagatagacgattcagagatagataatgttccaaactcttgagggccaagaactggtgacatcttgtatcaacacatctaggtctacaatcttggtttctaaacaacattcattaaaaggacccaagggttgaagttagaaaatacaagttgagctagagtatcttgtaaagccacaaagaaaaaagtgcttaataaaaatgatggggacttttcaaagggagccaacctgaaagacctcccaatggtccaagctccaacaatatgagcaataagttatgatagctttggattatggcccacagaataaagtaatactcatctctactgtgtgaat

SEQ ID NO: 211312 - DNA, 283 bp, Homo sapiens
gacagagagactctgtctcaaaaaaaaaaaaaatcatacaatgactaaacatcttattttgtctcacactactcttcttgctgctgattaactgcttgaatttcattacaaaataatgcaaaacaatgaccagcctgtttgggaatttcagagcactagtatgtattgtaatataaaatcaatatattaatagagtcatcccttgttatcctcagaggattggttacaggaccccccaccccacccccaacagcaaaataaatggatgctcaagtctctgata

SEQ ID NO: 211313 - DNA, 186 bp, Homo sapiens
agcaatatgatttcatgtccctatttgtaacaaaacagagcccaaatgttaatattctactgaggccgtttaaacctctttgtaagctgtcaactccataaatcctcaaattccactctcccctactcctacctcccccagataattcagctggcaaagtttctgagaaatccctaaggttagcag

SEQ ID NO: 211314 - DNA, 1378 bp, Homo sapiens
gaagtttctttctgtctcttaagtgatgtgtgagtggatggacagattgccctcagctttaagggcagttcaggatgatctgtcttaagatcgatgctctgtggaatgagaaaaatgcgctctgcagggcatgcccactgcatgtgctgggaggctctcctacatccaatgggcagatgcgcagtctccacggaggcctcaggcctcggtgtgagccagggctgcttcaaacatgtcggctatctaaagtccagcatcttccggtgactctggaggaagaggtgggcccccgtgctggatagtgggaggttctacatcattacctggtcctgagagctgagctgtagcctcctggtggactggagaagttcccacctctgcactaggctctgttgctatggtgagctgcatgtctggaggcttaacagagacattgggcaaatctgaatgctgagtttgatggtgacctggaggtgaaacggtgacttcatgatgttctggaggctgagctggggtctcctgctgggctggagaagattcaacctccccagaaggctgagctggctgctcctgctcactgggggaaagttcaggctctacaggaggacctggaggctcagttggggcctcctcttggtttgcaggaggttccatctcttctggaggctgagctggggtctcctgccgagtctgagaagattcaacctccccagaagactcagaaggctgagctggctgctcctgctcactaatggaaagttcacgctctgtaggatgacatggaggctcggttggggcctactgttgggttgcagaaggttccacctcctctggaaactgaactggagcctcctgctgggcttgggaagattctttctcattggtaggctccgaagttatggtaacctccacatctgcaggtttaactgtaatgttgggcaagttataatgagcttgatcctcacctggaggttgaactgtcacctcatgatttggtagagtttgagctagactctccatagaggactctggaggcagagctggggcctcctgctgggttgaagaaggaggtgtggaagctgctctggggcttcttcctggagtgaagaggactggatatcttcaagggtctctggattttgagtttcaggctctagatggaattgagaaagtccaacttactcagggggccctggaggctcatctgagttcacccggagttctggaggcaggctgccaggatactgtgtatccatactcgaatattcatcctgcaaagtctgtttctaacgctgtggtttggataattgctgtggaattccaacaatatcagcaatgctccaatgctgagctagatctttcttcaggttcctgggtg

SEQ ID NO: 211315 - DNA, 275 bp, Homo sapiens
catggcatacaaacatgggctgcaatcatgaagtcacagagagacagagggatctcatctattagcattatccttaatgatggaagcctgcatgatttctcccctaagatcaggaataagacacggatatctgcaattgctacttcttttcagcctataatcgaggttccagccagaaaaattaggcaaggaagagaaatgagaaaacaaggtaatctcagccaggcgtggtggctcacacctgtaatcccagcactttgggaggcccaggctgg

SEQ ID NO: 211316 - DNA, 301 bp, Homo sapiens
ccttcatctccacagagatctgttgcaggtatcttgaagggagagaaaattacttacttgtatttcttgttctctgcagatatacaaacccagtagatcatcacttgcctgccctctgtcctccctgagttgaggataattggcttgttattattagatactattatagttattattttcgtttcaaaaagacttgaaggcctacagttcagggccccagaaggaaaggcacattcagacagatgcatacctcctgctggtaggcaaagtcaatagctgagaaacttaagcctttaatatc

SEQ ID NO: 211317 - DNA, 657 bp, Homo sapiens
aacttagcagcactgtctgcttggggcagaatgtaagctcctttaccaccttatagtatcttcaactcttcaatgtccttaataagcactttgtaagtatatgtcgaatgaatatgtggatgaaaacatagtactgaaaaggtaggttgggagcaaattgtagagaatcttaaatgccaaagtaaaggacttggcagcaggcagtttggggtttataagcaaggtttatttatgatctaaatgataagaataaaatgatagagttgtacaaggtggattagagtagggagagacgaataaccaagggagttactatagtccagaaggttagtaatgaaaatctaagagacaggaggatcgcttgagtccaagagttcaaggctggcctgggcaatctagcaagatccaggtgtggtgacgcatgactggagtcccagctactcctgaggctgaagtgggaggatcagttgaacccaggagttcaaagcttctgtgagttgtgattgtgccactgcactctaacctggttgacagagcaagaccctgtctcttttaaagagaagaagaaaaaaaaaaggcttgagagaaataaaattgaagaggttgattcaagagaggctctgaaggaaaaattgacaagatctacctacagcaggg

SEQ ID NO: 211318 - DNA, 598 bp, Homo sapiens
atgcatacacagtatttgcacatatcttgatagaatacttattatgtcacttagtcttatatgagagggtttttttctttgtaaactagcaatttaaacaaaagagtcttgtcttgaattatttcactcagaagctgcaatgtgcaaaagacattattagtcttgagggtaatccattgtgaatattttcaatttcatataggaatgggaaatatttacagctaaatggatatgctacctaatcctatgtatgaattataaacctagttctcctctaccaaaggaatgatatcagaatgacaactggttcttatatgtgtctatcatattttatatggtctagtctacttgctgctttactaatacataagttggttggttggttagaaatagagaagagtggtatttaaggactgaggagagacatgcactacaattttaatagcacttagagctattagtcgtaatacagggaaccgaatatatcagcaagaaatagacttggactaaaaatgatgagcatcacctaagtggaggctactttttcttgatttttatttttgaatgctactttcatagtaataagcaatagtaaaaa

SEQ ID NO: 211319 - DNA, 481 bp, Homo sapiens
agatcgcaccactgcactccagcctgggcaacaagattgacactgcatctcaaaaaaaaaaagaagaatgttctcccttgaaagtgggagctaaacattgatgaacacaaagaagggaacaatagacacttgggtctacttgaggggaaagggtgaggattgaaaaatacctattgggtactatgcttattacctgggtgataaaataataagtacaccaaacccccacaacatgcaaaatccacatgtgagtatttaaaaaataatgttggtaaagatacagagctactaaaattctcacacattggcggtaagagtgtacagtgatgaaaccgctttaggaaaaggtatggcagtttcctaagactttaatcatttaccacataacccagcaattccactcctgggggaaagagaattgaaaacatgttcacatagtcttgtgtacgaacatctatagcaaccttattttataatagct

SEQ ID NO: 211320 - DNA, 380 bp, Homo sapiens
ataaccccctttactcacacactttatccatctttctcttctccagagaatgtttctctccctagaacctctgctgagaatgctcttcccatggaattgtatgtccttggcttcttttgatactcaggtgtgagattagatctcaccttctaagagaagcctagtgcttttctcaattctttctatcattgaacttatcactacttggtgatttcttatttatttacttgtttgttttcgtttccctgcaactgtatcataagcttatgtgagctgaggccttgtcttcatgtccaatgttgcagcctagtgcctagaagagcccccctcttctagtgcagtgatgctcaatgactgttgaataaatgacagaaccaata

SEQ ID NO: 211321 - DNA, 791 bp, Homo sapiens
accaattatatagcgacactgtgatattggtggagggattgacagatggatcagtggaggagaatggagaacccagaaacagacccataaaaccaagcccaactgatatttcacaaaggtgcaaaagcaatacaacagaggaagaatagccttttcaacaaatagtgcgagagcaattagacatcctttggcaagaaaagcaaaaacaaacaaacaaacaaaaacaaaacaacaacaacaacaaaaaaaaaaccttgaactaaacctcatagcttttacaaaaattaagtcgaaaatgggcatcaggcttaaaaagatgtaaaaaaaatataaaaagcaagatcgttttcaaaaaaatcaatatattgtacttcatcaaaactaaaaacttttgctctctgaaagaccctacgaagaggatggaaagacaagctacagactgggagaatatatttgcaaactacatatctgataaaacactggtagtatttaaaatataaaaagaactctcaaaattcaataataaaaaatcaatttagaaaataggcaaaaggcatgagcagacatttcgctgaagtggaatagatggcacatgagatgctcaaccccgttaaccatcagggaaatgtaaattaatactacatggataatatgactatagatggttatgtagaattgggaacctgtggtagggtgagacaggataaaataaggaggaataaagagaaaatgaggatttataacaataatacaacatttctattgacataaatacaaagttatcaaggggg

SEQ ID NO: 211322 - DNA, 380 bp, Homo sapiens
tcacctttctaatttaattcttttcaaaacaaagacagcaaagccacattgtttactgagaatcttctagcaagtctttcttagctcagttttggcagaaaccacatatctagtttccacttgtgttcctggacttagacttgtaagtttcaattatgcatagtatgcatttcattaggtctctcaacccctgagataaggtgtgccaaaataataatttaacagtcacatccttcacaggtagagttagagtgtctggggaatcagcctcattccaactccagggagaatatgagactggtggtaacttttatttttttattaagatattcatatacgacttcaaactctttcaaattccttaaactgaagtttaagga

SEQ ID NO: 211323 - DNA, 303 bp, Homo sapiens
cagggcagaccatggatagggaaaaaggcccaggagggtgagaaacacaggtggccatgaactttttataatccagcatgaactggcccccatgggcagcctctgttattgccctgtgtctccaaaaggcaaaaccgagtccaaagtatgagtttgtaatgaatgtttgactgaaggttttacagagtgagtgaagttacatcaaacactacacattatagattactgaagctacttccattggatgccttggttttccttcccaattactttggccaccagccactcctggactacccttcc

SEQ ID NO: 211324 - DNA, 96 bp, Homo sapiens
tctctaatccattattcagtaactacttataaaatgcctgtggtatatttatcatgtgaaacacttgaaatgatagtaaaacaaaacgccaaaaat

SEQ ID NO: 211325 - DNA, 531 bp, Homo sapiens
cgagatcgtgccactgcactccagcctgggggatagagtgagactctgtctccaaaataaaaaagaaaatagataaattgtaccacttcaaaattagaaactttggtgcttcaaaggacactatcaagaaagtgaaaataaaatgcacagaatgggagaaaatgtctgcagatcctgtgtctagaatatgaaaactcttacagctcaataataaagcaacaactcagctacaaaatggcagaggatctgaacaggcatttctccaagaggcatacagttgtcagtaaacatatgaaatgatgctcagcgtcattagctatcagagaaatgaaatcaaaactacagtgagggccgggcgtggtggctcatgcctgtaatcccagcacttcaggaggccaagtgggggcggatcacttgaggtcaggagttcaagaccagcctggccaacatggtgaaacctcgtctctactaagaaatataaaaattagctgggcgtggtggtgcatacctgaagtcccgctacttgggagg

SEQ ID NO: 211326 - DNA, 455 bp, Homo sapiens
cagccggggccctcctgtgacctgcatgtactgggggattcgcagggaggatgtcgggacaccccggaagctgggaaatgaactcggttgcctttgaggatgtggctgtgaacttcacccaggaggagtgggctttgttggatccttcccagaagaatctctatagagacgtgatgcaggaaaccttcaggaatctggcttccataggaaacaaaggggaagaccagagcattgaagatcagtacaaaaattcttcaagaaatctaagatgtactggttcatgaagatgtgcttatgggtttctactctaatccttgaagaatcgccacactgtcttccacaatggttgaactaatttacattcccaccaacagtgtaaaagcgttcctatttccccacagcctcaccaacatctattgtttcctgactttttaataatcaccattctgactggc

SEQ ID NO: 211327 - DNA, 416 bp, Homo sapiens
caaccaccactccccacccacctagctgcagcaggtggcccagcctggggcagctcccctgttccctcaggtgggcaacagcagggactggtgggagaatcccagtgacacatattagccaaacagaccaaaataacaccatgaaggctctgaaattaaattgccattggaatcacagcccacaaagtagaccaagacctacagactaaacctaaacaggaggactgcctgcaaaaataaaaaaattacataggcagatgttggaaccacctgactcatcacttataacagtcagtataaaaatgctcaacaagcaactacaaatcctatgtcaacaatcaaagaactgaaaacgtcagcaaagaaactgaagaagaatcaaatggaaattacagaaatataaaatacagtaacag

SEQ ID NO: 211328 - DNA, 572 bp, Homo sapiens
taggcctgtatatttctctctgtacttgcataatcatctatctttatgtccttgcattgcatgtgaattatctgctcacataaccatttccccatccagaatgggagcttcttaaacttcttgcttgggatggggttgggactagatctggttcatcttggtgtcccagcccccagttcagaactgaacatagaatgagtcggtaagtgttgattgaatgtcagcccaccccctacccaacacacacaaagatagataaggcctccatttacagagagaaaagcccaagaggagttttttgacctgtttaatgtcccagggtgagttagtatcaggacagggattagcatccagctctttgggagcttagactagttcttatgcacgaaggacagcattcatagagcagccagccaaagggacccactcaacacctgtgaaaagaagaggggggcagggaagaaaagaaacaaagggatcacttagcctgagccaaactgggcatattcattgtcaaatgctgttgtaacaaatcaccacatgggcgcggtgctcatgcctgtaatcccagc

SEQ ID NO: 211329 - DNA, 596 bp, Homo sapiens
gagtctgtgtggttgaaattttcacagggagcctggggtgtggtcagtactgcctaatcctgcgactggcacactttttctgtaaagggccagagggtcaatattttaggctttgctagccagatggtctctgctgaatattctttttgtattcttcaaccctttagtgacataaaaattattcttaactcagagttcttacaagcacagaacactcaccagatttagccccaaggcttagtttttgtttgtttgtttgttttgagaaggagtctcactctgtcgcccaggctggagttcagtggcgctatctcagctccctgcaacctccacctcctaggttcaagtgattctcctgcctcagccttccaagcaggtgggattacagatgtgcgctaccatgcctggataatttttgtatttttagtagagatggggtttcgccatgttggccaggctggtctcgaacttctgacctcaagtgatccacccgccttggcctcccaaagttctgggattacaggtgtgagccactgtacccagcaaaggctacagtttaaggacccctgatctagactaaaggtaccctagagttg

SEQ ID NO: 211330 - DNA, 674 bp, Homo sapiens
catagaatttgttagtatcaaaacatgaactaaaattaaggtttcttgattcctagcaccacccatttcaacaatagttgagagggtttttctagctcctttagtgtgcttgccttggtttttaaaaattacagtgattcaagtcagtctcccacatccctcctttttaaaaatggtgttttgcaggcctttaaaatttaattaatttattccacatgcaaccagaaaaatttgaaaatggcatatacatatgcttctaaaaactgtgtgactcctactacttttcagatctttagtgcttagcatggtgcctggcagtaaggttaggtattcaataaatacttgaagtgatctcttaagcctttgcactttggtaaagcatgcaaagtactggtttgcatagtagctgatgttgcatttttatgtgtctagaaagtttaatagcatatgaatgtcttagaaaaaaaatttcactggactttgagtgatctccaaagttgattatctttagcctgtttctgaggtagcttttactttctagagggtttggaagatacgcatctattttcatattatcttgtcacttgtacctataaaattctctccctgctttagtttgactttttagttatgcgttttctgtgggattctctttattatttatttgctatttt

SEQ ID NO: 211331 - DNA, 208 bp, Homo sapiens
atctacagtcttcaggatactcttcaaatacactgatccaaatgttttaaacaataaaaggaaaagctttattcttaggaatttctgccccatcgcacccccaaaattagccacgtataaccatgtagcactatggtcttcaatgtgttaaaaaaaatttaggccaagcgtgatggctcacgcctgtaatcccagcactttgggaagc

SEQ ID NO: 211332 - DNA, 446 bp, Homo sapiens
ttttctttctcggaaccacagaggacttactactcagtaccaacctaagtatatcacagcaatattcaggccctttgtgtagtagggagtaaacaattaaatatagattgagcatgccaggcagcagctggtgagcctaggcccaggaaagcctccaattggcctggtgcagtggctcacacctgtaatcccagtactttgggaggctgaggcaggtgagtcacctgagctcaggagtttgagaccagcctggacaacatggtaagaccccatctctactaaatatacaaaaattagctgggtgtggtggcacatgcctgtagtcacagctgctagggaggctgaggccgaagaatcgcttgaacctgggtggcggaggttgcagtgagccgaggttgcaccattgcactccaccctgggtgacaagagcaaaactccatctcaaa

SEQ ID NO: 211333 - DNA, 363 bp, Homo sapiens
gcagtaaggcggcatcagaggagcaatttaactcacaagaggtaacgcagatggagagtacaactgaaagataccttgtgtggaagggtacagaaggaacctcaagctggacgttgatttcttttatcagtaatacaaattcactactagctgcttcttggatttccccccttgagagctgcaacgtttcctaaatgaacagaggtctttagggaatgcctcaaaccacagctgaatggggagtggctttagaaatcgccggtggaacttgcctgttaccttcttacaattccccccgcccctgggcaacgcaaaagccgtcctaagtgcgataagagcatggagtgaagggagttatttctg

SEQ ID NO: 211334 - DNA, 426 bp, Homo sapiens
tagggaaaggagttgagtgatttattgagtgcttacttggtgccacggcatgtgctaggtgcttacctaaatcaactcattggatcctcacaacaaccctgtgaggtgggtttcataacccccactgtttaccgatgaggcatgcctatcagtggccattctgtgaacacagaagagagctgcgctggccacagagaagatagtccaatgatccttaaagttcaggcgtgtgggttggagccaaaggggcctgtcccctggatataacttgagagtagctctggagaggaattctagaagccagtatgccactgtctggcctgaaccagccccacagcacgcagcacaggtaacctgcactcaggaagccaaaagatagaagcatccatacaccccactgccccccatgaagcccaggagtaagag

SEQ ID NO: 211335 - DNA, 353 bp, Homo sapiens
acagagcgctctggcaaggcaggatctggctgcctctgcggggcccacaccttcctctggaagggctcgggacagagatttattaacgaatcgcttctgcttggtggtatgcggtctgggagttcaggctaagagttaatgagaggtgggtaacagtcagagggtctcagtcagaccattcaaccgcaactgcaaacccccattagtaatcaactttcccaccacaaatcacgattcatttttgctcggtggcaagtctcttagggaggcaggggaaaaggattctactaacattcctggtaatctacctgattatttccctttcaattaaaaataataatttatacctttat

SEQ ID NO: 211336 - DNA, 587 bp, Homo sapiens
tctgatacataaagatgtgcatctatatgtatgttcacaaacatacatacagtttgtagctccagctgctgagaaggcttgacacaatgatgcccagagaacaatgaactcacctagcattccaatcttggtgtctaaaacctagaatacttggtttctagatattcctttataaaaggaatcaggaatttttggagaaatgagtgcttccatggccgtgtgtgagaaaatataagatgaactaggaacatgttgaaagtggttccagaaagtaaggaagtgcttaaaaaattacatggtcaacttgaatggatacaaaagcaaacctgaaagagttcccaatggccaaagctgggatactctgggcagcagaataagtaatgacagtattggattataactcagaatagagaattatccatgagtttgtacagagcatctatatctatatcatctgtatcatctatatctgtatcttaaataaatacatacatggggaaaaaagatagctctcctttactgaagaatttcagttaacaaatgtaaatcaaaatagacttgcctcatcttttctcacacttaggatc

SEQ ID NO: 211337 - DNA, 686 bp, Homo sapiens
agacaaacagcaacttgaaagaaaatctgaaaactttgaaggcaaagaactatagagtttttccaatagatccagattgaggccaaaacctcactcatcccctaaaatccaggtcaaatgtcatttcctccaagatgccttcttggtaccttcccctaggaggggtgatcttcctttcaatcatgttttgtccctaaatctattatagcaccctccacagtacagtaattcttatgtttccccatttacttccattgccccaacagccaaattgtgaccttcttaaaagcacatccctgtaaacctagaacctaatacaaaccctagaactaggcagatgaacagtgtgaaaacgacagccaaatgaaggtgtccagtctttttgaagggttctaccttgctgttcataagagtctactttggcaaaacctgccattatctagacagtgaatcaagttcacctaggttttaagggaataaaagggaattgattgttctagtatttgcaaatcttaaatttcttataacttagaaaataccatcattttaaagcttccaaagatattttctccttgttacatacagaatttgagctaattcatggatgaatgaaaaacactttctgtatttttatcatcatttcatacatttagtgaaggttaatttctgaactatatgcttagctg

SEQ ID NO: 211338 - DNA, 610 bp, Homo sapiens
  misc_feature (535)..(535): n is a, c, g, or t
cttaatctttttttcttacttcaaaaaaaattggatagtgatttaaagtgttaatccaaattgcattaaaacttcaccatttacatgacctttgaatattttgtagaaaaataattttacagaagtgctttcaaaatgagaagttacttctctgttatgtaggattttggttattagtaaaatttaccttaatagttaattaataaaacattgtcctttacttgatattagccttttcaggctatgaaaagcctggataacatattatgaagtaggcctacatagtaatgagattagttgaattaacatacaagacctgacctaaatgacttttccaagtcactacttaaaagacatcacttttttttttttttgagacagagttttgctcttgttgcccaggctggagtgcagtgcgtgatctcggctcaccgcaaccttcgcctcccgggttcaagcaattctcctgcctcagcctccctgtaataccagccactcgggaggtgaaggcacaagaattggtttgaacctgggngcaaaagttgcagtgagcttagaatgcactgctgcactccaacatatgcgtcagaatggctctgtcttgggtttc

SEQ ID NO: 211339 - DNA, 334 bp, Homo sapiens
ctgctctgatgccccaaacttccctgcctgggaattggatctggggtaatgagtgacccagcaggcagagatgacagattcctgcctaatgtagcaatgctgggacaacctggagtatctggtgtggcgggcaggcacaggcaggatgggagaggcagcctgagtgacaactgcccctgacctctcgctcctgctctttccatatgatgtgctggttcccctttcaccatgaagctttcacctgaggccctggccaagaggagatgccatcaccatgcttcctgtacagcctgcataaccatgagccaattaaacctcttttctttataaatta

SEQ ID NO: 211340 - DNA, 319 bp, Homo sapiens
aaatgtaatctccagtgttggaggtgaggcctggtgggaggtgtctagatcatggaggtggatcctcgtgaataacttaatgtcatccccgcggtgattagtgatttctagctctgagttcacacaagatctggttctttaacagtgagtgacaactgcccctgacctctcgctcctgctctttccatatgatgtgctggttcccctttcaccatgaagctttcacctgaggccctggccaagaggagatgccatcaccatgcttcctgtacagcctgcataaccatgagccaattaaacctcttttctttataaatta

SEQ ID NO: 211341 - DNA, 487 bp, Homo sapiens
cctttggatatcaaaagtttattatgacaatgttctttgtgcgtttttattcgatgttgtcagccattcatctaatacctcttcagaagatttttgtctctgggcagtggcattttataacttcatatatagaagaaaacttttatccaactgataactgatatgccaatgtgttagtatgaaaaaattttcccaacattcttaccaggtgtggtggctcaacctgtaatcccagcactttgggaggtggagtcgggcggatcacttgaagtcaggagttcgagaccagcctggccaacatggtgaaaccctgtctactaaaaatacaaaaattagctgggcgtgatggcaggcacctgtaatcccagctacttgggaggctaaggcaggagaattgcttgaatccgggaggcagaggttgcaatgagccaagattgcctcactgcactctagcctgagcgacagagtgagactctgtctcaaaaaa

SEQ ID NO: 211342 - DNA, 551 bp, Homo sapiens
agctgcccccatcaaaggcatggacactccctggttctcctcggtgctctctggcagccccgtcccttgtagcacctcacttgctctccccattcccattacccacccacactttagacaagtgagtgtgtgactgcttacattattgggcctaccctgttggaggatctacactcgaggaaaagtttatcatagtagatcatagcatgttgaaatcaaacagtcctgaatcctaggactggcagaattcagctccaccacacctgagcaatggtgttataactttaggcaggtgacccatgagccctcccctcccgtaagtgaaaagagagtgacgtaagcgtttgcaaaatgggaaagatccctcctcatttgcagtgttgtgagcattgaaggctctagtgatcgtaggcagcattatacattattaccatgtgacattgtaaggctcagtttgttagaaggggtgtaagaaagcagaaacagaaaaagtgaacttagagttgagaaccatgtttgagtagtgactgataacagaagactggagttca

SEQ ID NO: 211343 - DNA, 248 bp, Homo sapiens
ctctattagaatgtgaaatccatgacattagggcctttgtctattttgtttactgacattattctcagaaattggacctgtgcctgacacctaatgatgcccagtaaatatttgactgcaaaaaaaagtacttcacaaaaaaggcaaggttggtaatcatttatagatatcattaatatattagatgcataactactgtactgtacaatatttagaaatataaacatcgactactttttttttttttt

SEQ ID NO: 211344 - DNA, 337 bp, Homo sapiens
agatatggtggtgcacacctgtggtctcagtacacaggaggctgaggcagaaggcttgcttgagcctaggtcaaggctacagtaagcagtaatcgtgccactgaactccagcctggatgacagagcaaaaccgtctcaaaaaaacccacaaaaaccctgagtgaataagaactattaagtaggatccattgtcaaacatttctctattaatctatagacaggaatatctgctgttagttcctggagattttgtcctgagctgagtctccagggacactcgcggtgggtgtgtgctgtgcttggctgagctgcagtgcttgagagcaccaccaataca

SEQ ID NO: 211345 - DNA, 467 bp, Homo sapiens
tcaagaaagttactcttaaaaatgtgaaattgatctggcttctaaattattgttgctatacttagttttaataaatctcttcagaaactaaatttatctatttacttttggctgtatgaaaactgtgcacaagaagtcaattcttatgttcagtgggtgcatggtcttaaagtaaaaatacaaacaaactggtcatggtggctcacgcttgtaatcctagcactttgggaggccgaggtgggtggatcacgaggtcaggagttcaagaccagcctgaccaagaaggtgaaacctcgtctctactaaaaatacaaaaattagccgggcatggggacgggtgcctgtaatcccagctacccaagaggctgaggcagagaattgcttgaactcgggaggcagaggttgtggtgagccgagatcatgccactgcactccagcctgggggacagagtgagactccatctcaa

SEQ ID NO: 211346 - DNA, 395 bp, Homo sapiens
aactttacaagaagtatttttttttttgagccagtatctcgctccatcacccatgctggaatgcagtggcatgatcatagctcactgcagcctcaacctcccaggctcgagctatcctcctaccacagactccacagcagctggccctgcatgcatgtgctaccgtgcccagctaatttttgtattttttgtagacaagggggtttcaccatgttgcccaggcttgtcttgaatacctgggcttacatgacccacctgtcttggcctctgaaagtgctgggattacaggcctgagccactgcatctggtctcactgtaaatttgatgctcctttttgtttcaattttagcaggatttatattgctttgatagagtctcttttcttttcttttctt

SEQ ID NO: 211347 - DNA, 558 bp, Homo sapiens
taacacagtgtacaaaaagggaattgaagaggaagtcaaataaagaaaagaaaatactacccgtgcaacttgcaacatgtacggcctgtgtcaccacacaatctgtgaataataagaagttactttaaataatacttcagcagttatctcaatcatgtgatttgtttgaacttccaaggctaatactttcagctcaacagttatctatattataacataccgtaatgccttatggagagttaaaaattctcatttcaactgtcctcttctgcaaagctttaataagtaatgcaaaaaactcaccccctttcatgtattgatgaatataggtagataaaaattttagagggaaaaataggggctgggtcaccaatatgagaacatagataagtaggcacatttgcctggtgggtggtcagctcatttgcaggggcatctgtagacagaaacttggagattatgtgcagtctataggctgatctaatgactgccatgaatgatagtttcacatagatgtaccaactgaaaaatgacatacagatggtccccgatttatga

SEQ ID NO: 211348 - DNA, 1096 bp, Homo sapiens
atcagagagttcacactggggaaaaaccatatgaatgtagtgaatgtgagaaagccttctcccagaaatcacccctcattatacatcagagaatacatactggggaaaagccctatgaatgtagagtgtgggaaagccttttcccagagtcacagctgattatacatcacagagctcatactggagagaagccatgtaagtgtactgaatgtgggaaagcattctgttttatacattaaagagttcacactggtgagaaaccctacaaatgtgctcaatgtgaggaagccttcagcaggaagtcagaactcattatacatcagataattcatactggggagaaaccgtatgaatgtacagaatgtgggaaaacattctctcgcaagtcacaactcatcatacatcagagaacccacactggagagaaaccctataaatgtaccaaatgtggaaaatccttctgtcagcagtcacatctcattggacatcagagaattcacacgggagaacaaccttatgtatgttctgaatgtgggaaagccttctctcagaagtctcacctcccagggcattggtgaattcatacaggagagaaaccttacatatgtgctgaatgtggaaaggccttttctcagaagtcagaccttgttgtacatcagataattcatactggagagaaacctgatcgatgtactgtatgtgggaaggccttcatccagaagtcccaactcactgtacatcagagaattcatacactaatgaaatcataagaatggtctgaacacagaaaagccttcagggtcagttcaagccttaatagatagtgcaacaaccaatggatttgatgattttggggactacatctttgttgataaaattttacaagtgaagtcatgttcctaatgtatttcattctttatcaaagataatagagaagtcaatacgtaaatgatggacattttcactatggcatataaaagtttttaaattgagaaatgaatgattagcataacagaacgaattgcatgtacatctcttttgaagttatgtgctcctgattatactacataacaatcagatatgtgtaagattgtta

SEQ ID NO: 211349 - DNA, 537 bp, Homo sapiens
aatttgttaattcactgattgttggacatatggttgtttctaaatttttgctactatgaataagctgctatgaacatttgcctgcaagagtggaattgctaggtcatacgttaaggacatgtttcactttataagaatctaccaagctgctttccagtgcatcattttgcattcccatcagcaccttctcaatatctcagtatcatactgacacttggtattttcaatcttttaagtttgagccactttagtgttaagtggtatcttgcagtttaaactgctcttctctgactgctaatgatgggggctttaatctttctaagttaactatcaatacatcctcagctttaattatggataaaatcaaagtatattttaccatagtttggtaatattaacacgctattgtaatagtattgtaacactattgcatgttatagtgcttttactttatatgttctgggtggtagttttggtctgttttagaatccactactttaaatctgcatcatatattatcaggcaccttggcggccg

SEQ ID NO: 211350 - DNA, 842 bp, Homo sapiens
ggtggtgcagtgcctgtaatcccagcgactcaagaggctgaggcagaagaaccacttgaacccaggagacagaggttgcgataagctgagattgcgccattgcactccagcctgagcaataagagcgaaactccgtctcaaaaaatagatagataaataaataaataaaataaattcatatacagaaataaatgtctcatctgtgtttgtctaattccgggtatccctgtatacttattggccatgagagtgtgagactctgtagggacttgtgagcccacaaattcttttctacatagaacaagtactaaggatgccatcttatataagagccaacatgtgcacacactaggtcctgaagatttgtatcttacattgcagtctgtggccagttactttgggttagaacaccccagatttgaatgaagcggagcatccagatggcttcaagggtgggtttcaggtacctctgctccttggtcactgagggctcccaccagaacagtgtaggccagtctgtaaatagccatccccactttagaaagcacatgcgctgcactaaacacttaggtatctctgactcacgccctgctcgtactgggagagactttagttaaaccaaactgtaaatttaacaactgagaaaatgaaaccgttaaaagataagcaacttgcccaaagtcataccgccaatgagaacagctaagtctcaaaatcatgtctccagactcctaggacagtgccctttagagcatactgtgacattcagtcatattcttggtgcctgtacagcttttagttcttgaactcctggcctcaagcaatcctcctgcctcagcctc

SEQ ID NO: 211351 - DNA, 562 bp, Homo sapiens
tataggccttttgactggcttcccactctgagcaactggccagctcctgagcaggttgactgtacggaccacattatctcttagaaattagactcctcatggacagtcaggataaatgccgaatgattggacaagtctacaagactatttgttatctacctaacctggatttcttggatgagatatgttcccagtcagaatgacaattgaatatcctccattttagaaatgacaaatagttttcatcttttgtcttagttgcaaatacttgctagtggcttcctatcctgctgatatattatgttctggctcagaaggaaaaattatcaattaaaagttgtcaggctgggcatggtggctcacacctgtaatcccagcactttgggaggccgaggcaggtggattacgaggtcagggcttcgataccaaccaggccaacatggtgaaaccccatctctactaaaaaaatacaacaattagctgggcatagtggtacatgcctgtagttccagctactcgggaggctgagacaggagaattgcttgaacctttgaggcagagg

SEQ ID NO: 211352 - DNA, 432 bp, Homo sapiens
acttggcaatttagtacagacattttctcgacctgatatgtgcgatagaagtagacaagcctcacacacatgcatgtgcgcctacacacacacacacacacaaatttttctccaacagttaaagattcttttcaatatactattctacaattcaaattaggtgctattctgagatatatgtggattaaggaacctaatataagatataggtagctatatttctgttaaaataataatacctcatacttgaatgactatatatgtattttcaagtaattttaaaaacatgatccctgccgggagtggtggctcatgcctgtaatcccagcacttggggaggccgaagcgggcagatcacgaggtcaggagatcgagaccaggtggctaacacagtgaaatcctgagatcgcaccactgcactccagcctggac

SEQ ID NO: 211353 - DNA, 293 bp, Homo sapiens
gccttatttttcagaaaagctctagactcagagtcaggaagcccaggtttaggtccttggccttgcacaagtgagttcttccagttataaaactttgattttctgggtctaaatcacttaaacttttctatctcagttttcttttctgtttaagggaacatccttccttcttccttccaagcctctatttgacaaggatgataaaatatctttcttttttaagcataaggaattctacaaaccaaaagaattattacattggttgatgtgaataacacatctcaacaccatga

SEQ ID NO: 211354 - DNA, 743 bp, Homo sapiens
gttaataacttgattgttgtattcattttgcaatgtatacatgtatcaaaacatcacattgtataccttatatatttttattgtcaaacatatctcaataaagctgggagggcaaatctcaccctttataacatggaacacattttcacaagaattggtaagccaatgttttaataggataaaacagtacgcaagaaccatgggagaccctttgtttcacactaatggtatcaggtacatttattaccaagatgacttcagcagaaagtggctcagaagatggtgacataaattttcccagtagtttgggaaggttgagtggtgaaaataaagaattcctgcatgattaagaaacatttccaactttcaggttactgaaaggcagtggttttgagctgggatcctggaggagggtagaatagagtggtgttgtgacaatttaggcttagccacaaaacaccagcatattttaaagggaaggagtgaacacacttggcgataaaagctaaaaattgagagactacaaattaaggctctgcttgcccagccaatgtaattcattctctattttggcactggctacttcactatttcccctttgtgctgttcctatcttctgccccctgtttaactcatgaaaaaaaggtgatggcactttcagctgctataaacatgaagctgctgaacaaatacttcatataaggaccttcgctgtagctttcaatcttccaacagtgttgtgg

SEQ ID NO: 211355 - DNA, 217 bp, Homo sapiens
cctgtgaccaaggaggcagagcctggagtggtggagctgcaagacaatgaatgccagcagccatcagaagctgcgaaagtcaaaggatggattttcccctcagcctctgagagcactggctctgctgatacctagatttcagcccagtgatactgattttggactcctgatatccaaaactgtgagaaaataaatttctgttgttttaagtcaccaa

SEQ ID NO: 211356 - DNA, 491 bp, Homo sapiens
cttgtacactgaatattttaaccttagaattatataactatacatatatgatatgctgtatattaaatttaacatttcaaataacatgtatagcacacattcagccacatactctcatgaaaaggtattattcgtaaaaagttaatgaaaagcttatttagatagaaatgtctagacataaatactaagcctatgaaacttgaaagtaaagtctgctgtgctattaaggaaaagaagattggtttttaacctattgaattgtgcagatacaaaagtgcttagcatgagaaaattaccaaaataaaaacattttagaggttatttggttctagcaatgttaattattttgtgtttctggataatttaatgtttgtattttaaatgttatataaatttcctctttataacaagttttaaaaagcacgcaaaaatagttcaaactatatataatctgttatttttcatcctagttagctcatcacaagtaactc

SEQ ID NO: 211357 - DNA, 412 bp, Homo sapiens
agagcattgggtctcaactgggggcaagcctgccccctgggggacactggtaatgtctggggacatttgtgggtaccgtgacttgggggtgctcctggcctggagtaggtggagaccagggatgctactcagcactgtgcagtgcccagaacggccccaccccagagaataatcaagccccagtttaatagtgtcaagatcaagccacgttgctttagtaggaaatagataaaagccagtggatttgttcagttttaaaaactggtgctggcatgcatatcttgataatttgcaaaatgccaaaatgaatcattttcttggcctggtcattcttctgatttgccctcagtgaatgtaccttatccatctgggcttttgcatctctcccaattatcaggttgatagatattgg

SEQ ID NO: 211358 - DNA, 557 bp, Homo sapiens
caggtggagaataaatttatgtcttcaggaagataaccgtatcatccttttagggcaggagattcaatcatatttggaaagaaagaacgaagaccaatacaaaggaacaacttgaaggcatgagaataatggaaagaagagggtgccagggagtcttgtggtcatgggactcaagaaataagtagaaggatttgctttaccaaggaggatactggaagattcccaaagacgtagaacagaagtcaaaggagctcatgtgaaatagatggagttttcttagaaagtgtatatagcatctttgacataaataacttcgtcttagaaatagattctaccttacgtttcctaaggcactttgccaaaatagattctaccttacgtttcctaaggcactttgccaacagggaccagatgctttgcttaataaagactgtgcttcaggcgtggtggctcatgcctgtaattccagcaatttgggaggctgaggtgggcggatcacgaggtcaggagatggagaccatccttgctaacacggtgaaaccacgtctctactacaa

SEQ ID NO: 211359 - DNA, 229 bp, Homo sapiens
gcacccagccaagaagtgatgttttaaaaagtcatgaagctttagaattggatggaggtagaagaagctatgacagataatgttttgcaaccgtggctatagaaactgtcagtgactgtagcattttattctccaatatcatgtcaacaccagtggagcccatgaggtgtaattgtatttattattgcttaattgagccacagatggtgtggttattcgttttgcataa

SEQ ID NO: 211360 - DNA, 446 bp, Homo sapiens
tggaaccacaggagtccaaatagctaaagcaatcctgagcaaaaagaaaaaagctgaggtatcatactatctgacttcaaaatatactacacaaagctatacttaccatatatagctatatgagactggtataaaaagacacatagaccaatggaatagaatagagaattcagaaacaaatccacgtatttacagccaactgattttcgacaatgatgacaagaacacgcattgggaaaaggatactctcttcagtaaatggtgcttggaaaactggagatccatatgcagtatgaaactagacccctacttctcaccctatacaaaaatcaactcaaaatggattagacttaagtgtaagacatgagaccacaaaacccctagaagaaaacatagtgagaaatgctccaggacattggtctaagccaagcttgtccaaccgagag

SEQ ID NO: 211361 - DNA, 808 bp, Homo sapiens
tacagaatagtataaaaccataatcatggtatgtaaactactcatattttgagtattttgagtagagggactaaaagatgaaccaatcaaaaataagtactacaaccacttttaagacatagacagacagtataataagatctaaatagaaacagcaaaatgtttaaaaatgggaagagttttattggtttacagtgtagagttttattggttttctctttgcttctttgttagtgtgtttatacaaccacagtgttagcttatcagtttaaaataatgggttagaagacgttatttgcaagcctcatgataatctcaaatcaaaaagcctacaacagataaaaattgaaatgccagaaattaaaatgtaccaccagggaaaatcacctttatgaacacgaagactagaagaaaggaaagaaggaagggaagactacaaaacaatcagaaaacaaataataaaatgacgggatatcaaagagatttctgtactccagtgttacatcaagttaaaaaagcttttacacagcaaaggggtggttaatggatacaaaaatatagtaagattgaataagatgtagtatttgatagcacaactgagtgatacagtcaacaataattgtacattttaaaataactaaaagatataattggattgtttgtaacacaaagaaaagataaatgcttgaggtgttggatatcccatttgccctgatgtcaccattacacattgcatgcctgtatcaaagtatgtaccccaaaaatatatacacatactatgtacccacaaaaaaatttttaagaaaac

SEQ ID NO: 211362 - DNA, 323 bp, Homo sapiens
taatgacctcattttaacttgatcagctgtgtatactccccatctccaaataaggtcatattctgaggtacaagaggtttggccttccacatatgaatttttcagggacacaattcaatccataacatacggcaggatgaaaagaaatctgagggtcagatccgacctaccagctgccgtgatgtagtctactcacaaattttataggtacggaaactaaaactctcaaagagaagcaagtggctctccaaaggtagtgggccgagaaaggtggagacaggccttctgattcccaggccagggcctctctatgccacttttgg

SEQ ID NO: 211363 - DNA, 1658 bp, Homo sapiens
  misc_feature (1395)..(1395): n is a, c, g, or t
  misc_feature (1401)..(1401): n is a, c, g, or t
  misc_feature (1472)..(1472): n is a, c, g, or t
  misc_feature (1553)..(1553): n is a, c, g, or t
  misc_feature (1562)..(1562): n is a, c, g, or t
  misc_feature (1565)..(1565): n is a, c, g, or t
cgcgcgccgagcttccgcgcggagccctcgcgggctgccgggagcggcccagcgccaccgcagcgcctagaagcctgcagctccggagcagtggccgcgccacgccggccccagcgcgcagaaccctgcaggccccgcccgtccgccccgggccgcgcccgccatgtcctacccgcagtttggatacccctactcctcggctccccagttcttgatggccaccaactccctgagcacgtgctgcgagtccggaggccgcacgctggcggactccgggcccgccgcctcggcccaggcgccggtctactgcccggtctacgagagccggctgctggccaccgcgcgccacgagctcaactcggccgcggcgctgggcgtctatgggggtccctatggcggatcgcagggctatggcaactacgtgacctacggctcggaggcgtccgccttctactcgctgaacagctttgattccaaggatggttcgggatctgcgcatgggggcctggcaccagccgctgccgcctactacccttacgagccagctctgggccagtacccctatgacaggtatggaaccatggacagcggcacgcggcgcaagaacgccacgcgcgagaccaccagcacgctcaaggcctggctgcaggagcaccgcaagaacccctaccccaccaagggcgagaagatcatgctggccatcatcaccaagatgaccctcacacaggtctccacctggttcgccaacgcgcgccggcgcctcaagaaggagaacaagatgacgtggccgccgcggaacaagtgcgcagacgagaagcggccctacgcggagggcgaggaggaggaggggggcgaggaggaggcgcgggaggagcccctcaagagctccaagaacgcagagcccgtgggcaaagaggagaaggagctggagcttagtgacttggacgacttcgacccgctggaagcagagccgccggcgtgcgagctgaagccgcccttccactccctggacggcggtctggagcgcgtccccgccgcgcccgacggcccggtcaaggaggcctcaggcgcgctccggatgtctctggccgcgggtggcggagctgctctggacgaggacctggagagggcccggagctgtctccgcagcgcggcggccgggccggagccactgccgggcgcagagggcggccctcaggtctgcgaggccaagctggggtttgtgccggcgggggcgtcggcaggcctggaggctaagccgcgcatctggtccctggcccacacagccaccgccgccgccgccgccgccacctccctgagccagactgagtttccgtcgtgcatgctcaagcgccaaggtcccgcagcccctgcggctgtgtcctccgcgcccgncacgtncccgtctgtggcccttccccactctggcgccctggacaggcaccaggactcccggtaacagtctcagaaantgggtgggaggggtcttccagacccatctcagcaagagttgaacaggctgggcacgcagggcgctctggaccgggctctgngagtgtggnggnggggcgaagtgtattgacctggccggctttcgcttgggtccaggagccgttggggcgaggatttcctgcaggcgggaactttgtgaggggggc

SEQ ID NO: 211364 - DNA, 521 bp, Homo sapiens
accccatccccttcatacacacctcattccaaatgctatcctgtcacagcagatgccacatcacttttggggtgggctaagagatcaaggacatatgccgtgcccaaatttcatctaataattaaaaatacgggaagtgacacaaaagggaaaacacaggatgctctggaaacttgttataggcagcgagtgggaaggagacctagagtcagaggaagctactactggaaagagaagcagaactgagccaggcaaataggagagaaaatgtatttcaggcagaagaaacagcactctggaaacccaacatctagcctttgagaatgtaaaatgaagccaggatgacactaccaattccaagctgtgtgtgtgtgcatgcatgtgcatgtatgtgtatatatattagatgtatattttaacattctgacttaacattaatattaacatattaatatttatttattgaaatatttaacgtgtattttaatattaaattctggatttccaaaccaaatcagaaa

SEQ ID NO: 211365 - DNA, 419 bp, Homo sapiens
tccattcctctttgtctgcttgtcctcttttgcccttcattactttatgttcattttctgtctccctacctcccttcttccctttcttcctccctcccttccttcccttcttggggcatggaaggaacatttgctttcaatttccttaagggcctggggaaattggggcatgacttgaacaagctagttccctaaaatcccataactgggaactcatgcaatgatctatataaataccttatctcattggggaaaagcaaattagagaattaaagcaagtatctggaaaattgagaggaaaccaaaagcttactttttggtgtaaactttccctctagaaatcactgttaaaatgtcccactgttctacatcaactctgtttgctaaacacccactggtttcagagccctgataggaaa

SEQ ID NO: 211366 - DNA, 441 bp, Homo sapiens
tagagaagggtttcttaccccaaactcaaggaaacacagattgtaaaggaaagattaataaattcaactacattaaaatgaactttctctttatcaaaggataccattaataagttgaaaagatgcaagccacaactgagaaaagtggtctgcaacacacacattgctgacagccgattagtatctaaaacatttaagaaagataaattgataaaaggtatgaacaagcatttcaaagaaaggaaaacatgacttgctaatatacatgaaaaatggtcaacttcagttgtaattagagagctagaaattaaaaccatgtgacagcattttatatgtaccaggttggcaaaattaacatttggaacaatacagtttgtgggcaaggatacggagccacagaaactctgatggtctcaatctaattccctgcaaagaccaagg

SEQ ID NO: 211367 - DNA, 166 bp, Homo sapiens
gaggtgtttcagcgatgggggcactgccgtcatgaatggattaatgctactgttgtgtgagtgggtttcctaaaaaaggacaagtttggcctcttcttgctctctgtttcgtatgtgtgatgcctttcacggtgttataatgcagcaagaaggccctcatcagatg

SEQ ID NO: 211368 - DNA, 496 bp, Homo sapiens
ttgtgcaagtgcatttgacggagaccccaactcacacatggaatcctagctgcaggggattctgggcagtgcagttttcagcttcccagctccagtaaggaaggcagcaagaaggggttgggacgatgctgagtgccgatcactctatctgacgcagctgccactgaaagtcatgaggaaatcggggagctgctggtctatgtgcatggcacgatccttctctgagggacagtagcatgtggcagaacacaagtggatgcctgagatttttaggaagtttaacgagtgttaagtcattaagatacaaaggggaggtaggggagaggcatcagaatagttgcctgttttaccacattagaagttactctctggaggatacccccatttatcttgatgtaattattatttattgtgtgcctgtatcaaaatgtctcatgtaacccctaaatatacacacctactgtgtacccataaaaactaaaaaataaataagtta

SEQ ID NO: 211369 - DNA, 695 bp, Homo sapiens
ttttctctacccgggtggtaatagcccaaagccttcattgtaaagtttcccattaacctttcacttaggaatccactgatgactactgtgtgcatttattatgtcattaaggttgtgaaatgatgactttctaattccgttactccttccatatttattagctgaaattattcttaaggaattaatatcatctgattatcctaaaatttatcattcacattggtaggataaatgcagaatttatttcttctaattgataattgtcagagtaaggaattgttgcccttgtcattttcagtgttgtccaagagtttttggggtttttttaaaagtattttactgaactctttttaattgttggcttcaacttttagaatcattgtgttttaggcagttgtttccattctttatgcccaatttgtccctttggttccttcatattggctcctgtattttttcaacataatcctgttaggttttgatagcatccttgttttctggcacaacaaagtgttctaggcttatcttgtatatgtctatcctctgacctcagaacaactgtttctctaaggaattctagttcctttttgtggggattggtatttggagaccacaagctaggtgtcatttttgaaaatgtaatataccatgcaagccacagaacacatttgtgagcagatgcagcccatagcggc

SEQ ID NO: 211370 - DNA, 235 bp, Homo sapiens
atggcgagaggtgggaggaagagggggcggggaggatgccaggctatttttaacaaagatttcacagaaactaacagcaagaagtcgctcattaccacaaggagggcaccaagctattcatgagggatccgctcctatgacccagccacctcccattaggcctcacttccaactgttgatcaggtttcaacatgagatttagggggcaaatatttaaactatatcaaatggccta

SEQ ID NO: 211371 - DNA, 277 bp, Homo sapiens
attaaactgaaactaataattttagactaaaacaccattttagtgtgaccagtcatgttttgcttagagtgaatgtaatttcttaaatgttcatacaaaagttggtgacttttatatgtttctcaatagtaaatttgagaagaaaatcagttttatcttctggtattatgtagaaattaggcaacaggattttaataaatgagataagtagttttttaatgataaactttgatgaaatttttcaaatgttctttcagtttcagatattgcaagaaaa

SEQ ID NO: 211372 - DNA, 551 bp, Homo sapiens
ccctcttccctgccaccctctctcttacagagtctctctatgatgcccaggatggtcttgaacttttgggctgaaacgatcctcctgcctcagtctcccaaagtactgggatttcaagtgtaagccaccatgcccagccaatttatgtgcaatttcatttgtgagaaacactaggtgaatgcagaaaactgcacctagctgaaatgagttgcccaggaatctacaaaacacacatacctaagacatctaccagtaacatcacttcactatgtgttataataaaactatagccttttgcatctgatgttatacttttctgatttcagataaacctccttctgccaccacaccataatttacaaactacaattctctgcttccacagacaagcttcaggtctttttcagtataaaacgccatagttaatgcagtatttatgtatttcttacttatttaacatatgtcaaatggcgctcccatttttaataaattcctatcttttttaatgcatcgctaatgaagtttttaatgtatgtctctaaccccatatt

SEQ ID NO: 211373 - DNA, 147 bp, Homo sapiens
ttgatgaacatagagtaacacgctgggatggttgtggccacttgtctgtctcattggtccatctctcccagtattccatttgaaatccttcttcagccccttaccacagcttcaggttgatattgaaatacaatggtaatagtgagg

SEQ ID NO: 211374 - DNA, 279 bp, Homo sapiens
ctccagcccccaatgtggaaaatagacccagcaagtaaactaaagagacaacattacctttaaaggtactgtagaaaattgctacttttcaagtatattaccagttgtaaacagagcagggagaagtttaatttttattttcaattctatcctcctcctgactgtcttggaagttagagcccaatattctacattgaatgctacagctcagctttatctctaagtcaaaacaaatatatttacagagaaatcactttggtaacacagcttaagaaaata

SEQ ID NO: 211375 - DNA, 681 bp, Homo sapiens
cagcccagctctccagccctgggtggtgatgaagcagggcccgtctgcccagggcagggcatgactgggctgggaggattcccacttggagctgtgtccctctgagtgcagacctctgcctttcccgttcagcagggtagggctggggcagtgtgtccaaggtcagagcagaacactttgcaggatgacaggtaccacagtgggacacagcctgtgggcaggacggcatgggacctgcgccccagcaggtggccacaccagtgcccagcctcaccctgtagttagctggcgggaatctagtcggcgggggggcccaagtgccctgagagcccctcctgccagtttatttatattatattatattatattttatttcatttttgagatggagtttcactcttgttccccaggctagagtgcaatggcacgatcttggctcactgcaacctctgcttcctgggttcaagctattctcctgcctcagcctcccgagtagctgggattacaggcatgcgctaccacacccagctaattttgtatttttagtagagacagggtttctccatggtggtcaaactagtctcgaactcccgacctcaggtgattgacccgcctcagcctcccaaagtgctgggattacaggcatgagccacagcgcctggcccagtttgtttatttatt

SEQ ID NO: 211376 - DNA, 230 bp, Homo sapiens
aaagatttgtggggtgttaggggacagcgggaattacagactctttgaaaatgtaacaaaagctttggaccctttcactggaagaatgctggcaaacacatttggtatgctgtttcagggcagtcgctgacactgtgtgtgctcaggagatcagaggcaactatattaaaaaacacctgccattaatatgaggaatatattattaagaaggatctcatcaacttttaacc

SEQ ID NO: 211377 - DNA, 919 bp, Homo sapiens
ctacacctcctttgttggttttcaaccttaacttcttactcaactatgaaatcttggcagttttaaggttcagtctcagaacattaatcttctccaccatactgtctgtcaagatgatctcatccacacccaatcacgtacacaaaaatgtctcacaacaaatttacatctttacctttgatctctctgtctgaaatctaaactttatatccactgcctactatatgatagctccctttgaatgtctcagaataattctacttattatacacaaagataacgtcggaatctatgaaaaaacatcctcttctagtaaatgtcaccattcaccattcagatgcacaaactcaatgtcatctctgacaactccatttatctcagctgccatacccctatctatcgccaagtcctggtgatttatttcccaaatatatttcaaatatgactcctttccacttaaactagcactacaaacttaatccaagctacttactgatcctttcaccaagaccaccaaaagagcctgctctttgggttcctctgatctacttggttttttctccagacattctttacagtgtaaccaatgcagacataatcatgccaaaccctggttaaaattcttcaatagtttaccatggctcttaggataaactcctaaaatgacatggctatgcttcacctagaatcttgctctcctggaggaccacccttcactcattgtctatgttttttatgctaaaggacttttgcacatgctctctctgaaatatacttccttccttcttacactcatccttcagataggcactcaaaagttacttgctaagggaagccttcccctgaccttcctgaccagatcatatcaggatcacagcctgtcctaacatcttgcatatagccttcattgacttgtcat

SEQ ID NO: 211378 - DNA, 278 bp, Homo sapiens
cagcacagacagacagagagatagataggaaaagagggaaagaggaagagcaggtcagagtgactttttaacttcattcttgctcatcctccccttcccagttggctgtgtgattacaaggaagcattggtagaatgactgatctctcgtgcattccaacttctctttgccctttagaaagcaaaaaaagtcacttcaggtggctgtgcccaaagctgccaactaagacccctactcatgcctggtctactccaggcatattcccttaaatttcagtc

SEQ ID NO: 211379 - DNA, 725 bp, Homo sapiens
ccacctcggcctcccaaaatgctgggattacaggcgtgagccactgtgcccagccagaagattagatattacaggagaaaagataaatgattttgaagacagcaatagaaagtgacatcctgttctaatgaagtcttaggtaattgaaatatcaggtgatgtcactgtgatttttgagatttaattagagttagcttttgctccctgttctatttatgtgaggattttaatgtctttctcatactttatagaaatttctaccctttcagattttcctcacagttgctcacatttcctactctctgtccctttcctgaactcttatggttgttatcatctccccttcatatagagctttaaataaggaacaatatacatttgcaacaagataaattctaacagtataaatcctttaaaattactgctaagaataacagtgatagcaagcattaaatccttagtatgccttaagtgctttgctttgtgtgttttgaccagtttaattcttaggacagtcctgtgcatgtatatatgatgattgttctgtattttactggagaagaagtgagacacagagggttgtcaaagtcatctagcttttaactatgaaaatagtagtagtatctaagtcattaagtttttctaaaggttaaatgagagaatgcatgttaagatacttagcccagtgcctgaaaatgtagtaagttatcagaataggctattgc

SEQ ID NO: 211380 - DNA, 122 bp, Homo sapiens
ttcagccctagaagacacgggaatatggaaggcgtggtggcaaagttaaaatcctaaagttagggctgtgaatcccagctttgaggagcgtgggtccttggccctatggaaagtatcaaagc

SEQ ID NO: 211381 - DNA, 858 bp, Homo sapiens
ggtacttagtccttgtcagctttcctgcccgtctgcaggggtggcagtggtgccagggggtggcgtgctgaactgcaagttcatctgggatctcctggttgtgtttggatttagctggggtgtgtcctctcctcctacaccttgagtcaccagccaaggtggaggagagaggatggggtgtagcctgtgtccagctctctcttggacatggttgggaggtgctgaccacaagtccgaggccctgaaaagaagtgctgcaaggaggatgtttctttccccattggcacagcatcaaggttctcaacagctggacacaaacaagctgttctgggagccgtgtctcattccccttcacctcctgcttgctgcctgctacgctcactggtcaccagggctgacgtatggggaggaatggagagtggtctcactgacagtggatgtcattgtttgctctctctggaaggaggatgtctgaccgaggccagagaccacgctcaggggacctggacgcccggggagttcaagcgagcctctgtcctcagtgatggagtcctgggccactggggcagtgtttgggtgctgcttccactctggctcttgacaacagagtttgttccctttgaaacaagtttgtaggaaccagagtgtgtgaggggcctttggcagcgctgaaggaagggcagctggaatctttgaccccctcaggcccccgctggcctggctagagagctctgcctggaaggggacctctgttgctgggcaagggaaggcacctttggctttaggaagcctgagggtcttgtccctgtcctggttgccagggctctgcctagtgccatggaagggaagaccagattg

SEQ ID NO: 211382 - DNA, 528 bp, Homo sapiens
gaggggtatctcatctacataccgacactaaaacgtaagactaggtgtgtcatttgcatagggcactaatctccagcagcacccctgccaaccttttattgcacagatgggcccttagcctaagttactccatgtgtttatctttattactgcacatgtgctaagtgggcagaaccatccatggtggacatgcccagcccaaggtagttcctcttattggtgcagctgcagacacccccattctgtgcaagcttccttatctgagtatgtccaaaaaatgaaacgaatgtgctcactagggcccactgtgtttactgggggccaccatatgtatgtgaagcttgctgattacataggaggctgcctctctgtgctggaacttgcttccttatctatatttgcagtctgatcttccaggctgttctttgttagagagggaattctgccaagggactctgccctcagtatctgactagctagtttcttccttctctctcactgtcatttccttgtataaggatttataaa

SEQ ID NO: 211383 - DNA, 336 bp, Homo sapiens
tcatttggttgtctgccttgcatagacttattatctgctgaaattgcatgtgaaggaaagattattaataaaatatatgtgaagaatggctgaaaagatgcttttgtcagtgcccctaaatacttttaagagcagagctgcagttttctaagagtggtgttgtataggccataaaaatacataaaaatttaagcttttcctttaaaaggttattactgcccacttttagcccacaacaaaattttatttgagcagaaaaccttctttgttagcttgctgtgcctgccgtcacaaattaccacaaacttgatggctaaaaacaacagagatttattc

SEQ ID NO: 211384 - DNA, 571 bp, Homo sapiens
cattaatgagaactccaccctcacgacctagtcacctcccaaaggccccccctcctaataccatcaccttggggattaagtttcaatatatgaattttgaggggacacattcagtccatagcacaagtcaataaatatttctttagagtagcttttgtcagataatctattaaatactttatgaacaaaactgtctaattgtctttatcagtctagtatggaaacaaaaataattgtgtaccaggagaacatggaaatgtagtatagtataacttacaaatgttgtaggggtgaatgatcaaaagccacctggcattttgctgctggtattcctgcccttactcctctcttagccccagttttgtcactttctggctttggaattggtaatgactcccacaccaggtctgaactcaacatgacatttagtgtctgagcccaccttatcttttaatgtcttttccattacttcttagcaagaactgcccaggtcaggctggtcttcaccccattctcataataagtcccaaatgttcctgtgtgtctttaaccacactgttcctcctggcat

SEQ ID NO: 211385 - DNA, 386 bp, Homo sapiens
ctgtctcccctacctaactggcaaatactaaaaataattatagcactggcaaagctgcaattggccacgcacactcatacacagtttatggtaacataaactggcatagactttatgaagatgaatttgaccgtatgtgtgaagacgttctactactaaactatccaagaaaataatttaaaatgcagtaacactaagtagtcagtgaaatattagaatcaacttaagtgctccaaaatagaatgggggacagggaggaaggatgcttacatttattatcataagcctaaataaaatgaaattctctttgagaggccgaggtgggcggaacatgaggtcaagagatcgagaccatcctggccaacatggtgaaacctcgtctctac

SEQ ID NO: 211386 - DNA, 228 bp, Homo sapiens
ccttcctcccagcatgagtggagcccacagtgatggtggtgcccatgagctctattgtaaacacctagacagggttacggatgtagccatagctagagatacagatttatgcacctgggaattttactcatatgtttgatgttaacagaaaaattcctgaaaggacgcaaactaaactaaggacagtggttacctgggtgagtcattcctactttttttttttttttt

SEQ ID NO: 211387 - DNA, 1058 bp, Homo sapiens
tttctttttacggggactctacatagccattatattttattacaaagacaatatcttagtcaccaatgaagatcaagtaccaatgttgaaatagatgactctcacaccagttctattacacaagattttctgtggttcacgaagctgtcttgtatgtgggaagatataaggtggctgaggcaaagcataccaatatcctcatcctcatccacagtgctgcaaactcggcagaagatgctcgcagcaacagcacagctacagaatttacttgggacacacaacttgggaagagtttactatgagcccattaaagatcgacatggaaacatactcatagtcaccatcagggaggtggagatgctttattcattttttaatggcaaatggatgcagatctcaaagctgcaaagccagagaaagtctctatcaacacctgaggagccaacagctttagacattctactgataaccatccaggatattctatcctatcacaaaaggagtcatcagcgtctctttcctggattatatctgggttacctaaagctctgtagctctgtggatcaaatcaaagttcttgttacccaaaagttgcccaacattctctgccacgtgaagatccgtgaaaacaataatatttctagagaggaatgggaatggatccaaaagctttctggctctgaatctatggaaagtgtggatcatacttctgactgccccatgcaattgttcttctacgagctccagatggcagtgaaagctctccttcagcagatcaatatacctctacaccaggcaaggaacttccgcctctacacacaggaggtgttggaaatgggtcacaatgtgtcctttcttctcctgtccctgcctcagacgacgtctgtacagccccaggacagaataatccttaaacccaaactcagggtttcttaacctccctcttcagatgtttgaactggtatagtagcttgtttcacctagaaatattaacccagcctccttataataaaatcacaaagttatatctgttcccccttgtcccagtggagggtcaa

SEQ ID NO: 211388 - DNA, 528 bp, Homo sapiens
acgtggaaaagaacaccaagttgacaaagtggtcgaacactcatctcaaactacctggctgagcacaaaaacaaattatttttggtctttcatattataaaaggggctgttatttaaaaattctaaaagcacactttgttacctctaatatacacctaccccaatctcacttatatactgtttcctttctgcccacaattagatattcaaacacattcacacccctagttgtacacctacgatgtcccaggaaattagtgcatggtgctacagggatataaatatgagtaaaacacaatctctgagtaagacacaatcttagcccttcagaagtgcttatattctagtcaaatgtaacaaggacccagcaaaaaattttcagtgacataagagaaatgcaaacagcaaccaacaggaataggagtcataaatctttgttacacagcaaagatagtccaagttatcaaatttatcatgtgtgatgctcttgacaggaaataaaaaatacacaatgcatgttgggataaa

SEQ ID NO: 211389 - DNA, 387 bp, Homo sapiens
agtaaagtgtactgattgagaactagagttgtggggtcagacagacctggcttcaaatcctcctcggccacttacagctatgtgatctctctgagctcaggtttctcatctgcaaagttgggttaataatacaagttcttgctcattgttttgttgggaggagtgaatgagataaatcacgtaaagcacggaccacagtgactggctgataataagcctcagtggatggtcgcccttagaattattttgtaaccctttgcttttgaggcagctggtgagctctgtagcctcagagattactaaagcaaggccaaggctttcggcttgtggcttacttacttacttgtttatttatttcagctcggcacatagttaaagaaagagaaa

SEQ ID NO: 211390 - DNA, 124 bp, Homo sapiens
aatgatagtaagtcttctggatttttattagaatgaatcacattttccatccttgtttttatttactaggaatttcatcttatgactaaaaagaacaagccataagctcttttggtctaaattt

SEQ ID NO: 211391 - DNA, 1437 bp, Homo sapiens
ccaaaccagtcttaaagttgtggcacagggtgaggaagatgaagctgttactgaacctcagagagtgactggtgttacagcaaaagttagcaatggcctgaagggagggtttctgaaatcaaatatgaatgattccccctcagggaacccaaccttgggaactactgcatggttctctgtatgggaaaatatcattaatgcaggataaattgtgaaatatcacaggaagcatcctgcatctagtcaatcttctgtttctggggtggcctgtgcagctgtgcaggcagaggcccaaccatcctggtgagtggcacacagggactgagatccagccacacctaccaggccatgctctgggaagggggtgggacctgggcaaaggacacctctctaggactgcacagaagcctttgtgggtgggtgggacattcctgtgatggccttctggctgggcactatgaaatgctctgaagatttttccttgcactgttgcactaaccccagtcctctatcactgccccttcctcctgggcgacttcactgatgttgtggccatgtgaattctctggccaatgaaatgataaagatgatatggcctctgccaagcagacactgtaagtattattgtatgatgcttttgtctctttttttaaagttaaagcagtttattaagaaaataaaggaataaaagaatagcactccataggcagagcagctgcctctgtctcttatattttcccctctgcctcaagcccaacatgcccaaaattggggctgctggttcagcctgggtctcagaataaagacatgagccacagatccattgctgacccatgatggagatggacacaagagagaaacacatttttgtcatgttagccactaagattttgatttggaggccatttgctacagcaatataacctagcgtgaacagagagacacagcgatgttccatttcttttcaacctggaacaggagaatttcataggtgggcctcaatttcactttagtatcttatttagacaagaaagttcatactgttcaaatgtcatgtttaagagtgctggcattatcactgctgtggctaccccatcagatgttgctcactgactaatcttctcatgttagtgaggatggacaacatatcaggccataattcaaagtagcaaataggaaaagagcttcatcctagcattatgggaccttaattaatgtcctttcctgacaggtttcagaggcttttgcaggcagcagcagagctattcatctcactgacagtggggaacatggccaaatggttgcccccacaatggaggcagagtttcaggacacttgtctgatctctgcccttgaaggaacagtctcaccctgattgacacttttgcctgttatgtccaaagaaccaatggaaaagcaggaaaattattccttctt

SEQ ID NO: 211392 - DNA, 251 bp, Homo sapiens
tcaaattattatttttggggggctgagttttaggagagatacattctgtacgttaactcctatcaaatatctaataggtcaatattttcacccatttctaaggtgacattttcattccactaattggttcctttaatgttcagaaattctgaagtttgatgtagttcagtttttttgttctttgttgcttatgcatttgacatcatatccaagaaaacggtgcaaagaccaatgtcatgatcttctctata

SEQ ID NO: 211393 - DNA, 1095 bp, Homo sapiens
agttagcttgtgttagctcaattagacccctgccttattgcaaggacagagggctttctgtatccctgggttcttgccttggtgtaccaggagaatcggatcacacctgggcttgaagaacgagtgcaaggttttactgagtagaagtagctctcagcagatgggggagccagaagggagatggttttcccctggagttgggccgctagactgcctgggctctcctctgattgccccggccaaactccgccaactgttcctccttccgccagtcgtggcctgtcggcatgctgggatctgtcgtgtgctcttcctctggcgtgctcccatccacatcctctcgctgtccagctgcttgtgtcttctgcgatgtgttcctctccacgtccagctgcttgtgtgtctgcctgctagaatcttggaggtttttataggcacaggatgggggcgtggtgagccagggtggtcttaggaaatgcaacatttgggcgctgaaggcaggggtgcctgtcctcacttagacccgtgggcacgggtttgggggtggagccctcgccagggaccacgccctcctctacccagcacttcctttccctcctttcctgttatttaaagggaccacgcccttcccagcacttccctcccgttatcacttacaaaagctagtttatcaagttctagctccttccctgacttgctgtccaacattggtatctttttgttttgaccatccttataaatgggatgggaggcagctgatcctgtaaattaaaaaggactggaaattagaagacctgaatgtgcatgtttgcttgttggtttacaagctgcatgtccttgggtaagtcacttatcttccctgggctctattctttcatctgtaaagcccatctcacagagcagctgtgaggatccaatgaagtgatgccagcaaaaggtgcttgcttcgtacatgtttttgatgatgtctttgccatttgattgcagtgttaaacttaataaattttgcatgtaaaatgtatactttttataaaaaatatttgatattcatcttgaaaacattatgctgaataaaataaagcagacgcaggacga

SEQ ID NO: 211394 - DNA, 489 bp, Homo sapiens
tgggggtgaaggacaagtagacttatcaattataaagtgattaatggtatgtttagggttcctcaggaacatgaaggagaaacatctaattcagaatgcggaactgagaaaggctgcatcttgaaagatgatttgtagttagccggaagtgtgaagggagagggatatcacagagagaaggtgggaactgttattaatgttttatttctgaaggtggtaatgagttcttggaagttcattgtattatttgtatcactgtatatcagaagactttaataataagcattgaatcattaagccttagaggtgatttctgggtattgataacaaaatatgaaaggattttctattgtatagaaactagaggcaggggtactataaatgagaaataataatagatgagtgaaagtaagtttatatattacttgccttttcaggataagtttcatttgggggaaatagttttactatttttgaaattaagacata

SEQ ID NO: 211395 - DNA, 418 bp, Homo sapiens
ccatttttaagtgtatgattcaattttaaaaaatgtattcagttatgtaaccaccatcacaatcatgatagggagtattccattattccacaaaagttctgtgtacactcctgtagtcaatctactcccttaactcccgcccgtgacagccattgacttcgtttctagctgatagttttgccttttccagaatgtcatatacatggcttcctacaatacataaatttttgtgtctggcttcttttacttagcacaatgctttgagattcatcaagattgttgcatgtattcacagttcaccgcttttaattgtggagtagcatctgactgtgttgatataccacaatttgtttattcattcactagtagattgcttccagtgttttgagaaattaaataatgttgctttgaacactga

SEQ ID NO: 211396 - DNA, 486 bp, Homo sapiens
ccaaactgggagttcaaagattgggttataagtcccagctactcaggaggcagaggtaggaggattgcttgggcccaggagttttgggtccagcctgaagaacagagagaggcccatctcttaaagaaaaaaaaggattgggtggttatagtctcaaattggggaatattaacaactagtaatgccactaataaggttgttgtgaggaacaaaagagacgtgaaaacactatataaaaaacctttgtgaattttagtgttttattatcagtactggaaatagcattaatacttgctttctaaatggggaaacagtctctctgtttctcgtatttttagttaagagggcttttaaaatttgctgtcttctgtgatatctgtaacaatcctgcaaaagtggcagagagaagagattttgcttctttgttctatgtactggggggttaggagagaaataagaattttttaaaagtctgacaactgaaaa

SEQ ID NO: 211397 - DNA, 388 bp, Homo sapiens
ccaggtgatccgccctccttcgcctcccaaaagtgctgaaattacaggcatgagccaccgtgctgggcttcgaagcactgtttaatatctcctacttatgcacagaacagcataactgtatgattactttatgggccaggattactcagtgatacagttattttgggtttgtagcatagaagatggtagaaaattggatttaaacggagtaggataatttttatgttataaagtgtacagcataaaagcagattgctagcttgaattgttaaaattatttcattgatgttaatatatgaagtgtaagaattttcaaatggtaaaaatgactgatttggtcattaaactttctggttttggtctttaccaaaaataaaaaaacaactcc

SEQ ID NO: 211398 - DNA, 510 bp, Homo sapiens
gtaatcccagctacttaggaggctgagacgggagaattgcttgaacccgggaggcggaggttgcagtgagctgagatcacgccactgcactccagcctgggtgacagagcgagatttcatctcaaacaaaaaaaaggacttgggcaagcccattgcctgcaccagacctcagtgtcacaacccagaagatgggctggcagcgtccccaggcagcggatcctaaagaagacacacacagctcccgagggtcaggccttcctgatgaggggcccgggtgaggccccgagctagagctgctagagctgtggaggggaagatggggagtcgctgccaggcacactgtgttcaggagctgtggggaaactgaggcaaggagctgaatactgagggagtggaatgtggtacagccacaggggaacagggtgggtggtgggactttctgtgggcgctgagagggcgggtctgccggagctcccgtttacctctgctcggaataaaaccactttatgc

SEQ ID NO: 211399 - DNA, 355 bp, Homo sapiens
tcgacattagagctgaggcacaaacatcacccttgctggcccttactatgactccagaaccttccgaccacaaccaacaactgacatagtaagatccgaagacaggcagcccttttcataggacagctgtgcttctagtttacggaagaatctgcttctcaagatttatggaaaatgcttctcaggccagccacagcagttcacgcctgtgatcctaacactttcagaggccaaagcgggagaatcgcctgagcccagttggagatcggcctgggcaacacagtgagactccatctctacaaaatgttttataaattatattgtgtaattaaaaattaaatgtttaagtaatttt

SEQ ID NO: 211400 - DNA, 601 bp, Homo sapiens
ccatggatgaatggataagcaaaacgtgtcatgtacatacagtggcatgttactcagccttaaaaaagaagaaaactctggggtgggcacagtggctcatgtctgtaatctcagcactttgggaggccaaggcgggtggatcacctgaggtcaggagctcgagaccagtctggccaacatggcaaaaccccatctctaataaaaatacaaaaattagactctacctcaaaaaaaaaaagaagaaaaagcagaagaagaggaagaacaggaagaagaaaactgtgagacatgatacatgctataccatgtaggaatgttgacatgatgctaagtgaaataagccagtcacaaaaagacaaatgctatgtgatttctcttatatgagatgtctatggtactcaaatttaccgagacaggaagcagaatggtcgttgccaaaagctgtggggagagaggcatggagagttgttgtttaatgggtaagagtttcagatttcttaagatgaaagtcctggagagggagggtggtcactgcattgtacagcaacgtgaatgtgctgaacgctactgacttgtacacttaagaatggttacaatcgta

SEQ ID NO: 211401 - DNA, 338 bp, Homo sapiens
atccttgaggggttaagctattattatcattattttatcattaacttctgtgagtttgacttgtacagggcctcctagcctgcaaatttcaaaattgacgtcttttttttttgagacagggtcttcttgctctgttgcccagtctggagtgcagtggcatgatctccactcactgcagactccacctccagggttcaagccattctcccgcctcagctactcaggaagctgaggcaggagaatcgcttgaacccaggaggcagaggttgctgtgagccgagattgcaccactgcactccagcctgggcaacagagtgagactccatctgaaaaaaaaa

SEQ ID NO: 211402 - DNA, 460 bp, Homo sapiens
tgcacctagacacttcttgaaaggagacactcagtttcacaagtgagccctcttgcccagcacacacctatggctggctgggcaaggcgctcaggcatgcaaccatgggcaccaggcaatacccatccatcacccatctcactctccccagtcctcaggcagcagcttttccaccccaggaatctctgttccttctctgtctgcctctccacagcccgtgatcccctgcttctggctcctaccactggacagtcattgtggatagagcagcctgctgctctcaggaccagagaagggaaatgacttctccaggcagaggcagatctgagtctagaacccaggcttctaaatttctaggccagtactactgctctcaaaagagattaactgggattaagtgagatgacgcatgtaaagatgctgtgtaaactgtaattcttaataccattatcacgcatta

SEQ ID NO: 211403 - DNA, 233 bp, Homo sapiens
ttaactatccttcaagttctaaagatagttcctgtgtggtttcaggaaatcctttaaaactcattttccccagctataaaaaaggacaagtagctagaagttgagttttgggaagacgtaacaattaaagtagcttgctttaaagacacagtaaaaggtaaggacaccaataacatattcattcattcatgtaacaaaaacaaattcagtgcttactctgtaatgggccctgt

SEQ ID NO: 211404 - DNA, 336 bp, Homo sapiens
ggagttcagcccagcgcccgaagtaaacttccttaccgctggcagcaaggccgggcggcggaggccgggccgggtgccctggggccggcgccgggagcgctaggggccccgtgcggtcaggccggggcgacctccacccgcacccacgcctcatggggctcccgggtcttggccgcggctgggatccccggaaaagcagggacggagaagccaggccggcatgcccgccctccttcccccgggaggacccaacaactccggaaagatcctgccgggagatgtgctcgctttccccggggcagcgggggaaagcccagcaaaggcacattgaaaatt

SEQ ID NO: 211405 - DNA, 403 bp, Homo sapiens
  misc_feature (251)..(251): n is a, c, g, or t
  misc_feature (381)..(381): n is a, c, g, or t
  misc_feature (399)..(399): n is a, c, g, or t
agccaccacatctggcctttcaatcttattctagtgtaaaatgtgttgggagagggaacttggactaaatacttacaagttacgaataccctgctctcgattgtccccgtgttttgtgggctggcttgggagcagggcgcttgtggaaggatgtgccactgatcgggaggttgtgcagtcactggtgatgcctccagggtctgatcccttccatgtgctgcaggaaagtcctcctggtagccacacccacngatgcctgggcggatatctcgtatgtggcacccattgagctcacggatgaattgcttgctaggtctattactcgaccaagggcgctgcatgtgacaacagaattccttggttcacacaactttcttaagnctttctcgggatgcgacnctgt

SEQ ID NO: 211406 - DNA, 345 bp, Homo sapiens
ttacaaagagacagtggaatttgaaagtgccggctggcagcggtggacagacggcgccaccacgcggtagcttggtagcataggttgctagacacagtaccagaaggaaaaagtttgaccaggaaaggtgactgtgtgtcgctatccaaatctatgttcggcttgtacagaaggtgtatctgcagaaggctaaggaccatatatgtaagttacatgtaactttggacatgtccaactttgctttggatatttttcaaaatagtaacatccttatattctggctgttataccctgatttttcaccccccatttaattaagcatttataaagctcgttattgtctta

SEQ ID NO: 211407 - DNA, 602 bp, Homo sapiens
gctaaatataaagaatgcatcctatgtaaatgggtcttagtagctgtggttatctagggcattggatatattgtccttttgattttattctaggcagaaattggcagagaagacctagcgttcaagggttctagacttctcttggctatattattgtttgaaccatttccaggccagtagcctggggctttaggggcttaggcagagtttgctgaggtataaggcagcaagtgctgttagctgcctgaacagagaagcagtgttgtgttttgttgaagagcatagtcttcagagtttaattgcagctttcccatttgcaagctgtgagcctggccaagctatgtgagatctctaaacttcacacttgttatctccaaaatttttttttaaaaaaggataaggattaaatgtgataactcttgtaacagcacacagtgttagctatcgctgggcctagaatgcagtaaatgcccagccactgttaattgccaaattaataaaaactttttcatgtatatgggacaaaaaaggtaagtcttaaattaacttgcatagcattggaaattagctagctcacataacacaaaagtcatattttcaag

SEQ ID NO: 211408 - DNA, 330 bp, Homo sapiens
gtctttccgttagaatgcctcagttggccagatgtccctatccttggaatgcctgaggtcacatatttgtcttcatcgttacaatgcttaggtttggccaggagtctctctggttagaatgactgggttcggccaggagttgctcccgttcgaatgcctggaatcagccaggtgtctttatccttagaatgcctgaggtatcacaggtgtctctatccttggaacttttgaggtaggccaggagtctttgtcattataatgcctaggctttgccagaactttctcctgttagaaagctgagggtctgcaaattttttttccattggaatg

SEQ ID NO: 211409 - DNA, 413 bp, Homo sapiens
gagtggctttgagtgatggtgggttctgtgagggatgattgagggggtgggaaggaggtcagtgggactgaggggtctaatggcctgcctgcctccaccctatcccatctcagttggctcttcccactgggcccccaggcccctcctcacagggaatgcaggttatgaatctcctcttctctggaccttccaatgccctcttgcctgcctcagagaaaatctaaacccttcccgtgacccgctccccttccccctggtggactgtctcctgccactctctcctgctgtctacactgcaagtccactctagggtggcccttgctgctcccggcctggcctccctcccctcagagtctcatggccccctccctccctgaagtttctgtccacgctacctttggccttctctgtcc

SEQ ID NO: 211410 - DNA, 968 bp, Homo sapiens
taatgatcaaaggtttaatccatgaagaagacagcaattttaaaagtgtattcaccaaaaaataaagcttcaaaatatgtgatgtgaaaactgccagaactaaggcgggccgggctcagaccagcgctgcctcaggatgtaaagtgtaacaagagggccaggggaggtggtgggggacaacatgggcctgtgaggcctgtgggtgcccgcgttccccagctccccccgcagcccgctccacagtggtccgctccggttggttgtcacgtgcgcattcgggttccagacccaaggctgcgtgttctccaccgcttgttgtggccagtgttactgcggtgaccgccagagcagcctcgacgctatggaggagcctggtgctacccctcagccctacctggggctggtcctggaggagctaggcagagttgtggcagcactacctgagagtatgagaccagatgagaatccttatggttttccatcggaactggtggtatgtgcagctgttattggatttttgttgttctcctttttttgtggagaagttttagatcggttaggagtcggctttatgtgggaagagagcaaaaacttggtgcaacgctttctggactaattgaagaaaaatgtaaactacttgaaaagtttagccttattcaaaaagagtatgaaggctatgaagtagagtcatctttagaggatgccagctttgagaaggcggcagcagaagaagcacgaagtttggaggcaacctgtgaaaagctgagcaggtccaattctgaacttgaggatgaaatcctctgtctagaaaaagacttaaaagaagagaaatctaaacattctcaacaagatgaattgatggcggatatttcaaaaagtatacagtctctagaagatgagtcaaaatccctcaaatcacaaatagctgaagccaaaatcatctgcaagacatttaaaatgagtgaaga

SEQ ID NO: 211411 - DNA, 256 bp, Homo sapiens
caaaaacaaaaaagcagaaagagatgttggcagaggagggattcattttttcagcaatgcatttctttctctttttttttttgtaatggcattagatgtatctgaaatatgtaatggcattagatgtatctggaaaactagtgacaaattttgctaatgacatatattggtcatgaataggtccaggaatcatacagcagatccaacagttcaatttcctccagtggcaacaatttgggaaagtttaatcaaagtg

SEQ ID NO: 211412 - DNA, 402 bp, Homo sapiens
aagcaaggaaggaatgaagggatttattgaaaatgaaagtacagcgtgggagtgggcttggagcataggggctcaaaggccctgttagttacagagtttttgtgagtttaaataccctctttttggggcacaccctatgtaaaaggagaggatgaagtaaggttacaaagtcatttacttggcctatgccctatggagaggatgaagtaaagttacgaagtcatttacctggcctatgccctatgaagaggatatttcctgttatagctgaagtgtgagattgccttagttccctgcctccagaccctatttttctgcctcagtggtgtgtgcctgttgtctcagctacttgggaggctgaggtgggaggattgcttgagcctgggaagcagaggttgcagt

SEQ ID NO: 211413 - DNA, 558 bp, Homo sapiens
ggagggaggcagtcggtgatggagatgggagggaagaaatccaggcaaatggcgccggtggcctgaactacagcactggagatgaatgacggacttacatcaaggagggagactctttggggctgaactggtggggaaggcaggaaggacatggatgtataagtgggaaatgtctggggtgaaaccctaggtttggactttcgggtaaacaatgggtgcttttcatcaggtagggagtgagaaagggaaacaaatttagcaaagaaacagtacatgtcggctgtgtgcggtggctcacgcctgtaatcccagcactttgggaggccaaggcaagtggatcatgaggtcaggggttcaagaccagcctggccaacatggtgaaaccccgtctttactaaaaatacaaaaattagccggatgtggtggtgagcgcctgtaatcccagctactcgggaggctgaggcaggagaattgcttgaagccaggagacagaggttgcagtgagccaagatcacgccactgcactccagcctgggcaacagagcaagactctgtctc

SEQ ID NO: 211414 - DNA, 490 bp, Homo sapiens
ataacttttgtatttgaaatctgtgcttatgtaaatatatatattaaatttcctaccataaaaagagcagaatattaagtatctgataatttcaggcaatttatgattctaaaaatttcccagattatcactatgatcaccagtccacagcgttcagtaaataaatatatagatatggaaggtgtgattcgttgaatttgatttctttcaagcacagtataagagatgtcaatggatttgggagactaaatacccaatattagtttatcttcatatagtttttctcttccaaggggaatttttgaaattcactttttctgtctaaaagttagcttactaataatgaatataatccaacaaaagaaaagctagggaaattttcagttaatagatggttcaacataaattacgttctggttatttgaaacttaacaatgattctaaaaaagcattcagaaagcgaagtagtaatattggttgataacaaatt

SEQ ID NO: 211415 - DNA, 318 bp, Homo sapiens
cccagagctgattcgccctcctgtgtacctccggcctgtggaagccagccctattccctaataccttcgttttcctcagtggaccccttcagtctccaaccccagggttagagggggttcggacgagcagaggattagattccggtgggttaggggtctggagtcccctctcctggaagtctctccgcttgctcctgtggagacctaaggggtcccgcacccgacagagaggggtggccggcgggatttttcacttgtgtccttcccctgcggggaagggggcgagagcccctaacacaagcctgagtcttgggggac

SEQ ID NO: 211416 - DNA, 434 bp, Homo sapiens
atgtcatcctcaccacaatccagtgaggaaggtttaattgcttctactgtgcagtcaagggaagctaggctcaaagagaagcgaagcaaagggccttgtctgagatcacacctaggaaatggatttgtgtgaggaaagccgagctcctccccggtggccacactgcctcctcaagctgaggctccaactacagaagctggtgcagagcctcctatatgctcagaggcctccttcacaatattctatacccagcccctgctgcactgatgatctccccaaagaaggaaagagacccaactgctgccagccacagaatcaacttgggcaacatgacttccttcctaatcttaacaatgagggttgaactagtccaaagaccattagagataacaggcctgaggaaatacctggcactaatacattcacagaaatga

SEQ ID NO: 211417 - DNA, 452 bp, Homo sapiens
ctttgccttgtcatgtggggcagctgccttctgccagggaggtcaaagggccagtgtgacagtctttttgggtacctgcacttggtgcaacctgaattcttgtctggtgcccaagaggaatggggtcacgtggatgaattgaaggacggtgaatgcagagaattttattgatctgtgaaagtggctctcaggagagaagggagctggaatgctggaatggggatgggaagggaaggtcgctctcccctgaagtcaagccacctctctgcctctctcttctgaagccaggttgcctctttccaatgtctagctgctgtctccgaagtcaagttgcctctcctcaatgtctagccatttctcctctctactgaacctgcagtctttataggcacaggatgggaggtggagtgggccatagactgttttggaaaagaaaacattcaattggaaaa

SEQ ID NO: 211418 - DNA, 168 bp, Homo sapiens
ataaaagttgtgcaaagaaaaactatgaggttcttgcttcaatttatcatgggcttgaaagaacagtttgacagggcactgagctggcaagggtttgaggatattgtcagtgtctcatatttgctagtgagagtgtgaactgttggaatcatatatgaaatatttaag

SEQ ID NO: 211419 - DNA, 161 bp, Homo sapiens
gtattgagaagcacaatcgaaggttatatggtgggatgattggcgaatgtgtgtcctggttctctctgcataaaaccctcctatgacatcccctcttaaaaagataccagtttaggcttgagttgtatgaaagagggaatgtttctggtttcctagtggag

SEQ ID NO: 211420 - DNA, 320 bp, Homo sapiens
aactgcgaacaccactttactattaaagaaaatgcattaagcatgttaaatcaggtatgacttctgcctcattatgtgatagaaaaccaaaatcttcaaggttcagacatcgaacaaaaactagactctaggttgggtgcggtggctcacgcgtgtaatccctgcactttgggaggccaaggcgggtggatcacgaggtcaggagatcgagaccatcctggctaacacagtgaaacctcatctttattaaaaacacaaaaaaattagccgggcatggtggtgggcacctgtagtcccagctacttgggaggctgacacaa

SEQ ID NO: 211421 - DNA, 384 bp, Homo sapiens
tgtaatcccaactactcaggaggctgaggcaggagaattgcttgaacccgggaggtggagattgcagtgagctgagattacgccactgcaccccagcctgggcaacagagtgagagactggatctcaaaaaaaaaaaagaatcttaaagaggagactgatctcatggaaacgtagaaaagaaggatatcaaggagggagtagccagtcgtgtcaactctgtcaacccattagtgatggttgcaggtcagagatgccattgacaagagctgttaagccttgctttataaagaggatcagaaacgtgtaaatgttttgggggacaatcccaccaaggtaaaagatactagagcatgtctgtgtgctgctgaaaatgattcagtaga

SEQ ID NO: 211422 - DNA, 406 bp, Homo sapiens
tttgctgtgggtcctggcaggcaggtacttgggaaagtgcacaagcgggaaaggcatgcagctggccttaacaggtgcaaaggaaaacaggtgcaaaggcacaccctcttttcaccatgaaagagtgagaagaacacctgctaaatgaatgagtgagcatatcttcacccatcaagaattagatgggtgatcaaaaacttgaatgggtgattcttaacttaccaagcaggaaaagcacagtcattggtagagatgtcaggagagtttggggcaagaagttttagctgagggtcatcagccagaggaaaaccaccctttccagtggatgagcaaaagatgatgtgtttcttatctgttggtcacataagactagattagaaggatcaataataaataattaaatcaa

SEQ ID NO: 211423 - DNA, 885 bp, Homo sapiens
gtgatccccctgcttcagcctccaaagtgctgggattacaactagccacatttcaagtgtgttcagtagccacatgtggctactggttaccataaaggatagcacagggggataggacatttctgtcattgcagagcattctatggggcacactaatataggctaaaagtggcccagtagaaagaagaattcataagttatttttaaaacaaatagactgcttatttgcaagttaaacagtctttcagcactgaagaaagatactgcattagcacttgataggatgctgagatgattaaagatgtagtcccagccgggcgcggtggctcacgcctggaatccgagcactgtgggaggccaaggtgggcggatcacctgaggtcaggagttcgagagcagcctggccaacatggtgaaaccccgtctctactaaaaatacaaaaattagccgggtgtggtggcgcgcgcctataatcccagctactcgggaggctgaggcaagagaatcgcttgaacctgggaggcggaggttgcactgagccaagatcgtgccactaatccagcctgggtgacagagtgagactctgttaccaaaaataattaaaaaaaaaaaaaaagacataatccccagtcctccaggtgttttctggtgggggagatagacctgtgcacaggtacccacaacccaaggcagatgcgagtggtgctttatgaaaggtacaaagagagttattgcagaggtgactgggaaagccttgtgaagggattagaattctagtggggacaggtaaagagagttggttttgtgggtactccaggtgccagaaacagcccaaggaaaggtccaggtggaggcaggcagttgtggatttgtgatgagggatc

SEQ ID NO: 211424 - DNA, 410 bp, Homo sapiens
ctcttcccaaacttcccactataccaccagaccctgctgccaggcatgggcagaccattgactggtagcatagggagggaaacaccctgtgcattttgcttggaattcattacaaaattaaatataattagtggcattccaagcaatttgaacttcccagtggtgaccagcagggctaaagtaactgctgggctgttcctaaggcaggagtcagatcctcaggctgggagtgggaagtcctgggggctgtcctagcctcatgaccactggcaagccaccacctctctgggcctcagtttcctcacccatcccatccagcactagcatttagctctactgttaatccctgcccacagaggtaaccatgcattgcaaagtaaaacttacgataatgggaataattaaaaaaa

SEQ ID NO: 211425 - DNA, 373 bp, Homo sapiens
gggtttcaccatgttgcccaggctggtcttgaactcctgaactcaagggatccacctgcctcagcctcccaaagtgctggattacaggtgtgagccaccaggcccagatttcccctttccatcataaaaggaaatgctttccaccaggtttccatgatcagggcacacagagtaaattacttacaggattttcctttggggctaggtgcaccccatagtactttgctctaactccaatcctaacaaccaccagatggtatttgcctgcctgtgctgttaaggtttccagcacatggggaatgagctgttcacactcaggcatgagcttacagataccagagcccctcccttaatggtgttcccaatcagcttt

SEQ ID NO: 211426 - DNA, 992 bp, Homo sapiens
  misc_feature (704)..(704): n is a, c, g, or t
acatctcctgtggtctcttccaggatgggctcatccacacgtccctgaagcccactgagatcctctacctcactgtggcctatgactggttcctcttcgggcacatgttggtagatcggctcagcaaaggggaggagattttcttcttctgcttcaattttttgaagcatattacctccgaggagttctctgctctgaagacccagaggaggaagagtttgccagcccgggatggaggcttcaccctggaagacatctgcatgctgagacgaaaggaccgtggcagcaccaccagccttggcagcgacttctccctggtcatggagagttccccaggagccactgggagcttcacctatgaggccgtggagctggtcccagcaggagcgccaactcaggcagcttgcttgcagccctgagtgatcgagagactcggctgcaggaggtgcgctcagccttcttggctgcgtacagcagcacagtggggcttcgggcagtagcccccagtccttccggtgccatcgggggcctgctggagcaatttgcccgtggtgttggactccggagcatcagcagcaatgccttgtgaagaagccagcccatgacattttcctgctcctctctcagctgagcccttagcagagaatcaaagccatgcctggccgaaggggtacttccaggtcaggggaaatttcagtcccccntctccatcatgaacatggcagccccaaagctgagcaaggccaaagacagggttttccaacccccagcctcttgactggtgaccaccaccccttcttgtcactgtctcccacccaccccatctttgctgggattcccatcaactctcagaactgtgtggggtttccctggggccttgtggaagccatgacttcacaaagaccctacctgtcagttcttgtttctggggaggagggatcacctgcactgagaatgaggcagtttgacacagatcacaaaataaaatcaaa

SEQ ID NO: 211427 - DNA, 1172 bp, Homo sapiens
  misc_feature (884)..(884): n is a, c, g, or t
acatctcctgtggtctcttccaggatgggctcatccacacgtccctgaagcccactgagatcctctacctcactgtggcctatgactggttcctcttcgggcacatgttggtagatcggctcagcaaaggggaggagattttcttcttctgcttcaattttttgaagcatattacctccgaggagttctctgctctgaagacccagaggaggaagagtttgccagcccgggatggaggcttcaccctggaagacatctgcatgctgagacgaaaggaccgtggcagcaccaccagccttggcagcgacttctccctggtcatggagagttccccaggagccactgggagcttcacctatgaggccgtggagctggtcccagcaggagcgccaactcaggcagcttggaggaagagccactcatcctctccacagagtgtcctctggaaccggccacaaccctcagaggaccgcttgccttcccagcaggggctggcggaagccaggtcttccagctcctcttcctcaaaccattctgataactttttcaggatgggtagcagtcccctggaggtccccaaacccagcttgcagccctgagtgatcgagagactcggctgcaggaggtgcgctcagccttcttggctgcgtacagcagcacagtggggcttcgggcagtagcccccagtccttccggtgccatcgggggcctgctggagcaatttgcccgtggtgttggactccggagcatcagcagcaatgccttgtgaagaagccagcccatgacattttcctgctcctctctcagctgagcccttagcagagaatcaaagccatgcctggccgaaggggtacttccaggtcaggggaaatttcagtcccccntctccatcatgaacatggcagccccaaagctgagcaaggccaaagacagggttttccaacccccagcctcttgactggtgaccaccaccccttcttgtcactgtctcccacccaccccatctttgctgggattcccatcaactctcagaactgtgtggggtttccctggggccttgtggaagccatgacttcacaaagaccctacctgtcagttcttgtttctggggaggagggatcacctgcactgagaatgaggcagtttgacacagatcacaaaataaaatcaaa

SEQ ID NO: 211428 - DNA, 999 bp, Homo sapiens
aaactaatactgtttacagggagttaaacttctacagtgggattaaaggtctgtaccacgttagcacaaatgtcacctctctgttaatcataaaacagggtcacaggccaatgttcaccacaaggagacaggaggacaacctgggatgggtaatgacaaattcagtgtgatggaagttgttcacattatattattaaatgaaaaacaagtttcagagaagtatgcaatatatactgtcctcctattttttaattaaaaaatgatatatacccatactgtttttgtgtctatataaacaaagagtaacaactctggagttacctctgaagaatggggtagggtggagagattctcacatttcttttctttttctttctttcttttttattttctgagacagagtcttgctctgttgcctagcctggagtgcactggcacaatcatgactcactgaagcctcgtcctcctgggctcaagtgatcttcccacctcagacaccaagcagctgaaactacaggcgcctgccaccatgcccagctatttttttttttatttttggtataaacaaagtcttgctatgttgcccaggcttgtcttgaactcctgagttcacgcgatcctcccaccttggcctcgcaaagtgctgggattacaggcatgagccactgcacccggccacatttcattttatacattctttatcacgcactttattacatatgtgtaacaagtaatatgtatataaatctggaggaaagttgtattaacaacagaaggtaaccacagaaaaacagagctacaaatgacctcagagatacctgcgtcaaccctgtcactttagagatgaggaaactaaagccagagagactatgtctgatgtgccttctaagttgtgatgttctaggattgcaagttacatcctattggcttatgacttagaattctatttctaatccttcagcaaaatagcaggtagaatcctatggtatggttctttct

SEQ ID NO: 211429 - DNA, 385 bp, Homo sapiens
gaaaaaaaacctgttttgcccattgaactgtaacttacagcccaaagacagaccttacccatgggttattcacacaaggcttccctctgcccttgtatttaatgaaaggagcagaagtgaggggcacgtacggtactagacggacagtgataatagtggccaccaggattaagtccttaccatggccaggcatggtggcaggtgctgtaatgccagctacttgggaggctgaggcaggagaatcgcttgaatccagcagacggaggttgcagtgagctgcgatcacgccactgcactccatcctgggcaacagagcaagcatctgtctcaaaaaaaatagtaagtccttaccacatgtcagacgtggtgctaagggctggatata

SEQ ID NO: 211430 - DNA, 538 bp, Homo sapiens
aaatgcccaacagcagattaatgtataaacaaatcacatatatacaaacaatggcatattattcagccataaaaaagaaatgaagtgctaatacctgttacctgttacagtgtggatcaacctcaaaaacattatgctaagtgaaagaacccagacaaaaaaggtcttagattgcatgatactatttatgtgaaatatggagagcatgtaaatctatagaaacagcagactgatggttgtcagaggctagggggaagcagggaggagggaatggaaagtaaccatttaatgggtatagagtttccttttggagtaatgaaaatgcttttgaactagaggtggtagttacacaaccatgtgaatgttgtaaatactactaagtgctcactttaaaatgattaattctatgttaaatgaacttaacctgaataaaaaaataaatgcttatgaaagagcttagaattaagagcaaaaaattttgaagagcaaggtagaagagcccacactatctgatgtcaagatatatctaaaggctata

SEQ ID NO: 211431 - DNA, 622 bp, Homo sapiens
aagaatacaagttacatggctctaacttggctccaatttctagctggtaggaagtcaatccttttacctgttttccaaagtctatgggtctgcctttagttggaaatacagaatatagaagctattacagaactcggggtcttgaattactgtccaactcttcacaaaattccatctgaaagaagtgatatttaaggaagactgtctaaggggtatgatataaatccatgcccctgcatattttaggctccattttctagcagatcacctgaaagctacacagatgtcattagctcagctcctcacagagtggttttcactaagttgcaatttcatgtaaaacatctgcattttgtctgcagtctctgtgagagctatagaaaaccaagactgcataagcactggttataaaaatagcaaggaaactgtcgctgtagtggtaaaaacaagaaaaaaataaataaataaaacatacttcttggtttaaaaaaagtaaaaattactattatatcattcaatattgccttacatatccatataaatttcattaaaacatgaaactcatttaaataactttgtcctttgagaaagtggtatgttgactgccaaggagaaggccatt

SEQ ID NO: 211432 - DNA, 243 bp, Homo sapiens
cagaagtctgaggatactgatcaaagcagaaaaggataaacattctttccttccccagttttgcctccagcatgatgcacaccccatcatatgtgtttgcctgcgtggctgtgggcaggtgtgcagtccacaagtgggtcatccacaagtgggcagcagacacatgtgcgtacagcttactctctctgccttttttgtaagctgggaaatctttctatgtgaattaatatatgctgtctatct

SEQ ID NO: 211433 - DNA, 404 bp, Homo sapiens
tggggctgagttagcaggctttagatcctggcttcatcactgacccgctttaagaccttcaaaaatttactcagcctctcttgcctcagtttccttatctttaatgttgggtgataataacaatagtacttcctttaaagggtcctgatgaggattagatggggtaacttgtgtaaaaatgctaagccccaaatcttttacacattaaatgccccatgaatgctggatgtaattgttactaagttaaggcccttggaatggaaaaaagccttgtgaccagggtcaggggcatgaaacagtggtctggtctttagtattcatgctctttaaggagatatatgagatacaggaagagagaaaacagacacctaaaacttgtaagaccaaactgaagaaacacacca

SEQ ID NO: 211434 - DNA, 254 bp, Homo sapiens
cctaaacttaatgcttgtcaccagttccttgactgtttactctccacatatcatgctgttctattcttccatgatacaagatggaatagaaagtgcagggtggccctcctggaacacaacatcatgctgtgtccagcactgcccagaacattttattcctctcaataggttgatgaaagaatggagtatcagatcctttcttttgctgacttttgacatgttggtttccttaataaaaactgcatctcacactc

SEQ ID NO: 211435 - DNA, 247 bp, Homo sapiens
ttcagacgctgaactatgtgccaggcagtgggatgctacaacgtataagatcatgaagctcacagtctcatgaagctcagtccattggggtagggagggcagaccatcaacaaatacactgcatggcagccagatggtgatcagagagcagtggagaaaaaggaagctgtgtgtccccaggaggcttccagcttgtttgggcatctgcaggtcaagtccacatagttcagcgtctgacgtcccctga

SEQ ID NO: 211436 - DNA, 578 bp, Homo sapiens
aagcaaatacccacctcttactcaggacaccccagtcagtggatgccttctctggcccctctcccgtcctgttcttggaaaagcagcctactttctctgtcctgatcatgcaacaagttgctctgaaatgaaccagcagcttgtggtgggaataaaagcccaggaaaaggaatgcagaaggaaagtgatggaacggcatgaaacccaaagcaattgataaaaatgagcaccacatggagaatgtggaaaggagaggcaagcataaaaatcacaaccacatctgacatctctagaaatggagagagacaaatgaaatctcacatgtggctttcctcaagtcagaaagattccgcttctccattcaggggcgggatgaaggagcctctttggaagccgtgggcctttctcaagttgttctaccacgcctttcatttctcccgcttcagccagtaagttcaagtgcttagagaaatgcttagcctctagcaccttctccaggcacaaaataatgggttgaccaaattgataattttttttttttttgagatggagtccctctttgttgctcaggctggagt

SEQ ID NO: 211437 - DNA, 444 bp, Homo sapiens
ggggacgactatacacgatgttaaatttctgctgtgtttttcctggagtcccgtctcagtttctggaacaggttatccgattgctgatgagatatttctgttattcatttttatttatcccaggaacactaactctagctgtgagtatgttttcccctccaagagaaattaaatatccctttcacattaatttcttcctgtttcatgtatatgtaagtggatgcatatggtaggcctgttgtgctgagaaatttctaagtataaactagtccacatagttatgagactgaacacctgacttaatagatgttccataagaagaactagggaaacaccatgttatacaagcaaccttaggaggtatttaacccagtcctctcaatccacagataaggaaactgagttcagagatgtgaagtgacttgcccaagattgtgaccgttc

SEQ ID NO: 211438 - DNA, 326 bp, Homo sapiens
atgctgctcatcctttgaaaaactgttggaagatttacagcaagggtcagcactttttttctatgaaaggccagatagtcaatattttagggtttgttgcctatgtatctcaactactcaagtctaccattgtggtgctaaatcaaagctagacaatatgtgtatgagtgagcatgactgtgtcacagtgaaactttatttacaaaaacaggtgtgaggccagatgtggcctgtagactatagtttgccaactgtggatttacagtactgtacatggttgtagtagtattgcaataccttctttaaggggatctggcctcccactt

SEQ ID NO: 211439 - DNA, 363 bp, Homo sapiens
tggggtgctcccaacagttagaggttgaagagctgaagaggaaccagtaaaggggaccgaaaaggagcagccattgaggagagaggacagccagacaagtgaagtgatccacagctacatgaagacagtgccaaggaggaaggagaaatgagaaatgaaaatactactgagaggttgagggcctgggctgagactggaacacaggatatagcagcatggagatcatggtgacattgacaatatcatgtcattgattgggtgggggcacaagcttgattgaagctggttcaagtgagaataagagatgaggaaataaagataggatatacgtttcttgagagatttttgctgtggggtgagagg

SEQ ID NO: 211440 - DNA, 186 bp, Homo sapiens
atcaattcccatggctttaacaacttaaccttctgaccactccaaaatctaccttcagccctactctcctaaatcccatttatttttagtcaaagcctttgctattaattttctgggattcccctagcagctcaaacactgttctcatcatcatcttctttaaagatccacttcctggccaggtgt

SEQ ID NO: 211441 - DNA, 310 bp, Homo sapiens
tgtttgagtgaaactatggttgaatatttatcaaaccaaacatttgagcactgcaagccctctattcaccaatcacctctccttcaattgtctgtgcagtatccaggatgccttaattcaggtcaatctctcaattacccccagttatgagcccctactttgatggaaccagttgaggtgggccagcattttgaagagttggcatctccctatccttacttcttcactgattctggctcaggttctctgcttacccaaactaaacttgacttcacttctcataatgaacttcctgtatttctgtcacgtt

SEQ ID NO: 211442 - DNA, 468 bp, Homo sapiens
ggacttccccactaagagaccacctgtttttcgagcaggagttatcaccattgccaccttggtggagaataagaaggctcagctggtggtgactggacatgatgtggatcccatcgagctagttgtcttctgcctgcccccagcctcagccgcctcatctggaaagtgggtgatgataggccgggtgtggtggcttacacctgtaatcccagcactttgggaggccgaggcaggcagatcacgaggtcaggagatcaagaccatcctggctaacatggtgaaaccccgtctctactaaaaatacaaaacaattacccgggcgtggtggcgggtgcctgtagtcccagatactggggaggctgaggcaggagaatagcgtgaacccaggaggtggagcttacagggagctgagattgtgccactgcactccagcctgggcgacagagcgagactctgtctcaaaaaaaa

SEQ ID NO: 211443 - DNA, 698 bp, Homo sapiens
gaataagaaatagcttgaaagtacagagattgctgatgtcacctgaaacttacttttaatcaaaagcatctttctagaaatagaagggcaattatcacaggtggatctggggtatctttcccttggcctgagtgtgaacatcaaagttagagaaaagaagttcccaatgaagacctcctcaagttgttatacatttggggattccatgaaaggagatggtgcttcgctctggaaattggtaattaacactatatatctctactgagaaatataccagacatgtatagctgctcctcagaatcagtaaaaaccataaagacattatcatcccctcactgagcactcactggctattgatttgctaaactggtctttagtttgccaatgcttagcttccttccggttactagttcaagatcctgctgttgcagagaagctccatttcatatctttatagcagtgaaaagtatcacctaactacttcctggttcagatagtgatgggtgtttcaagcatccaggcattattatcaccttcaatccccaggatattttacagcaagtaaagccatacctcacaggaggttcataatttagagcctcatttagttaaccatttccctgttacatacatatgtatatggaccagagctctcttcatagactccattcttctttaatctgactcagttctattct

SEQ ID NO: 211444 - DNA, 475 bp, Homo sapiens
ctaatcccttggaatttcctatgtaataggaaaatcttttgttctaatgaggcaactcttgatgggctcttgggtggtggctggccaccagaaagaccaagctatgactagttgtctggaacttgcagcacccctccccatcattttgataggggctggagactgacttaataatcaatcatgctgggtccactggcttacgcctgtaattccagcactttgggaggccgaggtgggaggatcgcttgagcccaggagctcaagaccagcctgggcaacatagatagtgagaccctgactctaaaaacaacaacaacaaaattagccattcgtggtgctgcgggcctgtggtcccaactacttgagaggctgaggtgagaggatcacatgagcctaggaagtggaagctacagtgagctaaggttgtgccactgcactctccagcctgagtgacagaacaagaccttgtctcaaa

SEQ ID NO: 211445 - DNA, 506 bp, Homo sapiens
ttttttcctgggaatttgaaatttgtactggagatataccaaactggtagtcatcaattttgaatcatatgaatgagaacagtttggaaaaagttatgtgaggctcagttgcttagacctctaaagctgctttgtatctgcccttcttaggtattatgtactcaaaactctcttggagtctgtgaaatggcctcaataacttacaatcaatgttacttctttctcaattatttagattttgttttatttatttttgatagggtttgttctttgatttacttgcaaccaaaaggaaaaagaaaatagtttaatactactagtcagcaatgtttactgagtctcccctagagctagtgtaataagtagtagtctcagaaaaaagcactaacactgggattttgataatttataatctatttcaaatatctgactgcagacaacacttgggtatatttaaaaaatgatgaaataataatttgataataccttaattcatcttatagaat

SEQ ID NO: 211446 - DNA, 484 bp, Homo sapiens
agtttatacggttctacttattttaatatgataattttaattaattaattttttatatgtttgagacagggtctggctgtgtctcacactgtttcctacgctggagtgcaatggcacgatcatagctcattgcagcctcgacctcctgggctcaagcaatccttctgcctaagcctcctgagtagctgggactaccggcatgtgccaccacacccgactaatttttttgtacttttagtagagacagggtttcaacacattggccagggtggtgtcgatctcctgacctcgtgatccgcccacctcagtctcccaaagtgctggtattacagatgtgagccaccgcgcctggccgatttaacattttaacttactaaaagatttttattacattattcaaagtcaacaaaaagttagcaatgatactggcttaagaactacttttaaatagtctaattaatttcctaactaaaataattgattt

SEQ ID NO: 211447 - DNA, 499 bp, Homo sapiens
ggtcggtcccctcacggattactcaccataccctgtaatagatacacgtcacgactaaggcagctcgtgtctcctccttcaactactaggtgtctgtctcacaaaaacctactcatccttcaaagcttaacttttagcagtcacttctacaaggcttttccatatattttcttatcttaggatataatttacctataccagtggttctcaaattgtggtccctaaaactacagaaagagcatcacttgggaacatgttggaaatacaaattctgggtcaggagttccagaccagcctgaccaacaaggagaaaccccgtctctactaaaaatacaaaattagctgggtgtggtggcgcatgcctgtaatcccagctacttgggaggccgaggcaggagaatcgcttgaacttgggaggcagaggttgcggtgagccgagatcacaccattgcactccagcctgggcaacaagagtgaaactctgtctcaaaaaaaaaaa

SEQ ID NO: 211448 - DNA, 464 bp, Homo sapiens
caggagagtgatgcaagtggcagtgtgatcctgaacttggaggggactcaaccgaactgaatcactctgaacccagctcagttgctctagcttctgagtacactcaggcagtgtacccacaagtcaattccacaactgccagggtgttgaagaaagccctggagcagtactcagggtttgggaaactgctctatgacattagagttgttttctttggaaattaaatcttattaccaaagaaaagaacctctctctttctcaagcacccactactgcaccaagaatcttctcctttcttagcttaaactgtttattcttttttatttgtattttttaagagacgggtatcaggccaggtgcagtggcttacgcctgtaatcccagcactttgggaggctgaggcgggcggatcatgaggtcaggagttcaagaccaacatagtggccaacatagtgaaaccctgt

SEQ ID NO: 211449 - DNA, 574 bp, Homo sapiens
tacaatttctcaatcccaatgccctctccctcaaacatgccccaacttcgcaggtaaccactactccaggattggagttggtcgtttccactgtatttatttattcattaaaacacgttgggcattcacaatatacagtatgatttgacatgtcacaaaaataatttcatactgcctatatcattcttcaacttgctttttgatattatatttctaagctttaattctataaagatggttctgtttcattcattgtagctgttgtacagtgtgccattgtataaatataccacaatttatccattcttccagctgacaaaaattgaggctgttttcaattttttgctgcaatgaacattctacctccacctgcatgtgtaagagcttctctaaaaagcaaaacttccaactcataaagacatacaacttcagcttgacaagatagtgtaaaactgttctccaaatcaattgtaccaattagtacttccaccaactgtataaaaaaagtccggctgggcacggtggctcacgtctgtaatcccagcgccttgggaggccaaggcaggcagattac

SEQ ID NO: 211450 - DNA, 148 bp, Homo sapiens
ttttggtctgacagttgtgagagggttaagaaagtcaatcattttgtaaccaggcacagcaatcttgtatgaaccatgtcaggatgttgtctgcatgccgtctttgctgatcacagtaatcgggtcataagagaaagggaagtaatag

SEQ ID NO: 211451 - DNA, 404 bp, Homo sapiens
tgtgatgggtccagtagtttgtgatgggtccccaatatgcttccccagcccagtagtttgtgatgggtgtagtttgtgatgggcttccccagcagagacggacccatcacaaactacccagtaattgtgatggttttaaaataccctttccaccaaaggtggagttgaattcccccctcttcccttgaatttgagctaaatagtgactcacttctaataaacagaaagaggctgggagacttcggtagctaggttaggaaacaaagcttcttttttttttctttttttttcctgttaagacacatcgtgacagacttaagccaatgaattaggagtccagttaccatgaataggtagctggaaagaaaatatggagagaactccagagatgtgagttcttccag

SEQ ID NO: 211452 - DNA, 289 bp, Homo sapiens
ttggctttttaactgacaagtacaaaatgtatatgttagtacagcatgatattttgatatatatatataaaacagaatggctaagtcaagccaactaacatgtattatctcacagttaccattttttgtggagagaatgcttaaaatatactttcttagcaattcccaaggatgcaatgtattgttattaactgtagttaccatgttgtacaatggatctcttagatttatttctcctgttaaattaaattttttatcatttgaccagtatctcctcaacccctccacc

SEQ ID NO: 211453 - DNA, 490 bp, Homo sapiens
tgcatcagagctccccttgaaggcaggtgcgcagctgggctccacgttggagggcaacagcagagctgccacttatagccggtctttcaaccctgctgtcccccagcccacccacaatggctcaaaaggctggtcttctgagaaagacttgctgctagccaatcatcacagtcactttccagttatgttaagtggcatcagagcattgattagcacttacggtatgcaagatatggtaggaggaaaagggaattatagacagaaaccatgtgaaagtataaaagtcactgatagactagatacacgaatgagaaacaaatcaagcattatcatcacagaaaaccaccaaatcgcaaaagataagaaagggatcaggcatggtggctcatccctgtaatcccagccctttggaaggctgaggtgggagaactgcctaaggtcaagagtttgagaccagccaaggcaacatagtgagaccctgtctcttatt

SEQ ID NO: 211454 - DNA, 619 bp, Homo sapiens
aagaaatgaccccagatgggctggaccacagcgcctgtggggcctggtgaggagggaacggatgcgaagatcagtggttctcaaagtgtggttccagcaagcagcggcaacatcacctgggaacttgttagaaataaaaatgttcagtccccacaccaggcctacaggatcagaaactccagggttgaggcccagctgttcgtacataacaagcctgacaagtgatgctcatgcatgctaagttgggaaacttctgctcttgatgtttagaaggtagaatcggtcggatttctggagtactgggatcatgatagggacactcagtggtagaggtcatcttcactgagacagggaaaatgggagctatagcaggtttgtgtaaacgcagtgatcagtttggttttcagcatgttgagtggaaccgtctaggaggctgttgggtgaacacatctgtcctgcagcaaagggcctggctggacctggggactttatagagttgtcggtgtgtaggtggtggtgcagtttgaagggtttcgccgagttaatccaggagagtttagacaatgagaagagcagagggccgagaagcaaagccggcggacacgaggcttggggtgaa

SEQ ID NO: 211455 - DNA, 304 bp, Homo sapiens
tgtgggtagcacaacataaaatggtctaataagcagataattatatgttaaggagaaggaggcagaaaaaatatttacataagtaatggctgagagctttctaaactgatgaattctgtaagcacacagatccaagaagttcaaccaatctcaagcacacgaaacataaagaaaaccacaccaatgcacatcataaactgttcaaagccaacaagagaaaatcttaaaagcagccagagaaaaaagaaatattacacacagggaagcaaagaaggctatcagatttattgttgctaccaattca

SEQ ID NO: 211456 - DNA, 601 bp, Homo sapiens
  misc_feature (19)..(19): n is a, c, g, or t
gtcgctctagaggatcccnatatatccggccttcctctgtcatggggatcagcaaactctttttttttatgtgtgtaaagggtccagatagtaaatattttaggctttcagggatcaggatgcaatattgaggattttgtgtaggtatttaacataacaagagagaaaacatttacggagaatttttactgatgaaattcaaaatataatgacaattattgagtacagttttttaaaatacacatttgctaatgagaagaatggattttgtttcagggggcataacattttgctgaattggagtacaaagttactgttttctattatcaagtcagttatagatgtttgtcagtaaaaaccattcttagttctcaggtaagagaaaaacagatggcagacctgatgtggactgcatgctatagtttgccaacccctagtcagtagcatagctctggtgatgttagttttggtgtggaaagtgtaaggacgtggtatggcccaggaccccatgttgctctttgaatggctgggaaggtgtttgaatgccacaacactggaattttgtgtatttaataaatagtggtagagaggccaggcaata

SEQ ID NO: 211457 - DNA, 850 bp, Homo sapiens
aagagaagtcagagaggaaataagggtctaaataatataaggcattgtaaagacttggtatttactctgcatgaaatggggagcctgtcacaagttgggttttcccaggaaacagacccagaaacaaagttaatcttgtagaaaatttattaagcagcgcccttggggtcaatacctggggaagaaatgggaaagcagcaggagcacaaagaaaatgaagctctaaaaagactcagttacagtgtcaaccacacccacaggaagctgtggaactagaatggcccttcagagttggggtaatatttacaggcctttcaacccctacactaatccgtctttggatatgggctgccccaggaaggggtgttgcattggacaaagttgctttcagcagctgaggcaatctctaatgggggtgagagctgaagcagcataataagtccatcactgaagcataacctgggtgttgcatcccatgtccacaaacccactgtggattttcagcagagaattgacctcacttatgtttctaaaaaaatctctctgctgttttaaggacgggctataaaggagagagtgaggaagcagggaaactagttagagtattgcagtatcccatgtgtgagattatatctgagaggtaacaatggagatggtgagaggtatttacttcggggaaattggacggaacgaataaacttccccaattgacggaagtcggacaaaggacggagggcccaacagcggaaagggccgctagaaaagcagggagaggccaaaaggcggacaatggcacattgaggggacaaccgcaacgctggaacaggggaagcgcagaaccgggcacagc

SEQ ID NO: 211458 - DNA, 339 bp, Homo sapiens
acagccagctaattttgtatttttagtagaggcgaggtttttccatgttggtcaggctggtctcaaactcccaacctcaggttggcctcccaaagtgctgggattacaggcgtcagccaccgtgcccagcctattggatagtcttaatggaaaattagagctgtcaaaagaaagagtcagtgaacttcaaaatagatcaattgaaattattcaatctgtagaacagggagtgaaaggatttttaccgaatgaacagagcctcagtgacatgtaggacaatttcaaatgggttaacatacatgtggaacactagaaggataaaagagtgagaatgaagca

SEQ ID NO: 211459 - DNA, 251 bp, Homo sapiens
cctatggtcagtgagaagccagtgagagtttttaaaggagtaattatctgaacacaaccccaagctgtcctgccttcactgtgagttgatggactaaatgtcttcctattgtaatgcatccatttcataggcttggattgagctcttcctgcttatgagcacttccgaaggcaggcgccatcttggtgaacaccctgtatgttatgtgaggggccatgctcccaatagtgtgtgcatgtgtgccctctgct

SEQ ID NO: 211460 - DNA, 232 bp, Homo sapiens
acaaggtgtttactgacctcagaccatatcccaggaaatcctacttatataaaactcctgatatgaatttattttcttgtgttttgctttttctcttaaaagctgagtgtgtaggcagggcacggtagcccacgcctgtaatcccagcacgttgggaggccgaggcgggcagatcatgaggtcaggagattgagaccatcctggcaaacacagtgaaaccctgtctctactg

SEQ ID NO: 211461 - DNA, 346 bp, Homo sapiens
tctgtacctcatgaaaatatttttccaaaattaattcaatatatttttcaaataaaagagctaaggaaatgttatcaccagcagatctatagtagaaaaaatgtgaaaagaggctctttaggtaggagaaaaattataccagttccaaaaccatattgggacattctatatcatacattggaacattatacaaaaataataacgatgaattgtgagccttaggacatatatggatataaatgcatgacaaagagagggcagggataagtggaaatatactgttgcaaggttctgatgctatacttgaactaatgtaatattattttaaggtgaagcaaccactaaa

SEQ ID NO: 211462 - DNA, 421 bp, Homo sapiens
cagcatagtggagacggagatgtaagaattgaattggaaaaatacatcagggtttgctcaataagcattaaagccttagggaataatactccttagaaacaggggcatcgtctgggcgcaatggctcccacctgtaatcccagcacttcgggaggccgaggcaggcagatcatcaggttaggagatcaagatcttcctggccaacatggtgaaaccccgtctctactaaaaatacaaaaattactcaggtgtggcggcacatgcttgtagtcacagctacccgggaggttgaggcatgagaattgcttgaacccaggaggcggaggctgcagtgagctgagatcacgccattgcactgcagcctaggcaacagagtgagactccatctcagaaaaagaaagaaagaaagaaagaaagaaag

SEQ ID NO: 211463 - DNA, 695 bp, Homo sapiens
cctgtttgttgtggtgtggagccaggtggcatgtgtggcgatggagtcacggggcgggtgacagaatttatgccagattgtaaaattcctggtttaagtttcccctggaaaagtttcgtaaaggttaagaaacgtgtctgttgaggtcctttaaaagccggtgctctgctgggagtaacgagcaaacgtttgttttagcatctacggcttaagcttccatagagaagtcggtatctcaaagttgcttgaaacagaaaaggacaaagaggttggtggaatagggtaacggataaggttactcttaaggaggttttagagagctttccccagttttaggagatgattaatggtcatgaaagtgtgtaaaatatacatgctattgaagttgcaacgaaagacataattactgtgcccctttagtgttttcaaacattttccagatctcacatcctataattttagagttttatcatctgaggcagaaacaagacgactggaatctgatgaccaggcagacttttaaacaataggtttaccaaaaaactggaagccctactagtttctccaacctgttgttgctcagtaaagagtgcccgaggccgagcactcacgcctgtaatcccagcactttgggaggcccagtcgggcgggacactttaggtcgggtgtccgagaccagcctgaccaacatggcg

SEQ ID NO: 211464 - DNA, 573 bp, Homo sapiens
aactcgtcaaccactgatttgttaaatgatcgtcttaactgccatatataaaatagtggatgaaaagaattttaaaaagtagaaattttaagtatatagttagtctttgtataatttagcagcaaatatggatgtacaggtagaggtgatagaccctatttctacaattggtcataaggctctggctggtatttgcagtttaaagaaattataaactaaaagaacattctttccaagtttgtaacgaaaaattaagaagtcagttgacttttcttccaaagtattttcatgtcttccttgaaacgaacttgctttatcttagcatgtcttgagaagtactgttatttatatggtaaagccatcattttgtctggatttatagtgtgaagagtcactaatctttttactatcttaagaccaaatgaacacaacttcagttattgctctatgaaatctgtgatttcttctaggcatctactcagaaacaagggagaactgaccccacagttctagggcccataatacattcagccccccactcaacaaatatttcaaaaattttaaattttcaaa

SEQ ID NO: 211465 - DNA, 431 bp, Homo sapiens
ttaagatttgtcttcttgctgatttcacttcttgctgacttaaagaaactattacctcaatccagttttaaataaaggtcagattagaaaagcataaacttatttaaatgttattttacttcccccattattcccaactttgtagtgtatttaggttacaaaaaatttacaaagtcttccttggatctttacctacttaggtgtcccctcagctctcagcactatctaaataaaatagttcacttctctgacagtgtcaaatcttggttctcctcctctgtgtacatcactgcttggaaatttttacatgcttttcctacttgtcccagagtttctttctctccaccagccctatacttctgtccaaagtgtacaatacttttcaagtatttacctggatatttaggaaaaataaaaccatctctttaggt

SEQ ID NO: 211466 - DNA, 467 bp, Homo sapiens
gcttgtcatgtgcttttcattctgtattgtcggtcacatgctgggcacaaactccacacttggagaataaatagaatgtgagcacctcctgtttgagaaactggcttcacttgtttttttaaaaaacataaagaagagacttaaacacatggaaattgtaatgatgcagggatctgagaaaataatgtacgggccactaagaactcatagacagaagatgatgactgattttcaatgcgctgactcaccaggcctttacagactgtaaaagaatgaaaagatggaactcaactgaagtcttgctcaaaacagatgcagggggcctagacaatttcaatgaggcagagatctaatacacagtcattctgtcaggaaatgattaaagaattctggttaaaaatgcaacaaatgcttactgatttaattaaatctttgggtattttactttataacttttagcttccaat

SEQ ID NO: 211467 - DNA, 411 bp, Homo sapiens
agggtttaaaaacataggccccacccttaccactttgccatgtggtgagacacaagtcaaaaatgtactaattacaaatgaggaagggaacaaatgaggccaatagcaccttcttggcttacacaatttgagctagtctttaaatataggttgagaatctctaatctgaaaattccaaatccaaaacctgaaaccttattagcactgacatgatgctcgaaggaaacagtcactggagctcttggattttggatttctggattaggaatgctgaatcggtaagtgtaaggcaaatattccacaaatctgaaaaaagtccgaaatccaaaatacatttggtccctagcattgtggataggggatattccacccacgtcaatcgcctcatcgtatgattcccaaagagggact

SEQ ID NO: 211468 - DNA, 892 bp, Homo sapiens
gtatcagggttatttgtggacagtttagcaaagttctctgtacttcactatacttgcagatgttttataatatatgagagtatattttcctttggatgctggtctcaaatgatttttttgacttatcgagagagacaaaatagtttaaatgggccatcattttatgaatcagtcattagagaggtttgataatcttctttaatgttaaagtagttcaggctaatcttaatacatgtatttttattgctgaccagtcttgaatatatactggtttgatgattgatttgcccctctaaaaaaatttgaaacatatgacattggctgttttagataatactttgtgtcattaatcatttttgtccaattttacaaaatatatgtcaatcttgaacatatattactttataatatatgttactttataatatatgtccaggtgaactcttaacatatttttttcagtgaactctgttctcttgtgggttacagtttactttcattaaaaatggaataggatttcttatatatataaaatataaaaaatatgtggcaccaccattccctatttatattttagttgtgatttaaaaatgagatttgactaaagcatttagcatacatgatcatccataatatgtgccctactccttaattcttactggttaccttagaaattttaagtttgactgacttctttagaaaaatgtacgtaaatcacagatgccccaatgtggtattgaaagcaaattaaaaattttaaattagggccaggcacagtggctcatgcctgtaatcccaagtgctttgggaggcagaggtgggaggattgcttgaggccaggagtttgagaccagcctgagcaatatagtgagactcctccatctacaaaaat

SEQ ID NO: 211469 - DNA, 623 bp, Homo sapiens
ggcaggagaattgctcccgggtgggaggcggaggttgcaatgagccaagattgtgccattgcactccagcctgggtgacagagcaagactctgtctcaaaaaaaaaaaaaaaaaaaaaaaaaagaaagaaacctggtaggcactgctagagacaaaaacctaagagagaattccaacaggaaggggagatctggccgggcgtggtggctcaggctcactgctagtggaatcccagcactttgggaggctgaggaaagaaggtcacttgagtccaggagttcatgagcagcctgggcaatacagcgagaccccgtgtctacaaaagattaataaattaacaaataaaaaataaagagcaaggggaatccgaaaagcaggctcccaggaggcaccagctttagacgtgccttgtggcaagtggggagagctgatgaaggggagggtgcagctggggtgggactgtcccgggggtgctaacagccatgtaggagtgtgtgcccacgaaatagttgggaaagcctcgtgggaggcggggagagctgcgcaggagaactgggagggacagctgcgcaggagacatgggggtgagagctgagggggagagctggctggcagagctgggt

SEQ ID NO: 211470 - DNA, 575 bp, Homo sapiens
ggcaggagaattgctcccgggtgggaggcggaggttgcaatgagccaagattgtgccattgcactccagcctgggtgacagagcaagactctgtctcaaaaaaaaaaaaaaaaaaaaaaaaaagaaagaaacctggtaggcactgctagagacaaaaacctaagagagaattccaacaggaaggggagatctggccgggcgtggtggctcaggctcactgctagtggaatcccagcactttgggaggctgaggaaagaaggtcacttgagtccaggagttcatgagcagcctgggcaatacagcgagaccccgtgtctacaaaagattaataaattaacaaataaaaaataaagagcaaggggaatccgaaaagcaggctcccaggaggcaccagctttagacgtgccttgtggcaagtggggagagctgatgaaggggagggactgtcccgggggtgctaacagccatgtaggagtgtgtgcccacgaaatagttgggaaagcctcgtgggaggcgggggcagaagcaggaagcagccatttggcagaagcaggaagcaggcagaagcaggaag

SEQ ID NO: 211471 - DNA, 371 bp, Homo sapiens
ctcacccccgtaatcccgtcaatttgggagacctaggcgagcggttggcgcttgcctgtggtccaagctactcaggaggctgaggtgggaggatggcttgagcctggaggtcgaggctacagtgagccgggttcgtgacactacatgccagcgtgggcgacagagggagaccctgtctcaaaagagacttgacaactaaatgcaaagcatgatgtttggttggaaagagaattttgttagaaagcagctatgagggatactatgggaccatggggacaatcggagaatgtttcatgtgatcatacagtagaaaattgtgtggtctccatgttacatttcctgagtgtcatggtggcattaaggttttgtgg

SEQ ID NO: 211472 - DNA, 383 bp, Homo sapiens
caattaaagccgtcttccctggtaatgctcttcgtctcagtcagtcattggctttctgtgcggccagcagcaggacgtagaccaaacccttggtatttcggtaacaggcacacccccaggaagggaccccggacacggctaccacctctaggcttaaagcgaatgcacttcccgcatctccagtcttccgtgtagcagctttaacctatgtatgtctgtgccacatccagtcctcagacggctgagtgaccccaagaaaggcttccccgacacccagacagaggctgcagggctggggctgggtgagggtggcgggcctgcggggacattctactgtgctaaaaagccactgcagacatagcaataaaaacatgtcattttcc

SEQ ID NO: 211473 - DNA, 425 bp, Homo sapiens
ccttaggggtaagggatgaggagttagtatttataaagtaaaaattaaaggaagaggaagcaaattctcccctctatttccgtgcctcagagataagcttttgctatatcttcaactaggagatttttctggggaaaatctaaacttgtaacattattgattgaattttcccctattgatatacattggagatttccctgttgtttgttattacaaactgtgatacagtgggcatttgtgcacaaatattcttagacatttgctgcaacagttgtaggacagtccttgaagtagaatttctgaaacataatgcatgggtatgtgtattttatccagataatgataaattactctccgccaaagttgtcagattaacattttcaccactattatataaaggcacatttttctgtactctaacacta

SEQ ID NO: 211474 - DNA, 447 bp, Homo sapiens
accatgcccggcctgggtctcatgttttttacagtgcccaaatatagagtggcacatgcaatgcatatatcacaaacacagaaatgtgtttttggtttcatgaacgtaggtcaaggatccatttttctagcactgagttttaagggtaagagttgaatagtgactaatgatcatacttacctcctaaaaacaaaatgctgacgaacaagaaagggattgagcaaggggacctcttcaagtcagagcctgccatcagccccagctggacctgacaatagccttacacactgatgtccctcgaaagattaataaacaaagatattgggactaattcggcacgaggaacttctcactctttatccatgaaacgccgcatggcacagctgctaggggtcatggggtgacagttcatctcaccaaggagttccttccaagaagtgctgctgt

SEQ ID NO: 211475 - DNA, 92 bp, Homo sapiens
cacttccacagcttgagcacgaggagggcaattccactgaactgggccactaacttgggcagggctgcagttttgatggctctgggggctgt

SEQ ID NO: 211476 - DNA, 623 bp, Homo sapiens
actattgtttgccaaacaagagccatgttcccacctcaacattttccaggctaacggaatccttatcttcctcagagtcctgagcccttctagggggcgggcgctggcccctctttggccccaggatgtgaatctctgttgcttaagtcaaccacgatgctctcattcgccttcagcaatgaccctcttaggcctggtcataggatgcccagccagcccaggactcatgaggtggcctctgcaggaggacatgtggagaagggtctcctcaccaggaggaggaagcacgtggaggaagtggtttttttctgagacattatcttacctgcacacaatgcctgtaactatgtcctccctctatccaccaaagacggcagagaagaaagagggaaggaacctggatttaagctatgatgttactgagttagccagtcctggagttttctacctctgccccccttgttatgagacacaatgaatattcctactgttttagtcacttgcaggagggtgtcctgctgtacgtagctaaaaataccctatctaccagctgggtgtggtggtgcatgcctgtagttcgtttctcaggaggctgtggcaggaggatcacttgaacccaggag

SEQ ID NO: 211477 - DNA, 322 bp, Homo sapiens
cattaactacgataaaagctgtaaatgactcagcagtgggaactgacaggctactgtgctccagcgtgcaggatgtctgtgtgatgtgatgcatgtgtttgcaatacaaggcagcccacccccaaccttccgggcctgcagctgagatcaactgtgactaacctgattccaaaactagctgactcatttcattgcttcctgtttctcttattatactttgaagtgttttcagtgaagagcctagcactctgcccagtgtactgtaagtgcttggtaattattggttatatatatatacacacatatatatatacatttatta

SEQ ID NO: 211478 - DNA, 645 bp, Homo sapiens
taaatcttcacatcccctagctagataagtgccattattaccctcattttgcagataaggaaactaggcatggagagatgggcagtaaataaatatttgaggcatgaatgaatgagtgaatgagtgttaagagtcttatcatacttcaagttgcagaaataaaaacaataactgcaaccccttgagtaccaacaggaggctaagcacaggatgtgaattaggattctccttgaatcctcccgaatcctcccgatgaggcatatacgattcattccagtttaccagtaagggtaattgaagctggcacaggtcaggtcatttgccctgcaaactgagaggtcccagacttaaccccaggtgcgtctgactccatagctggcaatcctaatccttgaaagctctcctgcttccgtgcctatccaaaacaccaccgagaaggcaaaacccaaaacagcccaagcagcgaagcaggtatcacaacactcttagactcttgttttagatgcagttctaacaagctgctcagcttcatttctcaggcccagcagccggacaggaatggagtcagagcagcttctcttaataggaaggtaagcaaggggtgattaaagcgataatcaacgaagcctagaagcctgggtcact

SEQ ID NO: 211479 - DNA, 418 bp, Homo sapiens
cctcccagtggtcatcagtgtcctggtgtccctcctgcagccatgctgtcagacggcgggagcggccccaacttctttcacctgaagggatgggagagaataaaggagcaaagaggttgccagtgcagacactgagtcgccttctggcttctgcccccttttctctgggctcctgcttctgtgccctcctgtgttgagaaagtttgaggttttcccctgggtaaggaagaccagtgatgatgtcacagtcacatagatgtgcagctgtgaggggtgcatacacatctttacaagtcacctggccacaaagtccccagacccacagccatgcctctcctctcacttcaccagacaaaaccttaggctgatcccaataaaaatgagttgagaatttcagaaatatcaactcactcaatta

SEQ ID NO: 211480 - DNA, 264 bp, Homo sapiens
ttacttcttccgtgtcactgtagacattgatgactgtgtcctattagattttatcttctgagattacagatttgccttttgttttatctcctgtcaaggccacagtttttattctcctcatcttctagatttatttgcatcatcttgtaaacttaacaattactcctcaaaatctagtttgagttttctattctgcgtagttggtctgcccacagtgcttccttatatcacttcctgtgtcatggtatcattttgtgtctgtct

SEQ ID NO: 211481 - DNA, 241 bp, Homo sapiens
aaaccagtgataaatagaaaatctcaaaagcatccagagaaaaaagacatattatgtacagagaaacagaaataagaattatggcagacttcttgttggaacagtgtaagccagaagacagcggaatatcacttttcaaacacttttttaaaacaaaaactgtcaactagaatcctacatccagtgaaaacatcttccagaaatgaaggtgagttcttatgctcatcaagatgaagtaatc

SEQ ID NO: 211482 - DNA, 582 bp, Homo sapiens
ggcggttcaccaagagaaatgaacacagctgtctacacagaaactagcacaggaatgttcatggcagcaccagccaattcacagtagccaaaaaagggaaagagctcaaatgtccactatctgggaaatggaaaaataaagtgtctatctattcaacggaatgatattgggcaatagaaaggaataaagtactggtgcccactccaacatgggtgaagcctgggaagagtgtacttagcgggaacagccaggcaccaagccgcacgggttaagattctactcatatgaccgtccaggagaggcagaccctagagacaggaagtagatgagtggtttcctaggctggggggtgagagaggtgggaactgagtgcagacaggtctggagctgcttttgggtgattaaaatctttaaaacccaccgatggtacacaactctgtgaatatcctaaaaaccattgaattgtacactttaaatgggcaaatcatatggaatgtgaattatatctccaaaaagctgttattcttaaaatgaacagctgctagataatacgttcctttcctaaaacccactctttcatcc

SEQ ID NO: 211483 - DNA, 618 bp, Homo sapiens
tcacttctattcctgtgtctgcatttatactcccaagccttccacccaccctccaccttctcagttgtcatttcccaggcctgagagtctgtgcctgggggttgtgctatccatggatgttcatctacactgggtcagaactcaccaccacagcacgctctgtttactgataagaccattcctctgcatggcatatgaggtatctatgtcactctgaggcctcaaaaatgctaaacattcttttcttcccctataatatgacttcctcttcgcacttacaccttcaagtaagtagtttaaggaggagataaaaattttactgttaaaaaaaggagattgctgggtgcagtggctcacgcctgtaatcccagcactttgggaggccgaggcgggtagatcacctcacgttgggagttcaagaccagcctgaccaacatggagaaaccccatctctactaaaaatacaaaaaaaaaaaaaattagccaagcatggtggcacacgtctgtaatcccagctactcgggacactgaggcaggagaaatgcttgaacccgggaggcggaggttgcgatgagccaagatcatgacattgcactccagcctgggcaacaagagtga

SEQ ID NO: 211484 - DNA, 900 bp, Homo sapiens
atttaggattatataaaacacacatatacacatacacacacatatataaatacatctagtaaaaattaacctatttataggtatagctatagagaaagctaatccaatttatggtcttgagactctatgaccaacataatagtgtttgcacagaaataacagataatctgagctgtaacttatttatctttataacaacaattaaataatatttgatggaaatctttacaataaatatataatgcagactgtgacaaatactagtgttgacaactgaataatcacctataaaacctttcccaggccatgtatttttttaaagttttaaaacattttaaaatttacatatagtaaaattcacattctgacttacaattgtataaatcttgacaaatgcatacagtcataaaaccactaccccagtaaaaatataggacagctccatcatcctgaaaagctctctcatgtggctactttctagttaaatcctccctcaggtgttaacccttgaaaaccactgatctgtttgcctacagtaacgaagcatctgttaaaatatttaggttgcttttcttaattacaatatttgtttctcattgttaagttttaaaagtattttttcccagtctatggttttcccagtctgaaggaatgtggcattctctcaacagtctttcacagaaaaaatgtttttaattattttttcttttatggatcagacttttggtactgtatttaataactctttgcccaaaacaagcaaggtcaccaagatttttctcctatgttttctcctagaagttttatggtgttacattttgtatttaagtctatggtcaatttggagttaagttttgtatatggtccgcagtgcaggtcaagttccgatttttgcacatg

SEQ ID NO: 211485 - DNA, 427 bp, Homo sapiens
tcctgtgacctgcctactataaccctggcaaggctgagacagtccaagtttggggcagtcaaggtgggacagcagaagatttcagggtacaagtcatctattctcttatgccagctctcagatttgtatataaaatctgattctacacttcttttaacaaataataaataaataaataggaccatccaacccctctagagctctctaaggagactgtagaagacttgtggccactctcattttaaagattctaataatctccacaaagtaatcctgggaaacatacatctgtaagaccagggaaacatactggcaatagcaacttcccagaacattcctttttacactgcctgggatttttcaataagaaatttggcatttctgtaaatttaaagtgtattcagtaaaattaatgcgtttttttctt

SEQ ID NO: 211486 - DNA, 496 bp, Homo sapiens
atccaagtatcaaactagagatcatttacaatacttcattttatccaactgtaattttagaaaaactctgaattttgtattttctagcttgagaaatgttgataatttctgcattaaaatagtttcataaaaaggaaagcacgctatttcagagagccaaatattttatcacacaacacaatataagcacatgtcttactattggattttcatcttattatacaaaagactcaaacatttatagcccctgacacgttctcttcccaaaagaatctctttcacccagtgtgcctactgcttaccaagctccagataactcaagttcctcagagctatgaaaagcaagaagaggttcaggaagaaaggataagggataatagtggccctgtaccacagctatacaaatttaaaaggcatatatttaaattatttgaccccacagttccattactaaaaatatttacaaaaatatgtaagatatttttatgtacaaaga

SEQ ID NO: 211487 - DNA, 655 bp, Homo sapiens
gtttatagcccaggagctattttttaaagatctgtaggcttactagccatgacaatgatgacaataatgatgatgaaaatgacatcatcattaccaatagctactgccatctattgatcccataacatgtgatcatatctctgtcctcagaacaatccatttcacagatgaagaaacagactcagtgagcacgtgatcacttctcacaactaatggagccaagattctgtccttatggctccagagacctcttttttttcccactgtaccacaacactcaccaggactggagtgccacctatgacctcattgcataatggatggcttgtcctcaaatgggcccgggtatgtgtacatgtatacttatgtctataggggagaggggaaattgacccactttcctccactctaactccagatctcagctgccgagtggaaactccattctcacaccatagctatgggactgggggaaaggggaggaaataactaaagagtaaggaattgggggaggctttgaggtttggatgtgacaggtagtttgcatgtagttggaatgcagtaacattggtccacaaggtttgtcagaaaccctggttattttggaaggttccaaagttttgtcctcttcagatatcatgaaaacaggaaattc

SEQ ID NO: 211488 - DNA, 400 bp, Homo sapiens
gcttcatcctcgttgtcttcacgttgagtaggctaaggaagaagaggaggaggaagaggagaggttggtcttgctgtctcaggggtggcagtggcagaagaaaattcatgtattacgtggacccatgcagttcaaatccgtgtcgctcaaaggtcagttgtacgtatctcacagggctgtgggaacagttatataagacagtgtacataaagcttcaagcaaggtacttttgcataatgcctgccagagaagtgccaaccaaattacctgtagggagaaaatagcagagatcacaacctccgacagtttggttgggcatgcctagtgtttttcatttaactaatgctgaatgtcattcgacagggtcctctctccagcatattgaattcctaacactgcc

SEQ ID NO: 211489 - DNA, 457 bp, Homo sapiens
gcttgaacccgggaggcagaggttgcaatgagccgagatcacgccatcacactctagcctgggggacaagagtgagacttcatctaaaaaaaaaaagaaaagaatatgtataccccctttttcatgtggcagatgtttagctatttggggagaactttcatggctcttccctaatcatcaagtattcaaggtaaagattctcggttcctgtaatggttcctcaccaggcataatttgtccttttaccatcctactttctgtcttctgaaaaacattctttatctgaaatacagcaattaatattaagatatcttaatatgaagtgcctggagtcaaatataacattccaaagtagtctgactggaagactaggcacctgcctttcttcaacaatgcacttctgttaatgcagtgtaaggtaacatgagttgtttttggaactacatcataatggggg

SEQ ID NO: 211490 - DNA, 465 bp, Homo sapiens
acatttgacgcactctgatgttttctttttctgatttaatttctttttatgctgctctaaattgatttcacaaccattagccacaattgtaaaaaacaccataatatagcacactgcacaaagtaggtatactgttgtacacatttaattaaattgactcggctttttccaaaatcattatagaaatattactgatttgtgaatatataaaatatatccattttgatatatttatttagattttaactttaccaaaaaaatattttataacctcaaagtattgctgctttggttttaattttacatgatctgaaaaagcaaatgcagttcatttttatgtatttttaaagtaagaagatgaagatatttagctgtacgataattatcactgtaatgacaaaactcctgagattaatgtatttgacataccataaaattgctgtttattgaatgctgagtatgttc

SEQ ID NO: 211491 - DNA, 666 bp, Homo sapiens
tcacagcagtttgccattcattgactgcagaggattaggtggaatgagactaattcttttttttttaagagccagtcttttagatatttagtgttttcttgggtctgcttttttctcagttagactttctgtaataggattgtgtattacagctcccagtcccttctatttctatcacaaataagatctcattgggtgtgtaaatttaggccaaataaatcaagtggtaaactttgatgcaggaccacctattgattcttcattccatcctgagaagcaactccctcaccctccaggctaaaatcaaggatcaagaaagcctggctttccacagccacaggatcaggaaagatggaggaaacaccttagatttgtcacctgggtattggtaccagttctattggccacagcctagagagaaagtctggactgcaagtgaaattgagggcttgaagggaggaaaaatggagaaataattataagtcattctcttcatggaactgatgaagtccagtgtgaaggactctctaactccttaggtacttttttgaggaaagatgtaatgaaagccaggaactgtaggaaatattttaacacatgtaacctcattcaattctgtcacaactctatgatgtgagcatttgcaatgaaaaagatgtgggcttg

SEQ ID NO: 211492 - DNA, 666 bp, Homo sapiens
taggcagagaaaggttataggtgtgtaaatcatatgctgtaggaattacaaagtgctgtcactaacatctcaaaagaaaatgtcaaagtaagacaccaaagaaacttgcaaacaaaaaacagaatattgctttgacgttataaccaagttttgcctggctatagtatgtctattataattctggcataaaatatacgtgggtcaaatcagtgtttctgatgtcattgtgtgatatcttaggtttttgttttgtctttttggtttttatttttgctttttagtatctaatcttcaagcccttctaattatatagaagtcagataaaaattcagattggtgaagttctctctggtgaagacagtgtgatgactcacatttaattgggccctcactgttttcaggtattctgctagatacttacttcatcttcacagcaatcttgggagccgcttagctattgccagttactagatgagaaagctgagatgcaaagagattaaaaaattggccgagctgacacagataataagtagcagacctggaattcaaacctaggtctctctgaccacagtatctgtccttctcccactacaccattttgtcatttccaagcattctgtgtcacttcttcctaaaggggtactcactaattgaattttggggtcc

SEQ ID NO: 211493 - DNA, 374 bp, Homo sapiens
cattattctattccaagccttcctttgctaaaggtagtttccttggctatagaattgtaggttgactgtttttttctttagcactttaaagatgttgcttctagcttgcattatttctaatgagaaatctgctgtcatctttatctttgttcttatctatgggatgttatttcccatctgttggcttttaaatttttcctttatctcttactttaaaacaatttgattgtgaaatgctttgatggtgttttcttaatgtttcctgtgtttaaggttcattgagcatcttggatctgtaggtttatagttgtcattatatttgatatttattcagcatgattttcttaaaatatatttgtcacttccccccacct

SEQ ID NO: 211494 - DNA, 431 bp, Homo sapiens
cttttttcataccaaatatgccaccttttttgttttaaacttaattcctagctgttgtgtttgccagtcagtggtaagtaaagctgttagtcacacctaggttcagctgattgaaagcacatactctgttacaccatgatgccttctttcaagaggagctggttagggaagatcatgacttatatttgtggacataagagggtggcatttagaaattcaggtctttggctcaggagagaatttgagattacaaagagtgctgtcatctacagcgatatgaggaaatcagtcttttacaaattagattcgacttcccttcttgggagtgcatacactaattatgtattataacagtagcttatgtcttggttccatagtatactggcatttaaaaaccatttgttttattatcaccttattttaaatacaga

SEQ ID NO: 211495 - DNA, 415 bp, Homo sapiens
aaataggaatttcagactacacatttatagtaacatggtataaaatgtgcttgactaaacgaaaactatgtctaaatttaagtccacactctttaataacaatttttattaaaagaaaatatggctgtgtttatattgttagcccttctgctttctgagacagctgatgaaagtttgatctggaaagagaccccataacaatgttctaattctgtatgctttttctggacattagcaactttcatgtctcggggtccaacttgagaacagaaaatgcctctatgattcatcatcaaatgtagttaacacttgcttggaattttcaagaaactagctttaaaaaaggtacaagttgggggctgggcgcagtggctcacgcctataatcctagcactttgagaggccgaggcgggca

SEQ ID NO: 211496 - DNA, 502 bp, Homo sapiens
gatttttggtgaaaagggaatttgatagttaataggatttgtaagttcagaggtagggcaggcttcaggcagagttggatccaggggcttgtagctaggtctccctctatccctttgttctatttttctctgccttggtttttctcagggtgactttatctacatagaggaagtttcaggcttgcatcctgtcctcaccaaccccagtagaaagaggattttttccttttgctaattcactaatattgcctctgattgaattgcctgtggtaactcctcctgaaaccagtcactgcggttatgggaggggagtgagggaggctggtacttttttgttaactttaagccctgtgcctatttctggtcacaggatgatggagagttgcttaaaacacgctgggtgagattgggtgactgggatggccaccaaaggcaaatggcatggtttcccaaaaggaagagattagaagttgatctggattatggagaattcataactgtc

SEQ ID NO: 211497 - DNA, 777 bp, Homo sapiens
acatcatttacatagggttcatttgtatataataaaaatttcatcataatgaaaaattttctggaaagtatatgttagtttgtttaacatatgctttggatatacggctaaataggaatagctaaaattttattcttcaaatattccctttaacaattaaaaaaaacctcattcctaaatatttgtctgtctttccatttgcttttttgtttgtaataatcatatgtaattgaactatgcaaagattggatctttttatagttcagaatatatttgtatacatcaataaatttgttcattgcatagcaaacatgtaaactcacataggatctataaattttaccctagtaatctaaaaaagttgctgaaattttacacaatagtttattctaaggtttattttgttgtaatttgggttcactttgttttttatttttaatacatgtggcaattgaatacaacaaatgaaaataagtcatgaaaaggtaaaaaccaagtaagtaattttatcctagattaccagaatttaatctcactatgctgtttgtattttttcattagtataacaagttgtaaatgtactgtgctgcctctttaagtgttcaaaattaatttcaacagcatgtgtttaacataaagttaactatgtttgcatcaaataaatgtttattaatgaaagctatttatcatacaagaaacagcaaagataagtcatcatacagaggtgtacactagaggtgacatatgtaaaagtgcatgcagagatttctgtttaaa

SEQ ID NO: 211498 - DNA, 618 bp, Homo sapiens
tcattactcctcagacacttgggacattcatggtgacctattggcacccaaggaagagaacctgattttaatttggactgataagcgagttttctgaacaggtttatagggattagtttagtctggacagagtgagccggaatcaaaagatactgttaataccagaggactagaagatcccatgtggagatgtcaggtggcttagccattgagaaagaatgacagtagatctgaaatggtccagagcccagatattcaacaaaggctaagagccaaggtgagaggataaagggaaggtgtgaacgaacgggtgaagccccactgtgtgcttggccagccccacagagctctctgctggtgcttgggggtatgaattctacttctgacatgtcaatttatgtcaccatctcctgtgcctgggtctaaagtcttgacttgtaaaagaaaaaaaaaccaactggggattccaacagacactaccttgatggtaggtaagcggggctgggtaacaagtgagatctctgattccttccttccttccttctctctccccttttcttttcttttcttttttccttccttccctctctccctttcctttccttccttcctccccct

SEQ ID NO: 211499 - DNA, 522 bp, Homo sapiens
cattgggatacatattcaggcacttggacaataccaccagagatacaagcacaattaggttgtcaaggtcagataatgcaacaataaggacaacctttagagttagagtggaaagtgagatatgttggaaataattctcttaagaatataacctcaagattcatttagaagtcctagcctgggctttgcaccctagcgtctgttcaccatattcacacaaataacaaggtgttatttgagaaaccaactaaaatacgaccatcattggatagaacctatgttcaactatattccttctaaatttctgcattgaagtgatttcatatactacatctcactttatatgtaaaaaaatgtgttttcctacaatgagatagtataatcctaacagtcaatatcaatctaagtatttatttatgaaaatgcattttttaggccaggtgtggtggctcacgcttgtaatcccagcactttggggggccgaagcaggtggatcacctgtggtcgggagttcgagaccag

SEQ ID NO: 211500 - DNA, 569 bp, Homo sapiens
acttgcacatggaggaaagaccaggtgagaacagtgagaaggcagccatctgcaagccaagaagaaagggctcagaagaaaccaaccttgccagcaccttggtctcagacttctagcctccagaaccgtgagagatttctgtggcttaagccacccagtctatagtattttgttatggtagccctagcaaactaatacgacacatacaattaatgattggtctgctttctttagtttctttaggtttctctggacagcagcttatacattgaagctgactcttcacaatgtggtaatgaacccttggttgcagtgaccttacaatgtcaagggagctcagatactacctcatgcatcagccagtatcaccttttgcagcaaacttttgtttgattgtcttgctgaagtaagtaaattatagtgaatatagtcaagtagcttgataaatgcaattctacagtatctcagatcatcatagtgaatattatggatatcgtaaaacatagaaggcatagaggatttagattaagagtatttgaaatttcttcaaaataaaaacccttatcata

SEQ ID NO: 211501 - DNA, 297 bp, Homo sapiens
gggtatcacaaggtcacctccctcaagggatccttttggggattaaataagagaatgcgcgtagtaggtactccaagagggtggaccctacggtccaccatttcgtactgcagatctttgggaccaaaaatgagtgcagttctgaatttgggaatgttcgaaaaataccacagtgtcctaagcactttgtgctgtcagctgtcactcccagcgggtctggggctgccaccctactccagacagtccagtgcatgtctgttagtgcgtgcaataaataaaggctagaagtagtcttcc

SEQ ID NO: 211502 - DNA, 382 bp, Homo sapiens
ccctcttctcccctgacaagagcaggaagcagtactatcgctatggattgtaggacatagatgttttatatttttgccatgtgtagaatggttttaatttgcctgtcccgagttacttttctcttgtctgagaaatttagtgggggtagtaaggctggctgtgcttttcctgtcttgagctgcaaatgtctgttactttcttgcacttgaaaataaatgtcggtatttgataaagtaagtgcattttgtgggagactgagctgtcagttttttttttctttgactagcttatgtggggtggtgatgggggacgattttgtaaaatggtgaaatgagcagtgactgtggaagtttgtgtttaaagctctgtgatgatgaaaag

SEQ ID NO: 211503 - DNA, 782 bp, Homo sapiens
ccctattattaaaacccgggaaattttaaacaggccttaaaagagaatttttaagccctttaaaatgtcccacacatttatccttaattttttccgggcacccaatcacatgtgttaaccctatagtccttttaattaaggaaaattggcaattttcttttttttttttttttttttaagtgagagggtagtgagccttactttctgccctttttccaacttgttgattacggctttttttgtatttgcgggtgggttgtgtgtgtttttgggttgagtgtattaagtgttgggtgaaaagccttgtgttcgctaaatgatttatgggagggaatttttccaggttttcattttatttcaaacggacactggatttatttgacacttgtgtctattggcttattggtattggctggggaagagaggaagcagtactatcgctatggattgtaggacatagatgttttatatttttgccatgtgtagaatggttttaatttgcctgtcccgagttacttttctcttgtctgagaaatttagtgggggtagtaaggctggctgtgcttttcctgtcttgagctgcaaatgtctgttactttcttgcacttgaaaataaatgtcggtatttgataaagtaagtgcattttgtgggagactgagctgtcagttttttttttctttgactagcttatgtggggtggtgatgggggacgattttgtaaaatggtgaaatgagcagtgactgtggaagtttgtgtttaaagctctgtgatgatgaaaag

SEQ ID NO: 211504 - DNA, 1230 bp, Homo sapiens
caaacaagaattctgcccttcttcagtgcctgagtgtgatattttgcctcaacatccctcttagatgaagttactgattgaaaatcatttaagtttttgccccgtgataaaagatcgcgtcctcagaaagatctccaaagcatttactgtttgtttggtttggttttggtaagtttaccatgattttgcttgaattgctctccgctgatcttctcagctaagatcgaggtagagttgcacagcagaagagggctgcatgtaaggaggcagctctgtctcggaggacaaaaggcctgggagcatccagacaggcagtcactgtgtggaggtcactcccctcccagtggccactgtggaggcatttcatagaaatgctcgctggaccattcagttttagagttgggacaaaaccgagaactcatgaggatatcggataggagttaggaaatgactttttcacacaacccaggcaaggaggggagaaccctgggcttgagacttgcaatccactgcctgcccctgcagtgtggcccgttacgttttctgcaactctgccttcttgagtccaaatgtctttgaaaggggcaaatgcttcttaagtgccaacagggtgtgtttcagtgaatgttcacagtgtgcactggtccggctgaaggcctcttcccttccccaacacccacccatcagtgcaaaagactgctgcccagcagggagtgacatctgtgtctcagattttcttgctgtgctctgagtactcactcctcatctcctttgaccagtttcctaacactccccttgttcacaacacagaacatgagtgctctttcctgtcattttgacgctgataaacagcaattctgtgtgaaaatgagaatgaagatttttttaaagacaggctacaataattcccatgctgagaaccacatgtgatgacacttgtgatgaagatgaggacagcaacgagctgagagactccaaccaggattcacacatgcaaggggatgcatgagaatggggatgggacattggtggttagcatccttgcttgtctcagaatggacgtgggttgtggatttctaactcctggagaaaccagagttctaggaattgtaagccactttatgttaggaaagaaaaagacggtgttctgctctcctgtcccttaaaactgtgcgtactgccactaaacctggaagctgagaacggtataatggctactcctgacttcct

SEQ ID NO: 211505 - DNA, 485 bp, Homo sapiens
agaaaaagttatttgctctgctgtttacatttgtactggaaaggagccatctgtggaaatctcatattcctcccttgaaaataatttgtaattctcctcgcctaaaggacagaggaaaaataagaaaaccagtgactatattactttttagatgttatctttacatatttttcagtaggtaactatgagtataaaaatttcaaaaatataccagccttgtgaagctcagaacttttacaaaaataaggaaattatgttaggaagagtcagagtgatcgttttatttattctattcctccttgttatatctcccatgttaaaatcgggacattattcactaaggattttaatctaacatttcaaaggttttgttcagttatagtggttcttgatcttctgtggtttgtgattgaaaaactaaaatgtagatatgaaatggcattcatacataaataagtgtacatacatgtacatgcattctttca

SEQ ID NO: 211506 - DNA, 770 bp, Homo sapiens
tctttatcttgctctaccttctctggaatacctacatctctgatgtttttttaacattacatattcacaagctttaccaattcatggaaaggattcctctaggattttggtggatctcttgaagcactaagaacctcaagcaaaaatgtatgcaatctttgtactttaaaattaaagcatttcaaccaggagcagtggctcatgcctgtagtcccagcgctttgggaggccaaggcaggatgattgcttgagccttggagtttgagactagtctggccaacatagccagaccccgtttctttaaaagaaaaaaaaaaacaattagctgcatgtggtggcacacatgtagtatcagctttgggaggcccagatgggaagattgcttgatctcaggaggttgaggctgcaatgagctatgatcatgccactgcactccagcctgggtgatagagcaagaccctgtctcaaaaaaaaatttttttaatagataaacattcaggcattccaaactcctaatgtattgtctactattaagaatgcatgctggctgaggcaggagttcaagaccagcctggccaacgtgatgaaaccccatatctactaaaatacaaaaattagctgggccaggtggtgggtacctgtaatcccagctactcaggaggctgaggcaggagaatgtcttgaacccgggaggcagagattgcagtgagccgagatctcgccactgcattccagcctgggcaacagagtaagactccatctccaaaaaa

SEQ ID NO: 211507 - DNA, 373 bp, Homo sapiens
atcctgtgcttttatattcttagtgctagtgtatgacatgagccagtaacagggcttctggcccatagatcccttctgataacagctccttttgtttccattctcttccctactaatattggtgctctgactgacaagacaaaggactgtatcctgttgagaagatctaaaatctgagtaactcccactaaaatctgtatcctgtaaagaaataacacactttctaaaagtgctcttgggacatttaaaaattgaaagacaataaccgcccccccaacacatatactcttaacattctgtttttgatgccataaaatgaaaagaatcagaaaacaaaactaagactcacaccaaaaaattatcattatctaga

SEQ ID NO: 211508 - DNA, 360 bp, Homo sapiens
aaactgaatacgttatggaatggcaactgccaagatcatttgagagcacttctacaattgttagttactccacaactcagcaattctgctcttagacatatgccctagataaatgttttccatgtacacaaggagacatgtacgagaatttttacagaagcaggctgtaatagaaaaaactagaaattatctaaatgtctatcactagaacagaaatgatacaggccaggctcagtggcttatgcctctaatcccagcactttggggggctgaggtgggcagaacacctgaggtcaggagtttgagaccagcctggccaacatggtgaaaccctgtgtgtactaaaaatacaaacgttag

SEQ ID NO: 211509 - DNA, 409 bp, Homo sapiens
tcggctcactgcaacctccacctcctgggttcaagcgattctcctgcctcagcctcccaagtagctgggattacagtcacctgccactatgcccagctaattttttgtattttaatagagacggggtttcaccatgttggccaggctggactcgaacccttgaccttgtgatctgcccaccttggcctcccaaagtgctgggattataagcatgagccaccgtgcccagctgtatttctttttatgcagtatatgtttatccatgctttatacataaaaatagtaagttttgttttgtctatcaataaccaattttcacccccttggtggcaatactgcccccactgagaatacaaatcttttttttgctttttttttagacggagtcttgctctgttgcccaggctgg

SEQ ID NO: 211510 - DNA, 266 bp, Homo sapiens
catatattatattacataaaggtgttattatttagcatgcttttactgtaatgaacagttagctaaatgcaaaataaaattcttctctgaagtaaacaataataataataatcaaaaggaatataagactctccatagaaataaaagaaggtaaagttgtattttttcaaaatcatatttaaatcttttatttagcaaaataaaatagactgcttatataactatctagaacatctcccaaagccccagaataggaattaaatagt

SEQ ID NO: 211511 - DNA, 549 bp, Homo sapiens
ccaaagaattgatctgcctagacccactaacgctggtaccagataagctgtcctggggcccaaggacagcttatgctggcaccagtgcctccaaggggccctgaggaccagcccacctggcattccagtcttcaacaaaacgtcactactgcctccactaacaatgacatcctaacccattagggaaataacagacccactcacagatgagtaaattatgtagagactacactactgcatgcacccagaatcaaagccaaagtgcctcacccaaccaatactatagatacatcttcaggaaaaaagtcctcccctatgaaagcaaatgttaaaatttggaagaagtaattgttacaccagatgcacagatatcaacataaagacacaagaagcatgaaaaagcaaggaaatatgatacctccaaagaaacacagtagttctgcagcaacaatttccaatgaaaaggaaattaataaaattctggaaaaataattaaaaataatattaaaggagctcagtgagatatgggagaatacagaaaaataatac

SEQ ID NO: 211512 - DNA, 435 bp, Homo sapiens
ggatcttgggccagccaagaaaagtgtgtctgtttaatagtctaaaaataaattttcaagttccctttagaacttctgcatttctcatacttagtttttaacttttacttccaaatggtctactgaaggaaaagaaaagtcttgattgcttcgacttttctcaaaaaaattatgaaacttttaaccttggaactcactgatttagaatatttattaagatttctaaaaataataaaaaatttgattatgtaccaatagagcctcacagttgaaatctttaaaaattaagaatgttaactatcacagatgttttctgccaattacagtaaggatatgtattctctattgtcaactacaaagataacctagagaattaatgttttatatttatatatgtacatctgcatgtctgggtgtgtgggtgaaaggagagag

SEQ ID NO: 211513 - DNA, 417 bp, Homo sapiens
tgcaacctctgcctcccgggttgaagcgattcttctgcctcagccttctgagtagctaggactataggcacatgccaccacgcctggctaatttttgtatttttagtagacacagggttttgccatattggctcggctggtctcgaactcctgacctcaggtgatccacctgccttggcctcccaaggtgctgggattacaggtgtgagccactgtgcccagctgactccagttatttctaaaggtcaggccatcttacaaaagaatgaggatatgcttccttggagggatatgctgcagactagggctttttaccagccagagcattttaaaaacaagtgtctgatctcctctggggtgtctgctttggataagtgcagtctgtcttcagtcttgctaagtggtgagacagtgagg

SEQ ID NO: 211514 - DNA, 421 bp, Homo sapiens
ctgccactagcattttagttctttctttcttctttcatgtatgtttaatttttgaaaataattggagatttatggtagtatcagtggtattttttccattttttttctcttgaactatgttttctttgctccaaaaagcaaatggcagtcttcaaaggacgatttgtttctatttgtataaattgagtataagctgcatccaattcctagtgcatgcataaaactctttttgaggaaatgtgaccaatatataacattttattgaatgtttcttgaaattggtgtcaaactgttttttatttcatttcttttgggatgcctaattgaattgaaacttcattatttcattccatggcttaggccacctttagagggaatataccatgtgagctcctacttacccattaagaccagatatcca

SEQ ID NO: 211515 - DNA, 308 bp, Homo sapiens
tgtgctctgcatcttggcattgttgaaattggggaaatggccacaattcagatcactgatccaatgtgtaattcctaatttcttcctttggggcaattttagctacatctcatagcagagacttatatgggtcctgagattaataaaatattttagtgctatgtatacataatcctttttcctctaggaaacacagatacccccagagtgactggattataaagtttcaataataattggtaggctttagtaaagactatttctcacctccaaaaatcaggccctgttttacacaaaagctagataaa

SEQ ID NO: 211516 - DNA, 581 bp, Homo sapiens
attcatcaggtgtttattgagtgcttgctgtatgccagacctggtgccagggatcctttgaataagaaagacacggtccccgatctcgtgctcacattctgtttgtgcactcgtgggcccacatggtgatgcgtgcagttaaacaggaagctggcggaatgagtgcctgcgtggggacggaacagttccgcgtctcgagtacagtggtggggagatgtgtctgtgtgtgtgataaagcttcacagtttgtgtgtaactacacatgacatgtaagaatgttggtgtgtgtagaagatgatgcagcgtgctgaaggcctgcagtccaggtcatagcagtgtgcctgggttagtgtcctggttttgctcatgtccttagttactctgatgtgcccttgggggatggaggaggtagggtacacaggatctctctgtactgtttttgcaacttcttgggagtcttttattattttataatacaaagtgaaacaaagccagaggagctgtttgcaggtgatggcgtgtgtgtgtgtgtgtgtgtgtgtgtacgcacgcacacgtgtgcgggcgtgctggggaaggct

SEQ ID NO: 211517 - DNA, 443 bp, Homo sapiens
caaagaaggttctgtgtgtacatccacttagaccttcacacctacaagtaaaacaaggcaaatacacgctcaaggaacacacagtcaaagaataaacaggtaggtaagggagcctggctctgtgggtagacaagtgggaaaaaataaataggtggaagcagagagcagagacgccatcaaagaaggatggtaggagaggccatggaagtcagtggctgaaacccacaaaacataacagctgtcagaattaccaggttctctgtcaggtttcaccagcagaaggaacatactggttactgaactactttggcaagcaacaggaaatgggtcagtttcatcagctttgctttaggaagcaatcatatgtatgagaccaaggttgaggaggaaaaggagagcagaggatgcagaaatgcaaccaccagccatataaacaggaaaca

SEQ ID NO: 211518 - DNA, 644 bp, Homo sapiens
cttcccaaggaatgagtatcagtataaaagtagacttgtaagatgaatacagcgcagagatctttcagagcaactagtctagtctcaccaaaattgaaacctagaaattcagagcaagtaccagtagcagtaaattttcttgcacatgtccaaaattaagtaaaattttaaaacttgaagatatgttttattattttcccccaaatggcctatgatagtcccaatcgaatattagaagagaaagttatgtccaaaatgaaaacatttccatactctggtaaaacgatgttcacaccaggcaaaatgcaaatatgaaagggcactgcgcctggcagtcacgtaaatgtttattttgggtctccttgacttcttggtgacacaaatgccttgtctgttcatgctcagatatgcgtgatttcagtggtttaactttagtctcctgtggaacatttgccattgtatttggttttcaccaagtaaataaaatgctgtgaaatcaaatatttcccttagattgcaggtactttgcacttctcctctgctttccaaactttctatttatacagctaaatataagtttataattagaaaataaaattctgtactaacaaagaataaaataatctgcagatgctattcttcat

SEQ ID NO: 211519 - DNA, 359 bp, Homo sapiens
tgcagtaccataaaccttgaataacaccataagacctacaggaagtgccaccagagatcctggaagtgttctgaataagcagaaaaaaatcatgacattacaagtaaaagttgaattacttgagacataccatggattgaggtctgcagctatggttgtctaccatttcagacaattaatcttggaaacagataacataaacttgtggtatcaataaatacagtacaatactggaaatgtattttcccttatgattttttttcctctttttgagacagagtttcacttttattgcccaggctggagtgcaatggtgcgatctcagctcaccacaaacctcgccttctgggttcaagtga

SEQ ID NO: 211520 - DNA, 404 bp, Homo sapiens
tcatttggaccaatttgggaatgatgtatgagtgttggtgaacattagtcaaagaggggaccacttgggggaaagggatgtgccgatgccgcaggccactcgggggaggcagctggggtgtcgtctcagcagcctgcactaatggcggggaaaggcagcaatgaccaaacgatgtactgcctgctgtcggggagcagcgctgtgtaaataaaccaataaggaaaacatacgaagcagaaaggagaggagttgtttttcctaaatgctattgacagcccaaaacataaaggaaatttgaggttccctttctctatttctaaaccctgaaacccgtatgggctctgctaagccttgtaacaggaggcctagaaaaagctcttgccagaaagcttaatgatgatttg

SEQ ID NO: 211521 - DNA, 260 bp, Homo sapiens
ctgagaacatacgcggcatgaagacactctcagccctcaagggcacccagtcagcgctgtttaaggacggtttttctgttcacagcatacttcatgattacagcttcactccattggatacaactatgtgagtatgtgtgtatgagtgtgtgagtgtgtgtatgagggtgtgtgtgtgggggggtaggggagtgccatatcccccagcagcacattaagaaataatccaattacaatttaaataaccattgtttcaacac

SEQ ID NO: 211522 - DNA, 520 bp, Homo sapiens
cttatctgaagggaaatatttaatattgggtatgttagttcctcatgtatctttaataatttttgtcaacagcgaatctttaaataaaatataaaggatcaggcctctgctctcctgcatatatttgtaaagtcacttactgctttttgtcacagtttcaatttctgtaaaatagtgagagggtttttacctgacaggatttgtgcatgtacgtttactttgaaaattaaaaagcattaggccaggcgcggtggctcacgcctgtaatcccagcactttgggaggccgaggcgggcagatcatgaggtcaggagattgagaccatcctggctaacacggtgaaaccctgtctctactaaaaatacagaaaattagccgggcatggtggctggtgcctgtagtcccagctactcgggagcctgaggcaggagaatggtgtgaacctgggaggcggagcttgcagtgagccgaggttgcaccactgcactccagcctgggcgacagagcgagtctccgtctc

SEQ ID NO: 211523 - DNA, 342 bp, Homo sapiens
agtgcctaacagggtggaactgggcacagggcatgtctcagacctgtatggtacttttaaaaaaataagttaaaataaacactggggcatggtgatggaaaagatgaaaaaacagaacgtaagttatttcaatgttgtcactcggtgtggccacttggagtttatatttgcattttactgttgcatttgaaaattgttaaagtgaaagtgacaagtgcaagacacactctttttgtttggtaaatatacatttcagtccacacatgagaatagttattgaatgttagaagtatcttttaaaatgaaatgtatgttttttcctatcttttggttttaaaagtg

SEQ ID NO: 211524 - DNA, 369 bp, Homo sapiens
agaggactatgtttctcacagattggagttaacaaataaagtaaaagatagtcagttaaataaatttcagataatgaattacatatagagtatccaaatacttatactacagagttagtagttgtctttctgctttttagatgtaactgtgtgtctggtagttttacttgctgaatccatcaacgccaacatgaaataatcataggatctgaaaacatgatgcagacctaggagaaaagcaaaagaagaaaaatccatagaggtcatatagattggaaggagcatggaggagaattgggtgccatctgataccatacaaatatatgtatttgaatgcacatctcagattgctctgaacagtgacagttt

SEQ ID NO: 211525 - DNA, 528 bp, Homo sapiens
aattttaaaagatgtattttggagaacaaaactgttagaatatatttagaacagaaaaaaaccatttcttctagaactaagttggtctaaaagtgcatatcttggtaaggctctgtgaggaaatgacctaatctggagagaagctgctgggacactcgtctgtgtgtggcctgtggctcacaggggcaggtattctcagaacgcacatgggataatcaccatcctggtgtgtccaggctctgggaacaggctcttcctcgtggctttcacatgagtttcctggtgggctatgtagtcacttttctgcatccttcttttaaaggctcatgaatgtcaaagtaacacagaccctgagatgaggcaggaaagttgtatcggaatgttttcagactatcaaccagaccaaacgttctggaatccataagatccagggctggggataaatttaatctattaattattcttctgaagttggcagctttgaaaaagatgccctgagtcagcatagtcattctaaccaaaaagaaa

SEQ ID NO: 211526 - DNA, 279 bp, Homo sapiens
tgagccaggctgtttatgacccgtggtgacaacgtgagggggtagcccttggggaggaaaccatttctacatctaaggatttgacattccaaagtttttccaggtgtgctttcattaaaaacaatcatgacaatgttaaatcaacatgaaaagatgttttccatttattatacatggtcctccgtgttcttgggcctctagagtcatttgggaagtgttaatgaatcaacccatcatctgcagaagatggattggccttggtacttttacaaaatcgct

SEQ ID NO: 211527 - DNA, 409 bp, Homo sapiens
atgtcaaattgtgctgtctttcaaaggggttctcaggtgcatctccggaatgtattgtcagaaagctctgggggccccctgttcaagaagtcttgctgccatactgccgcactgattagatgttttccaagcttcaagaagctgcttcttgaaaggattgtttccccaaggcccaagaggaaatgattctcacggggttggggctgtcctgtccatgacacgcctgacgctgtcagatctgaacgaattcacagacagacggacttgtcaccatgaactctgtgtgcgtcatcacccagggctcaggtgcaaggttgtccccttctcgcctggcctctgtgatcgtcttagatagcaatgttaacttgccctgttagtggaacgggaaagtaaaatattttcttatttc

SEQ ID NO: 211528 - DNA, 168 bp, Homo sapiens
cccagctattcatatgccaagtaatggtttttcttcccttttctttttttttaaaaaatcaattcccatttgctacctcccagaaatactttccagactactctgtgaaggcaggaaaagaaggcagcagcttggtttctggttcccttgtgctctgcggctcggccc

SEQ ID NO: 211529 - DNA, 370 bp, Homo sapiens
cggacagatggaggccatcctggagatcgagaacatcctggccaacatggtgaaactccgtctctactaaaaatacaaaaaattagctgggcgtggtggtgcgtccctgaaataccagctactcaggaggctgaggcaggagaatcgcttgaaccactgagtcagaggttgcagccagccaagattgcaccactgcactccagcctggtgacagagcaagactccgtctcaagaaaacaaaaaaatgtaactctaccttctgcagaaagtgactgaaatctcagagcttacaggttcccttcgaacatcatggaaactttcctatgagccagaaactgagtgacttacttccaacttctatttaaaatta

SEQ ID NO: 211530 - DNA, 320 bp, Homo sapiens
caaatgtaaacttatctttactttaatgtgttcacttctcataactccttgactggaacccttcacttcatccagtctgagagtctgtaagtttctgccgcaggcatgcacattcctgacaccacgcttttgcttggctgtgcctcctgcccagaatgctgtctattctcttacgcacatcctctctgtatcccatttttgtcctatttcttcctgattcagagagggtggtgattggtggatatggctaacatttattaagtatatctcatgctttacatactgtggtggcaatttatgtgcattgtttaatgataccc

SEQ ID NO: 211531 - DNA, 512 bp, Homo sapiens
aggaacacatattttgatgtggtcctagccttgagtattgaggactaggatttctaagtagggcaaatgcaaaagcctggggtgatttagaggtcacagaatgaaaggggattaacctgccagaaagcaattaagtaatcccccaattgcaaggaacactatggtgctaataatgagcttccttgagcaaaatgggaatactttacattatgtaaactctttggggaggaaatcacactgtctccagtggtacacaactttttttgagggtctctgggagttgttgcatcttagtttttgagagcagcagtagtgaaagtgtatgtttgagaacggtgtcatcactgcctaggggctttcagtggccttaacgttctgcatatgcttggttttctcctagagtcagttacctgtttcatttgttgggatagtttatcagttaataatgaagaaatctgaaaccctgaaatttttgaggtctgaggaggggaaggatggatcacttttattgg

SEQ ID NO: 211532 - DNA, 375 bp, Homo sapiens
acacatattaaagcgaggagaaaggtttatattgttcagctgaatctgtacttaatgttatttatctgaacactgtaaaagtttgctgaaaggttaatctgaggttatttcaatttgtcttttcttactggcaaggtggaaaacactgtttctcaaagcacttcctaagactttcaggataatgtcctcagcgatgccaaacctcactgaaaaggatttgaatgtaaactccaatagagaatcatgctagtcttaaaaattttaccctgttcttataatctcctgaaacactttgtaaattaaatttagttcacatttttaccaaaaatcttgtgcgtgtagaggcacatgctgcaaaacaacattttggtcaac

SEQ ID NO: 211533 - DNA, 543 bp, Homo sapiens
agggataagatcatacaaagagaatgcatagggaaagaagagcagagagtccaaggggacccctggggagagatgggcagagtagggaaaccatgagaagaaaggaaaagggcacccatgaggagggaatgaggatcaggagagagtggctaacattcaatgtcaagcatggctcatagataatctcatgtgatgcattcaataactctatggctagatccaattatgctaattttacagacaagggaactggagctcattgggatatagcaatctgacatctgaccaggtttgcagcatcaataagttttgaaggtgggactgaaccatgtatttgcttttttctttgaagcctgtgtacttccatctcacaagctatatcacaggtttccagaacagaattgatacctaacatttatttagtatgtactgtgctgtagacactgttatagatattttaaatacttttcctcgttgaatcctcacactgacccaaagatatatagtacccattatccggttacattatttcctcatttttca

SEQ ID NO: 211534 - DNA, 218 bp, Homo sapiens
aaaatgtcagcacttacctgctgcccacattgtggacacatggatcagttcacaggtcagtgactgataacatgaggaaacaagaccagcttcagatctaattcaagaatagatacctgaccatccccatgttctcaataatataagctaataataatggccaattccttggccacatcagtaactatctaaagagacagccccggctgggtgcggtg

SEQ ID NO: 211535 - DNA, 213 bp, Homo sapiens
  misc_feature (12)..(12): n is a, c, g, or t
  misc_feature (37)..(37): n is a, c, g, or t
  misc_feature (50)..(50): n is a, c, g, or t
tacaagctttgnagactgagtccagctctgtcgcagnctggagtcagtgnccatctcgctcactgcacctccacctcttgatatgtggctaatgcttagcagatatttttgagtgaatcagtaaataaaatttcgctgccagctctcaaaggaatatgctgtggaagcttcagttacttttttttttttttttttttttggaaagggagtttt

SEQ ID NO: 211536 - DNA, 947 bp, Homo sapiens
acaatgcgcagctgaattgggatgaggggccaggacaaagcagaaatctgctgcagagagcaggaaagatattctgtagcaggatctgggcaagcggcactcatccatatcctttgcattgcaaagagaggagctacctccttcctttttattttccagtttattggtggctcctagaacctctgagaactaactgattttgacctcttaacagttgcctttcaactaccattcatttactgcaagcctactgtgtaacaggcccttgctaaccacttcagatatattgtctcttgtccagcttcaagtgactctcttagggagggattagcctcacctcactagtatggaaatggagacttggagtaatcaagtgacttgctctgaattacacagctgggaagtggtgaagctggaattcaactcaagttatgtctagatctaaaactcatgctcttttctatgctcaaagctgcatatcaaaactgaactttagcatggagtctatgatgactggctcatgtctctccacccagcacctagcccaaggccaagcacagagaaggctcacagtggacacttttggaatgagtagattttttatggaatggtcgagcacactgaactacctggagtaaaggggcatcatgtctgaaactgatgcttaagtggctcagaaaaaaaattctgggagctagagggagagagagacagaggagtgtggtaaaaagttaacattttggggatctgcgtaaaggtatatgaggattctttgtacagattttgcaatttttctccaaatgtgaaattatgtcaaaatataaaattaaaagacaaaattaaaagaatgaatgagagtttgctaggtagagaagcagggggatcttctggcaaaggaacaggataagcaaaagcatcacaagtgtgcgagtcttctgtgttgacaa

SEQ ID NO: 211537 - DNA, 516 bp, Homo sapiens
gaaacatgcagtggcagtgccagtttcccatctgtgctcgatttgcgcctactggtgtaattttcaggtatcttgtgtttacacaaatgctggaaaacaagctgcttcttaagcagcaaccgacagggaaggtcagcttttcccactgccatggccgtgccaggatgcacattgcaacaggcagggttctccagagaaagagaaccaataggagagagagagagacagtgtgtgtgtgtgtgtgtgtgtgtgtgtgtgtgtgtgtgtgtgtaggggtggggagagaaagggcgtgtgattgagagactgatttattgtgaggaattggttcaggccattctggaggctgagaagtttctatgttctgccatcagcttctggagacccaggaagacctgtgacataattcagtccaagtctgaaggcctgagaaccagggagctgatggtctaaatcccagtctaagggcaggagaagatgagaggagatatcccagctcaagcactgagccaagtt

SEQ ID NO: 211538 - DNA, 307 bp, Homo sapiens
cttgatgatatcttctctggaggcctggtgaacagaaggctgtcataataatatggaaagaatgatagcttggccttaggccttgtcagtagggatcaagaaaaaggagtaactgaaagacattatagtgatagagtgaataagttaagtgaccgattatatgaggtgaatcatgaggaggagttaaaggtgttggcagggaatataggaggagaaaaaaggttgagagggctttgtgaatatatatatatataatcacaatatatatgtactcaatacttcttacatacatatattacagtgttat

SEQ ID NO: 211539 - DNA, 532 bp, Homo sapiens
aatactataagtattacagaataggcatacaaaggaccatggatggcaacacataagaagaagtggcctacagtccctggtagcttagggaaggtgcctgggaggaaatgacaccatctgcattttcccctaatcagccaatgtaagagtactttaatgtggcaagtctatgatgttgcaagacagtcttaacctatctaagtccataaacacatggcaggtagtgtgactgtaggactagtaaaattgtaattatctatcatttgttcatgaatggttgagtcactatttaggctatatgactcttctttttatgaaaggagcagatttagcttctgagagaataggtattttttttctttaaaaaaatggaaaattgtattctttagactaccccaatagactgctgttatagtctgtgtcatgagtggtctctttgtatgaaaacctaaaaagaaaaaaaaagctattcttaagtacaggtgaattgctaccaaaaagaagcagcaatcatatggaggcttctgtatcc

SEQ ID NO: 211540 - DNA, 721 bp, Homo sapiens
catgaccgtaatcaagataatgtgatattggaataaagagagtcatacagatcagtggaatgaatagaagagagtctaggaatagatccacacatatatgacccactgatttctgataaagctgccaagaaggcaactcagtgggggaaatgatagtcttttcaactaatggtgcttgaacaactggatagccacatacagtaatatgagccttgacacttacctcacatcctacaaagacattaattcaaaatggattatagacctaaatgtaagagtttaactgtgaaacttctataagaaaacaaaattgtagtgaccttgggttcagcaaaaaatttttagatagcgtacaaaaggcaccaactataaaaaaatcagtaagttggactttatcaaaatgaaaaactattgcttcccagagaatgtttaagaaaataaaaacccaagccacaaatgggggaaaataactgcaatacgtaaatgaaagatgtgtaacatgaatatataaaagaactctaacagcacaataataatgagaaaaatacctaatttaaaatccaacaaatgacttgtaacttgtcaaatatttcaataggcactcaccttcatgccaaatagcacattaaaagatgctcaaaatcatgagtcattaaggaaatgcaaattaaaaccaaaatgagatctcagtatgttcccactagaaaggttaaaattaata

SEQ ID NO: 211541 - DNA, 326 bp, Homo sapiens
acattattctgttttgctgttagcaaaatagaaggctttgctgtcttctgaatctgtcctggatttcactgataattgccctagttcagggccccatttcatcatgcctgtttgacatttgtctcctaactgatttctctacctccacccaacttctatatttgatttatctccgccagtcaattgtccaatacacgcttcatcagcagtgcagattgggagaagaattctaacatgccccagcaagctgtatgcagtagtatgcacctatagtcctagctactcaggagcctgaggtgggagaatcgcttgggttcatgagttca

SEQ ID NO: 211542 - DNA, 295 bp, Homo sapiens
aacaaacaaacaaaaaaaacgtgttttaatgttaaaacaattttgaaaatctacacttacctgaaaccgcacttagagagtatcttaccaccctctggattcagcccaatcatgatacgatctttttagaacggaacatcactgcagccatacagaaattagaaggattataagggagcaatttcatgccaaaaatttgacaatttaaatgtaatagacaatttcctagaaagagacaagttgcaaaaactaaccaagacaaaggagaaaatcttaatagacttatatcaagtta

SEQ ID NO: 211543 - DNA, 194 bp, Homo sapiens
atgtttagtagagaagtacttacttgtagctaaaatgatgggatgaaggaaaatgaaaattagtttgtagatagtatttgggtacatgcggacactcatgaaatatgttgtatcgtttaaatttggtttgtagcacagtttcctttactttgtgtcatttaaaaaaattaaaacctagacagaagagaaacgta

SEQ ID NO: 211544 - DNA, 326 bp, Homo sapiens
aggggcttgctaaggtaggaagaaaacccagagactcccgtcctggaagtcgaatgaagagttttaagaaaagagtgacccaaagggtcaaatcagtcattggttagggtgacaagtgagaactgacttccggatttggcaaagaatgatccttagtgatcttgacaatatctgtttgggtgaagtgaaggtaaaagcctgatcgagtaagttcaagagaataggaggagagaaagcagagagtgcaagcaggtccaactctttggggagtttatctggaaagaggaacagagaaacaaggaggggatggggatcaacacagaatt

SEQ ID NO: 211545 - DNA, 267 bp, Homo sapiens
ctcagctcatggaaagaagatgctaaagatgaaggaagataaattgagaagagattttttggtatgactgtgtcaatagccttaagagttttgtacattcaacatacctggctgggcgcagtggctcacacctgtaataccagcactttgggaggctgagatgggtgaatcacttgaggtcaggagttcgagaacagcctggccaacatggcaaaaccccgtctctactaaaaatacaaaaactagtcgggtgtggtggaggctgcc

SEQ ID NO: 211546 - DNA, 758 bp, Homo sapiens
ccaatcaaagtgctggaattacaggtatgagccactgtgccaaaccaagaaatttattttcatattttgagatttgttattgaaaattacagatttttaaaaatgcaataacatataaaagtacatcatatatggttcagtcttactgaaccatttaatataatattttgtcaaagtactcaatttataaataaaatataaaaatcattaattgtgacaaatattttcctaaaatcttccaaaaggaaactatatatgtgtgaatacatataatttgcttgtatatcaatcatatgtataatttatctttctttttttctcagacagagtcttgctctgtcacccaggcggaggttgtggtgagccgagatcactccactgcactccagcctgggcaacaagagcgaaactccatctcaaaaataaaaataaaaataaaaaataaatgattaattcagctaaagactaatagatactgtatatttgcaattgttggagagctcgatttgtataaattgtttattttgaatctttctgagctcactcaccattatgtgctaatttttaccctgagaagtgtcaattatgataacattttggattagaaaactactttcatcctgttttatgggagatttttagagcatttttagagcattctataaataaggatacatcatggataggggttctgcagttttcagtagctggtagatacctgtaccttaagcacactctttgtcttaaataaagacaat

SEQ ID NO: 211547 - DNA, 568 bp, Homo sapiens
catttcagaaatgaggatggtgcaggctcaggagtcggcttgcaaggatggggaggggcttgggaggaaggtgtccccatcttgctcagggccccctgagtggacagcctgctcccccacacccctctagcctcatttgggcccagaatgctctggaattggcagtgttttttggaactgtgtggagctgcatttccgctgagaaaccctatcagtcaacgtcaccttccatcccttactgtcgtcacacgtacacaagaggcataatgcccagcgctggcctggctgcaggcaagcaagcagtcccagaggacactggtgggagtgttcatgattgctgccttgggggaaaatacattggcagtgtctttaaaaataaaaacccacgataccctttgattcagttcctttaggaacttctcctatagaaacaagaaaaaaaaagtaggtaaagatgtaagttacaaagatgtttattccagttttgtttctaatggcaaaagaaattggcaactctgtgagtggccgttagcagagaaaagtctcattaggatggttgttgatccac

SEQ ID NO: 211548 - DNA, 414 bp, Homo sapiens
caaaaattggctgggcatggtggtgcacgcctgtaatcctagctactctggagactgagacacaagaatcacttgaaaccaggaggtagaggtttcagtgagctgagatcacgccactgcactccagtctgggtgacagagtgagactctgtctcaaaacaaatacataagggacagaaaataagtattttaggctttgcaggccacaccacagctgttacaactaatcaactctgctgacgtagcacaaaagtagccacaatctataaccaaatgaacatagctgtgttccaataaaattttatttacaataacaggtggcaggacacaatgacctgtagaacatagtttgcaacccttggtcagaaaagttccaaacaaataacagtatcagagtaagccagggatttatgg

SEQ ID NO: 211549 - DNA, 200 bp, Homo sapiens
cttggctaacttttgtatttttggtagagacagggcctcagtgtgttgctcaggctggtctcaaactgggctcaagtgaagattccttttataaggctgaataatattccatgtgtttttatttatttatttcaaactaatgcagtttattataacaagaaggaaatcaagctttacagtaattatagtcactaagctga

SEQ ID NO: 211550 - DNA, 393 bp, Homo sapiens
aataaaaatgccattgatacagaccttagaaactggaaccttgcagaaataggaagtatctagggtggggtaagtgacagacttctctgacagacccctgctttacgcactgagtgctcacagagtcggggtaaggggttggggagcagccaaaggtcctcacagtttgcctcgcttggtggtggagtcactgcctcacaagccagggcaagggctatcagtacttcagtatactcagtggtactgtgcccaaggtagagctttgtccacaaactgggggctgggcagaataagagagctctcacatccatactgctcttgcccagaacttagccttagtagtaggtagctgagtgcaggatgatataatctgaagtctggtttctcctgaga

SEQ ID NO: 211551 - DNA, 255 bp, Homo sapiens
atctgaaatacagcaaccattatggactctaatgaaaagctagcttcaggaaacagtgaaacagcaagaatggagtcagtcgaggcttatctctaggtgcagaagatgtttcccaggggagtccttaaaggcaggcaacaaatatgcttctgaaccaagtctacaatgactatgttcagaatgtttacactaatatttgttgaatgctactgaggaaaacaggcttaggttaaaaaatcagattttatagttgtt

SEQ ID NO: 211552 - DNA, 728 bp, Homo sapiens
gaatacacccactttgaagaaaacacaaaacagcaactgctctctcaggccccaccatgaggcacaggacacagagggagtctcccaggaccaaagtgatctctgaggcccctcctcaccctgacgtgctgtgcgtacagcagccaaggaagaggcgcagagtcatgggagagtctcagggccacctgccctaagacaagctcaacagcacagaattccgcatgtgacgaagttggaacttactccactgaagctgatgcaggttcaaaaaaagccagcaggccaggcgcagtggctcacaaatgtaatcccagtactttgggaggctgagaatgcagaagaatggagtaagagaaaacccgcgaaaatccaaacaacagaccatttgtagctctagtccctgtggctgcagtagagaacagcaacagaaaacacggcctgtagctgtgaaatcaatgacacaattctcggagggagcaagcacatgctagtcccttccttcttcccagtccctcacagcactgacaaggaacactgacaaggagccacaggtggcatccacatggcactcaccatgccagggcagacatggaaccagcacatgtcttaggctagagcccaggttccattttcctacagagagtctccgaagtgcaaaagagaaactcagtcattccttctttacccttgctcacactagtgtcatctttaaaccagggccgctctca

SEQ ID NO: 211553 - DNA, 305 bp, Homo sapiens
ctcaggcattttactaaatcagtctgcattttaacagggtctctaagtcattggtatatacattgagaagcaatgctataaagcatatgtctttgatctgtattgaggacttactgtatactagctgtgggactttggtcaagcttgataacatctataagctctggctttttcatttgctaaagaataaaacaagtactgtgttcaagctatataattgtaatgaagatctattgaactagtatgtaaaaacatttttttttaggtcatataaataaagtttgttgacaccaaggatacataat

SEQ ID NO: 211554 - DNA, 253 bp, Homo sapiens
ggctagagtcagaccagcctggcaacatggcaaaaccctgtctctactaaatatacaaaaattaactgggcgtagtggcacctgtaatcccagctactcgggaggctgaggcaggagaatcacatacaatcaaacataattggtaatgtaccgaagattacattcagccgtgagtaacaggaaacacccacaatattcctgatatgaggaaagtgcttattctcacatcaaagtactgggtgaaaccagtcac

SEQ ID NO: 211555 - DNA, 420 bp, Homo sapiens
cacttatctagacgccagcatcaaaaggttcaaagcccaggtcacaggctcatgaaaaaattaagcaggtatcaaaaaatatcacaaaggcaacagttttatgacatgaaaacatctatcagagacaatataaacctgtctgctaatagaaccaggtaaaactgtctaaattaaattccgaagaaatttcaattttattttactaatgattttaaaaactagctttatttacccaacatgactaaagtcccattgacctgaaaagcatttgggcttatttacttaatttatgagtactcctttatttataagtctattcagtaccatgtagacaatgttcaaacacagacatatgcacgcatacataaaaatacaaatgaacacaaaaaaataaagactacatgcttttatttttaaaat

SEQ ID NO: 211556 - DNA, 382 bp, Homo sapiens
ctgaggcagatttcagcccttgcttgagaccaaggcagggcttcttaacaaggagaaccagcctataagggcagtgactgggcccctggcagtgagtagtgatcttctttttttttttttgagacggagtctcgccctgttacccaggctggagtgcagtggtgcgatcttggctcactgcaagccccgcctcccgggttcacgccattctcctgcctcagcctccggagtagctgggactacaggcgcccgccaccatgcccagcgaattttttgtatttttagtagagacggggtttcaccgtgttagcctggatggtctcaatctcctgacctcatgatccgccctccttggcctcccaaaagtgctgggtttaccggc

SEQ ID NO: 211557 - DNA, 458 bp, Homo sapiens
actgcagcgacttcttgataggatctaataagaagagccttcaaataagcatgacatggaactaacaagtacattctaaagggaaggaaagcttttacagtgaagacaagcctgagagggagaattgttgaaacagattagttagtattttagaattgcccttcctgttcttgttttctatggtggcaagagcagcacgaagtgcaaggtcatactattctgaatggagccatcagggcaagttttgttattcagagttactcgtggggcagcctggatggggagctctgatggagaatatatggaaatagcttgtatcttcttggcacactgacaataccaactctaaagggccactttagcttttaggcactaaaggcccaacagggaaggcctatgaattttggggggacgtctaaaactatttgaagcctggaaaagaaatgtattggctccaa

SEQ ID NO: 211558 - DNA, 513 bp, Homo sapiens
agacatatttaaagtgctgaaggaaaaaaaatttaccctggaatagtgtatctggtgaaaatattctttaaacatgaagatggaataaggactttcccagacaagcaaaatctgagggatttcattaacaccagacccatcctatgataaatgctaaggagagtacttcaattagagagaaaagaacattaatgagcaataaataattacctgaaggtacaaaactcaccagtaatacctttttcctgagactctgcaagctgaagttcatgtaaaaaccatcttctgacatacaaacttacagacccgaaaagtctgtcaagattgccactgtctacttcaactttaactgaagatgcctttagtctaacatcaagacacctcaaatgattgccctccatactctaaggaaactggtttatagactgttccaaacattaatctttgttattgagagactgtctacaacataatctcttataataaatacaaattttccattgtaatggccta

SEQ ID NO: 211559 - DNA, 451 bp, Homo sapiens
ttatttgcaaaatagttatttgaaacactgcatccaaaaaaacaaccattagattccaaaacttccctccaaaacttactgaatatttaagtaaaacaatagttcttaaaaatgccagagaatagctgcagactctgcagaagtggttacctccaagaaaggcctttaaatgtgagcctcattgtgttttggatttgagccttgacttcaacattgggtcatcctattcaggtgattgtacctctaggctttagtttctgcatctacaaaatgggaataaaagcaacaacttcggagagttgttttgaggaataagtgtgacaatgtatataaagaacttaggccaggtggctcatgcctgtaatctctgtactctgggaggcaaagccaagaagatcacgttaggccaggagttcaagacgagtgtaggcaacatggcgtgatgctgtct

SEQ ID NO: 211560 - DNA, 402 bp, Homo sapiens
gctggggaagtgagcagagctctgagggccgccgcctgcgcggtctcttggtgggaagcaggactttgcgtgtgagcgttgcgcttctcccagccagaagtcggaattctaatgtccaaggcgtggtgtgttcagtgagattcgtatttttaaaaaataaaatgatttaagagaaaaacctaaagctaccaggagtggggttcgaacccacgcggacatatgtccattggatcttaagtccaacgccttaaccactcggccatcctggtgcagacgttgaaccttgtttttgctccgcttacaaggcatcctctacctcctcctgcccgcaccctccctccagaacgcagagagttttcgccgccactgtctcggctctctcagcccgggctggggcggccg

SEQ ID NO: 211561 - DNA, 515 bp, Homo sapiens
caaagattttcacacccaaaggcctgtgtttccggtggcattcgctttaggtaagcatatcagtccagattccccagaggaaagaatcaataaacagaagcaatagactcataggggatgagagacagagagagagagagagagactgattttaagggattgactcaccgccatggggactggcaaattcctaatctgtaaggccggccagcagggtggaaacccagcagagtttctacgttactgacctgaggcacaattccttcttctccagaaaacctgtttgtttgcttgtaaggccttcaactggtgggacgaggcccacctacatgatagagaataatctctttgacttaaagtgaatggactgcagatgtcagccacgtcgaccaaataccctcccagcagcacctagactagtgtttgaccaaactccaggcactacagcctggccaagctgacacggaatgttaacaagtgaaccacatccaaatcctgaaactgcaggtgtcaac

SEQ ID NO: 211562 - DNA, 442 bp, Homo sapiens
tgtctggtttcctttgccgcagcttataacctgcctaatttcctaaaaatggatgtgctcttctcaaatgctggttcctaaactgagccaagaccaaaggtctgggtcgaaagcagtgagcccctagggccttcctcattggcttggcagagagtggttttaccttttctgaccaccaaggctcctctggagcctccccaggcctcaggtgggaaccctccctccgtaaacaaagaagcaccctccccatcacaggctcccagtaaacaatgtcataagcacatcttaggcacttattgggttagagcagttgcaggaatggagcaatcagtcatttctacttcttatgtcttccagagtcaggttagcagtctattagaaactccataaattctcttttaaaaatcgtagaatctcttgtgatccctggaataatgaaatg

SEQ ID NO: 211563 - DNA, 215 bp, Homo sapiens
  misc_feature (165)..(167): n is a, c, g, or t
  misc_feature (188)..(188): n is a, c, g, or t
  misc_feature (192)..(192): n is a, c, g, or t
  misc_feature (206)..(206): n is a, c, g, or t
agtgttcctggcagggtcagactgctcagataggtggacagataacccagcttttcactaacagtcaggttacttccaatagaaatgaagatgactgtggctttttaagacctttccttctgcaggtagcaaatatacatatgatggtaacctcgagaaatagcnnnccaatggaatatcatcaagcnagtnggagatatcatgcntccagtgga

SEQ ID NO: 211564 - DNA, 650 bp, Homo sapiens
aaagtgtgaagaatgttccaattacaggaaatcctgattagtatggataccaccaatttaaaattcatgataattaaggcccagttagacatcacaatatgtatgcggaagaaagggggcagatgctggaggagttggagaggtgatgggcaaatagatctatggaaaaaacttttaaagaaatccatcaatactgacaggaatactaaaaataagcaaattccatgtgaatcttattggctgattaaaaagtattacccttggccaggcgcggtggctcatgcctataatcccagcactttgggagactgaggcgggcagatcacctgaggtcaggagttcgtgaccagtctggccaacatgatgaaaccccgtctctactaaaaatacaaaaactaggtgggcatggtggcgggcacctgtaatcccagctactcgggaggctgaggcaatagaattgctggaacctcagagacggaggctgcagtgagccgagatcgtgccattgcactccagcctgggtgacaatagtgaaaatccatctcaaaaataaaaagtattaccctttggtagcattttgtaagccgtcagtttgtagaggcaagatggtgttagtgaaaaagcacctgattagaaactagaaagcagct

SEQ ID NO: 211565 - DNA, 740 bp, Homo sapiens
ggtggcggccgctctagaacaagtggatcccccgggctgcaggaaatcgaattcccttcccccaccagtgagaccccatctctaaaaaaaaaaaaataataattgaaaactgtgcgaatggggtttttgccaattttttttgtcatcagtccctcccgtacgtaggttcataaattttgttctctatcacctgtataaaaataaaaagaaaagtacatttaaataaaaccttagttaagctggacgctttgggtgagaatagcttactttgtggcatttttagtaaaaagctgtattatttatttattgtttgccagaatttgataatatactcaagggggaaaacccagtatatcttttaactaggaactttttacaaattagcatttttcttccaagagtcatgcatataattcttagaaagcagaactgtgacttggccttcagctcaagctctgtcacctggagtccacgagtgctttcttgttttacttgtggcttcaatttcagttttccttctgataaatcacatctcccttgttaaatgttaacaggaatattaagaatgagagtttggatggatgaaaagtaaacctaggccgggcgcggtggctcacgcctgtaatcccagcactttgggaggctgaggtgggtggatcagctgaggtcaggagttcgagaccagcctggccaacgtggtgagaccagcctggccaacgtggtgaaaccctgtctctagt

SEQ ID NO: 211566 - DNA, 411 bp, Homo sapiens
agcccaactcccagtacccagaatgtgactgtacctggagacagggtctcccgagagatcattaagccaaaaggaggccattagggtgggccctcttccaatccgattggggtccttaccagaagagatcaggatgcagacgtgcacagaagggccaccctgtgaggacacagagggccaagggccatcgatcagcaaagggaagtagcctgggacacagtcgtcctgcagagccactgaggaaccagccctgcctacaccttgaccttggccttccagactgcagagtgcgagacgctcaatctcttgtttaagctgcccagtctgtgggatgttgttctggcagccctgcgaaaggaattcagaccctcttagccaaggggaataaatgctctaaggtttcatattaaa

SEQ ID NO: 211567 - DNA, 477 bp, Homo sapiens
gacatacctttcccctagacatgttactttgcaagattccctaggcacaccatgttctttcctatttttgcacatatacggttgacccttgaataacataggggttggggtgctgagcacaacccccgaccccagtcaaaaattcatgtacaattttgactttccaaaagcctaattactaatagcttactgttgaagccatactgataacataaacagttgatcattaacacatattttgtgcatgtattatatactatattcttcttataataaagtaagtgaaagaaaataaagtgttattaagaaaatcagggccaggtgcagtagctcatgtctgtaatcctattgctttgggaagccaaggtgggaagattgcttgaggccaagagttcaagaccagcctgggcaacatagcaaaagcctgtctctaagaaaatcataaggaagagaaaatatatttactattcattaagt

SEQ ID NO: 211568 - DNA, 485 bp, Homo sapiens
gtcccccaagtctgcctaattggcttgtttccagcatcagcagtttagtaagagactcgattagcaatttggtatctttagagttttcacccgttagtaagaacaaataaatgaaatacattcttgcctttctacctagagtcagtcttggggaaatttaccaattttggtgtgtggtccaatttattaaatgtttacattttgtctgtatatgtcttttccatagtctagtatggttactcaatatcctatctatagtatacacctagaattatccaagttaggacatcagagtgtacttctaacctcaaaaggcaagctttttcctttgaaattgtgtcaatgtagtttatatattgattttataatgtactccagcagtagaaggctatgtcaaatgtaccagaagaacctttttttggtaccaataagatagagtttatgtttaattattataattttaataaactatttaaattcaggca

SEQ ID NO: 211569 - DNA, 383 bp, Homo sapiens
agaacacttaactgcggctctactgtgcactcggtaatgttctcggtgttggacatatggtggtaaagaagacagaaaatgcccagccttctatgaggctgacattcaagtggagaaacatgggaaataatcaaataaatagaccaccaaataggtcaaatggtgatcagtgcaatgccaacaattagaacatggtgatgtgctagaagtgtctggattgtgactttagattggatggccagagaagaataatataagaatagcatcaaaatgttactcgtgggcttcaggtgcccacctataaaataggttacctggacaaaatgatttttgcatgcatctgtctagaccggagacctgacttaatatatcacatgaattta

SEQ ID NO: 211570 - DNA, 1108 bp, Homo sapiens
tcttctgttattgttcctgctaccagaagacatttttcttcgcagattttggtcttagtatgatgattaagataaagttaataatttattaattgaaagtgagtcagactcttatccattactatattctaggaaaattggaaagtttaatgttattaattctaaagctaagcttaatgcttctgagaagctcaaagggcattattgcttatagaccaatgtctacaaagctgtatttaagtcaggaaagggttatcacaagctgatttagtgcagcaaccaagtaaaagatgcatgagaacagagttctcaggtgacttcttgatgtttctgtaaattatctgtctggctttggaataagcacttatttgtggaaaatgtattatttacagtttggagtaaatgttcatagaaaagttacccagtttgatgctttgtcgagagctggatttaagtttaaatcttggttccccacttgctagctgtgtgacgtatctgttaggaatagatttagctttaagtagtaacagtggcaaaactacaaaggggtttatttttctcacataatgagaaatctttttcagtgacagtaattatagtaatgttcagcgatgccagggctggaatctctgtgattcttcgaactttttctaataaagaaaacctggctgctttagcttgaggcgtcatatccacatggtgggctgggagaaaggagggaagggcaaaggcagcttttatcaggacaagataattttgcttatgtctttggccaagtccaggttatgtggttaagtccagctgaaagactggctggcagatgagtaattagctttttagcggctgaggtagaggcatgcaaggaagagtttgggaatggacgtggggttggtcagtctacagagtctgccacagtgaccatgagtgccactggtaacctgaataagcctcacttttctcttgggtatagtaatagaaccactgggggtgggacttggactttttgtgtaccactaaatctctagcatctaacacaaggcctggcagatgtatttgtttggtgaattaatacatgaagattatcatgagaattatatgaggtatataa

SEQ ID NO: 211571 - DNA, 1286 bp, Homo sapiens
ggtcactgctctctcagcaaattacagtcactgtcacttagcatggagagtggacgttgcacatcactgtgaaaccttgcagaggaggagagggcaggttcatcagaagaaagaaaggacaaaatgactccttatgaagcattttgtgccttctgtgagaaaacatgtatttagatcagataaactctagtcaaaatacaaaaaggaaaaatgaaagacctctgaaataggaacaatctcttgaagaggcaaatgactcaaaactgctcagtggctctttcagaaaatctaagtaaagttccctgacaacagaaactgaagagattgcctggttcatcttgtagtcttccaaaacagcagataatttctgaatctcagatgttgaatcagtacaacgggatggatttcttgttcctaagtgttaaatgatcacatacataaaagagtctgagcctgagcaacatagtagagaccctgtctctacaaaaaaaaaaaaaaattagccaggcgtggtggtgcacactgatagtcccagctactcaggaggctgagggaggcggatcaattgagctagagagttcaaagctgcagtgagccatgtttgtgccactgcactccagcctgggcaacaaagtgagaccctgtctggaaaaaaaaaaaaaaaaagcgtctgcataattcctggtgcattttgtggatatacaatatgagtatgtgttccatgttttcagaaattcaaaggaagcgtttccacaatatgtgacggtttatttcccaagagatgaaaagattcattaaggtgcatgctttgatttaacatctgcaaacatttaaaaaatataacagtgtgtgacgtagcagtgagagtactatctttttttaaaaagggaaattaagatttatttctggccaatgtgaacagaaataagtcactttatctcactgagcaccaattttacacgtggaaaatagaagaattggaccaaatcagcagtttcaagctgagttgcaaaagttcatggaaccatttcagtcgcttcatggaatcggggtaggcatgaggcccgttgttctttcaacctgagccgcatggctcttgtgtctttaaaccttgtggtaggatttttttttttttctgctttaataagtgaagggtcagggcaccagttggtgtctgagatgccctccagtctggggaaccccgtagatgcttagactactttgaactgaagtatgtgcagtctgccatctcacattaaaatgtaggcattttgtcaattgctttt

SEQ ID NO: 211572 - DNA, 579 bp, Homo sapiens
cagttggaatctagctcttctgaccatttccccaatgctaatgggaccccgggattagagaatagtaacttcaggtatcctattcctggaatcccaggtgtgttcatggctgtgagggcgctcagcgcatgcatgtatctggccagatgccctaggccaggcatgtccacgttgagcattgttgttgtttttctttctctctgtacacttctcttgatgatgtcattttctttatcaaaaagctttactaaactcctgctgtggtttgaatgtgtcccccaaacttcatgtattagaaagttgagactgggcgcagtggctcacacccgtaatcacagcactttgggaggttgaggtgggctgatcacctgaggtcaggagttcgagaccagcctggccaacatggcgaaaccccatctctactaaaaatacaaaaaaaattagctgggcgtggtggtgggcacctgtaatcgcagctaccagggaggctgaggcaggagaattgcttgaactcgggaggcagaggtttcagtgagttgcaccccagcctgggcaacaagagtgaaactccatctcaaa

SEQ ID NO: 211573 - DNA, 405 bp, Homo sapiens
ttgacaggaaggacgggaggaaatcctgctcgagcgcacctgttttccaggatgatatgtcgcttttataaatggctgcaggtccctttgagaaaagcttgggacgatttctggggtgcacttgcagcagtggtgcaaggtccttcccaggggaacctagcctccctttccatcatgggactctggatgccggcggtgacttaggtctggaaactgggttcgaggctgtaacaccactggggcagtacaagtcaggaattgcggcggagtgccgtggctcacgcctgtgatctcagcactttgaggggcggaggtgggcggatcacttgagcccaggaatttgagacctggacaacatggcgaaaaaccgcctctacaaaaattaaaaactaaaaattggctggg

SEQ ID NO: 211574 - DNA, 626 bp, Homo sapiens
ctcagcctcccaaaatgctgggattacaggtgtgagccacggtgcctgggccgccctcctactctgtaagtgcatgttgctcttgtactatgagcccctctggttaggatggcctctgcacttcttggaagtccactggaatggtgataacttcccactcatattaagtgatccctgttcattggctgattggcattccatcattaatgtttgggtcatttatagctaaaccagcagagcctagtggatcattctctagcgagcctgtctaatttgagtgatctttttttttttttttaaagacaatggtataaatagttttatgttaaatatcatacagactttgaaatgttcaatgaaagatagaaggaagataatctctaaagggcaaagtaagttgtttatggagacttctataaagcacctgtaaatcatttgggtgtcaatactgtgcatgttttataatggagaataaagtttccttaatgatgcttgtgtttgaagtataacgttttgcttttcagtaatggtctccctgactataattgtgtctataactttagtctgttacggaaaaaatgaaatggctgatagataagagttctgatttcattatgaggtaagaa

SEQ ID NO: 211575 - DNA, 478 bp, Homo sapiens
gagatggaggttgcagtgagccgagatggcgccactgcactccagcctgggcaacagagcaagagtgtctccaaaaaaaaaaaaaaaaaaaaagaggccgggtgcagtggctcatacctgtaatcccaggactttgggaggctgaggtgggtggatcacttgacgtcaggagtttgagaccagcctggcaaacatggtgaaaccctgtctctactaaaaatgtaaaaattagatgggcgtggtagcgcacacctgtaatcccagctactctggaggccgaggcaagagaattgctagaacccaggaggttgcaggttgtggtgagccgagattgcaccactgcactcctgcctgggcaacagagtgattccatctcaaaaataaataaattcattcttctaaagaattattctagaaattattctaaagccagtgtccatgcattttgattaacaggactggatgatataaaatcctc

SEQ ID NO: 211576 - DNA, 702 bp, Homo sapiens
tacaataggctaaaactataggagcataatatcttccttgaaagtctggatattaattggtggtgcatgtaattagacaaaagacattagctcctcctccttacatttttttttccaagagcaaatctcccttaaaatttcatctagtactttaattgtttagaaattaactgtttaaccattctaattccaaaggacgaaagtcacaattatgaaggtggatacatataggttatgtgccagcaacaaatgttatatattaaaaaagttgttgtggaggagttagagcagaatgagaatcagtcttctttgatagatatgtaacagaaataaaaatattttaaaatataggagatgaatataagattggcatttttaacatcattgtaaaagtaaaacaaagagatactatggagcaaaatgatcataagagggtaatagttatgatgccaggagtttcaaaattcccagaagtcagaccctgatagctctcttgagggctttgcactgccaatgcagatgtttccaatgttcaggaaaaactttgaaaaactagagtgtctgggcagggagagaggacagtgggatcagaacatgcagcagctgcctctcatctggtttaatggactgactttaagggcatcttctaaggaaggttggtactgacagtgtaagtcattcctttggcactctgcattcatt

SEQ ID NO: 211577 - DNA, 128 bp, Homo sapiens
tatatttgagacctgaatttaacctcagttttttgttaaaccaggttctggaagacttaactttataagaaatgaacatatattctgtgtaattttcccatcacattaataataaatgtttcagaaat

SEQ ID NO: 211578 - DNA, 276 bp, Homo sapiens
tccaaacccacagactagaaggcccaagaggggaatttgcctttctcagaaaaaactccaaggacagagaccacccgttggctttctcactttcccatcacctcatcctgcagggcatttgaggcagaattgggtgtttggtcaacctgggcagtggggcagaatgaaaggcctgggttcctgcccagcttggcctttccttagcagctgcctgactttggagggtccagtgggctgggggccatttcctgagcgccccaggctgctgtgatgcgg

SEQ ID NO: 211579 - DNA, 399 bp, Homo sapiens
ccattgttaatcataatgcataattccctgtagggcttccttctccagttgaatccctttgttctgtgatacaactggggaaaacatctaggggagaaaaactcttcgtattgatactcagaagaattagtttgatgaccaagacaatctgctaataatatttgagtggaaagatgagctaagggaattcttgaagtacaaatttacctaatggttgttttttaaaccttttattagggtaaaatttaagcacacacaaacatagagatggtataattgaaccccatgtcccattcacccagcaattatcaacacatggcaatcttttttcacctattacctacctctaccacctcctgctcttcaataaaatgatctttaacacaaaagaaaaaaaaa

SEQ ID NO: 211580 - DNA, 309 bp, Homo sapiens
ggtggaatggaaacaataatccatccaaaagaagacagaagaaaaagagaaacagaagagacaggagaatgagaaagcacccggagaaaatttctgcaaaatataaatcggataagggcttatgtccaggttatagagagaactcttaagacgtaataataaagacaaacaacttgataaaaaaacaagtgggcactttgggaggctgaggcaggcggatcgcctgaggtcgggagttcaagaccagcctgaccaacatggagaaaccctgtttctactaaaaatacaaaattagctgggtgtggtggc

SEQ ID NO: 211581 - DNA, 354 bp, Homo sapiens
agctggtcttagggttacagcaggctgtttcagcaactgggcctctggatagttcagttcttggagcctgtgctatgtgccctgagtgcttttttcccctgactccttgactcttatgtagttgggtatacaagaatgacccaattcatgtaatcaactttcacagatccaaatatcattcagttgaaattaagactcattttattttggtccatttaaaaaatgttgtcttttaaaattacatatgtatttttattgtggtaaagcagacataacataaaatttaccctttcaccaattttaagagtgtggctcagtggctttaattttattcacaatgttttgcaatcatca

SEQ ID NO: 211582 - DNA, 286 bp, Homo sapiens
tatatggagtgggacagaccttagaacagctaaaacaatcttgaaagggaagaataaggtgggagggatgactctaatattaaggcctgcgatataaccatcataaccaagacagcatgacaatgtcacagagggagacccatagatcaacgggagggagtaaggacccagaaacagacccacacaaatatggccaactaattttggacaaaaatgcagaagcaaatcaatggagaaaggatttcaacaaattattctgtagtaactgaatattcatccatagaca

SEQ ID NO: 211583 - DNA, 217 bp, Homo sapiens
aaataaatagccatggagtttttttctccttcttggctaggaaatatttaattacctaatgcttacaaagagaacaggatgtttgccttcaatgttatgcaaagaacccgcttcccttcctccagagctcacttctcaccaactcacctgcagagtacagcaagcctcctcatatcaagacattctccatcacagctgagaaaaaatgctttcatct

SEQ ID NO: 211584 - DNA, 558 bp, Homo sapiens
ccccttctcctgcctcttgcattttaacacataaagcagataaggtggaggagagaatggggctggaggagaatgttcgagttacccagagaagacatgagcaagtagagcaaagaaagaactgtgacctcccagtcacccatatttattcctttatcaaagaacgcaggagttagacttctcttttcctgatctattgtttctggagctcaggaagtacaatgcaccatggcaagtcagagtcatgagtttcaattccaccttccccattatctggctaagcaatggtggacttaatccaacgaggttcagagtctacatttataaaacaggggttatatcagtacttatgcctcaaagataacataggtagagatttggcatactgcttggcacatactaaccagtcaatgactgttagatattatcattaatactaatcccacagagtcagttgggttgcaaactgttttgcaccaaagtcaacattatagcacccactgtcacaatcctttgggcagcatcatctctttgcatcatccttgttggatcatgtgt

SEQ ID NO: 211585 - DNA, 385 bp, Homo sapiens
tacagtacaggcacagctggggagcaagggaccccttcttctgccaagctgcttccttctgcaagccccagggtggccgagtgcctgctgtgggccagacctctgctaggcccatcaggacacccctgtcctcagggtccaatgctgccaaggaggaggcgggggggtcggtgcagcgcactgtaggagtgggaagtcaaggaggcatcgtggaggagtgcggcttcccacaggcaccccttcaggctttcaccagctccctttgttgcaaggatgtgaggatgactgactttggaagtcatgccaaccaagtccctgctgacctgatcacccacccactactcttccaggaccaggaaataaacttcttttgtgattaagcctt

SEQ ID NO: 211586 - DNA, 398 bp, Homo sapiens
tcaattttagctgctggtcatcgttgatactattattgcagcaataacaagcctaatggctttcagtgctctgccatacgttttcagtcatttacagtgctctacagtcgtttcagtgctctgcaagcccagaattgttagcctcttatgcttggccttgatgaaaataaggcagctagagaagaaagatatgagttcatgattacctatctcatagaattcttatgaaaatcccaagagatataaaccataaaaaaagccgtaagatcaggaaaacacaaaacaaatggctagaatttaacagatagtaaaatatacaaaagtcaagagacctccaaaaactaagctcccaaatccaataagactcaataggagctaggatttcaatgcatactaat

SEQ ID NO: 211587 - DNA, 331 bp, Homo sapiens
ataagactaatctaattaaatcctcataaaaattgtgtgagatgtatatttaaatgaggaaacaggttcagaaaggttatggccataaatttatcaagtcatagaactgggttttctttttttttaatcaagtgcagaatatttgaaaacctccattttcttccactactctatgcttccctgaaggaatgtgaccctattggtagaatttagccctgtactcatattttatggtaaactacataactaaaaaggcatctgattaaatatagggttgtcatatggttttaatacacacagtagattaaaataagatttgtttgcctctcta

SEQ ID NO: 211588 - DNA, 528 bp, Homo sapiens
agcaagatcaggaggagacttgtatgggcctgtggttctccaggaaatatagctggatttagttagtttcaggatgaaaggaaactggtagtcaaggtgaggaaaaaatttaggctaagattagaaatttgagcaaatcggtgtttaagttaatatttttaaatgagtctcataactttgagttccctaatccctaggatcgcaaaaattttttgaaagcattaaatagaatggcttgggctgggcacgggggctcactgctctttgggagctcacagcactttgggaggccaaagtgggtggatctcttgagtccaggagttctagaccagcctgggtagcatgttgaaaccatgtctctaaaaaaaataccaaaagtagctgagtgtggtggcctgtgcttatagtcccagctaccaggaaaactgaggtgggaggatcacctgagcctggggttgtagagattacagtgaccactgatggtgccactgcactcctgcctgggtaagagactgagaccctgtcaaa

SEQ ID NO: 211589 - DNA, 451 bp, Homo sapiens
tacaagtataacgtaattcaaaatgacttcagtctattttatacttgatgtaagtatagcttcccatagtgaaaatcacctttcttctcccctgctacatcctcatcacagagtgtaattcttatgctgaggttccaaacccccctccttgaacagtgacacagctaaaaaaaaaaagtctcctatcccaattatacctccttcctggcagcgaactctgaaataaaaccacaagattaatattctgatttctcctgcaatagtcaccaagaagctctgaaaggcttagtggctgattttgaaaaataacaagaaattgctaatgcttgggaaaaaaaatctatttccatttcaggagacaattctgcaattattttcattgttcatttgaatgtactgggaatttttaacttagagaaagagtgaaaataaattgttagttcattatact

SEQ ID NO: 211590 - DNA, 717 bp, Homo sapiens
tagtagagacggggtttcactacattggccaggctggtcttgaactcctgaccttgtgatccgcccgcctcggcctcccaaagtgttgggattacaggcatgaaccaccgcatcaagcaagatggaattctttagccctgagtttggtgtactgagtcagaggaggttgtatatctatactcccctcccgccacaattatggagtaatggtgttgaaagttttttgaacgaccacatcctttttgcatgatactgatgtcaacctctagtggacagagtggtattaacataagtggaaatcaaaatgaggccttgggaataaataatcccagcattttgctggccccattttctgagcttgccagcaatttgtcttcactcgtggctgccagtcagggttgggcacttgggattttaagttttagtgtttaactactactgtgaggttgggtaattcattttcttctaatttacttgggtcaagggactctaagaaactattgaaaaagttttgtttaattatatatatttccataaaatatatttctgaaaatgttatttactaaaattgttatctatatgtgaaatttttttcaatgcagaaaactctaggtattctaattttaaaggagcttaagaaaggttgagacaatctgatatttgcagccatctactgtgcaagaatattggtaaagtcttgttcaaacttaattcttt

SEQ ID NO: 211591 - DNA, 789 bp, Homo sapiens
tgtggtggctcatgcctgtaatcctagcactttgggaggccgaggtgggtggatcacctgaggtcgggagtttgaggccagcctgaccagcatggagaaacccccatctctactaaaaatacaaaaattagctgggcatggtggcacatgcctgtaatcctagctactcgggaggctgaggcagaagaatcacttgaacccgggaggcggaagttgcggtgagctgagactgcactgttgcactccagcctgggcaacaagagcgaaattccgtctcaaaaaataaaacaacaacaacaaaaaacaaccaacaaaaaacaagggcaagagtgtacaaagatatacacatgtaaggacaaaccaacaattttctcttaatgattactcataaggggaagggcaggaacaggatggcgactggacagaaggtttgccttctctggatagattttatcatgttttgctgatttgaatctggaaccttatacacattttacatgattataaaagaaaaccaaatttttaaaagataattccaaaaaataacatatcaaaagcaaagtgaaacaaatgaacctgtgtgtcaaactgatgatgtaacaacagagagaaaatctgaatttaatcaagcttctagatctaactaccaattcacaggaaagacagaggacagtagaacatgttaagcaatactataaaattcagaccattggaaattctagaagacaaagaatctaggtattacaacaaattacaagaaattaaaaaaaggaagagattaaggggaac

SEQ ID NO: 211592 - DNA, 429 bp, Homo sapiens
tttttccatgtacagtctgtcacggcttcccttggcctgacgagggaaattcccagaccccttgcacttcctgagtgaggcaacaccccgccctgcttcgcctcaccctctgtgggctgtacccactgtccaaccagtcccaatgagatgaaccaggtacctcagttggaagtgcagaaatcacctgtcttctgctttgttcacgctgggagctgcagaagggagctgttcctatttggccctctttgaacggaccgtgacagagatcaagaaataatattttttaaaagatcctcttctgttcttgaaaatgcttacaatacaatacacaatttaaaaagtaggctaaaaacaatctaaaatcaccaatgctaaattaaaaaagagaaggaagagggactagagctaaagaaaggaaataaaaataaa

SEQ ID NO: 211593 - DNA, 341 bp, Homo sapiens
aaaaaaaagtgtgagaacaaatggcttgccaaatagagaatatcgagagagattaaaattatttttaaaaaagaaccaaatataaattctggagttgaaaagtacaataatagcagattagagcttgcaggaaaatcagcaaacttgaagacaggtcataagattatctagtctgagagacagaaaggaaaaacaatgaggaagagtgaacagagcctcagagacctgagggacaccatcaagtgtagcagttgacagacaccactggtctccctctctatcctttccctccctccctgatacttctgtcaccctgcaaaaaaaacaaaaaacaaaaaaca

SEQ ID NO: 211594 - DNA, 906 bp, Homo sapiens
  misc_feature (234)..(234): n is a, c, g, or t
  misc_feature (237)..(237): n is a, c, g, or t
  misc_feature (242)..(242): n is a, c, g, or t
  misc_feature (248)..(249): n is a, c, g, or t
  misc_feature (251)..(252): n is a, c, g, or t
  misc_feature (266)..(266): n is a, c, g, or t
  misc_feature (277)..(277): n is a, c, g, or t
  misc_feature (282)..(283): n is a, c, g, or t
  misc_feature (294)..(294): n is a, c, g, or t
  misc_feature (301)..(301): n is a, c, g, or t
  misc_feature (309)..(309): n is a, c, g, or t
  misc_feature (342)..(342): n is a, c, g, or t
  misc_feature (353)..(353): n is a, c, g, or t
  misc_feature (355)..(356): n is a, c, g, or t
  misc_feature (358)..(358): n is a, c, g, or t
  misc_feature (362)..(362): n is a, c, g, or t
  misc_feature (371)..(371): n is a, c, g, or t
  misc_feature (373)..(373): n is a, c, g, or t
  misc_feature (376)..(376): n is a, c, g, or t
  misc_feature (382)..(382): n is a, c, g, or t
  misc_feature (388)..(389): n is a, c, g, or t
  misc_feature (395)..(395): n is a, c, g, or t
  misc_feature (398)..(398): n is a, c, g, or t
  misc_feature (402)..(402): n is a, c, g, or t
  misc_feature (406)..(406): n is a, c, g, or t
  misc_feature (410)..(413): n is a, c, g, or t
  misc_feature (415)..(415): n is a, c, g, or t
  misc_feature (423)..(424): n is a, c, g, or t
  misc_feature (436)..(437): n is a, c, g, or t
  misc_feature (439)..(441): n is a, c, g, or t
  misc_feature (444)..(444): n is a, c, g, or t
  misc_feature (447)..(447): n is a, c, g, or t
  misc_feature (454)..(454): n is a, c, g, or t
  misc_feature (457)..(457): n is a, c, g, or t
  misc_feature (469)..(469): n is a, c, g, or t
  misc_feature (482)..(482): n is a, c, g, or t
  misc_feature (489)..(489): n is a, c, g, or t
  misc_feature (501)..(501): n is a, c, g, or t
  misc_feature (524)..(524): n is a, c, g, or t
  misc_feature (530)..(530): n is a, c, g, or t
  misc_feature (534)..(534): n is a, c, g, or t
  misc_feature (541)..(541): n is a, c, g, or t
  misc_feature (544)..(544): n is a, c, g, or t
  misc_feature (547)..(547): n is a, c, g, or t
  misc_feature (567)..(567): n is a, c, g, or t
  misc_feature (570)..(570): n is a, c, g, or t
  misc_feature (573)..(573): n is a, c, g, or t
  misc_feature (575)..(575): n is a, c, g, or t
  misc_feature (591)..(591): n is a, c, g, or t
  misc_feature (593)..(594): n is a, c, g, or t
  misc_feature (599)..(599): n is a, c, g, or t
  misc_feature (602)..(602): n is a, c, g, or t
  misc_feature (605)..(605): n is a, c, g, or t
  misc_feature (612)..(614): n is a, c, g, or t
  misc_feature (617)..(617): n is a, c, g, or t
  misc_feature (632)..(632): n is a, c, g, or t
  misc_feature (635)..(635): n is a, c, g, or t
  misc_feature (637)..(637): n is a, c, g, or t
  misc_feature (639)..(639): n is a, c, g, or t
  misc_feature (642)..(642): n is a, c, g, or t
  misc_feature (650)..(650): n is a, c, g, or t
  misc_feature (897)..(897): n is a, c, g, or t
agaaaatttaacagaataagataaaataattgccatagcaaagaaaggaaaaggaaagataagacaaatgcagaaggaagaaaaagagagaaaaaattatgtagtaactttcaggttttaatatatttgcaggataattactagtgtatataaaacctgattacatttctagccaagtttctagtactatcaaccaggagttcacacagttttagtcctgaaagggttttggcnttnattcntgcgcnntnntgtaatgtaacggngggggcgggantgggnngctgctaagcnccacacnggacaatntgcgcccttttctaggacaggagctgcacattnaatggcatggncnncntccngccgctccnanatnatcacncaggannaggccnggngccngggngccnnnncngggatggnnggccggaagganncnnnggnggnggatgtnccnttgttggagccncactgctggaggngccaggnatgaatagaaantgtaggatggcggccctccgcgnggtggngggngggtcangcngcngagaaaaaaaaaaaaaaacnccncgncnccgggcaatttccttngnntgttnttnctnagccctnnnttncggggtctcccggcnctncncnctntgctgccntctgctctcctcacagaacctgcacaccctcttctggtggttggggcagatatagcctgtccctagcacctcctcagaacagggcttccggcagagggggcagcagaagaccccagaggctgaggccttctccacatgctgtgtcaggcacactcgacagaagagatgtccgcagttggtgctcacggcctccttcaggctctcctggcagatggggcagacaccctcctcctgggttgtccttctncaaagggat

SEQ ID NO: 211595 - DNA, 325 bp, Homo sapiens
acgtgtgaaggctggaggagagggctgtatcccggggaggggtggcatcggatagagggaatcccatgtgtgaaggacagaggagaggtgagttctggggaatggttcccagggaagcagcctgaagaatgaagggagggagatgactctggaactcttgccagtgtccagctaggagatgacccatgggacgccgtacaggctctgctggagcacaacacatgtccctgctgtgtccccggaataggtcatgctcctgtcactctgaaggtcattagtaacaaggcagaacaaccacacaggacccccgggatacagctgaaca

SEQ ID NO: 211596 - DNA, 454 bp, Homo sapiens
cccccaccccacaacagtccccggtgtgtgatgttccccttcctgtgtccatgtgttctcattgttcagttcccacctatgagtgagaacatgcggtgtttggttttttgtccttgtgatagtttgctgagaatgatggtttccagcttcatccatgtccctacaaaggacatgaactcatcatttttttatggctgcatagtattccatgttaaaccatcactattaatgcacacttctaaaaatgcagtcacaaaccttctctttttatttgatacttttgtttttttgatctgatctttaaaacttttactcattccaggttataaactcaaattattcaaacttctactagatatgtctatgagttcaatcattatgcaaaagtaaaattaaccacttctgacttaaatttagtgttatgttattaaagagctttttgattccaggactc

SEQ ID NO: 211597 - DNA, 392 bp, Homo sapiens
cccagcccacagggggacagtgcaaatctagaaccaaggcgatggcaggggtgaggctggcacggtagctagagaccacgtcgtgccaagggccttggggaccatgggactatgggaccttagggaaggcgtctggaatgctgtagccagacactgttgcaaggaggatttttctgtagacatgaggccttccttatgaagaaagcaagggttctttcattcctgggggtgccaggtgctgtggactgcagcacgcgtggttgctgccgtcacagagctgtcatgcaggagggcagcgcgtccttgggaaggtggcaggcaggtcaggctaggaggaaagaggccgggaagctgagggcatttcctgcccgagatgcccaatgtagcctact

SEQ ID NO: 211598 - DNA, 285 bp, Homo sapiens
acagaccaaatatgggaggagatgatgatgattcacattacaaaaagaattcttgggcagaaacttgccacttcagcattcttctaggttgcacgattcctccgggccttttgaatatcatgtgatcaaccaagattggttttgtatagatgtttttctaggcacaggcctcgtctgtaaggcaggaacaccaccagctgactttgaacaaggggtctttcgccaacagcataattgaaaacaattcatccaggatcattcctgtcctcttgtgaagtgagctgg

SEQ ID NO: 211599 - DNA, 417 bp, Homo sapiens
taatggttgaatgggtggaggtagggggagccagtatttttctgcagctttgcatttgaagccactcagaacattcccagatgggcgtatggctcaaggtctaatggtttagctgtttgctttccctcttcttattagacacagaagttctcttaaccaccttttactcagctgccttacttggagactcataaaactcacagccttcgtaccccagcatagtgaagagcactcccctcatgctttagtctctagctcatgatcacttcttcattcccatatgagttctgtgttcacaaagggaggagtggttagctgtgtttgtccccaaatccatttatggtagctatatttactgtgtaaatataatgtaattaaatagtatgtaaatcaataaaatgagtgtgaatacaaaca

SEQ ID NO: 211600 - DNA, 289 bp, Homo sapiens
tcaggagataaattcgtgttaaaacagtattccttttcttacctagcatattggcaaagataaagaaaaatagcaaatttttaacagagattcaagaaagattggctttttttttttttttttttttttctggagatggagtctcgctctgttgccagactggagtgcagtggtgtgatctcggctaactgcaacctctgcctcccggattcaagcgattctcctgcctcagcctcccgagtggctgggactacaagtgcacgagattggcactttttaattcgctgtt

SEQ ID NO: 211601 - DNA, 762 bp, Homo sapiens
ttttatattactgcccatctcaatttagactacccacatttcaagtgctcaggagtcacagtggctactgtatggggcagtgtagctctagctttaaaggtatgagagactgattgtaagccggtagtagttggatttttggcacttcagtttcctcacctgtaaactattagatgaactataaggttccttcctttggggccaactttatagcgagaacaagggccctctatactttttttttttggctctctaaatgatatttaaaatgcaaatataatttccatatgcaaataaagatgtaccataatcttgagatggctgcctaccatagttcaccacagatttaatgcttaggtcaaatgtcctgatagcacagtgaggactctaaacattctattaaaaacttgacaattaatgtttttggcctacagatgaattttaacaattacatagataaaagtatatcaagtacaatttgggcaagtagggggtaaaactaaatttgccaataacatgactatgacatctaggttaattaccatgataactttagaaatcacatgtaaccagtattcataaaaccaccactctccaccaaaaagaaactgactatactgcctttttaaaaaacttcacaactaatagtggtaataagaaaatataaagcaactaaaaagttaatttattactcaatatcaaatcagcattcagttaagtgttacttctggccagagcgtgagcatcacgcctgtaatccca

SEQ ID NO: 211602 - DNA, 444 bp, Homo sapiens
accagaatgtactttaatagatgtcctctgtgcccagcagcccacaagcaggaaacaaatttctcctctgtctaaagcattactaagcctttatcaagggtgtgtcatgtgcccgggactatgcaacaaagaaaaatagcacctcctatccacagccctcatgtacatcacgcaaaggactaaagtgggcactaaagtgcccattgtcccaggcgatcatcagagccagacaggagaggactggggtggaaaggacctttataagttcccaaggaggtggcaagggaggtctgagtgggcagtggactgggtgctgatgacagctgctctccctcgggatggcagagaggggagatgggattaggggctcttcacttggggcaggtgacgggccacatccccagctgtcctacgccatgaatgcctccccgttgatgatacata

SEQ ID NO: 211603 - DNA, 237 bp, Homo sapiens
tcaacatttgaattttggaaaataaagaaaataatttagaataatgtttctcaaagggaaagggaaataacatttagtttggaaaagccaaacatacctatcctctttattaaaaaaattattgaagattaaagtgctgggattaacactttggctagtgcaaataattagaaaacaatgttagaaattggtaaggaacataagtgtaagaacgcttggaaatgagtgatttagaag

SEQ ID NO: 211604 - DNA, 546 bp, Homo sapiens
tctatttcccctgcaaactcaatgagaagccattaaaagtgctgtcttggggttctaggcgtatgtctcaaccatgcacgaaagcaatgatgctccaaggacatttgtctgtcagagcacagcaaggtcagaattgtctactaagtcccccaaggcctgctgtgtctggtatgttaccagacacagctcttaacatctctatctaataatagatctttgatttttgtttttgaagccacaatgcataacttttttttttaaaccctgaatgacaagagttttccttacactaaagtaaaatgtgttttacattttattgtgttggcattggtccaaattaaataatctggtaaaatcattaaaggaatttaagacttcaagttctgtctttcattgttccttctctgtgagtaaactttaccacctaaaagagcttgtttttaagagagtttatttgggttcaaaaagtgttgattattatatagccttgttgcttaactgcacatcttgtcgtatgttttactttttccccctctatcccaacat

SEQ ID NO: 211605 - DNA, 510 bp, Homo sapiens
tgtgtgcacgtgtttcccttcaacatactcaccacatcctagtctttctttacacctttcatttttccatattctaaatatcttcttgttttctcttcccctctagagtgggaatctctggagaatagccaataaatagacgaagacctaagtttcaccccctatttatactctcatggaatggatttcaattgtttagtgttctgtcttccccattagtccataagtttttctacacatgcagcagagttaataaatatctgaggacttattgtatgcaaagtgctgtgctgcaatccatggagatagcagcataaaaatttaaaaaacaaaaggccaaaaatttcttttctcacttagattgcattacagagaagatggataataaacaaggtaaagaaatgcagtccagctcgggcacggtggctcacatctgtaatcccagcactttgggaggctgaggcaggcagatcacttgaggccaggagtttgagaccagactggccaaca

SEQ ID NO: 211606 - DNA, 302 bp, Homo sapiens
tgcttttatgttttaatattgaaatctctttagtggttggaaataccctttttcatctctacagattttctcttagcctttcccacttttgtaatccacgatctctgttttaccagttacttatagttctagtgttaaacatcatattgagactacttatctgtttgtttgaaggcatggtgtttcagtcaactctcaggtctaattggtttgattctcatttctcatagcaactgagataggaaagaacctgtcagtgcaatcacttaaaggtcttttgacttcaacatcttttaccccgt

SEQ ID NO: 211607 - DNA, 416 bp, Homo sapiens
cgagggactctgacgggaaagtaccattgtgggttgggctggctcttgttgcatacccaaccctgggcaaggagtggatgcttattcatttgtttaatgaatgaagatgaaatagacccaaaaagcagatcatctattcagtggatgtttaccgagttcccaactggtcacaagtgcaatggaggaaggtgtgcttgacagggggtatacatgtaggtgcaactgtagacagggtggccaggaaatgcctcccctaaaaagtgacatttcggcagaggtcttgaggaggtgagccatctaggtacctgtgcaaagagcatctccagtccctgccccatccactgagctggaggatggggcagggactggagatgctgtgagaaccctgccctgcccgaggatcatgtacctgggcc

SEQ ID NO: 211608 - DNA, 427 bp, Homo sapiens
cagtgcttaccgtgtaaatttaacatactgaataaggtagtttaacatctctctttttatgaggagagagaacagattcttttgagatattctaggaatcccctggaaactaccgaagttagttcaaggtgagaaagacctaatggaggctgggcatggtggctcatacctgtaatcccagcattttgggaggccaaggcaggcagatgtttgctgaggcaggaagcagcctgaccaacatggtgaaaccctgtctctactaaattaaaaaattagctggacgtggtggtgcatgcctgtggtcccggttactcagaaggctgaggcaggaaaatcgctcgaacctgggagatggaggttgtagtgaaccgaaatcgcaccattgcattcaagcctgggcaacagagccagactccgtctcaaaaaa

SEQ ID NO: 211609 - DNA, 543 bp, Homo sapiens
agttgttgggaaggaacctctggttgcagcaggactgactgtacaatttgtgagcccagtgtgaaatgaaaatgcagggccccttgatcaaaaattataaaaaaatctcaagacagcgccagcagagcattaaaacaagccccaagtcccaggcgccacacagcctcgctcttctgcagttcagctcttccttttacgttcctcttctggctacctcatttatccttccgtaaaccttcactgatgagagatgtggtaacccaagcaagtctatcgttcttgcaactaaaatgaaccagcacacttaggacacgacagggttcctgctgtcatttcttcctcttaccttgtaccgtctaaaaattgcagggatgtattaaaatgctttctactccatgttattttaggtaatatttaattaggtttttatgctttaatacgatgtctgatgttctggatcgtatcctctaattttttctactataataaagttcctgacactagtttaggatggactgcatcctctcatcattaactactttg

SEQ ID NO: 211610 - DNA, 369 bp, Homo sapiens
gtttatttcaatagcgttttagatacaagtcattttggttacatggatgaattatgttcttaattctgagattttggtgcacccatcacttgagtagtgtacattgtacccaatatgtagtagttttacccagtatcactgggtatctagtattggtcgctgcatcgaatggtagacctacttttggttctttaaggactctccatactgttttccatagaggctgtactggtttacatttgaaatgcgttgttttcttgaatagccttgaaatcacaggtgctaacacataagagctagcaactgtacgtgaaccctgggctactaattgctcatcagactcctctaacccctttggtgtgtgccaga

SEQ ID NO: 211611 - DNA, 428 bp, Homo sapiens
cctacttgacatttccatctgtaatataatagttacctcaaacttgacatgtccaaagctgagctcctggcctttacttgccttcctctgccctcagacttgctaaacccacagttttcttcttctcagataatgacatctttctgttacttgagctaaaaaaaaccttagtcatcctggactcctctttctccctcactgcggtcctgttaattagcaaatcctttaggttctgcctttcaaaaataacctaaattcaatccatactagctcttcttccttttttttttttcctcagtctcgctctgtcgcccaggctgcagtgccgtggcatgatctggctcactgcaacctccgcctctcaggttcaagcgattcttgtgagtcggctacctgagtagctgggattacaggtatgcgccaccatg

SEQ ID NO: 211612 - DNA, 927 bp, Homo sapiens
ttgatgatttgagattcttactctataggttgatacagtaatacagtatgagtagatatacttaggacacaggcaggatgggaaaaaataatacctacccccttgcacccaatattcccagacccttatggttgatggctgtagtctctcagctgtgactgctctgcagggacctccatctctcacccgtcagacagcgactgaaggtggcttacagagcatgaaggacggcgtgtgagttggccagctctgtgtgcagaagctgtttcccaaaaccatttgtgtgtttaggtcttggttctggatgagagctgtcgtggaagctggcccccttctgtttgtgaaaaagaaagcagcatgggtctgatggtcaccagtttcgaagcccctctcagcacctgctttaagggagtgcaccgtgttgttgggcttgttttgggagaggggatcccctggagggagttgttcaggaccttccacagtggtagagaaacaactttggaggtcttgggatgttttagtaggctttgggcagggagtctctgaccaccattctttttttttttttttttttggagcagagtcttggtttgtcacctaggctggtgtgtgcagtggcgagctctcggctcattgcagccttctcttcccggattcagccattctcctgcctcagcctcccaagtagctgggtctacaggcatgtgccactacgcccaactaattttttgtattttcagtagagatggggttttgccatgttgcccaggctggtcttgaactcctggattcaaccgatccatctgccttggcctcccagagtgctgggattacaggcgtaagccactgtgcctggcctggttttgttttatagatgcacagttatgtaaaaatataggaaatattttattaaatgcctgcagagtt

SEQ ID NO: 211613 - DNA, 237 bp, Homo sapiens
taaaagcagcagactgtacctttgctactgagcacagagagcttcttctcctgagatctcttcctcctgcttgggtccggccccagctcctgctccagcaagtatgaccatcctccaaaagaaatgaaggctacaaaaatgctcacatcttattaaacctgctctttgatttctcttgggatggaagcactcttctaaattgcatcatgtatattgcagatagtgcccaccttcctt

SEQ ID NO: 211614 - DNA, 449 bp, Homo sapiens
ggcttgttgacaagaactgtgctgctcttggtggttggcaccctcagatgctggagggttcatgtcagtctttccaggctggccacaagcctgaccccaagaacaaagtgggagccaggactcccccatccccttcctgtgccttcttctgctgagctgagtgccactgacttttgtgccttatatgtttccttgggcatgaagagtccagcattggatgtgaggagggacccagtagggtggctcaggaacatttgtaacttcttattggacacttaccttgtaccaggcactggaaaagctgtgttacacacattatatataatcctaccataatcttgagcaggggtgtctaatctcattttacagacaaggcaattgggcatcagagagtggtccactgatgcgctcaatgccacagagctgatgaatggcactgccaagatttg

SEQ ID NO: 211615 - DNA, 268 bp, Homo sapiens
acaccctggtgcagggaagactaatgacagaatgtcacgaagcagaaatgcagaaacataggagtaattgcgcagcaagtcagagagctttcgatctgaatgcacgcaacagcaggaaagcccattactccaactgctgaaattatgtctcactggagtgaagtctacagaaatatttatagaattagcaaaatactatcattggcagttttggggattgcctaatctcctgaaaaccttttatgggctgtggggaaagagctggggg

SEQ ID NO: 211616 - DNA, 266 bp, Homo sapiens
ggttgaccacccttgttatctgatctccctggcctgccttcagcaggaatcctatcaggtctgtttagacagaaacccccttatccttggggcttcctcttagtaattttccatgcgctgctttccaccctgctccttgattataaatccccacctgtccttggtagagttggtgctgagttcaatttctccccactgcaaagccctgcagtgcccctctacctatcaccatggccccctggaataaagtctgctttaccatctga

SEQ ID NO: 211617 - DNA, 331 bp, Homo sapiens
caaaagtgttctaaagccgcatgactagtgagcggaggcctgaggcagtgactagaaggtaaggccacctttgactctgccaagggaagtaattaagacccaggtggttctccttagggtgcttcccctgcaggtgtcctacgtactcacgcttatcaaggagagcaggtgtcctacatactcacacctatcaaggaaagacccctttggtactgacagaaactgagcattgggaggatcgcttgagcctgcaaggtggaggttgcagtgagccaagattgtgccactgtactccaacctgggtgacagagtgagaccccctctaaaaaaa

SEQ ID NO: 211618 - DNA, 225 bp, Homo sapiens
caaataagaatagaaagatatgtaaaaaacaaaaagcaaacaaaaataaacaaaaaaaaccaaccttactgtttaggaagctcacaggtccaaggcctgttatcttaaacaacaatagagcagtgtctggcacacagtagctgctccgtaaatgtttggcccaaagaatagtatcactggcatctctgcatttattgagacttcatattgcagtgaccccttgct

SEQ ID NO: 211619 - DNA, 715 bp, Homo sapiens
ggtgaaggataggcatcattggtttacccagtaagggattctctgttactcaaaataattatgggatcatttaaaggaaattaagtctgacatcactgactatttgtggtatatttacataaattttgtcaaaatctagtaaggaaatgttaagatatgaaaccattaaagaaaacaggttgagccattaaggtgtaatatcagcagaacagagcttagaggtctgtttctccttccatttttgttttatcaggtaactatatcagtataattcctatgaaggtgctctagtacttaattaaaaattgtctgtgccacaggtataattttaatattaggtagaactcgagtctgggttggctatttatcagagtttgaattccagctctgctacttgcaatatgaccttgactcttggcaagtcacttagcctctctgtccaatctataaaacgagcggcgtgggccagccagttgctgaggtctgttaggccctttgggttacataaaaggagtaaagtgctgtccgtgttcacagagggcatgtacagtctagtagaaagactatcataaatgcataaataacagtagtactaggtagatgacgtaggaatcaaaagataccatcccattcatgtgcttgagaatattcagtcggtcagaaggcatgaaaggaaaaacaaatatcaaagagattgtaaggcagtgtgtactaa

SEQ ID NO: 211620 - DNA, 725 bp, Homo sapiens
gggaaccccagacctaaacctcagccatgcttctggcagcacacccagcactgtctctccaggtgctaggaaggcactaagacacacccacccagtccaggtgggctaactcaccaactgacccatcatagcaacttggcttgcccagcagcatagcccatccggatgactctacctactgctctataatcactgtgtggtgagaaaaaaaaagaaactctgccttgaaacctcctgttcccccaactagttctcaggagaatgtttgtgctttactctctctctctctcactctctctctctttctctctctctctgtgcctatatgtaaagactgatctgcagtctgccatcatagggagaaatgtgcttctagcctcacctctggaaaaagaaaattaataattaattaattaaagatcttaagatggagaggttatcctgaattacccagtggttccagtgtaattacaaaggtccttataagagggaggcaggagagtcagaatgagagaaagaaatgtgatgatagtagcagaaatcggagtgatgcaaggaaggggccacaagccaaagaatgcaagtagcctctaggagcttgcaaaggaaggaaaatggattctcccttagagcccccaaaggagtactacactattgacactttgatttgaggacttctgacctccagaaatgttaagtaataaatgtgtattttaagacattaa

SEQ ID NO: 211621 - DNA, 746 bp, Homo sapiens
taatagagaaaagctagcttgagaaacttaagaaacaggttgtattctgtcatgaaaacaattttagttctgaatttgcattgcaaaagacattgtcttgtaaatgtaaataatttcattaacagtgaaatgaaaacacaaaattaaaaaaattctaacttaaaagctacatactacagactctaatagtttaagagacactaaagtagaccaattaattagtctaattttaagaacctcagaggttgtctgttttgcagacacaaagtattttgggttcaaattttgggaactacactagagagcttaataagagtaaagttcagcagtaattcagttcaactagtcagaacaggattgtaatagttcaatggtagtgaaagttctgccattaaagcttgattgagttagttaaaagattgagaaacagaagggacagcagactctcacaggaaaaaatcccgaaagtggttgtaagtaagcccctcattgtatcacaaaagaaattctctatatctgattcttagagttttgattgagaataagtaatgaatgttagtaaatttcttctgagcattaatctccctctctcaaccacccaggaatctgcccaacctctatttttagcgcttagcttatcttaccttgtgttgcaattatgtgcgtctaggactttctcttcttgtatgcagaaggtttagttagagtactagccttgaattagtttatcatctctgtaaaaactc

SEQ ID NO: 211622 - DNA, 837 bp, Homo sapiens
gaaccactgtgtttgactcctgtaatcaaagctgggtgaagaaggagactgcaggtactgaacaggaaaactgctgtggagcctggtctccaactccgaggcttgctttatttgaggagctccccacctgtgctgggctctctagcagaggcaatacggcatcagctgatggagctgcagtctcccccagcacttctcaagtccccacccccagcccccgacctttttctaaaggacacagccttcctttgttatctttttccacagaatgtaaaatgagtgtgctgagtgaaaagtccatgacccctgtgaactggctctgcttttgccaaaggtgcaaaggtttgtcattcccttcatgagccttcaagtagtaacttcagctgaccctgggggaatgtgaggtgcccagggtctggccttagcagggctgtgggtgaaggaagtgttcttgttcttagagggttctgtatccaccaggaatgtagagtggagacagttcttctcagcttctttttctgccctagagaaacaagcatgggaagggtgcgtgcgtgcgtgcgtgtgtgtgtgtgttcagcctcactgggaacagtatcttgactttcacttggaaaaggtaatggtggatccttgtgtgtgtgtgcgtgcatgtgtgttttgaccagcctcactgggaacagtctcttgactctcatttggggaaaggtaatggggtatcctccccccacctcccaaataggacagttagctgccacacacttacatgcacattttaaaaactgtgcattgcgaatggcaaatatgtattagttcactcacctggtgggaggacca

SEQ ID NO: 211623 - DNA, 472 bp, Homo sapiens
gagcctcagtttactcgtgtgtaaagcaaggaggctggactcgacaacccttaggatccattccaggtctaatctgtttccgaacctttaatgcgcacctagagtgtaccaaacactgtactatttattggggatatggtggggaacaagaggccaaggaaggggacagtaatcgggtaggcaaattaagaagcaggatagttttaggcagggatcaatgctgtgcaataaaccaggtgctgtaataagagtggctagggggtgatggaagtggagagggatttctaccatagaaggtgatcagggaaggcttctctgagcaggtagtttttgagaaggttacaggtgggggcggagcactccagacaaaggaggagcaagtgcaaacgccctaaggtaggaacaagtctgccctgttggagaagataaagaaaggccatgtggttgggacagaggcaatgaggttggggtg

SEQ ID NO: 211624 - DNA, 292 bp, Homo sapiens
tttggatccgagttcgttgtagaaataaaatgtgtatagtggggattttattttaagtttgttgtttaggtagttgaggtctagggctgtgagaagtcctaggaaagtgacagcgagggctgtgagttttaggtagagggggattgttgtttggaaggggggtcagggttgattcgggaggatcctattggtgcgggggctttgtatgattatgggcgttgattagtagtagttactggttgaacattgtttgttggtgtgtatattgtactagagattgctcgggggaata

SEQ ID NO: 211625 - DNA, 704 bp, Homo sapiens
catcagtcttaggtagttctaccttcagatatattgtacatgagggaagagtaaacttttatgtttaagcccctgttatttcagctctctgttactaatttccccgaagtgataccaaaatggtagaatatgtattcctctttttttcttggttaatttagaagtaatactgtatttttctatttcattggttgttacattctctttcgcggcatgcatagtcaaactacatttctttggtcttttatgaaataccagttattgtacatccagccacatcactacttctcccacctcagaaagtagagacttccagaatatttacttccccaccttccatctttactctcaagttgacatcttttcatcacttccgtttcctttctctgtatcccctgtatcaacttcaaagatttagggagattagcacttcaattctagactgttattatgatttctcttgccgagtacctctattatttcaagcatctttatttagcatttacattacgaattcccagtcactatatcattatctactcagacttaattatatatacaacagatgaatcattgctcactatttgttctcttcatcttctctgattttgaagtctgtgttctgatttatttttcgattgaatagtccttttaaaagagttttccttagatgagttatgtgggtaatagaagccgtgggagtg

SEQ ID NO: 211626 - DNA, 320 bp, Homo sapiens
gtctccccctcccccatcgtattccccaaccctggtcagacacttgtgaccgggccctgggccccaaactggtctcaggagctcgggcagaaccaacacttgcgtgtagtgaagcctggctgcacagctcacaccgtgtctgcagcttcagggagtgagcccctggttacgtggccattctaactgggaggatcttgtactctttccttcccagggacttttgggaactttttggaaactctagggtgtcagccagatcctgagggagtggagaggtcttgagtgacttagcaggacataaagtcttagttacttgactc

SEQ ID NO: 211627 - DNA, 374 bp, Homo sapiens
atttgtaatttaaagtagatttttcatgagcatggctttgatgctatcattttttagtcattgtttagagaattaatgtgcatagtaggaataatattattgaatatcagcatatagctgattatttgccccagatcactgaagttgaaatattacctaatgtgattggtgtaggaaataaaacttgtttaaaacacataatatattcttttgaaaaatgaatattctcaaatactaaaaaatagtaagtattaaaaattatcaatacatgttggttttttaacaaaatatatgttatttcaaaaaatatgtaattttgaattgattccaaagcaaagggatgatcaaaagcactttaaaatttctaacataaa

SEQ ID NO: 211628 - DNA, 656 bp, Homo sapiens
tgtcccctggcatcgctgggaattcaacagacacagcccacagcatgacttccagaacacctgaatcaaattactcctcaggatgataggcacatataataggagtgtaaccgggttgggacagtggcctcacagttgccttattttaggtaaagcaatggcagggaagaaatctttacctaggaaaccgtgtgcgtgtgtgtgtgtgagtgtgtttgtgtgtgtgtgtttgtgctgggatgaacctccaagtaggtacttttggcagctgccatcatcctctcagcgacggaaggacaagaagtcgaaagtgcgctttctgacctgagaatagtcaatgaagtatagtatttagcacagcgtattttcttccctagtgagaaaggagagatccgtggaatcaaacagaccttccagcgataacctttccacgttgagcctattgattctctgtccgagtgaaattacctgccagtggagaacaagacaagtctttgcatgaaatgctcttgtggaagctagattgccaaataataaagcatcaaatggtagaaacatgcactgaagtttgaagagatactcagtgcacaaagtagactgtgaaagcctttggggaaatcatgcaatccccgagagactgattgatgacaatcccc

SEQ ID NO: 211629 - DNA, 829 bp, Homo sapiens
actatttccctgggcttttgtttcctcatctgcaaaatggagagaacaatgtctgggtacctaatgacctgaaattatggatactagggatgccatgcttaattaaatgacaagacgcctgtcttgattactgctgtgactgttactctcctccacggcaaatggagaaagcaaagcctaaagctttattgctggacagaagacaaggccagcacaaggatgagaactgccatccagaactgctctccttccaccactgagggccacttggaaggtgacctctgctggctgttgtgtgtgccaagggcagatctttccagtatgggcctggctgtgttggaggtttatcttgattcctcgtggcttagaacacaaaataaaatgttacatagcaccacgattcgtgattgcctagcaggctatcaacagatttgtttaggatgtgaaataatgaattcagaatattgtattgatgatggttattcttttatataattacaataattatccaggaaaatagcaaacagatgcagtgctgaattcaaataaagggtaggaagaagcgtcccaaatactgacgtgattcagaatattatatgagttaaccctacctcttaaactgcccatgtcagaactacaaggtatggataggcactctttataaatggacataatgtacgcactaaagcgaaatacacatgcgtgttacagtgggtctaggggggttactcagaaaaggtatgtcagttaggacccaacatgattctatggctgcagactgacaggtggcaagagatcatgttcctcaaatttctccatctctcaatgg

SEQ ID NO: 211630 - DNA, 595 bp, Homo sapiens
tgggagtacgatggcgcgatctcagttcactgcaaacctcaacctcccgggttcaagcgattctcctccctcagcctcctgagtagctgggattacaggcacacgccaccacagccggctattttttgtatctttagtagagccggagtttcaccatgttggccaggctggtctcaagctcctgacctcgtgatctgcccgccttggcccccataaagttctgggattacaggcatgagccaccgcacctggcaaatctacataattttaagtataaaatgattaattttcttccagacagattagaattttttttttttttaatgagatgaagtcttgctctatcgcccaggctgagtggcatgatcttggctcactgcaacctctggctcccaggttcaagctattctcctgcctcagcttccctagtagctgggactacaggcatgcgccaccacacccagctaatttttttttgtattttgagtagagatgggttttcaccatgttggattagaatttacagtgatttcattgtcctcaatttagttgcctcaaatttttaaatattacattttttgttaattcatatgaa

SEQ ID NO: 211631 - DNA, 337 bp, Homo sapiens
ttaggagaatttagaaaacagtcactccaatcagcttgcacaggatttaattctcccatggtatctcaaaaatataaaccaaaagccacctacaggtgaaaaacccatctttctgtggccatagctatattttctgttaaatgtaataagtatagctacttttgctctcaggacttaatgaaaataagtaacgatggtgtaagtgatactcttgacactaatgactaggttttctagcagttttactacttaggagaccttcttttcaaaagaaaaatgatactcagtgtttacagaagttatatctttttggaatggccacattttatagctgttt

SEQ ID NO: 211632 - DNA, 1257 bp, Homo sapiens
attaggaaggtgaaagttaagaggaaatgagtatctggaaacatcagaaatgccttagttaagtacagttactcctagtaaccactaacccaggcctgtcataggcctgcttcattttagatatgatagaactctattcatgaacacactgcttgtctctgggactcctggattactctgatagtacctcgaagcaaggattttgccctcaaatttcctctctgtattggcaacgtacttcattagttggggctttatgtcccattatgacttcagttaaaaggatgcaccctgtattttgttttcttctgagtattagaaccatactgtctttagctaaaatagcaaccccttgggaaaaggcaacttctttttagtctacagtagtccatccttgtttgcagaggataggttctagattccccaatgaatgcctgaaactgtggatggtactaaaccctaaatatattaaattttcctttacataaatacctatgataaaggtcagtttacaaattaggtacagtaagggattaacaacaataacaaataacaaaagagaacaattatgataactactgtaagttatgtgaatgtggtctctctcaaaatatgttactgtcctgtactcacctattttcagaccacagttgactgtggataactgaaacaatgtgggtaagaggggactactctatattctaactattctaacctatagaaagtatttctgtatattaagatgtaggaggtacataaccttcctgaaaacttatggaatgacatcctaacataatttattttgttgctctgcaccaaaggtggttctggtatgtctattatttgtctggtttggatgtaaaatgcttttctaaagcttgagaaagaaaaaccagctattactacgacgtggtaaaactgcatattcagagcactaagactagggactcagtatctgtttggtgcattttaaaaatttgctatcatttgttaaactgattttgtcctcctataacttcactccattctttacaattttactacttagccaatgccaaaaaaagaatcataatagaaccgctataatcaagatgagaaacataatacttactgattcataaaatcaatacagtggttaaatctgagggtaggaaaacattcccagtggaaataatgttctttatacaggacatcttacctcctcaaggaaatctacagtttatttttgatgacggtgtagtatattataaaataata

SEQ ID NO: 211633 - DNA, 446 bp, Homo sapiens
ttttctctctgtttcgcaggcccgatagctctgggaaagcagaacttggccttttccaaaaattttctgcccttggttttggggatcatttgggcaagcccgaggtgctgtgcatgggggctcctggaatcctgggaagggcagaaagccttggccccagactcatcgtgcagcagctctgagcagtatttcggctgaggagtgacttcagtgaatattcagctgaggagtgacttggccacgtgtcacagccctacttcttgggggcctggtggaagagggtggcgtagaaggttccaaggtcccaaactggaattgtcctgtatgcttggttcacacagtgcgttattttaccttcctctgagctgctaatcgcctgcctctgagctgggtgagataaatatcacaaggcacaaagtgattgtacaataaaaaaatcaaatccc

SEQ ID NO: 211634 - DNA, 336 bp, Homo sapiens
tggcctcagatgggcagcactcctcctgaccctgggcttcagaaattttcactgggagtctgatgaggctcagccacagttgtgtgggactgttctcaatttcaagcagaggagcagagaaagctggttagttgcggaggcttcccacattacttggaccctacaatatatatgacttctatcacaggacatggtacagaactggaacaataaagcattttttaaaatttaatttcttgagcaattttagtttcacagcaaaattgagcagaaagtatagtgttcacatatacttccctgtttattacgcacacactgccttcctcactactgaag

SEQ ID NO: 211635 - DNA, 547 bp, Homo sapiens
agaattggcatccaatccttacctttattgaagcttccaacctattggaaaaaaaaaacatgtttatagacaaacaagtgccacacaggtaagtgtatgaacagtgccaacagaatgatacaggaacgacacgaagccaaatgttacaaggagatcatatttcagtagaaagtaggaaaacaaattttcttaatttcagcatatacttttgtgaaaaaaaaaaaaaagccaggaaatacgagactgaatgtttgatttctaaaatccttggcttccctgttcttttatgctacctgtatacccaggctaaaggagaagtatttactggcagcaaatttcagcatctcccaacaacatggattcctataaatttcaaacactgtgtgatacgaaagaatggacagtattgcaggcatctttccatctccattcacatactttctacacatactatgctttctttcaggtatggaacatgtaagctagaaatcattttcagaacatttttcttagaaaatatcttaaaattatgttctaaaaatcttcc

SEQ ID NO: 211636 - DNA, 341 bp, Homo sapiens
ggtgagtttcatactaggactgcttgatgttctggaatcccttaaccaggagtcccagttgccttttgagagccgtggtcagacccttggcgagggtgtggctgaggatggccctgccagggggaagggcccgaaagccccttttcagcatgactttaagttcttgtcatttctaagagcgtacatgtttctctttttgtgaacagctcccactatatttctctaattgcaaaaacgtaagaaatgtaaagcattccttagtgttttgctttgaaatgtaacatttaatttcctccgttcattctattaaaattgtagctcttgttatttctgaccaaaga

SEQ ID NO: 211637 - DNA, 392 bp, Homo sapiens
ttaattgcactgagatattttggtcgttaccttgcaagtttctgtataaaacatagatacctgagttttaacacactgcaagtttatactaaggataatctgtgaaggtagggcaaagaaggttctaggaaagcccaactccacttgcttcttttatcacgacaggattcttgaaattacagcattggtgggttttttggtattttttttctttattagaaaatctctgttgtcacgtccccatgattactttggtttcattggtttatggtaactgctgtgagagtaaattaatgtgtatatgtttagtatttactctgtgcctagaatatatagatatcatgagaatacaaaaaattaaagacatgattattaacttcaaagagcttata

SEQ ID NO: 211638 - DNA, 312 bp, Homo sapiens
tagtgggattatcttgtgagagcttgatttttatctatgattttattgcataataataaaatttgtcaacaccataccatgcagctattactgttactggatcttttgggaaatttcaaaggaaagagaagacgtttttatctgatttgacagctttggagaattgttaatttatgtattttaaaatgtagacagctgatcctaagggaaaatattgaatcagaagataagccatcaaactttatttgataaatataacataatagaatatatttcaacttcaacttcatataaaagttgtttaaggaaaga

SEQ ID NO: 211639 - DNA, 468 bp, Homo sapiens
taatgggtctgtttcacccccaaactgtatggtcacggggatagattgacaagcccatagatgccattttacataatctctaagctgtttttcagtgacttcggttttcttacataacttccttatcatgcccggatgcctcagggaagtcgtagcaatttctctttcagtagataaagccaataaactggctttagaacaacattctgaggtttaagcccacaccaagtatgaggagttctataagccaaaagacaccagtggatgacaggggacacttattgaaatagcagacattttgctagacactccaattaacctgatatgaggtgctaatcaataaaaaatagttaaacatttgcatgactctactcatttgggaataaattccctgtttaatatctcggctttttatagaaaaataattacttaaaagagtaaaccaggtaacccaggcctgtgaactat

SEQ ID NO: 211640 - DNA, 445 bp, Homo sapiens
aaaggcaaggtccagctctgtcacccacactggacttcggtggtacaatcctagctcactgcggcctcgaacttctgggctcaagtgatcctccagattctgacagaagatacagatggaactcattggtcagagatcactcacatcatagcaagcagcatgagcttcaagtttatgttgctttctcttaccctccaagtccctgaggagtgatatgaagtggctcagatacatgttgtatacacagtaggtttatgtcacaaatgaagaagcccaagcttaaggaactgatttttaataataggtgcaagcaaaatgcttcaaaaggtataattttttgaaagaatactggagaatgaacaaatatgccttctgcttcaggagaagatactacctgtacctttcaaagtacttcactatgtaagcaataacagtttagaataga

SEQ ID NO: 211641 - DNA, 455 bp, Homo sapiens
atctatctgcttcttggctaccagaaaccaaaatcaacattaaaaagtgtcaaacctccttaaacagccagatcactggttgcaaagactgcagaggaagagatataaaactatcttagccaaaaacttggtcgtgatatattaaccctaagtgttccagagaaatgtaaagcagaaacaaaacaaaacaggacagctggatcatccaattctcatccatgatgttctgcttttttatatggctttttctccctctaatgactttatgtcataatgagtgagtatcagctcatttaaaaaattggaaccaatccaaggaaaatacacagggctgctgccctttttaccaaagatctttcattaactaatgttgatggaagcaaatttcaccacagcaatttacatggtagttgagttgctatttgtatggaacagcaaaccagagagtaataaaa

SEQ ID NO: 211642 - DNA, 549 bp, Homo sapiens
aggacgagaaagttcccatctgatgccttctgttttctgaatgatacttgaggtgaggttattagaggttgaggatggaaagccaaagagttgaaaagatcatcataattgtttctagttatggtgtgcttatgttatgccaatctctgctctaaaacctttacatctatgaattaatttatgtaatattttgaagaacagatgaggaagctgaagccaagaaagttagttccttgataaagatcccacagctagtaagtggtagagcttggacttgaacctgagcgtcttcattccagcatctatgtactttacttctgtgcctactgcctctagcctggaaccagaaatatgagatcaaccacttcaagagtgggacacacaataagagaggctgcctggccagactgagtgcccagtggagatttgtgctcgtgagtttaatgtgaaaccaataagctcactcatacagttctgggaaggttcagctgctgagtgcaagtgaggagaagatggtagtttagggtgttccaggtgagtataccaaag

SEQ ID NO: 211643 - DNA, 174 bp, Homo sapiens
tcgcgtgtgctggcattacaggcgttagccaccacgcccggcatgcatcattattttcaaaccatctggtaacttccctactgcactggctatgacctccagtataatgatgagtagaagtggtaacagattattctttgtcttactcctgaagtaagggaaaactgtagcaca

SEQ ID NO: 211644 - DNA, 104 bp, Homo sapiens
tgtatcggtgtgcgcgcgcgtgtgtgtgtgtgagagagagagagcacccgaggctcctggcgcttggcacatggtgagccctcggtaggtgggagccgtgaaca

SEQ ID NO: 211645 - DNA, 162 bp, Homo sapiens
agttgtcagtgtgaaagaacatgtccagttggtatggcagtagaagttgaatataggtcataaggtagcattatgctagggatgttatgagtagaagccatgaataagcagaggccaacaggagatatgcaaaaagtatactttttgcaggagatgactagc

SEQ ID NO: 211646 - DNA, 428 bp, Homo sapiens
aataaaataaggtgtcctgggctcactgtgtgtacctcccaccacagactggaatctgcctttgctaaggagcattacagtgggaaattaaatttagaagccacagactgacaggaggtattggaagaaattccaacttgagtctaacagatatctcagaaagagacaactgagcgaatgggaagtacagatatagagaaatgatttttttttgttttgtttgttttctaaaagcttctagatttgagggaaaacacaaacacatacttagaagcagcagacccacttcatccttcaattccagtacatcaggtgtaaggaaaaaaaggctatttaggacattacagagggctataacgcccaagctccgatgagaaactgattagtatcctaagatctctgaaacgccaagtagaaaagcaaaaaaa

SEQ ID NO: 211647 - DNA, 5035 bp, Homo sapiens
tgctgatcgctcgtgccggtgcggccgttaaccgcccttgccggagccctaggctcaaaagcagccccttacccttcctgggcttcccccaacccctttcccggtctgccctggggcatgagcagcgatggccggctgcatccctgaggagaaaacttaccggcgcttcctggagctattcctgggcgagtttcgcggaccgtgcggcggcggcgagccggagccggaacccgaacccgaacccgaacccgaacccgaacccgagtccgagcccgagcccgaacctgaactggtagaagctgaggcggccgaggcttcggtagaggaacccggggaggaggcggccacggtagccgcgacggaggagggggaccaggagcaagacccggagcccgaggaggaggcggcggttgagggtgaggaggaggaggagggcgcggcgacggcggcggcagccccggggcactcggccgtgccgccgccgccgccccagctgccgcctttgcccccgctcccgcgaccgctgtcagagcgcatcacccgcgaggaggtggagggcgaaagcctggacctgtgcctgcagcagctctacaaatataattgcccttcctttttggctgctgctttagccagagccacatcagatgaagtccttcagagtgatctttctgcacattatatcccaaaggaaacggatggcacagaagggactgtggagattgagacagtgaaattggcccgttctgtcttcagcaaactacacgagatttgctgcagctgggtgaaagacttccccctccgcaggagaccccagctttattatgagacatcaatccatgccatcaaaaacatgcgcaggaaaatggaggacaaacatgtctgcattcctgactttaatatgctcttcaacctagaggaccaggaagaacaagcttactttgcagtgtttgatggccatgggggagtagatgctgctatttatgcctccattcacctccacgttaacttagtccgccaggagatgttcccccatgatcctgctgaggccctgtgcagggccttccgggtcactgatgagcggtttgtgcagaaagcagccagggagagcttaagatgtgggaccacaggagtggtgactttcatcagaggcaacatgctacatgtggcctgggtgggtgattcccaggttatgcttgtgagaaagggccaagctgttgaactaatgaagccacacaaaccagacagagaggatgaaaagcagagaattgaggcccttggaggttgcgtagtctggtttggtgcctggagggtgaatggaagtctgtcggtttccagagctattggagatgctgaacataagccatatatctgtggggatgcagattctgcctccactgttctggatgggaccgaagactacctcattctggcctgtgatggcttctatgacaccgtgaaccctgatgaggcagtgaaagttgtgtccgaccacctgaaagagaataatggagacagcagcatggttgcccacaaattagtggcatcagctcgtgatgctgggtcaagtgataacatcacggttattgtggtattcctgagggacatgaacaaagctgtaaatgttagtgaggaatcagattggacagagaactcttttcaaggagggcaagaagatggtggggatgataaggagaatcatggagagtgcaaacgcccttggcctcagcaccagtgctcagcaccagccgacctaggctatgatgggcgtgtggattcattcactgatagaactagcctgagcccagggtcccaaatcaacgtgctggaagacccaggctacctagatctcacacaaatagaagcaagcaaacctcacagtgcccagtttttgctaccagttgagatgtttggtcctggtgcaccaaagaaagcaaatcttattaatgagttaatgatggagaaaaaatcagttcagtcatcattgcctgaatggagtggtgctggagagtttcccactgctttcaatttgggttcaacaggggagcagatatacagaatgcagagcttgtctcctgtctgttcagggttggaaaatgaacagttcaaatccccgggaaacagagtttctagattgtctcatttacgccaccactactcaaagaagtggcacagattcaggtttaatccaaagttttattcatttctctctgctcaagagccttcccacaaaataggcactagcctgtcctcacttactggaagtgggaagagaaataggataagaagttctctgccatggaggcaaaatagttggaaagggtacagtgaaaacatgaggaagctcagaaagactcatgatattccatgcccagatcttccttggagctataaaatagaataatttttctttcaagtaggttagctagctctcccccaataaaaataccactatcagagtagaaacaaggtagacatttctaaaacatatgtgcttcattatgaatccatggatggctcaattcttaaatgtaaatagatctctaggaaactcaaagtacagtgttttcaatctaaaaagaagtattggcagtttcacttgcaaaattacacagctggtccctgtgatgtgtctcgacaccaatacacaacccccttcccaccatccttcatgtcactagatacacaacccccttcccaccatcccttcagtcactagtgaaagctttcaagttagttatttcagtcaggatatacagtgttgaaatctcaatgcagttgaaatctggtctgatgtgcctaatttatctgtggaaaatttaatgctgaattacatttggttgggaaatgtccctcaaaatcctgggcactatgaaggaaccccctgccccctcacctttttgggtaggtaaaagactaaaagccatatggattttaactgataacaatgaaagtggtaaatcagtgtaaaagtgtcatattctcagacttgtgaggcggtttatagtcagaaagatttacggatttttttcctgtaacataaaagattgtgaacttttttttaattaaaaaatatttcctagggctgtagttatttgggagtttcataacctgttatggtgcttttggtggaatttttattatttagcattttaggagaccgctgtcaactggttttaatctatgatgctaatgtgttttccactgtaccctcatctcaggaataaaactgctttaacggagatgatgtcaggtacaaatacactatagagtcaaaataccatttacaaagaaaatcaaaagcatttctatattttgtctttttttagttcagacagcaaaggcatgtactactataaaatacaaagtgattttagagaatgaaaaatgctacttttatcttctctaaaattatttcccccaaggtagtgaagtaattggaatgaaggaggctgaaagtattgtctaaagtgagcccagaggccactgagaatgcagattactgacagccaggtctgtttagttgtaattggaagacacatgagtgtcctgcttacatgtagcttcagactgcagagacaggacgtgtgcttttcatttcaatatttagttatatttgatattttgaaactgtctgctttttgctatttctgcagtttcaagttagttagaagcatgttgtcaactaaagacaacaaactatcagattcattcattcagtgaagcagcctctgattctctaagagtcacgaatgtcttagtgttaccctcccctagtcaacagcagaccagcctggccaatgcctatgggtggcccctctggagtgctcactaacaagggtgagtgctctcgctaagaagtgtcccccgcctaatcatgtgtttataggatagtacacgttccccaggcccataacagaggactaaaatctctgaattttaaagacacagatgactggcatattttggataccagtatagctatatcaaatagacaaaaacagcttcactttagcaatgatcagattgttaatctacagattttattttttaaaatttggatgtaagtagagactttcagtatttgttttctcttgattttgaagtcatttcttcttctcacgtctgtgacaaatggttgaaaaggagtcaacatggccccaactatagtgccggaaccttttcatcattctgaggctttgccccacacatggtcctcactcatatctgtcaccttctgaagcctagatcttgttaacccatcaggtgcagtgtcagtttcaaatcaaattatctaagaaaacaagaaaacaaaggcagcagactattggtacacattatagtccaaagtgcttagcgaagtaaaaaaaaaagctttttaaaatttctattgttgtctattggtaatgtttttgatcagaataaagagggtaaagggaaaaagttactacacatgctaggctttctcagtggggaaaaaaatggctggatagaactgggacaaacacagacccatctttaggggtctggattttgtaggtccgactacacagcagtgttaactcatttctcatgccattagctctctacaaaataaagcaaagtagttctagtgtggtcgttataaaccaatattgtgaaaaatagcaactattcatttgttcacaacatgcgtatttatagagtagttaggtaccatttgtaaggtaaatcctttaaaattctataatacatactaaaatagtggttattggtctgatatatgctgctcttggttctataaactagataaaagcagtgctttgtgaaatgcagtgttctctcttaacgccactggtgataggaagtagttcccttcagttcaaatcctgtgcccttatttgctgcttgctgacgtaagcaataagtaaccctctaactaatggtatctacatatttctgtaacttgtatttaatgatggtgtacctggtgattgtaaaaatattagacagatataaaagtatctatataatatctataaactgttaatgctgaggt

SEQ ID NO: 211648 - DNA, 1352 bp, Homo sapiens
tgctgatcgctcgtgccggtgcggccgttaaccgcccttgccggagccctaggctcaaaagcagccccttacccttcctgggcttcccccaacccctttcccggtctgccctggggcatgagcagcgatggccggctgcatccctgaggagaaaacttaccggcgcttcctggagctattcctgggcgagtttcgcggaccgtgcggcggcggcgagccggagccggaacccgaacccgaacccgaacccgaacccgaacccgagtccgagcccgagcccgaacctgaactggtagaagctgaggcggccgaggcttcggtagaggaacccggggaggaggcggccacggtagccgcgacggaggagggggaccaggagcaagacccggagcccgaggaggaggcggcggttgagggtgaggaggaggaggagggcgcggcgacggcggcggcagccccggggcactcggccgtgccgccgccgccgccccagctgccgcctttgcccccgctcccgcgaccgctgtcagagcgcatcacccgcgaggaggtggagggcgaaagcctggacctgtgcctgcagcagctctacaaatagttaagtagctgggcttggctggtggtgggcccgcggtccccaccgcgccggcctcggacgcggctccctcggcccctcaaactgctctcttttctgctcctctcccccgcacccgcgcctgccgccgctgaaagcgcccccgctgctcggacccgggcggtcggctgagagctgcccacgcccgcctcggcccccacgcctcctacccggccttgaagccgctctcctgagccccggcgccctcccgccgggcccgggcccctcatcccctttcacctcggcccccagcttctagctccacttcacgcaacctttccctttcctgcctggaaaggtccttcctcccaggcttgagctccctcttcttcccagatcccttctttctccgggaggtttcctcccaccccagtctgtcttttcccgggctgagtgccttgttgtttggcggcagagacgcgactcctttctagactgagctgcgaggtgcctcctgcgtaactgcaacaatgatggttataccggccccgtatccagatgagagaatggagtagattttccgtcaggtgctcagtgttgaaagtgaagggctttttagatgttttcacacagggaagcctagtctcttagtttagacatttgacattccataattgagggaagtgggaaggaattgagagggaagggtaagcaaaattttgcaagcaagccttcgggtgaaagagccataattcattaaagtggaaaagtcaggctg

SEQ ID NO: 211649 - DNA, 639 bp, Homo sapiens
tgctgatcgctcgtgccggtgcggccgttaaccgcccttgccggagccctaggctcaaaagcagccccttacccttcctgggcttcccccaacccctttcccggtctgccctggggcatgagcagcgatggccggctgcatccctgaggagaaaacttaccggcgcttcctggagctattcctgggcgagtttcgcggaccgtgcggcggcggcgagccggagccggaacccgaacccgaacccgaacccgaacccgaacccgagtccgagcccgagcccgaacctgaactggtagaagctgaggcggccgaggcttcggtagaggaacccggggaggaggcggccacggtagccgcgacggaggagggggaccaggagcaagacccggagcccgaggaggaggcggcggttgagggtgaggaggaggaggagggcgcggcgacggcggcggcagccccggggcactcggccgtgccgccgccgccgccccagctgccgcctttgcccccgctcccgcgaccgctgtcagagcgcatcacccgcgaggaggtggagggcgaaagcctggacctgtgcctgcagcagctctacaaatagaattgcactccagcctgggcgacagagagagaaactatctc

SEQ ID NO: 211650 - DNA, 239 bp, Homo sapiens
tggaatgaggtagagtttgagattgtagggacccccgtgggtaggatgattttggagggtttcttttaggaagatgcatttgagatgggtcatgttgaaggatattgctgtacatgtgtcatggaactgggtgccagacttgtgcaccgtgactggactcttcctccctcccctctccctttatagtagcatttgacagcaaggaagaattaattaccacacatttccctctgcctaga

SEQ ID NO: 211651 - DNA, 644 bp, Homo sapiens
  misc_feature (18)..(19): n is a, c, g, or t
  misc_feature (406)..(406): n is a, c, g, or t
ccctccgaggatcccgtnnagtagagacttgatgaattgaactcatgtttttgctgctgtggccacaccctctttacagacatttgcttcatttgggttctcagcaacttgggaaggaggaggctattgatgaaactttcaaggcgttggcttatagctactggagtgttcttttcctgtcccccccccctcctcacttcctccagtgttgggacactttgtattgaacaagaagatcatgagctaatttcaacctggcagccatttatttagcacctactgtatgttgtctttttttttttttccttttctttctcaactccatccgtgtaccttccctcctaaaagcagagtaccggctgaaacaaattataagcctgacttcccttgggagatggtctaggtnaaacaattttcccggaaatcataattcggggaggctaagatcataattcatgggtaaccttttaaaaattggtcactcccgggtcttcattaagttatctggaggtcaaggcctcttctataacatatttataagctctatcacctaggctagactgcacgggtgaaacaataagggcccctgaatctcgaactctggggtcaagaattcccgtgtaatcatcctcatgggcgggacc

SEQ ID NO: 211652 - DNA, 519 bp, Homo sapiens
ctttccatcttgttccagtgacccaatctataaatggtcagttccttcatttgcagaacttgaaatagtttaaagaagagacttgatgaattgaactcatgtttttgctgctgtggccacaccctctttacagacatttgcttcatttgggttctcagcaacttgggaaggaggaggctattgatgaaactttcaaggcgttggcttatagctactggagtgttcttttcctgtcccccccccctcctcacttcctccagtgttgggacactttgtattgaacaagaagatcatgagctaataattatgttatagaagaggcattaacttcaagataactaagtgaaagcctggtattaacaaattttaaaaagtaacaaataaataatgatctaagctacccagattagtttctggaaaatttgtttaaccaagacaatctccaagggaagtcaggctaataattgtgtctcagccattactctgcttttaggagggaaggtacaaaaaggagtgaga

SEQ ID NO: 211653 - DNA, 930 bp, Homo sapiens
aaaaaccatcctgggagtcatccatgacttctaatctctcacggccccctccccagaccagtgtaacaaaagctgccaactccatttcctaagtatctcttgatctgcctactcctctccaccatcaccagcaaggctgagccactggtgctaacactgccacatccactctcaccccattccaaaccactcttccctctattgccaagatgatctaaaaactaaaatcaaattcctttattccttgcttaaaatcccacaaaggcgttttcttgcccccaggctaaagccccagactctggccatggcttacacccggccctgtgtggtcaggcccacatccctctcttcggccccatcttgcctcacttaggactggttgctgtgctctcccacactggcctttctttaatagttcttttccctgtgtcaagttcttcctaccataggtagaaagaacacacatagtgccttcgcttcaaacattctccccctccccttcccagttgttgtggagtgaattaccactcattacccctcagaccaggtgtcctccctccgagagcacccgtcttcccaggctcattgctcacgccagtactaactccaggccagcacaggaaattgctcggcttcctctctgtgagcatgccaatgccctgacacatacctatgttctgaatgcataacctgagacatgttcactgagacctcagtctcctcatgtggaaaataggggtaataccatccaccctaaacaacatttgtgaggactacatgaggcaaggtaagcaaagcatttcagccctgtgccacgccgtgggggcacacggtactgggaagatcctatcatttatcacctctgcactgttggcatcaaacacatggctaggcacaaaacaggcaattacccttcaaggctgtgtctaa

SEQ ID NO: 211654 - DNA, 343 bp, Homo sapiens
tttgtcacagttcttgatatatatatatatatatgtgtgtgtgagaataagagatctctatatatagagtttatatatatatacacatatatacacacacatatataatttatttgtttaactgacagaaaagaaaaatatatatatttgttgtataatatatatgtataatttccttttctctttaatggaaatgcatagtgtttcattgtatggctatttaataaagtattatctggttccttattgatagacatttaggttgtttcctgcttttccatgttataaactgctgttatgaatgtctttttatgttttccaatttgtggtaatacatctgtag

SEQ ID NO: 211655 - DNA, 293 bp, Homo sapiens
taggcaagggggagagagcaggaggccactgataccgatcctcacagccaggaagaggaggagctccgtgaggcagctggcgtgaggtacctgctcagggctctctttggacattgaattataaaggggaaagtagaggcaaggtgtctcctgccacaaccttctgggatccaaacaagcctcaaatctgcagaagcccgagggactggggagaggactggacagtggagtcagggtgcccctgccagactttctaggacaagacaggaacattccaggaaacaccacagcag

SEQ ID NO: 211656 - DNA, 812 bp, Homo sapiens
acctcaaaaaaaagttctgaagacaatgttaaaatctgacaactgggaaatggatgctgttcattattttattccacatatttgttgtggtgcttaaaatattttgtcattgaaaacaatgtaataaacaaatgactagaaaaagtcaaaaaaaaaaaaaaaaaaaaaagcaatctttaaaatgtcctggtgttggccgggcacagtggctcactgtttaggtggtcaaagtgggaggatcacttgaggccaggagtttgagaacaacctggacaacctatcaagactctctgcctctaattttaaagctaacattggtgtgcttatgtgttagatactgtgctaaccactactacacaatttcacttacttggtaacaatgaccctttgcagcaggtaccattattttctgctagactgtgtcactgtctctgatctttactcttgagggtccaattgtactcatcattctatattttctaagggcagaaaaatggactcatctatttagagacagggtctcactctgtcacctaggctggagtgcattggtgcaatcatagctcactgcaggatcaacctgctgggctcaagcaaactttttaaaatatgcagctacaaaagcaaatttaaaccctaatttaaaagctgattttgccgggcatggtggctcacgcctgtaatcccagcactttgggaggccgaggcttgaggatcgtttaagcccaggagttcaagtcagtcttggccaatatagcaagatccccattttttaaaccaaatacctcagattcatataattagaatgtttt

SEQ ID NO: 211657 - DNA, 871 bp, Homo sapiens
acctcaaaaaaaagttctgaagacaatgttaaaatctgacaactgggaaatggatgctgttcattattttattccacatatttgttgtggtgcttaaaatattttgtcattgaaaacaatgtaataaacaaatgactagaaaaagtcaaaaaaaaaaaaaaaaaaaaaagcaatctttaaaatgtcctggtgttggccgggcacagtggctcactgtttaggtggtcaaagtgggaggatcacttgaggccaggagtttgagaacaacctggacaacctatcaagactctctgcctctaaaaaaaaaaagtcctggtgtttatagttccaaatcaatatatattacacgtgatttttttttttaaagctaacattggtgtgcttatgtgttagatactgtgctaaccactactacacaatttcacttacttggtaacaatgaccctttgcagcaggtaccattattttctgctagactgtgtcactgtctctgatctttactcttgagggtccaattgtactcatcattctatattttctaagggcagaaaaatggactcatctatttagagacagggtctcactctgtcacctaggctggagtgcattggtgcaatcatagctcactgcaggatcaacctgctgggctcaagcaaactttttaaaatatgcagctacaaaagcaaatttaaaccctaatttaaaagctgattttgccgggcatggtggctcacgcctgtaatcccagcactttgggaggccgaggcttgaggatcgtttaagcccaggagttcaagtcagtcttggccaatatagcaagatccccattttttaaaccaaatacctcagattcatataattagaatgtttt

SEQ ID NO: 211658 - DNA, 682 bp, Homo sapiens
gttggatgaatttctttataaagattgcagaggatagtgatgaaaacttgaattagtatctttagagttatgtttgaaatattttatgaacgttgattttattaagtggcagcctttcgtggttttatgaactgatgtgcctttaagtgtttttttcatcaacagaggaattctaataatatctgttatgctgcagaaaacttagcaaatggacctacattctgacattcagtcaacaagtgaatgattaagcatagctgttacaagttaacagactacatctcttacctctgactattgtactgaaagtacatgtcatttttcatgagaatgtattgccgttgccaataatagaaaacaataaaaaccatattcatatttctaaaaatagcatataatatcccttttagaaatcattttaaaattcttggagtcacaacatattactaaatatttcttctagatgtttatagcagtgttatatataacagggtgaaatttgaagaaaaatatgttcaccatgcccagaatgtctctggagggccacataatagtggttgcctctagggagctggaactgggtgagtcagggacaagaatggaaggaagggccgggcacagtgctcacgcctgtaatcgcagcactttgggaggctaaggtgagtgaatcacctgaggtcag

SEQ ID NO: 211659 - DNA, 281 bp, Homo sapiens
ttcagaaaatcaataggctacgaggcagttttcaacaggtcttaaatctttgccaaactgataaactaaacaagtgtttcaaatgaaacattttaaatcacaagtggatttgatcctctcatggtgtatttactacccatttgttttttcatttacctgttcatgtcctttgcatttatatggtggtgatggtcatactagagtgttttctgtagtcagattattagccttttgtcatacatacctcatgtgttgttatcctcgttgcttttgtgaatgct

SEQ ID NO: 211660 - DNA, 434 bp, Homo sapiens
ttttttttttttgggacaaagtctcactctgttgcccaagctggagtgcagtggtgtcattgcaacctccacctctcgggttcaactgattctcctgcctcagcctcccgactagctgggactacaggcatgctccaccattcccggctgatttttttatttttagtagagatgggatttcactatgttggccaggctggtcttgaacacctggcctcaagtgatccacccgcctcggcctcccaaagtaaagtgctgggattgcagatgtgagctaccacatccggcctatatccagctaatttttaaaaataatatttttgtagagaggtggtctttctcccctcggccttccaacgtactaggattacaggcgtgagccacccttctgtcgtcttttcctttttattttttcacacttccagtggtccttg

SEQ ID NO: 211661 - DNA, 946 bp, Homo sapiens
agggctaagttacaacattcttgaatacccctccaataaattgggaattacacccatgatccaaagcatctgaaaaatcaccccagactcctccactcagggctgcccccacactcctgcctcatccaggtccagcagtttcctcttgtctttgcttccttcccaagttgcatgattataaacacatttactgggccgggcgcagtggctcctgcctgtaatcccagcactttgggaggccgaggcgggtggatcacaaggtcaggagatcgagaccatcctggctaacacgataaaaccccatctctaccaaaaatacaaaaaactagccagatgtggtggcgggcgcctgtagtcccagttattcgggaggctgaggcagaagaatcacttcaacctgggaggtggaggttgcagtgagctgacattgcgccactgcactccagcctgggcaacagagggacactctgtctctaaaataaaataaaataaaataaatacatttacttctaataacccataagcaccttgtacctaggaatcctactaattatcctctcagcgcattttcatactactctcattattcacttattcaatgaatacagccgaaggatctgaatagacatctcttcaaagaatataaacaaatggacaataaacatatgaacggtacctgacatcatcagctatcaggatggtggtcacttcagatccactagcatggctagaattaaccaaaaagggggaaaataacaagtgttagggaagatgtagggcactgtaaccctcatacacactggtgggatgtaaaatggtacagccactttagaaaaaggtaaagcagcttctcaaaagtttaagcacaaagtttactatatttcccagcagttctactccgttcccagagaagtaaaaacacagaaacgtgtatgagcgttcatag

SEQ ID NO: 211662 - DNA, 182 bp, Homo sapiens
tcacagtgcacttagagggggtcctcccaccccatcctcccctcagacagagactgggtgttgtgtgggtttctactgggtcctctgagagggcagcgcttggggtgaagaagtagcccccagactctgtccaccccctcccgcctctggaatgtatcagggggaagacaggcctccagttc

SEQ ID NO: 211663 - DNA, 482 bp, Homo sapiens
atctgcccgcctcagcctcccaaagtggcactaccaactcttaactcacagagacctctgtggcagatacagctgggagacaccagtgaatggaacgtgccgaactgcttccaaatctattgaatctactaaatctactttatctgctctgatccacttttgatcttcaaaagcaaggcaaacacagtctacttctcctaaacctacagtcatggacatattcattagcccccgacaatgagatacccattccaaaaatatacactaaaaatgctttcaatatagcaaccctgtggccagggaacaacagtcctaatgtccaccaccacgcccaggtaattttgtcattttttttgtagagacggggtttcacaacattgcccagactagtctcaaactcctgggctcaagcaatctgtccacctcagcctcccaaagtgttgggattataggtataagccattatgcccaacctctccctg

SEQ ID NO: 211664 - DNA, 357 bp, Homo sapiens
tgagccaccatgcccggcctcttgggtcaatttaattatggcttcaagaagtttattttttagtgatgtcgggggcagagtttttaatttgcatgttttttctttttcggttttattgatatttaatagagagcactattttgatattggatacttttttagttttagaatgtacgtatgcttttttcagtaatgaagatgtgataataggtttctggtgaagaggtatgttgtcagaatgattctgtttcttaatagagatgtcactgtccaaattgattataattgagaagagtctgcttcctttaaaactagtcattttagtgaatacagagctgtcaagctcacagttgtggc

SEQ ID NO: 211665 - DNA, 501 bp, Homo sapiens
gggaagtagcgcccgagctgcaggcaaggcttgggcttttgcgggaggtggggcatggcagagccatggagatttgcagctagggatttgcaaactggcttttaatgcttgaattctgatacacaccccttctccctgccaagacagagtgagaaacacataagaacctaccaaatcctcctcactcccaaggcagagctccccagtaaaactgaacagttgaatgtagctttgatccaggagacctcattgattcctgctcctcggatctaggatggtctgtccagagtagatgggactggacataatcacccaggcttggaggcagaggactggaaagagagcccatgtgtggatatccttcacatttcgttcagtgactacccatcctcttgtcaaatttcacccgatgaatttctcagactcagacagatcaattagatgatcagcccctcctctcttgggaatcatctcacgaaggtttcaataattccctgacct

SEQ ID NO: 211666 - DNA, 905 bp, Homo sapiens
gaaagaaatttcaggaaatcatcaatcgcagtagcagtgaagcaaatcaggtggttcgtcccaaaacttcaagtaaatggtctgctcctggttcagctccacagttaactacagccattttggaaattaaagaaagcatattgtctttgctaattaaacttcaccacaaactctcaggaaaacaaaactcctactatcctccttggcttgatgacatagaaattttaatccaaccagaaattcctaaatacagtcatggagatggtataactgccgtggaaagaattttactaaaagctgcatcgcaaagtagaatgaacaaacgcatcattgaagagatatgtagaaaagtgacccctcctgtaccacctaaaaaagtcactgcagcagagaagaaaacattggacaaagaagaaaggcgacagaaggctagagagaggcagcagaaattgcttgcggagtttgcttcacgacagaaaagctttatggaaactgcaatggatgttgattctcctgagaatgatattcctatggagatcaccacggcagaaccacaggtttccgaggcagtatatgactgtgttatttgtggacagagtggcccctcctctgaagatcgacctactggattagttgtactgttacaagcatctcaagttaggggcgtggcgtgacaatgtgacccaaaaagtggccaccaggaaaagaccaattacctgggatacgtgcgcgtcagaagaggttacaatacgggtattaggaagcagcccgcgaaatggcggagggggttgtaccggccctcttaaagcaacccagccacagcgactccggtccgaaggcccgcagcagtccccacagacagctcacaacaagccgccaccacatccataactcactgcccttgg

SEQ ID NO: 211667 - DNA, 2671 bp, Homo sapiens
  misc_feature (617)..(617): n is a, c, g, or t
ccatctgccccctttctctgacacgtttattttttgaactaggacttaaattttaaaaatcattttctaataataaaagttaatacacattcactgcagaaaatataaggaaatacaggagagatcaaaagagatcaccggaattcccattttctcaagaaaaccaatgttaatattttggtgttttttcttcccatctttttctttctgttttgtaacatacttgggatcataacgtatattcagtttgtgtcctgctttctttcatttagcacagaagtactttcttaataaaaagatctagctagtatccatcagatgtatttatcataatttatcccctcctcgtagatatctagactttgaccagtgttgattttgttcatctgcacagactcccaaaaaagctcctagctgaaaacctggctcaaaacagaaaccacctgtaaggacttgctcgtgaaaaatctacgcagcagttccctccaggaaaaccaggcggacgagcagcctgtgcctggaagtaggcggggcccctcctgggtctgcgtctgcagacacagaccagggagcgatttctcagcgcctgtggtagctgctgcggtgggaagcacacngcagaccctgagcaggctggccagtgagccagcctctttctgacgggacccacagctcgaatgttggctggatttgcctgggccaaaataagcggaagagtggcagagtgcttggggatcacttccaatcacaccattcagaaggagaagcagtgcacctctaggacagatgccttcaaacgaagaggctggctgctccccgagaaggagggccaggcggggtggtaccaagcagtgccgctagagaaacatcattcagcagcctcctggaacacatgggagcccggtggctgaaatgtcctttcctcccagagttagaatacataatgttagttaactccacaaattagtgcagtggccatgacagtcgaggcccccagtccccagtcccctaggcttatacaacagacgccggttgtcccatcctttgctcaatcctatttaagacgaggattgtgcactcctggctggagtccaggagggtgggagccactgggtggtagtggagcggccctgtctccaggccagactctcctgctcctggccctcttgacgctcacagagtggcctctgtggctgccgagccctgtgctgcagcataaatcctcagcttttgtctgtgtttaatcccaccctgagaagtgatatccaagtgcaactgtttccagccaggagcgcagctcccaggccctgctgctgcctacccaagacaaacagatgtaacaaggaatttctagcacagtgctggtcctctgtgttaataaatggccgaccaggagtactgggtaatgcaagctgggaactccccatcacacacagacactggagccggctctgacacatggggcagagactcggcctttggttccctgaggactgaatttacacaccctcttagttgccacccaactgtttctagctaaagctatttttgaagtatcctgaaggaaagcacacaagactctagcctctccctgcctgtcctgggtttccaaggtcaggatatggtggaaagacctgttcaagggacatggcatggagggagctgtcacagttacagagaagggagccccctttttggtcaaaggcaagtattgtgaaaggttacttttctagaaaggcacaaacatcaacccaagcccctaataaagcggggcccagtaaactgtgcagataactgaagcactaaagagagaaaaagacatctagtcatttgtaatacagctttggtgcatgatatataacattttgtacattaaaaggtttttggcgatttctctttaaagcagaccacaaagtagacaagagattggttattatggaacacttgtgtgttaaacgcgatttccatctctgcggcacccaattccagaaacgttaactggacaatcctcaggggatggtggatcatctgcatctgtttccagacgtgcatgaaggatctccttcgtacacctacacaacccatgcgatttcccttgaaccatgactaaccagctgtctggacgacatccagggcgagtcacaagaggcttgggaatcctgggaggctgttttcagattatggaaatgcaaatcaaatcctccctgatacgacttcacacccactaggacggctatagaatcaaaaagatggacaataacaagtgctggtgaggacatggagcaactggaacccttgcacactaacaggtatacatccagcctgtgtgcaaaaacttgtacatgaatgtttaaggctgcattattcctaatagccaaaatgtggaaacaactcaaatgtccatcaactgatgaatggacagacaaaatggaatgtgtccgtacaatggtgaaggggcttggcagacgagcagccccatttagccctaaaaaggcgtgaaggactgatgcgtgccgcaacacagatgtacttttcataaaatgtccagataaaataaaaataaataaataatacaaagtcaataaatacataaaatatccagataaaatgcttgacactatataattaataataagaaataaactaaaaaaaagtacaccataacttcagt

SEQ ID NO: 211668 - DNA, 2778 bp, Homo sapiens
  misc_feature (617)..(617): n is a, c, g, or t
ccatctgccccctttctctgacacgtttattttttgaactaggacttaaattttaaaaatcattttctaataataaaagttaatacacattcactgcagaaaatataaggaaatacaggagagatcaaaagagatcaccggaattcccattttctcaagaaaaccaatgttaatattttggtgttttttcttcccatctttttctttctgttttgtaacatacttgggatcataacgtatattcagtttgtgtcctgctttctttcatttagcacagaagtactttcttaataaaaagatctagctagtatccatcagatgtatttatcataatttatcccctcctcgtagatatctagactttgaccagtgttgattttgttcatctgcacagactcccaaaaaagctcctagctgaaaacctggctcaaaacagaaaccacctgtaaggacttgctcgtgaaaaatctacgcagcagttccctccaggaaaaccaggcggacgagcagcctgtgcctggaagtaggcggggcccctcctgggtctgcgtctgcagacacagaccagggagcgatttctcagcgcctgtggtagctgctgcggtgggaagcacacngcagaccctgagcaggctggccagtgagccagcctctttctgacgggacccacagctcgaatgttggctggatttgcctgggccaaaataagcggaagagtggcagagtgcttggggatcacttccaatcacaccattcagaaggagaagcagtgcacctctaggacagatgccttcaaacgaagaggctggctgctccccgagaaggagggccaggcggggtggtaccaagcagtgccgctagagaaacatcattcagcagcctcctggaacacatgggagcccggtggctgaaatgtcctttcctcccagagttagaatacataatgttagttaactccacaaattagtgcagtggccatgacagtcgaggcccccagtccccagtcccctaggcttatacaacagacgccggttgtcccatcctttgctcaatcctatttaagacgaggattgtgcactcctggctggagtccaggagggtgggagccactgggtggtagtggagcggccctgtctccaggccagactctcctgctcctggccctcttgacgctcacagagtggcctctgtggctgccgagccctgtgctgcagcataaatcctcagcttttgtctgtgtttaatcccaccctgagaagtgatatccaagtgcaactgtttccagccaggagcgcagctcccaggccctgctgctgcctacccaagacaaacagatgtaacaaggaatttctagcacagtgctggtcctctgtgttaataaatggccgaccaggagtactgggtaatgcaagctgggaactccccatcacacacagacactggagccggctctgacacatggggcagagactcggcctttggttccctgaggactgaatttacacaccctcttagttgccacccaactgtttctagctaaagctatttttgaagtatcctgaaggaaagcacacaagactctagcctctccctgcctgtcctgggtttccaaggtcaggatatggtggaaagacctgttcaagggacatggcatggagggagctgtcacagttacagagaagggagccccctttttggtcaaaggcaagtattgtgaaaggttacttttctagaaaggcacaaacatcaacccaagcccctaataaagcggggcccagtaaactgtgcagataactgaagcactaaagagagaaaaagacatctagtcatttgtaatacagctttggtgcatgatatataacattttgtacattaaaaggtttttggcgatttctctttaaagcagaccacaaagtagacaagagattggttattatggaacacttgtgtgttaaacgcgatttccatctctgcggcacccaattccagaaacgttaactggacaatcctcaggggatggtggatcatctgcatctgtttccagacgtgcatgaaggatctccttcgtacacctacacaacccatgcgatttcccttgaaccatgactaaccagctgtctggacgacatccagggcgagtcacaagaggcttgggaatcctgggaggctgttttcagattatggaaatgcaaatcaaatcctccctgatacgacttcacacccactaggacggctatagaatcaaaaagatggacaataacaagtgctggtgaggacatggagcaactggaacccttgcacactaacaggtgagactgtaagatggtgcggccattttagaatacagtctggcacttcctcattatatgaatgaaacacagcattaccatatgacccagaaattccattcctataggtatacatccagcctgtgtgcaaaaacttgtacatgaatgtttaaggctgcattattcctaatagccaaaatgtggaaacaactcaaatgtccatcaactgatgaatggacagacaaaatggaatgtgtccgtacaatggtgaaggggcttggcagacgagcagccccatttagccctaaaaaggcgtgaaggactgatgcgtgccgcaacacagatgtacttttcataaaatgtccagataaaataaaaataaataaataatacaaagtcaataaatacataaaatatccagataaaatgcttgacactatataattaataataagaaataaactaaaaaaaagtacaccataacttcagt

SEQ ID NO: 211669 - DNA, 508 bp, Homo sapiens
ctacacgtccatccgagaggaatgtaaccagctatcaccatgaagaaaactggggtttttcctaaccaagaagtcaggagtttcaagaagaagtatttagtcttgtactaaagagttagactacattttgtgatgtctgaatactaacagcttttacacctctgcattccttcttcctatgaaaggaggtagttaacttgccttaggtagatagcaagaaaagggtctctggagagtccctggcccatgggtcagtgcctcatccccacctaacagaaaaagcagcctgggaaaaaattcaaggtgcagggaccgataagggaactagcacaaggtgttatgcctacggctgcacagatggaaaaggcccatttggataaaaacttgcacagacctccatctcactcagataagggagcaggcctggcacagaaatgccttttgcctttgtagagtcagtgggctcccaggcaaaagtttcttctccctttgtggacatgggcacagt

SEQ ID NO: 211670 - DNA, 265 bp, Homo sapiens
ggactttctcacacatagtaggtgcttaacagatggtagtgctctctccttgcctctttggacacccacaatggagtgattcagagcccaagttttgggcagattgtacatgcatgggctaaatgggctctgagagtcagcatccagcttcacaaaacaggaataatgatagctgcctcccggggatgttatggagatgcaatctgctatgtctatagctatgtctataaagctatgtctataaagcacacagcgttccacacgt

SEQ ID NO: 211671 - DNA, 256 bp, Homo sapiens
aatattaggagaatgtcttcagcagaaaggtaagaaaggacttcttaaataaaattccagaagtacaaaccagaaggcaaaaaaattgataaatttgtttacatcataattaagaattttatttcatggaaggatattatagacaaaattcatagagaaatgtcagagtggaagaagattatttgcaatgtttaaatctgacaaagggttagtaagtagaatattcaaagaaagcctgaaaagtagctctaataga

SEQ ID NO: 211672 - DNA, 539 bp, Homo sapiens
agttattttgcctttatctcagttttatttgcaaaaatagtatacgcaaaatacatcgagtgaatgcacatcaggcatatagaagatctggcagaaacatgttttctcctgctcatttccagtcagtatttgaacacagaggcttccacggttttgattctttccacaaaaggttagttttgtctgttttcaccatttatgtaagtgaaactataaattatataatttttatgttcactcactaaacatgcttgtgacacatcattttgctcctattgattattcattattttgtaatattcaattttatgactataccacaggtttgaggcctttgcttgttttgtttttaatccattccactattgatagacacaaaagcagtttctgatttgaggctatcatgaataaacctgctacgaacaaatcagatatacatatttttttctgtaataatattttcacttttcttgagtttaagtacataagagtggattttctgggttataaaataagtatatatttggcattgtatgaaa

SEQ ID NO: 211673 - DNA, 420 bp, Homo sapiens
taactctatactggaagtgatttactctaagaatgtggtcaagtttctagcattaggaccctacctcgatataacaagaagtggggattcagagaaaggtgtattctcttacgatttctttgcttgaaaatctgaggaaacagtatgttaggtacaactaaatagctttgcttaaacacgatttgcagttaggagcaatgtcacctagaggaggaaggcctctagcataccagtcagagattttaggatataatcctatagtatctggtatttgctattagtcactttcttatcatatctgcctatgttgaatgcctgaataaaggagaaagagctaacattttggattaattatttaggattccaaaataccctgataggcttgaacaaataatctgaataacatgaaaacaccattaa

SEQ ID NO: 211674 - DNA, 514 bp, Homo sapiens
ttctaagagcatactacaatatatcagatattattgaaaagaaatgtggcagctattttgcttcaagttaattaggaaaataaaatatgctttcttttagaagtcatggaaattgttggaactttttgataacttaattaggcacttttatatttaaataaatataaataaggaattggaaaataatcatttttctctcactgtctttcagaaccatgcaatactgtttttctgcatttccttttcagtaaaaccgattatttgggctatccaggggagtttttaaaaaatctcaaaatggaatactttgcaacatacacttgatatatatttatgatgatagttaatatgctaaagcttcccaaatacacatgtgatataaatttatttagaaatatttagtataaaacagaaaattttaaaggaaaactcattagaaaaatgtttaaagatttatatacacaaagttcattacattgtctttttattttaggatagtcataattgaaaagtc

SEQ ID NO: 211675 - DNA, 351 bp, Homo sapiens
aatgtgaaaagcacaagatttgggagggaccaggggtgcaattatatgattgggctctgtgtccccacccaaatatcatcctgaattgtaatccccacatgtcgagggagggacgtggtgagaggtgatggaatcatgggggcagttttccccatgctgttctcatcatattgaaggagttctcatgagatctgatggttttaaaagtgtttggcagttccccccttctctctcttctctcaccatgtaaaaggtgcctttcttccccttttccttccaccatgattgtaggtttcttgaggcctcctcagccatgtggaactgtgagtcaattaaacctcttttctttat

SEQ ID NO: 211676 - DNA, 500 bp, Homo sapiens
ttttctccactgaacaagcatttattatgtttttactctgggccaggccctctgctagttactgggatccaaagataaatcagaaatactctctgccctaggggactccaagtctgatgaagaatatggcagttatctgtggtgctggagtctctgttcagttgtgtagaaggacaggagaagttgtgaaggaaggtaacatttctttagtgcgtgggccatgccagaccctttatacatgtctaacttagccgagatcacagctctgcgaggtaggcagtatcatcctcatttcacagaagagggacctaaggctcatgaggtttagctacttgcctgtggccatacagccagaaagtggcagaactagaacacaaagcgagctccatctgcagagcacatgctgttacacaccaaacaacggattccctcatgggcagggtgtcacctttttggagttggctttagattttattttgtcagactctttgggaaattag

SEQ ID NO: 211677 - DNA, 417 bp, Homo sapiens
atcaaaactgtgaagttcatggagaaaaaaggagcttctagtttcacatactggcctagacctgcctaagggtgcagccaactccctaaaaagaggatgatactagaataggacagagcaaacagtatctctcaagaatgttggaggggtcgggctcagtggctcacacttgtaatcgcaacactttgggaggctaaggcaggaggatcgcttgaccccaggagttcgagaccagtctgggcaacatagtgaggtctcatctctacccaaaattttcaagttagctgcacctgtggtcctagctacttgggaggctgaggcaagagaatcacttgagcccaggaggtcaaggcttgcagtgagccacgattacaccactgcactccagcctgggcgacagagtgagaccttgtctcc

SEQ ID NO: 211678 - DNA, 460 bp, Homo sapiens
gacaaggctaatcaagagaaaaaaaaatcacgtggtattatgaataaaaaaaggtactgttatgtaaagtattttaggaaaatacaaattcattacagcattaaaaataaactaaataattaaaaaggttttagttgccttcattgaaaagaccaacaactacagaagaaactggaaatatatttttattttttttttgttttttgtgttattgttgttgagacagagtctccctctgtcgccaaggctggagtgcactgatgtgacctcagctcgctacaatctctacctcccaggttcaagcggttctcctgcctgtaatcccagctacttggggggccgaggcaggagaattgcttgaaaccgggaggcggaagttgcagtgagccaagatcgcaccatcacgccatcacactccagcctgggggataagatcgagagttcatctcaaaaaaaaaaa

SEQ ID NO: 211679 - DNA, 488 bp, Homo sapiens
gacaaggctaatcaagagaaaaaaaaatcacgtggtattatgaataaaaaaaggtactgttatgtaaagtattttaggaaaatacaaattcattacagcattaaaaataaactaaataattaaaaaggttttagttgccttcattgaaaagaccaacaactacagaagaaactggaaatatatttttattttttttttgttttttgtgttattgttgttgagacagagtctcccttccagcctgggcgacaagaacgaaactcagtctcaaaaaaaaaaaaaaatcaaatgaataatactccttgaccttgtgaagattctatgaagttcagattacagtgtccagaaattgttttgtttgtttgtttttttgagacagcttctcaccctgtcatccaagctggattgcagtgagccaagatcgcaccatcacgccatcacactccagcctgggggataagatcgagagttcatctcaaaaaaaaaaa

SEQ ID NO: 211680 - DNA, 300 bp, Homo sapiens
ggcctgttagtcaaaaagaagacaagacagaagcaagggggtgcggggggaggagagcaagaggggaccgagaactcggaaccaagtgatgggcagacactgaatgcctgactccagggttatcgcctcagaaaacaagtccgtttaagcccgtggtaacagtgttagcgctttcactgaacctgcactcaacactggagaacctccctgcattatgaagatgagccgaaaaataacattaattcacaatgtagagtgatgattcagccacagaaaataaaactgatataatccactaca

SEQ ID NO: 211681 - DNA, 527 bp, Homo sapiens
gcttctccaacataccatggcttggaggccaatgtgaaaagtatataagatgtaacaccctcagaagggttaagttttcacctgagttttcatcttcaaccaagtcattgggatggtgatctagaaggacctctaagatctagaaggataaagatctggtccaaggagtacaaatatgtaatggatctaccaccagtgtcccctgctgtactcttggcagacatcactaatccatcacagcatgccttcccactgatcacagatgtagcttcagggcattcgagttaccacttaagatggatatgagtgaccctcccttatctcactcttctcctttcacagaagcaggatctgaggcccagagagggaagctataataaactcccctaagtcaggtcccttctaagaggcagaggtaggtttagaactcaggcctcagaaacttccagaagccaagccatttgggctgtagttggtggacagtctatcagcgctctgcagatgtttcttctcagttagggaacttg

SEQ ID NO: 211682 - DNA, 417 bp, Homo sapiens
ggtcattgcaatagggagaaagattgggctcaactccaaatacagcaaagacgtctggagatcagtagccaatgagccggggaggcgtctgtggaggggaaattactaagaagagatattaaagtcagggggattcttgctaaatcaacttaacaggattcctgctgaaggcaggttgacttagacaacaaggatagggacaaggaacttgatcaggtgtgatcagatatccagaataaaggatatctctctaaactcatctagcagctctctaactttagcaggattcttgctaaaactaactgggaaggcctggaaggtgggggtgggctaacggcctagctgagaagggggctcagagaagccggattcaagtttggtcaaggagcaagtcttcatcagtaatagtaactccag

SEQ ID NO: 211683 - DNA, 454 bp, Homo sapiens
agcaactaaaaatgggtaatgaactagaaatatgatgtgtttttagtgaaaaaagcaggttacaaaacattcttttctaaattatgtatgtacagcctgatgtcattattgtttttgtttttttgagactgggtcttgctctgtcatccaggctggagtacagtggcatgatcatggctcactgcagcctcgacctcccaggttcaagcgatcctcccaccctcactctcctgagtagctgagcctacaggcatgtaccaccaggcccagctaattttaagttttttttttttttttagagttgaggtcttgctatgttgctcatgctggtctcaaattcctggcatcaaatgatcctcccacctcagcctcccgaagtgctgggattacaggcgtgagccatggcacctgtcctcattttttatttttaataaaacatgtaaagattggatgg

SEQ ID NO: 211684 - DNA, 623 bp, Homo sapiens
tttaatccaacaccatggccctcaatttaaaaactacatccaagagaaagaaggagggagagggaagaggggtggtaggcaacaacataaaaaacattctaggccacggaagagaaagtctcacaaaccggatgaaactactaatacaatattaaaaattaaagccgagcactgaagcacgaaaatcacacgataacccattacagttaaggattaaaaataaaatgacatatgcaccaagggggagcggaaactaaatgtcgaaagtacagcggtttataaaaaactaaaggcaaaacaagacattctcgcgacggggggaaaaaaaggccgaaatcaacaatacgttcacaattctaggccaaaagaaaatgggaacggggctcaaagttttgcggaactacttgatgctgtttcccacaccttctctctcccacggcccatccgacccttttcgtcccaaaatcgccgtccgcagatctccggatccaggggagaagaaaaaagaaagtcgaccccgagcaagaataaaagtgtggagtgaaaacgcacaggctgcctacctggggcaaggatcagctcagttcgtgccttgagaaagacagtgcgggtgggggtgggaa

SEQ ID NO: 211685 - DNA, 415 bp, Homo sapiens
gaaacaattgagaacacagggggaaaaaagacccaattatgcaccaggaagtccagtgccccatttttggagaaggaaagtgagagggcattgagtttcattgattgggtctccgtggcaggccagctgccccccaggaaggcctggtattcctgtcctctccgtgaacctgcctgaaagggatataggagttattgggtaatcaggacttgtcagcacctcggttatgcaggatggttcaatccgataatgtgaatggaacctgtaatagggctgatgaaaagcactccagtttcaaaagggccttgaatgattttttgttcattttctgtttacatgtaatgtgttattgatgtcattaccttataatacggcagcttgtttcatagaaaaaccaggaattattcattcttta

SEQ ID NO: 211686 - DNA, 615 bp, Homo sapiens
gtttaattgcattgcctcttttaacctcttgctgattaaatagtgggaaacgtagaaataattgtcagatttttaggagaaaacaggttgagaagtgcacttgcttattgaaggatgctttcccttttcactgaaattacctggacttttgtatgcaattgctttgtgccttccattatttttaatttcggcttacaattagagcttgcaaattgaattgctttctctgaggagctgtgatttctctatttggcaagtgccaggcatcccccgtcacaaatccccacttgctcagctgaaattaacatggttgattttgttctcttgtactgcaatcgggtctgatcagtagaatcatgatctcacttagtaattgcttccacagagtctgtagggagagcggatatgagtggtgctctgcctgatgaggagaatggaggttctccaggggagtacaagggagctttaggcaatgatcttggggattatagagagctgtccctctttacttgcactcagaagtcttgtggtatttaccaaagccattaagggccctgatgttggaagtgtcctctttggaatcaggataaattcaaagatgtggttagctgttat

SEQ ID NO: 211687 - DNA, 507 bp, Homo sapiens
caggttctggtggtgtgcacctgtagtccctgctgcttggggggctggggcaggaggatagcttgagcccaggagttccaggctgcagtgagctatgatcacagcactgtactccagcatgagtgacagagtgagatcatgtctctggaagggaaaagaaaaagaaaaaaggtaagaggtgcaggaagctacccatttaattttatgaggctatgatattgtcctgaaacactggaaaaggacaatacaataaaattttagatcaatctttcttatgaatgtacatgcaaaaaaatcctaaataaaagtactaggcaaacatactggcaaactgaatccagcagtatactgaacaaaacacacagacacagacacactgcctctactatgaccaagaagggcttatcctgggaatataaggcttaacatcagaatattaatgaaacatatcatattaaagaagaaaaatcagatgcggagaaagcattcaataaaatttaacactac

SEQ ID NO: 211688 - DNA, 292 bp, Homo sapiens
caatagtaatttccatagttttcaaaagactttcaaatatcttttatcatttgatcctgacaacaaatctcacaagctcagcaaggcaggcatgcagggaaatctttattctttatccttatacaaaggaacttgggcttcactgttcaggtaggtactgtatggaaaaaaatatttctagtccctcttgtccatccttcatttgcttttctccataagaggagtaatgtatccatctggctgctgaccttgtaaaaggctaacacctatctgactatgttggtcaggagat

SEQ ID NO: 211689 - DNA, 470 bp, Homo sapiens
atgtgcaggtttgttatatgggtaaacttgcgtcataggggtttgctgtacagattatttcatcacccaggtattaagcctagtacgacattagttatctttcctgatcctctccctcctcccaccttttcaccaacaaatcatttcgtgactcgactctagcttatgctgtttaatgcctttcctgctatgtttacctgacggaaatagtttctttggttctaaatatttgcacaaaactggttctgcctgtaagcatgatttacaacattaaaaaaaaacgttgacatagtgttgagattgagaaaggtacattggagtaagcagtgtcaggctaaaggtctctaaagtactctgttgaaacctaagtgaaggaggacaacttggtgtagttgctctccagcactcccatccccaacatccattttcccaagctcactcccccatggatagaacctgactgcccctca

SEQ ID NO: 211690 - DNA, 406 bp, Homo sapiens
agtaatatgtgtaaaaagaaatgtacagaacctgtgcagaaaactataaattgttactgtagaacatagagtaactggaaaaaaaaatcagactgtttgtttgaataataaaactcagtattgtgactgggtgcagtggctcacacctgtaataccaacactttgggaggccaaggtgggaggatcacttgagcttaggagttcaagagcagcctgggcaacatggtgaaaccccatctctacaaaaaatttaaaaattagctggcatggtgctgtgtgcctgtagtcccagctactcaggaggctgaagtgggaggatcgcttgagtttcggaggttgaggctgcagtgagccatgttcgcacaactgtactccagcctgggtaacacagcaagatcctatctca

SEQ ID NO: 211691 - DNA, 793 bp, Homo sapiens
gagacggtattagaggataacggcttttttcttggtgatgaaaatgttctaaaattgtgatggatatacaactgaatatataaaaaaatcattgaattatacactattattagttttgagatggagtctcactttgtcgcccaggctggagtgcagaggcatgatctcggctcactgcaacttccaccttccaggttcaagctaggattacaggcacatgccaccacacccggcttatttttgtatttttagtagagttggagtttcaccatgttgccaggtgtgggggtgtggacctgtagtcctagctacttgagaggctgaggctgtagtgagctatgatcgtgcagtttcactccagcctaggtgacagagcaagaccatgtctcaaaaaaaaaaagtaaaatttaaattatgtttgggttttgtgaggttataaagcattccttttagacttataaaatgaaagcttatgtttacacgtttcataggactgtttttaaaatttattttaatgttctttctgctgctttcatttatctcttatttttgtcttttcccatgttctaatctacctaaagttatagctatatttaatatagtgttaatattaagtattgtatttagggaaataacggatacatattgaaatagggatcgtattaccttatagtaatctaaagaaatagcaactctgcacctgtgtagtcttaccatgttaaaagaaccaaataataaatccataaatatttttatagagaacatgtggaccagcagtgcagagaagctgttt

SEQ ID NO: 211692 - DNA, 458 bp, Homo sapiens
gtggacaagtctagggagtaaaaactctggagatatgtctaataatggggaaacacagacgagttttacctgacagattctcacagtgaatattgggaaaaaatcatcccatgcttctgaaaaggagaggaaaaaggaaaccatttttaaatatgccagagcattttatttttcttaataaggcctgccctaaagagaaactatcttaccagagcctaaacttttagcattttatcagagtctaactgacctgggagaagaaaatacccaaatctagccccttggaggcttccacataaggaaagaaaaaaaatcaaactcagtattactctagccatcccatctcaggggagaaaggattgagaagcattggtgaggttcacatttttagaagcacaggctaagacctaatttatagaaccatggaccacttcccttccccccacgctttaccatca

SEQ ID NO: 211693 - DNA, 328 bp, Homo sapiens
cggtgcagtatgctaaaagccaggttgcaagtgggtgaaagagagaatgagaggtgactgaagtcagcgccttcgctttcctaagggaggatgggaagtgaagtaggcttgaggttatctaaagcattcccagcttttcagttggctcagaaattgggccatgacagagcttatggttggggacatctgaggatccctctacaaggaactgagtccaaagttcagggtgccaaagggcataacgtgcgccactgctgttcaaacagtagttcctagcacttcttcttttttttttttctcccaagacagagtcttgctctgtcaccca

SEQ ID NO: 211694 - DNA, 293 bp, Homo sapiens
attatttgtaacagtagaaaaactataaaccacttacatatccaacatgagtaaattagttaggtgaatgaaatccacacaatgaaatacagcattattttttaccatataatgaaataatacttttaaaatcttaaatttaaaaaatgacctaaattgtttataagcttgttaaaactacataaaaatagagtaaaaatgacccatagaaagatataaacagtgattgcctctagatgatggaattgtgagtgaattttgtcttcttctttgtatgttctatgctttcaagg

SEQ ID NO: 211695 - DNA, 706 bp, Homo sapiens
gaaagaatactggctctcatttattgggaatctactatgtgccagatactacattaggttttatagtttacatttcaagttagctgctattttatagttgaggaaagtaaggctgaggggttaaatggcttggttgagatgtcaccactccaaaaaaaatcataattcatattcactaagtgcttcctatgtgccaaatactgtttttaagcaattacatgttttatctcattaacaggtaagaagaagtggctgaaagggtgctaactaacctattcacaaagtcatgcagccacagggtaatgtatgctagcactttcctctgcaccacgctgtctcttgctacagaggtaaaggaaatatccccagctgtgcctctggtcaatcagcaggggctctccagtaaataaggaaggactgaggctttgatcaggggttgttgctacctttctgtctcctgcaccagaagaaacatccatgtgcaagaccaggacctgcaggtcaaggaaacagcatctcgatggcctggctgcacagccaggagttgtctaagtggacactccaagcacagccatacctctctctgctgtgaagcagcacctcctccatgccacccctaagacagctttgcttccctttgtcatcaggtcccacattgcccattgcctcttttactgcccaaggaaagcacagttctgtagcctta

SEQ ID NO: 211696 - DNA, 261 bp, Homo sapiens
ttagtagagacagggtttcaccatgttggccaggctggtcttaaactcctgacctcaggtgatccacctgccttggcctcccaaagtgctgggattacaggtgtgagccacctcgtctggcccatttattttcattgctttgtaactttcctttccttgaatatctcacaatgtattcattctaccttggacagacatttgcattgtttccagtttgtctattatgaatcttgctgctgtgaacattcttgtctattatga

SEQ ID NO: 211697 - DNA, 249 bp, Homo sapiens
cctggaggcgatgtgctggtgggaagggctgtggcgccgggaaacacggggtggaaatggaaccggaacgagcaaggagagtccaggcaccacctgggcgacagccagggagaggaatcctggatcccgggtctgagccggaagttgctcctctgcctgattccaaatgagctcaaggctggacccagcaccccagctggcatgtgtgaatctcggctggtcaccacccgcagggccggccttaactga

SEQ ID NO: 211698 - DNA, 529 bp, Homo sapiens
ccatcaggtttttaatgagtcacagtatttgaaggctatgaactgagaaatatcattcatttatggtcttgtcctgcagctgttgtgttttatataagacagtgtgatacaaacaaaacagagctctttaataagcttcactattaagtgcaactgagccatttcaggaaataatggcatttcacagaagagaatgaaaaacacgaagtgtaattttcctcaaataacaaagaggtaaatggatttaaaaaaagcataaatgttaacatagtgaccaataagtactttttggcatctaaaaatctcactgtagcacaactctttgcaccttagtttttgcttcaaatatgccagtcatgagtcaattatggtatatatttgtcaacaagtccttgtctgttttttcctaaattagggtcaagcaataaagctgccaaaaaaatttatgctttttttaaaggtaacactagaactcaaattcaggctagaatccattgtccaggtaaatccctgattatcaactgatcaa

SEQ ID NO: 211699 - DNA, 335 bp, Homo sapiens
aattttatgtacttctcatgatttaaattttaggcaagaatattactttttagccgggcgcggtggctcacgcctgtaatcccagcactttgggaggccgaggcgggcagatcacctgaggtcaggagttagagaccagcctggctaacatgatgacaccccgtctctactaaaaatacaaaaaattagctgggcgtgggggtgcacgcctgtaatcccagctactcgggaggctgaggcaggagaaacgcttgaacccggcaggcagaggttgtagtgagccgagatcatgccactgtacttcagcttgagcaacaagagtgaagctcttgtct

SEQ ID NO: 211700 - DNA, 639 bp, Homo sapiens
cgcggtggctcatgcctgtaatcccagcactttgggaggccgaggcaggcggatcacaaggtcaggagtttgagaccagcctggccaatatggtgaaaccctgtctctactaaaaatacaaaaattagcctctaaatattatataattctagcccagaaacttacattcctcagtctccaaagggagacctccacaaaacaataatttactataatgtcagtttctatcagcatttcacataatcacataaataaaacttctgtatcgattataaaactcacagtccattaggtttttaaaatatctctaatgtaaaagattctccaacatttatatcaaaccatgattaacaaaaagttcctggtcaggggtggtggctcatgcctgtaatcccagcactttgggaggccgaagcagatggatcacttgagcccacgagttcgagatcagtctgggcaacacagtaaaacccgaaacctcacctctactaaaaacacaaaaattagccaggcgtggtagcatgcacctgtaatcccagctactcaagaggctgaggcatgagaatcccttgagcctgggaagcagaggtcacaccacggcactccagcccaggcaacagagtgagactctgtcaaaaa

SEQ ID NO: 211701 - DNA, 887 bp, Homo sapiens
cgcggtggctcatgcctgtaatcccagcactttgggaggccgaggcaggcggatcacaaggtcaggagtttgagaccagcctggccaatatggtgaaaccctgtctctactaaaaatacaaaaattagcctggtgtggtggcgggcacctgtagtcccagctactcaggaggctgaggcaggagaactgcttgaacccaggaggcgaagtttgcagtgagccgatatcacgccactgcactccagctgggtgacagagcaagactccgtctcaaaaaacacagtacctccttcaactcaaattgcttccccaacaacattgtcaggatgttaaataaaacaatgtttggaaaacacagtgcttcatgcgtagtaacaatgctaaatataacacttaaaatgtgcaaacctcatgatttacctaatcagcctctaaatattatataattctagcccagaaacttacattcctcagtctccaaagggagacctccacataaataaaacttctgtatcgattataaaactcacagtccattaggtttttaaaatatctctaatgtaaaagattctccaacatttatatcaaaccatgattaacaaaaagttcctggtcaggggtggtggctcatgcctgtaatcccagcactttgggaggccgaagcagatggatcacttgagcccacgagttcgagatcagtctgggcaacacagtaaaacccgaaacctcacctctactaaaaacacaaaaattagccaggcgtggtagcatgcacctgtaatcccagctactcaagaggctgaggcatgagaatcccttgagcctgggaagcagaggtcacaccacggcactccagcccaggcaacagagtgagactctgtcaaaaa

SEQ ID NO: 211702 - DNA, 535 bp, Homo sapiens
gcatggtctcacttattcatggaatccaacaaagtcaaacccacagaagcagagagtagaagggtaattgccaagcactgggatgtggtttgaggaagggaggcatgggaaatagggaaatgttggtcaaaggtacatgttttaatcagaaataagttcaagagatctattatgcagcgtgattactatagttaataatatatttactcttgaaaattgctaagaatgtagattttaaatgttcctaccaaaagaagtcaaaaccaaatggtaagtatgtgaggtaatgcatatgttaattagcttgatttaattattccacaatgtatacatatatcaaaatgtcacaatatcacattgtataccataaatatatataatttgtatttgtcaattttaaataagtaaataaagtaatgagatagctttcaactaagcttatatagtggtataatataaaaatttttgtagtaacaaaattatagtaattttggcttatactgaaatgtgcattaaacaagtgtttgcataaaat

SEQ ID NO: 211703 - DNA, 488 bp, Homo sapiens
ttagtagagatggtgattcaccattttggccaggttggtctcgaactcctggcctcaagtgagccacctgccttggcctcccaaagtgctgggattacaggcatgagccaccatgcctggccatctcatgttgccttttttgccataagtcatcaactcatgaccatttcatgcacttgctttctagatgttcttgcttttgatctcttcccattttagtctactgagagactaatctttaaaacactttcctttattataacattaatgtacaggcagacatataaggcaaaggttttaatatttgatcctattcagttttcccaaatgtgttttactactgcttaacctgcacgcttactctagcctggaacattttatttgttagggagttgaaactgagattcactgaattctcattgggagaataagagtacatatggaagggtgaactttagagcaatatcctgcaaggaaggatattgagg

SEQ ID NO: 211704 - DNA, 556 bp, Homo sapiens
ataatagccaccattaatacataatgcttattatacgccagatgcttttttaagcacttcatagatatttacttgtcatttaatgcttacagaaccctgtgaagaattattatcatccctattttatagtaaagatatagagcctgaagaggcagaggatcctgcccaaagtcctacacctagtgacagagctgggatttgaatccaggcagtctgactcacgggtaatgctgaacccatcatatcttaactgcccataaagatacagagagaaggctgggcacagtggcttatgcctgtaatctcagcactttgggaggccaaggcaggaagatcacttgagtccaggagtttaagaccagcctgggcaacatagcaagaccctgtctctacaaaaaattataaaaattagctgggcatggtagctcacacctgtcgtcccagatacttgggaggcggaggtgggaggtgggaggatcacttgagtctgggaggtcatggctgccataactatggcatggtcatgagccatgattgtgccactgcactccagcct

SEQ ID NO: 211705 - DNA, 510 bp, Homo sapiens
catgatggaagtatcttgatagtacccaaagaactggtagcctcaggccagaaaaaggaaacccaaaagggaaagagaaagtgagaagaaactgaagatggactctattacgtgaagtagtaatgttcagaaactgattatttggatcacaaaccattgaaactgcttcaaaaattatatctttaagtactgctacttgaataactcagttaaggctctgttttgaagcttacatggacaaatgtttaggacttcaagatcacacttgtgggaaatctgggggagccataacttttcatgaaatgcattgtatacaaaattcatagttatgtccaaagaataggttaacatgaaaacccaataagactttccatcttggcagccatcctttttaagagtaagtcggttacttcaaaaagagcaaacactggggatcaaattgttttaagaggtatttcagttttaaatgcaaaatagccttattttcatttagtttgttagcactatagt

SEQ ID NO: 211706 - DNA, 376 bp, Homo sapiens
agatagttttagatggtaaatgtgttaacattttgaaaaaatttatttaattggcttaaatattcagcattgtttaaaatttaaggtactgaacaaaaaaattaatgatattttggtaattggagtggtgctatttggaactattttaaggacttagggaaaactcaagttttcaaatcctttttgaaagcttattctcttataagcaaacataaaaatatctttattgcttcattccatttgaatcttgaccagtaattagagagaaaatcaacgtggctggaagggaaatggagtggggaaagctggacttatgcatagaaaaaactatggcaactggcaaatcattaaaatctggagactatcttgtttattt

SEQ ID NO: 211707 - DNA, 380 bp, Homo sapiens
cagagtgagacttgtgaaaaaaaagaaaaaattaaaaaaacacactttaaatggggacttatatggtatgtggattatatctcaataagttgttaaaaaataattaaattgcatcagaagacaaaaagatgtacatatgactatatttactgcagcactgcttgtaatgacaaaatacttgaaacagttaatttgactcttgtgtgatatgtaacctaaggatgaaaacaacctttaaaactgtaaactgctttctgtagtgacactgtggatagtaaaaaagctgacttattctaagattacaagatttgtgttttgtgataagataataagtaattttgttggtatagcaaaactgggattttgggttctggagaaag

SEQ ID NO: 211708 - DNA, 529 bp, Homo sapiens
tcagccatagttcatccttgttaagaatatgtttattcaaccttgcggaggttgggatgatgcctaagagaagaaccaacttaggcttctagacggacctatcgggagacctgttccaagtaccaataatgtctcttcttcaaagatgtgggcattggtgacccactattagagattttatacaagttttggggctatcagggaccttagagatcgtctagtctggattcaaacattaatccaggtatcccatcctcaaagattgccagggagctgcataagcttcccaggtgatgtcaatgcgcagctggatttggaagtgaatgcctaagtaaaaaggataatttaggcaatcacttcaaggttcatccttggaaagtggattgtttctactttttggctgttatgaataatgctgctataaacatttgtatataagtttttgtgtggatatgttttcttttctcttgggtatatacctaggagtattactgctgggttatataataaatctatatttaacctcttg

SEQ ID NO: 211709 - DNA, 450 bp, Homo sapiens
tgcctgcactcaagagcacaacagccctaaaagcctcaaacagaagaacaccacacacagtatgccggcgctttgcagtttcctctgtagaacaccacacacagtatgccggcgctttgcagtttcctctgtggaacaccacacacagtatgccggcgctttgcagtttcctctgtggaacaccacacacagtatgccggcgctttgcagtttcctctgtggaacaccacacacagtatgccggcgctttgcagtttcctctatggaacaccacacacagtatgccggcgctgtgcagtttcctctatgagactacgctgctttcactgacactaactaagaatgtttctcttcaaggaagaccgtcttggccttctcaggctctcagcagaggatgatgatgataatagcagctgtcattcactttacatggtaaagtgacacagtaca

SEQ ID NO: 211710 - DNA, 217 bp, Homo sapiens
ttggagtttgctttccattcagtgggaaatgtagctagccttatttccacatgtggaatcagcctctgtctccctttcctaaagctagtgtgttttaaaaagccaattgatttatttagcaggatataaagtcagttttagaaaagttaattgaaatggtcttgtcttcctcctgttttaacacttttctaaatatctctgttgatggaagagagca

SEQ ID NO: 211711 - DNA, 105 bp, Homo sapiens
aataccaactgtagcacagccatacaacagaatacttctcagcaacaaaaaggaacaaactgtcaatatatgcaacagcctgaatcaatctcaaagacatgatgc

SEQ ID NO: 211712 - DNA, 328 bp, Homo sapiens
tcaaactccttttgtacttccttctatgggacttaaacttatattgtcagatcttacaaggccaaatggtgtcatgaataaagtggctatgggtggcaaggatggaggtcatgcatgggctcagccaaatgtacttctacttaccaaggtggacctggttacagcaaccactgaatatatacaaactgttagcaatagaggccaacactcagctccaatgtggtaccattccctggggtgatcagctagctacctggtggcaggagattgagttatggtatagggacatgtgtttgggtgccaagttgacaaggggtggacttaattg

SEQ ID NO: 211713 - DNA, 527 bp, Homo sapiens
  misc_feature (19)..(19): n is a, c, g, or t
gtagcatgaacttcatggntttttgctcactcttgccaaatgccctcctcagtacaatagtcagaataaaactaccctggctcttccctcacgacataaggtgaataatgaaactgacctacaatgttctggtttgtgtggagctgcccaagggactgctttctgtcttgcctgaatcagagtgctaatgggaacaatggcatagtttggataggaggttggaaagagctgaaagcaatgatgggtaccatggcatgagtgagctgcaggggaacacagacctacagaaacctgtgggcaagagatcagagacaaaagaataacagaacagctaagactccaagaggaagctggaggcaaactcaggaaaactaagaaaaactgaaaggcagctgtgtataggaggaaactaaaactaatgcatatgcacaggcccagggaagatggcatccccaggaaaagtttgagaggacaccaagcctttatggtgcgctaatcagtgaaggcctttccatgcatggagccag

SEQ ID NO: 211714 - DNA, 373 bp, Homo sapiens
  misc_feature (12)..(12): n is a, c, g, or t
ttatttatgganggacagatagcaagaagaaatcgcactctggattacaaagtgggaagacgcacccccttggccagaatgcctgcctcctatgttcatgatggatatttctaattgatcttgacactcttttccactgagcccatgtcccaaattggccctgagttagggagaaggctctagagtgggaaaggtgtacccaaaacttccctaatctgactatcaagcctaaaaaattaaactttcaattcaacatcccttgtttctccaacttggagtgcctgatggtgtgggaagcccctactcatacaaatttatagttgaagattgttggtaattttgcccaaccccttcttttttttgttatacttta

SEQ ID NO: 211715 - DNA, 507 bp, Homo sapiens
taagatgtgtcatctttgtgaatatgatctagaagaaaaagcacaattatttaaatatggcccattttggtttctgatagatttgtttgacaccttttcttattttgaggtgtagtatgcttccatgtacctttccagtataaattcaggtcctaccatctggagtgactcaaagtaaggttggacttcttttggaagacaaaaacaaacaaacaaaaagcaaaaacaacaacaacaaaaacaattattcaaatatttgaagataaatattgctgcgaaaggccatcatggcatgttcatcatatggcatcccctgctatgtctcttcctggttgggaggaaatggggtccttcacctgctgcccaagacgggtgcgtgcaagtcatctcctgtgtcgactgtgggacgagacccgctgatcataagaaactgaactgatactcactgttgaaactgggctttctctgtttcttctatatgatagtaaagcattgttccatccaaaa

SEQ ID NO: 211716 - DNA, 346 bp, Homo sapiens
tctgcttctcttctttaatctcttaatctatggtttgaaaataactgccaaacgaagccaggagcagtggcttatgtctataatccaagtactttgggaggccaaggcaggcagatcgcttgagctcaggagtttgagagcagcctgggcaacatggcaaaactccatctctaccaaaaatacacaaactactgaggtgtggtggggagagcatgtagaactaggtactcagaaggctgaggtgtgaggatggcttgagcctgggaggtggaggttgcagtcagtcaagactgtgccattacactctaacctgagacagagccagactctgtctcaagaaaaaaaa

SEQ ID NO: 211717 - DNA, 544 bp, Homo sapiens
agaaggtgcaaagagggcttcataaactgcatccaatgctaaataaaaatgaaggagatgaggactcagagggtctttggatttagtcctttggttggtagtgatctttgtgatccaagtctgtagagtttccactgagtgaaaagatggttgccctggttaaggaataaatggaagaaagagaggccagaagcatggaatattatttcaagaagttttatgtgaagaacaggaaaaggacattgtaaatttaggataagaggccgggcgtggtggctcacacctgtaatcccagcaatttgggaggctgaagcgggtggatcgcctgagctcaggagttcaagagtagcctgggcaacatggcaaaaccccatctctactaaaagtacaaaaaattagctgggcatggtggcatgcgcctgtggtcccagctactcaggaggttgaggcaggaggatcgcttgaacccaggaggcagaggttgtagtgagccaagattgcaccactgaactccagcctgggtgacacagtgagactccgtctc

SEQ ID NO: 211718 - DNA, 1009 bp, Homo sapiens
agccacctctgcaagggtgtgccaggaacaggtgggccaatcaccaacctcacatgctgccagtcacagtacatcagttattctgccctagagttagggccccagtgccatctgcttttcctcaggactctgctccatcagccatcaggtggcagctactcatgctgttggaacctggccatctgggcttccttgagtgggtgaggctgctggcttgtccgcctgcttaaaggtactatggggatagaacactgaaataataataatgcatttttcaaacaaattaattccttggttttcaaacaaattgaagacaaaggaaactcatgattcaaatgaatacatatggctcattttattcaatatttatgcttacagaatatatggaaataagacattcccatgattaatattagtatttaagactgataaacttttgagtgggcagttaaagcttatcttctactattttctaacttcagaaatgcttttgtttgaaagttgggtgacaaagtttcaaggagaataagtcccaatattcctattttaaatctctcagcttgtgcaggcagggcaggtaaacatgaagtttttaaggatagaagggacctgagagatagcagaatatgtctgctacataacaggtactcaggttatgtttgatgaataaatggaatgaaagaatggaaaaatacagttggggagttcaatatttttaaataaactcctataaagcaatatttttgcaatagtaatatatgttatttttatttaagaatacaattaaaatgaaatgattaatctatcattgtttgcttacttactgtattccttacacaacatatttccttataactctttgccatcaatctgcacctacacaccacaacgacaaacaaaactccaacgcagacaaacccgggaccgacaacgccaggttatcaaatggccctactctaagacaagacacttatccctcaggataagacccccacgccttgcatacacc

SEQ ID NO: 211719 - DNA, 899 bp, Homo sapiens
agccacctctgcaagggtgtgccaggaacaggtgggccaatcaccaacctcacatgctgccagtcacagtacatcagttattctgccctagagttagggccccagtgccatctgcttttcctcaggactctgctccatcagccatcaggtggcagctactcatgctgttggaacctggccatctgggcttccttgagtgggtgaggctgctggcttgtccgcctgcttaaaggtactatggggatagaacactgaaataataataatgcatttttcaaacaaattaattccttggttttcaaacaaattgaagacaaaggaaactcatgattcaaatgaatacatatggctcattttattcaatatttatgcttacagaatatatggaaataagacattcccatgattaatattagtatttaagactgataaacttttgagtgggcagttaaagcttatcttctactattttctaacttcagaaatgcttttgtttgaaagttgggtgacaaagtttcaaggagaataagtcccaatattcctattttaaatctctcagcttgtgcaggcagggcaggtaaacatgaagtttttaaggatagaagggacctgagagatagcagaatatgtctgctacataacaggtactcaggttatgtttgatgaataaatggaatgaaagaatggaaaaatacagttggggagttcaatatttttaaataaactcctataaagcaatatttttgcaatagtaatatatgttatttttatttaagaaattcattccacggactgtgttacccatcatggttgcctacatcgcatgatacttagaaaagctatgtacttctaatacttgctataattcgcgacgaacaacaactacccaccccccccac

SEQ ID NO: 211720 - DNA, 222 bp, Homo sapiens
cggtaacacaggggcaaagttggtttggtcagctttgaagcatgcaaaaccaaactcgcctgtcatctaaactgacgcagtgtggggccaccttctcctattaagtgcagtcctcaggggatagatggatatcctcatttgttaaaagttatatataatgcttttgcaaaaagcagtttttaaaatgatgtgtctgtcttgagtgttaaattacttgtttta

SEQ ID NO: 211721 - DNA, 319 bp, Homo sapiens
ccataagaagcaaagaggaaggaggtccatgttcaagtcatagtttatctaattaagacatgattcaaggcagaaaccatgttcagagcatttaatgcctgagatacccccggctcaacaggtttttatttgagaaccaacctgtgcataacagcaagatggccgtccggtttacagcatcctattgtagtagtgtaaaatcttagatttgtacccagagatttttgtttaagtccagggctgggcaattgtctcctgtggtacaaattcagcctgttgcttgtttttgtaaataaagttttattggaacacagctatg

SEQ ID NO: 211722 - DNA, 342 bp, Homo sapiens
ctagtatgtgattcatgtttactcaattaaattaaattaatttaagatgaaccctttgttccttacatctaacagttaaatttttttcttgattatcaaattatatcattatttgagaaaatatgcaaaatatgtaaaagcttaaataaaattaaatttttctaattatacaatacagggataacaactgttaagattttgtttcatgtagatatgttatatatacttttatatttatctgtttaggtcatcttttttttaacaaaatcagtcatattttactaactttgtaattaactttttttcatttgacattcttattgctgggagttgattcttaag

SEQ ID NO: 211723 - DNA, 708 bp, Homo sapiens
catgtcaacatgcccagttaattggttttttatatttttgtagagacagcatctccccaggttacccatgctggtccaaacacctggtctcaagaaatccttctgctgtgacctcccaaagtgctaggattaaaacatgacccaccatgctcagagtccattttcatttctgatttgagtaattttaaacttttctctttttttcttagtcaatctagttaatggttgtcaattttgttgattttattttgaagaatcaacttttggtttcattaatttcctctattctttttccattctccattttatttatgtccactctaatccttattatttccctcattcactgtgcttgggtttagtttgttcttctttcatatcctgaagtattaaagtaggttgttgacctgagatctttcttcttttttaatgtaagagtttacagttataaatttcttgcacaagactcaacttctctgaacctctgattcctcacctgaaaattgcaatgagagtgctttcttcataccattcttttaaatgtttaatgcaatcaatgaaacaagatgccacacagaggagccaatgtcagctgctatattactaccatcatcattagccttgaggtcaaatagtcctagaatcaaatttcagatccacctgtcactagccatatgacaccaggaaagtttttacaccatgataagc

SEQ ID NO: 211724 - DNA, 397 bp, Homo sapiens
tggtcctaataagctgtgtgtcaggtagaataagttcttaatgagtaagcttcctattgctaaatcaacatatcgtttaggggaaagctcatttacccacaaacaatatctgcgttaagggaaaaaaaaccttcagataaattagagatgattgttataacaggatccacgctttatttctttgatttaggggtaaccataatttatttaggtttgcattaatatatttctagctactagggcaagttttgaggaggggctagaaagtttttagtctcataagtcattgctctgtgaagatcaatctcaaaatatgatgaaactttttttaaatgatatcttcatgtcagtcagtgacgaaacttttttcctggcagtctgactaagcaaataaagc

SEQ ID NO: 211725 - DNA, 560 bp, Homo sapiens
atatataacataacatttgccattttaacaatttttaatgtacacttccatgtcagtaattatgttcacaatattgttcaaccaacaccattatctattttcaaagttttttatcatcccaaatgaaaactgcacccattgaagaataggtccccatctttccttgtatttggggacatcacgctcttctagttttcctctgtctctgtcctcctctggatcccttcctccctgccttcttcccttttctcagccttctttgtgaatatattttcatctgttggttacttaaaatctgctctccatgagtactgtcctaggcccttgtctcttcttactttatacttttatctaaagctagatcttttacctgagccctttaatataattcattacttacctcttgctacccaccaatggtataatattttctgtccctctaaagctttaccatttcttttctacacatttgcaattgcatttttctatgcttggaatttatttctcttaagtgtgttcattatttttaagatcttaacttggaggtcacttcttccagg

SEQ ID NO: 211726 - DNA, 533 bp, Homo sapiens
tcttcagtctccctgtgttttcccacaaggaatagtgtggaaaagacttggggaaaaaaaaatcatcatgattcagccaatgaccagggcagaggtataaatggagcatgattctatgtatctgtctagaaggcatatatggagcatgattctatgtatctgtctagaaggtatatatggagcatgattctatgtatctgtctttctgtacttgttgcctactgagaaaatacagatttttattagaaggttgctgggcacggtggctcacgcctgtaatctcaccactttgggaggccaaggcgtgcagaaaacctgaggtcaggagttcgagaccagcctggccaagctggtgaaacctcgtctctactgaaaatacaaaaatttgctgggcgtggtggcaggatcctgtaatccaagctacttgggagactgaggcaggagaatcacttgaaccggggaggtggaggttgcagtgagctgagattgcgccattgcacttcagcttgggtgacagagcgagactctgtctc

SEQ ID NO: 211727 - DNA, 359 bp, Homo sapiens
aaaaggaaatatttggctcattttttagtttccctaatccatcctgagaggtagaagataaaggaagaatttttggagaaggaggtgatacttcatattagtcttcataggaattatccagaatagggagaaagtcatttggaagagaaagggtagttccggggactggagaagatgttcaaggaaggaggtggtgaaagaagagacctgagtcatcatcaggcctgaagtcagggctggctttgggtaagccacaaatgccaccttattaaggccttctctcctgcactttcaaaacatgccttcctcccccaccagcactccctattgtccttaccatgattttaaaaagcgtatat

SEQ ID NO: 211728 - DNA, 558 bp, Homo sapiens
cactaataaaattacaccacggagacacaagatagaataattctttctaccatcagaaacaggttaatcaataagtcgcccaaagttagtatcacccaatctatatttttaaaattttggcaagccttatttgtagatgactttaagagctattttttttaacccatcacacttaaattaatattacttttcatttctgtgtctacactctggaataattcattgccaaatgtatgatccctgtaataattatgaacatttgataataccccatccatttgcaaagtacaccacagatgagtattatattcattaaggttctccatttataaacaacatttatcaacttcagctaacttaaacaaaaagagccaagtatgttggctcacaccttgtaattccagtgctttaggaagccaaggcaggagagtcgctcgagcccagcctgggcaacaatgtaagaccccatctgtgaaaaaagtttaaaaatagccaggcgtgatggccatgcctatagttggtgtgagccatgattgcaccactgcactccagcctggg

SEQ ID NO: 211729 - DNA, 341 bp, Homo sapiens
aatatgtgtacaaacagacatcaacaggctgtcatttcctgttatagaaccatgaaattaagcacatttataaaaccaaaaacctggaaagtctttaaaggctagtttcaaaatctcaattaatcaaaatcttccagatggcaattcttttacaattattcaataagctgtaacagtataggacaaataaaatcaaactataaacggcacatggcaccaactcacacagcatgctctgtgatgccttaacgctcgcagctctatggagcgtacagtaacgtagtgaatacaagtgctttccagagcacaataacaattacagccttattttaaaactgcaa

SEQ ID NO: 211730 - DNA, 391 bp, Homo sapiens
tttcctccaaatttggcatcttatctttcaagtacatgaacccaacaattagtgtcatttgtgagaaagtttagagggaacacaaagtatgtatgatccaaaaagcaagcaactgctgggcacagtggctcatgcctttaatctcagcacttcgggaggccaaggcaggagggtcgcttgaacccaggagttcaagacaagcctagacaacatagtgagacttcatctctacaaaaaaaaaaaaaataataacaggcatggtggcgcttgcctgtagtcctagctgcatgggaggctgaggcaggagaattacttgtgccccagaggtcagggctgcagtgagccatgactgcatcactgcactacagccagggtgacagagcaagacctt

SEQ ID NO: 211731 - DNA, 488 bp, Homo sapiens
tcccttccagcccccgcctcccactgtggccattggcaggggctgttgggatcaccacagagggcacatggggaaggtggtgcaagtgctggccttcttgtttctcctagacttttgctaaggcctgtgtggggaatacccctgttggttgccaagctaagcattttcataggctgagtcacatagacagagctttactttgtgaatacaaaacagggaaataaaggaacaaaacaccaatcctgaagggcaatgacatgatcattgctaagtgccattgaatgaactcaggataactctcaacctcactcttctgtggttctgttttgcatatgtataatgtgaacttctaatgagttggttaatattattccctcctccctgttttctttaaaccctgctttgaagcataatggtgtaaaccagtaagaagtttggaaagcctgtgcttgtcattggagtttaattaaaatacactaagccttgca

SEQ ID NO: 211732 - DNA, 447 bp, Homo sapiens
agcaaaagataaatatactaagtaaattttatgatttattaaaggttgataaatactatttgtaaaaaaccaatggacttctggtttctgatgcagcatgtaaggagcttgaaagttgtcactctgtcctaacaaatagctaaacaaactgaaaatcaacaactcttcttagatccatcagagaatggaggtcacagagcaaactgaagccccccaaattggagaaagacacgtggatacagagaatcacaacttactgggaacaagcagaaacctccgtgggaacaaagggcagagtaggaaaaacctaagctataattgataaactgctggaagctcaatgtgaacaaatctgagagttaacttgttgtgggggaaggtgatggatatgttaatttgattgtagtaattatcacacaatatatgtatattaaatcatgtacactt

SEQ ID NO: 211733 - DNA, 601 bp, Homo sapiens
gtcagcattcaagagtaagagtacagcatccaaggattatttagacacccacctttaaacaaagctttgaggcagaaaattaaagtattctgcctctaggaaactaaagtagggatgattggtaaaattatttcatacatttgtttaatctctcactgttagtatctgtatacagtttaaaggttagctgccttaaactgccctttaaaacaaggtgggaagtggagggagaaatcctagcatatattactttacaagaacaatacagtttagcttatatattcagcatgtccctaggtatcttgctattttaaaaaagaaaaaaagataaaacatttcttcttacaagtttgggcttctatagccacatttggagatggagccaagttccaatcccggctccatcatgcactagttatttggtcttgattgagccactgaccttgtgtgtctcagtttcttcactgatagaatggaataaagacctatgtgcttgacaggattactgtgggaacatgcctatcacaggaaaagtgcttagtaaattatagtcattaatgctgtattaaggaatagtacactaaggtctctacatccgtat

SEQ ID NO: 211734 - DNA, 686 bp, Homo sapiens
cgagctcggaccctggacttcccggggttgcaagaggttatcagtggcctgagcaagatggtaacagagaggtgctgtgtcgcccaggctggagtgcagtggctgttcacaggtgtagtcatagctcattgcagcctagaactcctggcctcaagccacctgagtagctgtgactacaagcgtgccacccactgtgcctcacctgaaagacgcctttgctgggaagagagaacatcctatatttactgaaaattgatgtcttacatcctaacactactctttccattttgggtttaaagggcccccatgggccaccaggatgcacgtgaaggtgaacccctggtcctgccagcctgccgtgtggcccgcaccacagggctggttgcaggcctacccctaaacccccagccgggcactttctaccttgattggtctgggtcaccagttctctaagtcttcagactagctggtagccctgcataaattatctcatcctctgagattcagtctcatctgaaatggtggggaaccttaaatacctacgaagggcctggcactatccctggtaaattcgaggccaaaagattcattcccttccctcgctctgggaaggtccaggttacgtcatctctccgtgcctcagtttccctatgtgggataacgtagtacctagtgaatagcggtga

SEQ ID NO: 211735 - DNA, 379 bp, Homo sapiens
cacacttgaagctagatgatggatacgtagaggtttattattctgttatttgcactgtgtgaagatttgaaatttcccataataaaatgttaaaaataaagaaataaaatggttttgagtgaattcataggaaagaaaagaacagtttgttgtctctggctcctcagaaaatgatgccagccatgtttttttttttttaggtaacctgtgttcttctgatctgaaaacaaattaatttttccattgctctggattgtctctgagatcactgtgcttaggaatgagatgaaagatactcttgggcagtaacatgatatttaaagaggcaaatgataagaagtgaatactattgcaatgcattaaaataatttaacccaaa

SEQ ID NO: 211736 - DNA, 599 bp, Homo sapiens
tcacatataatgaaatattattcagccttaagaagaaatgaagttttgatagatgttacaacataaataagccttaaaaatattacgctaagtgaaacaaaccatgcacaaaggacaaatattgtatgattccacttttatgaatactcagaatagtcaaatttgtagagatagaaggtaaaatagtggttactgggctcgggggaggaggtaatggagagttattgtttaatgggtatggggtttcagttgagatgagaaaaaagttgcggagatgaatagtggagatggttgtacaacaacgtaaatgtatttaatgccactgaatcacacacttaaaaagggttaaaatggtaaattttatgttctgtatattttaccactataaaaagaaaaaaatagccaggtgtggtggctcacgcctgtaatcccagcactttaggaggctgaagcgggcaaatcacttgaggtcaggagatataaaaaaattagccgggcgtcataatgtactaaatgccactggattgtacaatttaaaaacagttaaaatggtaaattttatgttatgtgtaatttgccacaataaaaatgctaaaaac

SEQ ID NO: 211737 - DNA, 486 bp, Homo sapiens
cctgaataggcggaggctccgaacagggaggagaatgtcccagagggaggctactgcttttcattccaagatatggatagcaccagaaggccttgacctgcagcacagcagttctctgaagctggtgggaagctgaagaagctgagagctgatttcttgcagacaggagaagttcttctttgaatgtctaccaaaacattctttaaagaagaaagccataattcttgccagcactccctcacaaaaccacttataacttgcagacatcggtctggggcagctgggataaaaatttaatcccacaactaaataataggaaactgttaaaatatttacagtaaaatctgccaacttcccaggacaaatctcttcataaaacacatttacccaagaacacatcatgctctggggaaataaaatacacattgccgctttggtattgtctttctaaagtccttatattaaaaaatacaaaaaacaataata

SEQ ID NO: 211738 - DNA, 571 bp, Homo sapiens
agactccgtctcaaaaaaaaaagatgatgttatagaggctaaaatactctgacctggccactcccctcttcggccaaccaaatcctgtttccgcttgcgtgcccctcagcacctggttctgtgcatggccgtgtgtgtgcattcagggagtcaggccctctgttctcacagaaacggggctctgccacacacatccctctgcatctttctttttttttattctaacattcaacaaaccctcctggtgctctgtccctgctggcgcctgtgaatccacactatttcccacagtatctctatccagcctctattgatagacacttttttttttttgagacagagtttcactcttgtagcccaggctggagtgcagtggcacgatctcagctcactgcaacctccacctcccaagttcaagtgatccttctgcctcagcctcctgagtagctgggattacaggcacgcgccatcatacctggctaatttttttgtatttttagtacagatggggcttcaccatgttggccaggctggtcttgaactcctgacttcaggtgatccacctgcctca

SEQ ID NO: 211739 - DNA, 182 bp, Homo sapiens
gatgacctctaaggaactcaacaagcttcccactgaacctcaccctcattttaccatgtagtttgagaaaggtcatcatacacaagtacattttacacaagtgatcagaataatatgttgccaaattaccagggagcttttaaggaactgccgtattggaagcatggacaatcaatcagaac

SEQ ID NO: 211740 - DNA, 378 bp, Homo sapiens
ttaaaaacagtatgtttggtcaggcacagtgactcatgcctgtaatcccagcatcttgggaggccaaggcaggattgcatgagcccagaaatttgagaccggcctgggcaacaaagtgaaatcgtgtctctaccaaaaaatcaaaaaaattagctaggcatggtggcatcctcctgtgatcccagttacacaggatgaggggatgaggcaggagaatcatttgagcacaggaagtcaaggctgtggtgagctgtgttcgcactactgcactccaatctcggcgacaaagcgagaccctgtctcaaaatgaaacaaaacaaaccagttgtttggctatatatcacacattcagggtccacagaatagagctgaccaaag

SEQ ID NO: 211741 - DNA, 836 bp, Homo sapiens
ttctctacatagactttagagtcgatatgtcaatgtccataaaataacctgcaaaaggctttcattgaaataacattgaatctatgaataattttggggggacttggccactttataatattgaatcctataatccataaagatagaatacctcttcattttattatattatctttaagaacttgctatactatttcatagtttttggtgtgcagttattaactgcatttcagtagcaagtattcctagctatttgatgtctttgtataagatacttttttaaaatttaaagttttatttttaagttaatggtatatagaaatacaattgaattttacatattgactgttaatccagcaactttgtcaaatttaactgttagttctaagagcttgtagattattttgttttaatcctgttaaactatatttttattttgtgtttatttttcttatttctacatccacatgctttatgttcatgtcaagtgtctagtgttccttgtactcattctaattttctttcattatattttttacttttattttaattctataacttacttttcatctatttcagttttttttctatcacttccctgagttcttatatttctactttgtaatcttccttcatacaggtgattgtgtcaataagattttcaattaattataaacttttggtcatacttttcattcattctatggcaacaatttctgtggtcccaccctttaacttctggagttcctctttcaatacactacattgttgcgactcttcaaaacaccggggcggccaaccgaggggagccgtaagcgggcacaccatagctcgtg

SEQ ID NO: 211742 - DNA, 212 bp, Homo sapiens
agtagagaaaatataaaagcaacacagaagccacagtaagtcaaccagaaggacaacagaggacatccagtaacttaattacagaaataccggaaagaacagagaaaacagatggagggaattcatcaatcaaataattcaaaattccccacagctgaaggacatgaatttctagcttgaaagggcccactgtgtgcccacactgtgaagtg

SEQ ID NO: 211743 - DNA, 415 bp, Homo sapiens
gctgcgactacaggcatgcactaccacacttggctaattttctttttaagggtgcttttttgtttatttgtttgtttaataggtgaggtgtcactatatttccgaggctggtctggaacttctgggctcaagtgatcctcctgcctcaacctcccaaaatgctcggatttacaagtgtgagccactgcacctggcctgcacaattattataaaaaggaatgaagcccagttgagttgcagaaaattgaccactttttcatttttttttctaaaaacattcatgttgtagaacatattgtcaatcacccagattgtctattttttgttcggttaaaagaggattgctccttatttcacattattttctgacattattgtttcatttattccttttatggttttattcaattagata

SEQ ID NO: 211744 - DNA, 260 bp, Homo sapiens
atgcccagccagtattttattcttacgatgctgttataaatggaattgttttgtttatttttggagtttttattgctagcatatgggaatataattgacttttaggtgtttatcttttatcctacaaccttgctgaactcatttattacctctggtagttatgtagtttgaattttctatatacaagatcatgtcactggcaaatagagatagtttacctctggatgccttttatttcttttttttttttaattttaaag

SEQ ID NO: 211745 - DNA, 1065 bp, Homo sapiens
  misc_feature (726)..(726): n is a, c, g, or t
  misc_feature (760)..(760): n is a, c, g, or t
  misc_feature (813)..(813): n is a, c, g, or t
  misc_feature (911)..(911): n is a, c, g, or t
  misc_feature (922)..(922): n is a, c, g, or t
  misc_feature (929)..(929): n is a, c, g, or t
  misc_feature (940)..(940): n is a, c, g, or t
  misc_feature (955)..(956): n is a, c, g, or t
  misc_feature (958)..(960): n is a, c, g, or t
  misc_feature (978)..(978): n is a, c, g, or t
  misc_feature (989)..(989): n is a, c, g, or t
  misc_feature (991)..(991): n is a, c, g, or t
  misc_feature (1009)..(1009): n is a, c, g, or t
gtgccttgggctcaggtggagggagcaaagtcctgcacactggagtggtgtactagcggatcaagtatggacactgactcagactgaggagcagctccactgcactgtgtaccgaggagacaagagccaggctagcaggcccacaccagacgagctggaggccgtgcgcaagtacttccagctagatgttaccctggctcaactgtatcaccactggggttccgtggactcccacttccaagaggtggctcagaaattccaaggtgtgcgactgctgcgacaagaccccatcgaatgccttttctcttttatctgttcctccaacaacaacatcgcccgcatcactggcatggtggagcggctgtgccaggcttttggacctcggctcatccagcttgatgatgtcacctaccatggcttccccagcctgcaggccctggctgggccagaggtggaggctcatctcaggaagctgggcctgggctatcgtgcccgttacgtgagtgccagtgcccgagccatcctggaagaacagggcgggctagcctggctgcagcagctacgagagtcctcatatgaggaggcccacaaggccctctgcatcctgcctggagtgggcaccaaggtggctgactgcatctgcctgatggccctagacaagccccaggctgtgcccgtggatgtccatatgtggcacattgcccaacgtgactacagctggcaccntacacgtccaggcgaagggaccgagcccccagancaacaggaactgggaaactttttccggagcctgtggggaccttatgctggctngggccaagcggtgctgttcagtgccgacctgcgccaatgccgccatgctcaggagccaccagcaaagcgcagaaagggttccaaagggccggaaggcnagatggggcancctgganaaagaaattcnccaagcaccttcccnnannntccccacatctctctccntttcccctccnantctcatgttggggagggncctccctttgactacctcaaaggccaggcacccccaaatcaagcagtcagttgccc

SEQ ID NO: 211746 - DNA, 660 bp, Homo sapiens
ttccttgcacaggtcataacaacacccaaaacatgtctctgaaatacattgccaaagaaagagcttcaaatagagtcactgtgcctaactcccatctctgggcattttactcttcatcgaggggagtggtaccaatgttttgctgttgttgtaatggctgctgctgtttctttagttcttattcttctcagtttatttactgtctatagtttttacaaaaaacaaactcaaaataaatctgaggaaggcttattataaggttttaatgcagacagagatagactcaactgtaatacactaggcattttggcatataaatccttatatctgagcttaatcatatctatacttaaggtagtcctttgtcttcaatttaatttttccaaattggaagtctgcatatcatatctttattaaatctatgaatccttggctatctaatatgtatcagcaagttttctttaaattaagctggccttctctcaagaacctaaacctctataaatactgtaaaataaattttaatcagtcgtctgtgagaggggattctgaactaatttttgtactttcaaaccattatcagtaccattctactggaaacaaaataatttttcttttaattgaatcaatcgtgtttcagaaattaaataactgaaaact

SEQ ID NO: 211747 - DNA, 438 bp, Homo sapiens
ttccttgcacaggtcataacaacacccaaaacatgtctctgaaatacattgccaaagaaagagcttcaaatagagtcactgtgcctaactcccatctctgggcattttactcttcatcgaggggagtggtaccaatgttttgctgttgttgtaatggctgctgctgtttctttagttcttattcttctcagtttatttactgtctatagtttttacaaaaaacaaactcaaaataaatctgaggaaggcttattataaggttttaatgcagacagagatagactcaactgtaatacactaggcattttggcatataaatccttatatctgagcttaatcatatctatacttaaggtagtcctttgtcttcaatttaatttttccaaattggaagtctgcatatcatatctttattaaatctatgaatccttggctatc

SEQ ID NO: 211748 - DNA, 483 bp, Homo sapiens
agacatctcaaagaaatacactgggaattcccaaaggggagagtaagtttaggttgaaagtgaaagaggtgttcaggaggaaatgatggttgtagaaattgatttttgtatcatctccattctaaaaagaagctattttataacccagttgattgtatcacctacaactttatggcctatagaaagaactgctcttacgtaaagtacatgaattgagagctgtcctcccgaagccagtttccctgactataaaatctgaaatagtccatctactgcgtggcattttaatcccctcagtcctccattattctcagaattttccgcttataggataaatacattactcaaaggttttgtgttaatttttatacctgtttttacttatagcctgtttctttttttctttaccaaaaagcatcgtcttctgattttgagagttttaattcttaagtatcagttgatgaattaataaaatgtaaatgt

SEQ ID NO: 211749 - DNA, 464 bp, Homo sapiens
tcctctctggctagggctggtttaaatgatccttctttgggtggatgtcaaatggttttggtatagttttgctttccattaaaacagggcaacactgagttcaatgcctcacaattactgtgctctccctctcctcagaacacagaagcattctctataccacacctccacttgtggggcaaagagtagtggtaatgtcagtgattcaagactatctttcttctttattcagtgcctttcagtgatatgaagtcaaaaccaggtactgtgagtattcgcctgatttttggttcttatgaaggtgcttttgtgtgtgtgtagatagttgttaaattggtgtcctggcaggggagatgattagtgaagcctctatttcaccatcttgttccaccccctccctatttaacctttaacttggattttttaaaggccaaatatttaattatttaatattaataagttgt

SEQ ID NO: 211750 - DNA, 327 bp, Homo sapiens
cgcagaggggaactgctaagaaacaggattaaaggggtgactttcctctaaacctcttgtggtacaccttttgtaatttgtgtgcataaattcaaaacaattttaaatcttttttagtctgactcaattttactgtttcctgaataaactgttttgtttttttcaaatccttaaactcttaatccattttttttctgaaactgagttaggctaaagaccaatcatcccaagcacaggaaacaagttccaacaatttaattttttaaacacgcctaatcctacgaaccagatagcactaacaaagacagaatacttttcatagttttt

SEQ ID NO: 211751 - DNA, 868 bp, Homo sapiens
gcatcagatgtttcacacagataaactatctcacttaaacttcccaagtccatgagttaataacattaacaccatttaatagatgagaaaactgaggttcagagagatttagtaacttgtccagggtcacacagcaattgattagtggttgctctggaaagtgagtcctgcagtgggaatctggacctaagctcttatccctttgccacatggcccagacacttcacaagcatcattaaccgggtgttgccttgactcctaagccataaacaatgggaatgcagaggaagattctgcatttgccacgctgtgtaaggtccccacgtgtttactagtcataacttggggtagaaaaatgcttttaactttttttaaacttgaattacgaagcactttgagctcctgggatggaggacctccctgttctggccctcctcccctctggtcttggatgaactggcgcaaaccaggcttcttttcagaccagggccagtctggctattctaataatagcacgttgtctgggaagagcagaaactactaagaaaatcctcatctatccatcagatcatctgtttatggaaacaaaaagacagaggagactcagaggtgaaggatgctcagctgcattgaatcacatcttgctggtttggaactcctaggtgtccctggcaggacagaaaactcagatgaggcagagcccacacctcactcaacaaatattaaccccacagttacaaccaactttaaaaacattttatgtgcatgtcaggaagaaggcaaacaatagttattgtggtagggtgctaggatggagtaattttattttatttaggaaagtctaacggggaaccgagctcgaaatcga

SEQ ID NO: 211752 - DNA, 267 bp, Homo sapiens
tagcacagtgactgcacagagtaactctcggggattgtgtcttggctctctagccgcagttccgtgtctgggacacacaagtgccatgctgggatccctcttcgcgttcgttctggggaatccttcacttttctcccatgtgctgtgtctcatgtggtcctctttccggggtcactcttccatgctggaagagcttatcctgacaaagagtgtgtgggagataaattttgagatattgcagaaaacatctttattctccattctcat

SEQ ID NO: 211753 - DNA, 430 bp, Homo sapiens
attatattgcttatttcagtttttgtttaggaatgactgcaaattttctcatgccagtttgatattaacacttttttctgtaaatatttgtgcataataatgaattgtgtcagtaaattcctaatgtcgaactaatcttgcacccttgaaataaccctgatgatagtcttctaatacactactgtattctcctagctagtattttatttatttagaattttttcctccattcataatgaaaaatatattattttctctctttgtactcttgtcatcaagatttggatgttaaaggttctggtagcctcagattggaatgctgatgactagagtattgataattgtcgacgatgagtacatggggttttatgatactgttctctgtatggctgtatatgtttggaaataaagtttttttttaagtgaatta

SEQ ID NO: 211754 - DNA, 152 bp, Homo sapiens
aatgaaatcgcaggtttaaatcacctaccacaaggtctaacatgtcagagggttttatacacaggagtttccttcccgaggagaagcttggaagggccagactccaaggggcaggagacagtagaggactcagagaatcctaagttgcatca

SEQ ID NO: 211755 - DNA, 185 bp, Homo sapiens
cttttttgggacaatttggtaatgtgatcaagctttaaacacgataaatccatccaattgtatatatctattttcaggaagccctggcacagatatgcaaagacttgtcccaaggacggtcaccactgagtcacaagagcaagaaatgtaacatgacccacacccccatctgtccctaccacagg

SEQ ID NO: 211756 - DNA, 653 bp, Homo sapiens
atgggaggaattcaacaaactgaaataaaagtaggagaaggaaaagagaaaagaaggactcttaacagttcctttactacagagctgggtttggtaagcacttcagaatgcctattaaagcctaatgcgtttgacctgaaagccagcagcaactcaacttaacagacaatgtacttgatcaaacaaatcacaaggaagatgacaaatacaagttgctggacaaacctgttttctaaaagaacagatgctgaagcaatgatcctaggtgccaagaaaggaattcacaggaccatgctttgccaacaaataagttatcggatcagaagtaattgtcactggttcatcggtgtcaaaagtcaactccaaattgcaaagctggaaaacatctttgcaacatgtatgacagacgcctaatagcctatataaagagaacttacagatggaaaatcctcaaaataaaggcaatacccgtaaaaagaaatataaaaggctgatcaatagatgccatgatgttcagcttattggcgaagctgccccatttcacagcttcggggggggtgtctatttggaaacagacactccaaatagagaactgtgaaactggcagcctgcctgaccatattcagtgcccctgcttagtaaacaacaacaat

SEQ ID NO: 211757 - DNA, 369 bp, Homo sapiens
tagaacaagatagaaagagagtctgagtcttaatgacattactgaatccctaaattcaacattgctgaagccaaatgttccctgaaactcccagttacttctccagtaaaatctttgtcttttatttttcataagtaaatttgaattgggcatttttcttttgcaaacacaagtgtcctgatgaaatactaattttcccacccttcccaacctccctcatccttggacttccaggacaatgtaatgagcaccaaggatctgaactctagctcttgttgggagcttaagctcccaacaggaggagctgcagccccccagagagagctcttcacgttaccaagtaaccagcccccagccttcaggccccaa

SEQ ID NO: 211758 - DNA, 507 bp, Homo sapiens
cttgaggtgacagaagcaaaggacagttctgcgagaagggtatatggttattgggctgactgaaaggatgacataaacaggagctgccatagactcatctggtttgaaattaagtctgaatcatttttacttaaagaacattatgcatggtaagccatatattctgtttccattggattttggtcagatttagtctctatgctataaaaatatatgattattatggtgctctgggaaaaaaaaatcctatcatgttccaaacaaaacaaatgaatgcattgccatgtaaaatttttatgatgattttaaattttaggaatacttaactataacaaaggataaatgtttgaggggatggataccccattttctatgacatgattattatgcattgcatgtctgtatcaaaacatctcatgtaccacataaatatatgtacctactatgtactgacaaaaattaaaaattaaaaaaagatctgtgaaagtccaatactacaatgttaaa

SEQ ID NO: 211759 - DNA, 387 bp, Homo sapiens
aatgtttgaggggatggataccccattttctatgacatgattattatgcattgcatgtctgtatcaaaacatctcatgtaccacataaatatatgtacctactatgtactgacatgcaatgcataataatcatgttccaaacaaaacaaatgaatgcattgccatgtaaaatttttatgatgattttaaattttaggaatacttaactataacaaaggataaatgtttgaggggatggataccccattttctatgacatgattattatgcattgcatgtctgtatcaaaacatctcatgtaccacataaatatatgtacctactatgtactgacaaaaattaaaaattaaaaaaagatctgtgaaagtccaatactacaatgttaaa

SEQ ID NO: 211760 - DNA, 317 bp, Homo sapiens
tagacagagtctcgctctgtcggcccaggctggagtgcagtggatgatcccggctcactgatggctagctctgataagtaaaatagtaatcattaagaaacaaattacaggctcctatcttctcagcctgcctctagttcacttgctcctctgtttcccatccaggggccattttgtttctttcatcctttttttttttttaattttactttaagtcctgggatacatgtgcagaaggtgcatatttgttatgtaggtatacatgtgccatggtggtttactgcacctatcaacccgtcatctaggttttaagccct

SEQ ID NO: 211761 - DNA, 159 bp, Homo sapiens
accatgcccagccaataagtatattccttcgtttatattaagtgttacatttagagaaattacctagttccctaattcctattttctgctcctccagctgagttacctcggagaggcaacttaacctagatttgctcactcataaaatggtaatactgc

SEQ ID NO: 211762 - DNA, 452 bp, Homo sapiens
agtgctggaagtgaggcctaatgggcagggtttgggtcgtgggatggatcacgcatgaatagatcactcccctcccttgggagcggaggggtcgtgagttctcactctgttagttcttatgagagctgattgttaaaaagagcctggcaccttcccccaccttcttgcttcctttcacaccatgtgacctctgcacatgcctcctctgctttgccttctaccatgaatggaagcagcctgaagccctcaccagaagcagatgctggtgccatgtttcttgtacaacctgcatgcagaactgcgaaccaaacagacctcttctttataaattttcagcctcaggtattcctttatagcaaggatgcccaatcttttggcttccctgggccacattggaagaagaagaattgtcttgggccacacataaaatatactaacaatagctgatgagc

SEQ ID NO: 211763 - DNA, 509 bp, Homo sapiens
atgtatgaaggtttcaatttctccatactctcttcaacacttattgtctgtttttttattataaacatcctagtgggtgtgaagtggcatctcatcatggtttagatagcatgactcctgaacagctggtttgactgccaagtttattaattagctagaaatgagaaacacagggcccagcatcatgatactccaattttgaaaatataacatgtaataggctgggcacaatggcttacacctgtaatcccagcaatttgggaggccaaggtgggagaatcacttgagccctagagcctgagaccagcctgggcaacatagcaagacctcctctctactaaaacttttaaaattaactagatgtggtgacatgcactgtagtcccacctacttgggaggctaaaggtggaggatcacttgagaccaggaattcaaagctgcagtgagttgtgatcccaccactgaactccagcccgggcaacagagtgatgctctgtctccaaaaaaaa

SEQ ID NO: 211764 - DNA, 599 bp, Homo sapiens
acacgcacacacacacacctgactaggttaactacccatagactctcacagcacaaggcagcttacaaaattgtttagagtttgaagcctgtctctctcaccagatgataaaacagggactttacaacaatatctggtacatagtagctgttcaaagatgttttatgggtgagttaacacagagcaacaattctttgcatcctcaaggttgccaactactttaaaggagtctatcttggaagctctatacttatgtctgtagtttttgggatgccttttggaattgacttcagagaccacttgccattcacaaaagaaaatttgtcttccttcttcactgctacacctggatttttgattcaagatggtttcactccaatcaaagtgttcacacatttaatttgcaagacattgctctaagtgacatttgtttgtttccaaaaaaatcctaaccagctccaaaggctagataactaacaagagattagcaaaagaaggtactgtggagatgagagctattattgaacacttacagtgtgccaggcattgatgaacaccttacaatcattatttcacttagtcctcacaacaaacccatg

SEQ ID NO: 211765 - DNA, 275 bp, Homo sapiens
tcataaaatgaaataagctggactgagttactatttattgtagatgattagaaatgaaaggacatagagtgtttaaggaggaagatgctatttgatttttctaaactagtgcaaaagaaaattaggaaatcagactaggaccgaggcaggaggggaacaaattgtgaagggttttgtatgtagccatataggagtttggatttttatttagttttatagatgggaagtaacacaaacacttttgtgttttagaaaattgatcatagcagtcataa

SEQ ID NO: 211766 - DNA, 425 bp, Homo sapiens
accccagtccctgcatttttcattcctagtgtttgaccaggatggtgggaagaggttatggtaaccaaagaggctacctgatatgtatgtctcgttatcattactaatcctttattgcgctagatgttttagaagtattttctagacccggtgcagtggctcacacctgtaatcccagcactttgggaggctgaggcgggcggatcacgaggtcaagagatgaagaccatcctggccaacatggtgaaaccccatctctactaaaaatacaaaaattagctgggcatggtggtgcgtgcctgtaatcccacctactcaggaggctaaggcaggagaattatgtgaaccgaggaggcagaggttgcggtgagctgagatcacaccactgcactccagcctggtgacagagcaaccctccatcttaa

SEQ ID NO: 211767 - DNA, 408 bp, Homo sapiens
ggttcttaatgtccacatttgttgttccagaccttcacttgacattaacccacaatcccatctgcctctaaatctcattattcattaggccgcatctcctaaatgtgtttaatggttgatattaaggtttctctgaaacctcaagtttaagattacaatgagggtgaaacaaggataaatacaaatgtaacatttaaaatcaactacctgtcaatgtcccactttaaggaagagctggtaactgggtgcaagaagatatagtaacaggttaagttcattaaaggtaactggaaaagcatgtatattaatatatctaactatatcacctaactgttacatgtagataaagctaacctaattggacagcaatgtaatgagtcttgaagaaagaacagtataaatgaagac

SEQ ID NO: 211768 - DNA, 958 bp, Homo sapiens
cggccgcctcctcccctttaaggcggggctcgcaagggcggtgggggggcccgaggaagtccgggggccctcggtgatgcccccgcccccgccgcgtcagggttgctccctgcgcttccgagtggcgactgcagcgggtccggtgcaggtgaggggcgcgcgcctgcccagctttgcagcccccgaacgcggcctcgcacaggtgagggcggtgccgggttcacctggcagcgcgcgtgggccgggcagcacggtcgccgcctgggggtgggcgtcttctctcaaccgaagctgggagttggggagctggagggtccaggatgagaattcagtggcgctactaccccggagctgcttgtggttcagagatcagaaaggtgtcctgaggactggaggcagaaatccaggcgtggcgtactggaaggcgcactaggggagggcagcctggcccagaatttctttgcattttaaaggccacacattcagtctccccggggcgctacggaggtagtcaccgccacatccaggactccttccacagaggagtcattgcagattttcagtagagtgtgtacgttctgagaagtgggctctcttgggtcttcatgcagccatggacatctggataaaccatctgtaatggggctcattaggacagcggagcaggccattgttgatcaacttaaagcaagaagaaggtgaacaaagaacccaagtaagcccccagatctacgggcaaggcatcactatggaccggcgttcatcagaccgtactctggtgcctgatctcctggaggctgaggccttggacccaagagggccaggcctataactcccggagccacagggactaacatacagccacaggtgaccccaagacagggctgacacactagcagggagtcgagcaccaagaagcagcgagaaaggaccaaggaaacaggcgagaagaagaaag

SEQ ID NO: 211769 - DNA, 571 bp, Homo sapiens
cggccgcctcctcccctttaaggcggggctcgcaagggcggtgggggggcccgaggaagtccgggggccctcggtgatgcccccgcccccgccgcgtcagggttgctccctgcgcttccgagtggcgactgcagcgggtccggtgcaggtgaggggcgcgcgcctgcccagctttgcagcccccgaacgcggcctcgcacaggtgagggcggtgccgggttcacctggcagcgcgcgtgggccgggcagcacggtcgccgcctgggggtgggcgtcttctctcaaccgaagctgggagttggggagctggagggtccaggatgagaattcagtggcgctactaccccggagctgcttgtggttcagagatcagaaaggtgtcctgaggactggaggcagaaatccaggcgtggcgtactggaaggcgcactaggggagggcagcctggcccagaatttctttgcattttaaaggccacacattcagtctccccggggcgctacggaggtagtcaccgccacatccaggactccttccacagaggtcagttcctcagctgggtgggctttaa

SEQ ID NO: 211770 - DNA, 306 bp, Homo sapiens
tgacgttatcagcctctgcacctctgtcctcccttctgccacatgttgcctactctccatgactttggtaagagcttccttgtgtatgtggatgatgtccaggatgttggtctggtgtccctgagacagcactaacaggtccatgactgagtccacttcctggctgggttcattggcaaagagctcacagacggtgttgaaggcatctctggtgaagtgatggcctgttccagatccaagacctggctaaggcggaagaagaactggctgccttctgctgctctttcttaaagcctctgaccatca

SEQ ID NO: 211771 - DNA, 891 bp, Homo sapiens
atttctagcaagactctgtcacagtttcttatcttcagtcagcagcaattacagtggctgacctaaaagcacagatgtttcttagaatacaagattaagttggatcctgaaatgcctacgtggcaatctgaccttgcctgtgatttcattttaatgaatgcattccaccagaaatattagagagatcagatctgaggaaatggcatttgagcaaaaactgatgggtgctgtttttctgtgcaccagataactttaagtcatagaaattgttgcatttggaagtttttaaaaaatttccttgaaaagaatctgaatatatctccaaggtgatttctcttttctgaatacctatgagccctgtctgtatcactgagttactataacttttaacatttttgtttcatcatttatatttcaaattatctttacacatatatgccttgtcttcctgactagactgtgggctccttcatgctgccataactagataggtaggtaggtaggtagatagaagatatgaaatatttttcattacataacagatttagtttaataatttagtcagctctgttagcgtgtcatgtgtgtatgttatatgtatggaggaaacatgtacaacatggatatttcctctggaaacatggatacaattattacaattagccttgttaactcgtatttaatgtgtttgcttattcataacactgaaagctgagtcttttattaaaaggtagtataatttaaaaaatacttattgtaatttctctattgtagactgcaaattctgcttgatgaaattataattgcactctaaaaggcttgaataaaatataattttattttcctttaaatgtgtgtttttgttaatgttctaaaatatagtaggttaaa

SEQ ID NO: 211772 - DNA, 422 bp, Homo sapiens
taaggaaaaaaataggggaacgtggcagagaatggctgaggggtagggtagaatgcattcaataggatggtcaggaaagacctatttgaagaggtgactctgagctgaggaaggaaggatgagaagatgttcatggagcaagctgaggtcatcacattccagagaggaagccacaagaacaaagacctcgagatggaatgaactctgttcaagtaatctaagaacagaaagaaagccagtgttgctggaatgtagtgagagatgggtaatgtggtagaagatgagaggaaggcgtgcagaaggtgctcaataaatggtttgttgtggtaacatagcatgtgaagtgctttacagatttcccctctaggaatatgtacattgtgtgcattttcatcttttccccctttgggtgtctttattgt

SEQ ID NO: 211773 - DNA, 463 bp, Homo sapiens
ttgattagtctaaccttcatggagaataattgttttttcaaaaaaggtatttaattgaagagcatttacagtaaaatcaattgcagtttgaaacttccttgaacaattacttgtgaattcaagagattgctataatgaaggttgatatagtttggatatttgcccctgccccaatctcattgaattgtaatccccatttttggagttggggcctggtgggaggtgtttggatcatgggggcagacctctcatggctttggtctatctttgtgatactgacttcttaggagatctggtcatttaaaagtgtgtagcacctcctccccacctctcgctcccccttcaccttttgacatgattgtaagcttcctgagtcctccctagaagctgagcagatgccagtaccatgctttttgtaacgcctgcagaactgtgagccaattaaacctcttttctttataaa

SEQ ID NO: 211774 - DNA, 454 bp, Homo sapiens
gttacccatattggctggacgatcttaaaatagctgtgggtttgtatagtttatatgtcagagggacttatttatttttatcccaaggcatatcctgttggggagattgaagagtatataaaataatgttcccatattctccagttatttttggtgttgacgtaaaaactagagaacatggtttttagagattttagaataatttgttgaatgtaaatatttttttacatgacagcataatctaacttgctgcctcttttttgtttttaaacacatttctttcattttggaaaaaattactttacttcaggcactttaaagttttttttgttgtgttgttaaactaataaaacaaatagctaagtccccttagtgttctccttactattatatttcactgcatgtgtatctatacattttaacttactgctggattgttcaaaattgtgaacag

SEQ ID NO: 211775 - DNA, 626 bp, Homo sapiens
gaattgtgtaagctatggagaatacaggggaaagagtctacaatcttcttgggaaaatggcacatttcatgtagtgctattgttttaagttatatttgaaaggaatttgcaggtgtgctgtgtaagggaaatattatgcacagcatgtttggagatagagttcagtgtggcttagagcaaagtaagtgggactgtgagtggtaggtgtgactggatttcatagtaggcttgtaatcatagaaacctttgtatatgttacacactttttttcacccacccatctccttcctagatggatttaatcactccccactttccactacacccagggctctcctggcccacagcaatgtaggaaagtggaaaatgatttagcagattgaagaagacagagtttgtcagcatgctatacataggtgtacttgaagagttggtgaatacatagagacaaagggctgactatattgtgtgtgtttcaatcaggctgggtatgatctgctcatttggttttcacctcctcctggacatgtctgggattctgaagcagtgacccattcttcctactcataagaagcaagtgttttagaatatgagtgctattattattcaagtatggtagagctaat

SEQ ID NO: 211776 - DNA, 516 bp, Homo sapiens
tggcagatgttatttgtaactttgttttaaaatagcataatatttctgcttaaaaaatttcaaaaatgtcaacaatgatttttcttgaaagtgttaatattccttcttgacagtatccaaagctatactttggtgatttccatggtacctcaatactgaatttgattactctttgattaggcaactaaattttttgtcttacttgcttttttcacccctaagtcatccataaagacgtgattttcatggttgtgttaggtaaacataagttgtactacatatgtgtaattacaaagcaattgtaatggcaaatctagggtcttgtgacatctgttagtagggatcttcttatcatatccctcagtgatcatttgacaaaaataataccatgaagggatttcaaaggaagcttgagaagtgtagtttaacaagcacacaaatgatgcatttcaccctacattgatgtcgttaggaccattcaccatagatgtgtccccggtcctccctgaagtatta

SEQ ID NO: 211777 - DNA, 1023 bp, Homo sapiens
  misc_feature (820)..(820): n is a, c, g, or t
  misc_feature (841)..(841): n is a, c, g, or t
  misc_feature (1015)..(1015): n is a, c, g, or t
gctctgccctccgcctcctcttctccgcccactctcgccgcggtctcttggcggcggaggctttgtctcgtgggctggtccccagcggctccctccccgaacagctgctgctccagggaggaagcggcgcgggtgctgtccagcttcccggtgctgaaaaccggagggctcgtcatccaccactaccatgtaagggccatgagaagggctcatcctggcgcagcgcggacatggaggaggacttattccagctaaggcagctgccggttgtgaaattccgtcgcacaggcgagagtgcaaggtcagaggacgacacggcttcaggagagcatgaagtccagattgaaggggtccacgtgggcctagaggctgtggagctggatgatggggcagctgtgcccaaggagtttgccaatcccaccgatgatactttcatggtggaagatgcagtggaagccattggctttggaaaatttcagtggaagctgtctgttctcactggcttggcttggatggctgatgccatggagatgatgatcctcagcatcctggcaccacagctgcattgcgagtggaggctcccaagctggcaggtggcattgctgacctcggtggtctttgtaggcatgatgtccagctccacgctctggggaaatatctcagaccagtacggcaggaaaacagggctgaagatcagcgtgctgtggactctgtactatggcatccttagtgcatttgcgcccgtgtatagctggatcctggtgctccggggcctggtgggcttcgggatcggaggagttccccagtcggtgacgctgtntgccgagttccttcccatganagccagagctaaatgtattttgctgattgaggtattctgggccatcgggacagtgttcgaggtcgtcctggctgtgttcgtgatgcccagcctgggctggcgttggctgctcatctctcagctgtccgctcccctctttgccgtgctgtgtttctggctgctgaaatgcaaggnatgatgtg

SEQ ID NO: 211778 - DNA, 391 bp, Homo sapiens
tctgagacaggatctcgctctgttgcccaggctggagtgcagtggcatgatctcagctcactgcgacctctgcctcctgagtagcaagcgtgccaccatgcctggctaatttttttgtgtttttagtagagatggggtcttgccatgttgcccaggccggtctcaaattcctgagctcaagggatcctccggttgcggcctcccacagtgctgggtttacaggcatgagccgtcacgcccggctataagtgttaattgcattcttagtaacagcaaaacaatggaagcagcccaatccccaaggagaggagagtgaggaattgcatcatggtaaaattccactcaatggaagattatagagccatgagaactaagaggctacagctacaca

SEQ ID NO: 211779 - DNA, 121 bp, Homo sapiens
cactgagttcctgttaggttatagtctgtcccaaaccaaaatcctggaggtgggtgcaagagcagggactgggacatgcttgagctacaggcaacaacgagcctctctgatgtcttctcct

SEQ ID NO: 211780 - DNA, 699 bp, Homo sapiens
ctcagcagttcaagtatgtcaggtagacccaaattctctgtaactctctgtatgaaactttcagagttggctatatacttagctggtaataagatgtctgaagaagttctaagtgtcacatccagatgcaatactgtccgtaggtagagagaaacatgtatttattattttctcttagaagacaagaacttttttaaataagcaattcagctgaattgctttcattttgaatggattagaattggctcacatgcatatacttgtaccaatcaatggcagggaagattaatttactggaccaaccgtgcccactcatgagacttggtgttggttcactttatcatgaagtgcatagttatatgcatggtgcatgggggtggacacctgaataaaactgggattctataactaaagaaagcaggaatggataatgattaggaaaacatctgtgtccactacacaatgctaacaatatatggctatgtttataattggcaatgatggcataatcagaatagtaataagatcagacaaaataaaactaatttgaatctaaatagaattaccaaatattctaggcatttttacccaagtcttctctagccatttaaacctttgtaagaatcagcttaaaaataatggaacagatttgcataagtaataccaatctgaaagctttcaatgagttaatatttaggc

SEQ ID NO: 211781 - DNA, 553 bp, Homo sapiens
atcctaggtggacaaaaggggcaagatgcaaggtattttttttaaagtaagccaagtattgaagaactagctgccaataggggcaaaaagtcacatggtactttactgagtttccttggaagcttttaatattgtaaatctgcttaagatatgttatctacttaagcaacatgtaggagagaatataggtgtctttactgaaattgctttgttccttaatgcatgcttttgacatgaaatgtaattcgggcaaattaagtctgaaaatagttactgagaattggttttgtttacttattctcagactcctaccacaaagagcttgaggcaaacttataattgaaggtacaggactgtgcaaaagaaatcagactaacttttaaaaagaatatttcaatgaaccaggtataaaaatcacatcaccaaaactggagaatactgaaaatgtttacaacaaaaagcaagaatgtattttctaagtcataaataattttttaaatctgggaactatcctgaaaaaacataatgagtttttaaattcatagtttatcat

SEQ ID NO: 211782 - DNA, 537 bp, Homo sapiens
tttctttgttgactctccatcttgatgacctatctagtgatgtcagtggagtatcgaagtcccccactgttattgtgttgtgtctatgtcatttcttaggtctagtagtaattattttataaatctgggagctccagtgttaggtacatatatatttaggactgtgaaattttcctgttgggcaaatcgttttatcattatataatgtccctttttgtctgttttttgtttgtttgtttgtttgtttgttttgagatagagtcttgctctgtcacccaggctggagtgcaatggcatgatctcggctcactgcaaactctgcctcctgggttcaagtgcttcttctgcctcagcctccggagtggctggtattacaggtgcatgccaccataccagctaatttttgtatttttgcagagacagggtttcaccatgttggccaggctggtcttgaactcctgacctcaggtgatcctcctgcctcagcctcccaacgtgctaggattacaggcatgagccactgtgtccagctccttt

SEQ ID NO: 211783 - DNA, 986 bp, Homo sapiens
tgaggctgcaggtgttaatctggggggccctgggccctgagccggcagcagaaatatgaggacccagagccttctcctcctgggggccctcctggctgtggggagtcagctgcctgctgtctttggcaggaagaagggagagaaatcggggggctgcccgccagatgatgggccctgcctcctatcggtgcctgaccagtgcgtggaagacagccagtgtcccttgaccaggaagtgctgctacagagcttgcttccgccagtgtgtccccagggtctctgtgaagctgggcagctgcccagaggaccaactgcgctgcctcagccccatgaaccacctgtgtcacaaggactcagactgctcgggcaaaaagcgatgctgccacagcgcctgcgggcgggattgccgggatcctgccagaggctaattctgatttaggatctgtggctctgcacctaagctggggaccaacggaaagagttcacgatgggaggcctggggccctgcccgctggacagcactatctctaccagcggtggttccagccttctgataatcactggcctgctgacacttccctgcaacccatccacccctggtttctcctcctgggagtcaaagtccatagcctgagctcggaggaaggcctctgtatcaccccagtactctgcaccactgccatacgagcttcccacccttcctaacgctttcacaccaatccgtacatgctgcttcctccaccaaaaatgcccaattcaggcagaccctgacctctccctcaggcagcccaaccatccagaatgaatattcttgcagagttttccaaacatcagtcattcacctctttcatgattttcaccatacctacaaaatagcaccatgataggttgcacgctgcctgtaccaccatttacttaatgttttctttaaatggctcacttttgtatataaataaattcatttcaaaagaaaattgatatcactac

SEQ ID NO: 211784 - DNA, 411 bp, Homo sapiens
tcataaacttctggtgaagattaagttaatatatgtgaagcactttaacagtgctgagagcattgtaagcattatataaacaatctatcatttttatgattaaaatcacttaaaattttgaaaaggaaaatttttcacagcataattttaagtgaaaaatagaaaatgtatattttcagtatgatcagatttctaaatatgtgtatgacacaagcacacatatgtaagtttaaagaaagtaggaggaaggtgtttgccctgtttcccaaagtgggaactatatctgttttaaaaacaactgtcaaaagtaaatgaaataggttatataagttgaggaatctgttttgctttgaaaattgtgtaaaattgccaagtttctaataaaccaataaatataacatcagttcttcc

SEQ ID NO: 211785 - DNA, 277 bp, Homo sapiens
gtgtgcctgcagctttctcaataatgccgttcatctccattaagggtgggaggatgaagacccgccactggcctgggtgtccctgctgaaaaatgtccaattcactcagccccagcatcaccccagggtgttcacacctgctgctggccactccagtactcatctgctcctgctggttttccacacccttttccaaagcccactaaacacgaaactttcaggacattgtagaaaaggaggaggaggtggtgcagagggcacgtgtgtgctctttact

SEQ ID NO: 211786 - DNA, 565 bp, Homo sapiens
tctctaagccagaagtagtgattatccatgatgctgtgagaccatttgttgaggaaggtgtccttcttaaagttgtcacagctgctaaggaacacgggtgtagtgactatgacttggaatttggaactgagtgtttgcaattggccctaaaatactgttgcactaaagccaaacttgtagaaggatcacctgacctctggaaggtgacctacaaacgagatctctatgcggctgaatcgattattaaggagagaatttcccaagagatttgtgtagttatggatacagaagaagataacaaacatgtaggtcatcttcttgaagaagtgctgaaaagtgaattaaatcatgtaaaagtcacatctgaggctctgggtcatgctggcagacatcttcagcaaatcatcttagatcaatgctacaattttgtttgtgtgaatgttacaacctctgattttcaagaaacccagaagttactgagcatgcttgaagagagtagtctttgcattttatatcctgttgttgttgtttcagtaagtgaaattaatgcagatttttctcaaac

SEQ ID NO: 211787 - DNA, 932 bp, Homo sapiens
tctctaagccagaagtagtgattatccatgatgctgtgagaccatttgttgaggaaggtgtccttcttaaagttgtcacagctgctaaggaacacgggtgtagtgactatgacttggaatttggaactgagtgtttgcaattggccctaaaatactgttgcactaaagccaaacttgtagaaggatcacctgacctctggaaggtgacctacaaacgagatctctatgcggctgaatcgattattaaggagagaatttcccaagagatttgtgtagttatggatacagaagaagataacaaacatgtaggtcatcttcttgaagaagtgctgaaaagtgaattaaatcatgtaaaagtcacatctgaggctctgggtcatgctggcagacatcttcagcaaatcatcttagatcaatgctacaattttgtttgtgtgaatgttacaacctctgattttcaagaaacccagaagttactgagcatgcttgaagagagtagtctttgcattttatatcctgttgttgttgtttcagttcattttcttgattttaaattagtacctcccagtcagaaaatggaaaacctaatgcagattagagaatttgcaaaggaagtaaaagaaagaaatattttgttatatgggcttctcatatcttacccacaggatgatcagaagctacaggagagtttaaggcaaggtgctatcattattgcttcattaatcaaggaaagaaattctggactcattggtcagcttctgatagcatgaagaacacaaaaaattacctattttctaaaacatctatttgcgtatcttaattgtgctttgtgcccccgctgctgtgtgtggtagaatgtttcagttgtcttttatatcttctctataatttgtaggatgtgatgcttagattataaagcagattaatgttta

SEQ ID NO: 211788 - DNA, 210 bp, Homo sapiens
agcctgggagggtgaggctgcagtgagccatcatcgtgtcattgcactccagcccaggtaacagagtgagaccctgcatctttaaaggaaaatttaaaaagagataaatgcaggagatcttccatcttatcaaaagggtgctgttataatttatatatttttaagtactggatggggaggtggagtagcagctccaaggtacttttcagt

SEQ ID NO: 211789 - DNA, 259 bp, Homo sapiens
ggcagcacacgccacccgttcctcctgttgtgacaaccaaaaatgtctccggacattgccaggtgcccccagggggtgggggtggggttgggagtgggggccagaattcccccatttgagactcaatgaaatatttcagctgggcgtagtggccgatgcctgtaatcccaacacttcgggaggctgaggtgggagggtcacttgagcccaggaatacaagaccagcctggacagcatggtgtgaaacccatctctttaa

SEQ ID NO: 211790 - DNA, 526 bp, Homo sapiens
aaggttttatttatcccttctcttttagctttctgtctaaggcctcagaatgtagtctattttagaaaatctccaaggcaggaaatttttcataacctttcccctgttagtcattttttttaacttcaacaaaagcctgcatcagaagcttcttgctcgcttatatgaccctaacgctcactgctgcagtccaagcctggcttcctttgcactttcttttgctgttcatattcttcacagtgggacctgtcttagctgaagcccattattaggtcactccttggcctcttctctaaggctaaataatgagttatttttttttctccttttttggtacatcatattttttcaaccatttaatgatttttgttgttgaaaatttggggatttcctgtgtctggaaatgcattaggcctcaaactttgtacccctaagacttttcctgctaccttttaaaagacaccaagtaaaattaagactaggagaagacagctgctgcaatttttaaaaaatcacaaaagcaaaa

SEQ ID NO: 211791 - DNA, 570 bp, Homo sapiens
tctctcagcacagttgtgaccactctgttggattctttggggaggatcacagaaaaacaagacgtgacttttctgctctcacgaggtttgcctctggcctgaatgcctcctccagatataggcaatccaggtgtgtgctggcatgtccactcggatgacctgttgtgtttcacattcgacatactaaacctcattcatctaaaccatggcatgtggagcttggaggaaacttagctttacctcctagggtttgctgatggaatattgttgccggactcatttcttcttgccctgaggatcctttcccgttccactcctgccattatacaatcatcaattcacacagcccctcactgtgatcctcccaacagatcatgattgcactttggattcctatagtactatgtttgtacttcattccttaacttagtgtaaccaatgtttaaattaaatatttaaatgtatttaacccatacttacttccccatcactttgcgaatgtcttgtggaaaaagagtatcttactaatcttgtgtgcctttcatgtttctttgcacatagtgtactata

SEQ ID NO: 211792 - DNA, 303 bp, Homo sapiens
aaatgtttatgggacaaccaggtagatgtttttaacagtggctgaaaatgtgtcatggaactcagaagggacaggaatgggaacagacctttaggcaccacccacagaggtgatggctgaagcctggaatgggacaaggccacccaggaagagaggggtacagagcgccaagtgccacttttctctcagttcaccaacatttaaggaggaaagggatgatctgacgcctggacccacagtcatctatcaacacaacctgaaaaaaacaccaaaggaagcaaaggaagtaagactagagctgca

SEQ ID NO: 211793 - DNA, 578 bp, Homo sapiens
tgacaatcgtgacaacccgaatgtaccgttatctagtttcagtggctatcttcatcatttgattgacatttgttatgcatgtctatataaaattagttcatttttcctgtatgtatcccacatatttcccaaaagttcttgaggaaagtgaccaaatctttatccatccttatgtttcactatgttgtcacgagtattcgaaggctgacattcgacaaaagaatgagacttattttgtatagccttagaaagcagaatctacctctctgaccttatcactaaggtaaacttgccatttcagctaacacttttattgtgctaaaatacacataacgtttatcattttaaccatttttaagtatatagctctgtgacattaagtatatttacatcgttttgcagctgtcaccatcatccatctccagaacttttcattgtcccagactgaaactctgtgcccattaaacactcacttctcattcctctctccttccactcccggcaactaccattctactttcgctctgtgaatttgactactgaagttacctagagtgtaagcagaaaaccaagcaggt

SEQ ID NO: 211794 - DNA, 320 bp, Homo sapiens
ggtaagtgtagtggtgatttgactcatgtctcacccaccactcaacagaagcccaggaggcacagcagcctgtggtctctgctcatgattgaaagagcccctgaaacagggccagaaggcccaaaatagccactcaacaaacatctgtcgaataaatggaagtcatatgcgtcattccaagtctttgctattcttcgaaaagtaatcatactgactccaggctacagtgagctatgatcacgccattgcactccagcctggatgacagagcaagaccttgtttcttaaaaagaaaataattatattgactacctaatatg

SEQ ID NO: 211795 - DNA, 467 bp, Homo sapiens
tacaagtttttgtatagacatatgtttctatttctcttagatatatacttagaagtggaatggctgggtcatatggtaactcttttgaggaactgccagattattatcgaaagtatccctttacattccccccagcgtaagagggttccagtttctccacattcttagcaacacctgttattacctttctttttattattgtcatcctcatgagtgtgaagtgggtattgtggttttgatttgaatttctctgatgactcatggtgttgagcattttttcctttgtttattggccgtttgtacatctttggagaaatgtctattcaaattctttgccccctttttaattgcttttttaaaagttgtaacctaattttcttcactgacaatgtaacttgaatgtttttattcccttaaacagcttcctaaacttagcattaaatggttgcttaatatttcattatatg

SEQ ID NO: 211796 - DNA, 617 bp, Homo sapiens
cagtgagccaaatcacgccactgcactccatcctgggcaatacagcaagactcagtctcaaaaaaaaaaagaaaaaaaattacagtttcacaactcccccacaatacaattacatacctaagtacatccatgatgaaaagacttctcatatttaaatactgtctgtttactttattcttttgcagagtaagctacttggtgaaaggaaagaaattgaactgtcaggtttcactgttataaatctctcttcagtccttacccactccaaataaaataatgtaaggggataccgtagtagcgtcatatgctcaatgtttcaaaggtactgtgcttaccaaccagtgcaacctagcacccaagtcctttctttcagtcatccatccaaagatttcagagccactcagtgctaagcacacagtgcaacagaagtgtctgtatactctatgtctctttcctttccctactatcattccttcacatttaagaaaaaaaaaaaaaacagggtcgggcacggtggctcacacctgtaatcccaacactttgggaggcgggcggatcacaagatcaggagatagagaccatcctggtcaacatggtgaaaccctgtctctactaaa

SEQ ID NO: 211797 - DNA, 145 bp, Homo sapiens
ttgattcttcccaagctttcagacagaactgtaaaacctagaagtctaagttggaagtaacttatggttaggattatccattgtcttgcaatctgatgcctttttgatgtggtatgtctttttcttttatttccttttataggat

SEQ ID NO: 211798 - DNA, 449 bp, Homo sapiens
cctaagtgataaacgaacatcccaacaaccaggccccactcaaacctcctcaatgccctgtagtagggctaaaaacccagagacgcccagggaaaaagtccccagaagtcactgaggtagcctgctggctgcttcccaaatccattctctcattcttccttgctaagagaagccccttggtcaggcaacttaaagactatatttcccagcctcccctgctgctggtgtggccatgtgactcagttctaccctagcagaactctaaatccaggtcaggccactttttaaggagaaatggaggtccaggtgattcttatggcagggaactaagggcagtcaagtcaggaacagcttgaaatctagttccagctttatccaaaattttatgattttaagccagtcacttaacttttcagagtctgtttcttcagttgtccacttcatgggtt

SEQ ID NO: 211799 - DNA, 147 bp, Homo sapiens
gtaaagtgttatttgaaagtggacttggattagctgtaaatgaatattgcaaactctaggaccagcactaaagtaaaacaaaaatacaactaatagctaagaaaagagacaaaatgaaattatttaaaatgctcagttggtggaaga

SEQ ID NO: 211800 - DNA, 246 bp, Homo sapiens
gctcaggggctagtttcttccttgccccttagtaaaacctcaggtaggtgggttcctgtagcttctccagacactcagaaaaattaaaaagtactccagtcatttttagtcataaaacagtctcataatagtcaaaactctgaactttaaggcaaatttttcttctttctctccttccccagcccaagccgattcaggctggaagctgaatatactcagaggttcattcaggagggtgtgctttca

SEQ ID NO: 211801 - DNA, 524 bp, Homo sapiens
cttcccctgaaactaactagtcaatatgtccattccatgttggagtttttcagaagagaaaggggacatgaaatcaagctggatatggtggccctagttcctccagactgaagaactctttgctgaggctggggaagggcctatgtaaggcaagtatttatttggatcccatccaacatgactcaaggagctgcaaaatgtcatcactcctgtctaaagaatcattgaatactattccacagaggcaggtaggacctttcatttaataggctgatactttcatagatcctttgaaatcataggcctttcccttgagccccgtcatctccacttctctgtaaaaagaagcctagcatgggggagatgaggaaagaggtgggcagagacacagtttaggagaaaattcagaagcctgctttctttcagggattatgaacatgggcagcagaatagacaggtagctcctcctaagcaacaggagtgaggtcgttgtttcttccatccaagccaaactccttggaggg

SEQ ID NO: 211802 - DNA, 205 bp, Homo sapiens
ggagagagaccgggtctagagacacagatctgaaagcaatcagtgtgttggtcacgtagaaccattcagactgcccaggaaaagcagaaaacagcagaactgtagagggctaaaggggacaccttggggacatccactttaagaggcaaggaaagggaaaagaagaaatggaggcaggagaaagtggcaatggtcacagagccag

SEQ ID NO: 211803 - DNA, 568 bp, Homo sapiens
agcccaagctaagccatcatatcccttgtgacctgcacgtatacatccagatagcccgaagcaactgaagatcctcaaaagaagtgaaaatagccttaactgatgacattccattgtgatttgtttctgccccaccctaactgatcagtgtactttgtaatctctcccacccttaacaaggttctttgtgattctccccaccctgcagaatgcactttgtgagatccaccccatgcccgcgaaacattgctcctaactgcaccgcctatcccaaaacctgtaagaactaatgataatccaccaccctttgctgactctcttttcggactcagcccgcctgcacccaggtgaaataaacagccatgttgctcacacaaagcctgtttggtggtctcttcacacggacacgtgagacacaaacatcacaaaaatctgtatacaatttgaggggattccgtgggttttcctgaagtccttcagctcacaagctccaacagaagaatctttctttaaaaagaaagatcctgggtgtggtggctctactaaaagtacaaaattagccaggcat

SEQ ID NO: 211804 - DNA, 185 bp, Homo sapiens
acaaagcccgtcctcagccttatttcagcccagatctcggtatttatgccacagatactgttgagctcctctgggtgcgtgctgaccctgaggtcacacagatgagccaggagtggccctggctttcaggaaacgtagtgacgtaaaaggtcccggctgctgcgggataagggccagggcagagg

SEQ ID NO: 211805 - DNA, 422 bp, Homo sapiens
cttataatttctgaatagtattccattgtatgaatgtaccataatttatttatgcactcacccattgaaggatatattagttgcttccaaatttttgcaatgatagataaagctggttaaacactggcatacaagtttttgtgtggacgtaagttttcagttcatttgggtagttaccaaggagtgcaactgttagattgtatggctcagctatgtttagttttgtaagactatgcttagtttttgcaacatttggcaaccctattctcaatgagttgcacctcttttgaagaggtaaagaacaagcatatacttcaatgagaaaagccataaaggacatctgaaagtcatgttcattcattcatacattcattcattcacttgatatttgagcacagtcatgtgctagaccctggaaatac

SEQ ID NO: 211806 - DNA, 413 bp, Homo sapiens
tcttgcagaatatgagctttgatgatttgaatattttcccccagcttttcttctcatcccatatcctacctttattcattcatacctaagtgatatttcataaattctctcaaggaaaatagttcatccatttttgcatttggatagaacatcctgaaaaagaacacctgtaaaatacctttgctattattataatgctaaaaaatacaaagaaggtaaccagagcatcagtgaagagctctcaggaagaattcattgtgagtgcatttgtaacaagtcatgacatagagttaatgccatgacttacagtccattgtaactagcctgttagaatccgtgaaaagacacattaatctatatacataggtatatagcagtaatactttttttttttttgagacggagtctcgctt

SEQ ID NO: 211807 - DNA, 430 bp, Homo sapiens
attgtccttctagcctttttcatctctaaaactgttagccaagggtttactaattgatccataaaacttaagaaatgatattaaatatccccagttaaacatgaagataaaaggctaggtactttaaaatttgtccaaggccgcagagacaggattaaaacttgggagctccttatactgaacattagagtattgccactgaccaaaatcctacagtttcaaatcagatagctgtgtgtagaaaaagagcaatgaatatggggacagaaaatgttgtttctagttcaggctgagtaaaataagtttcttcacctgtgttctgtaccccatcaccttctattttctcaggaaacatatgttatcaataatatctaatatattttttctttgatctcattgtactagaaattctgttcacatttaaacatgg

SEQ ID NO: 211808 - DNA, 383 bp, Homo sapiens
agtctgggaaagttttgataattacttcagcattgctgtgtgatgggagacattgttttaaaaaccgaatgtggtagaggttaaaaggacagccgtcaccatcctgtttcaaccaacgcttgactgagaactctttctggaaatctctcgaacagacttccaaaagttatatgtgaaaaagcactgaaacctcacataacgcaaagatccactgcaatacaggcatttaggaaatcatttacactaccttgctgatcacttttcacacttgatcttagccaaaaggccaagaagcgatgtggataacttttcaacctgtaaaatagccaccaatctgcaaaaaaactaattgaacactaataaatgaccaaaattgatgcaat

SEQ ID NO: 211809 - DNA, 387 bp, Homo sapiens
aatgactaatagaatattttgttttctagaaaggaaactgtagaattaaagaattataggatgtcagataaactagaatagattaattaatttaaattataatagattatttatattataataaattaatttaatttaaaaataaccaaaattcacctcttcaactttacagatgaaggagtcctagagatgtaaaattaaacttgccccaaaaatacaaatttagaagatgcaaagttaaaaacaaaaatgactcctaactcccaattcagcactctttccattataacacaccattttcagctgggcacagtggctcacgcctctaaccccagcactttgggaggccaaggcaggtggatcacctgaagccaggagtttgagacc

SEQ ID NO: 211810 - DNA, 375 bp, Homo sapiens
agttatatggcagcagcatgcaaactcaatctctgccctgtatcaagtagactgaaaatccagtggtgaaagcctcagtatgacacttgtggggaagaggaagatagaatcatactcaagggggaggcaatgcagaaattaaaatcatacactgtgtcttgatttaatttcttgatcacccacacatccttttcagccatttcaaactgcagtggttaccttgacacttttgaaggtgcatttgtcagtcctaacttcccagcatccagacttggcttattgggtgtggcacacacaaatagagaaaagttataagaaaaaaagactgaataaaaatttttaagtgctgtgctctactttgcctagttgagcaaa

SEQ ID NO: 211811 - DNA, 694 bp, Homo sapiens
caactgtccatctacccatccactcaagcctgacatttgcctgggagtagccctcgccacctgcctgcctgacggcccccagaccaaccggccactgccttctgagtgtgccacctcccgcatcctcatcctcctcgcctccccgagacccctactggagtcagcccctcatcacctctttgtggccaccctgcctacagcctctccccttcctgccaagcctcctgcacatgggcctccagggtgacctaaaaaccaagcttcccattatacaccctggggggagcttccatggctccctggcccggaccccaaggccttgctgccggatcaaagccgtcgctgggcacccccagccctctggtgtgccgtgtcctgctagacgcccccctttgcccctgatttcctttaacacctagggaaattctactcctccgtcgatgcccagcatggcttctgtgaagccagatggttctagatcgctggagagctggccgccctctcgtgtgctcaaggtggctggagcacactggccctgcagagcctctccgaatgccgccttttgtttccatcccccccagcgtctgtgtgtggtgtcagaccagggccacgcattcgctgtccaaaaccctccggcacacttgaccagcccgcagagttccagagatcctcaccaaccccatctgagatgaaa

SEQ ID NO: 211812 - DNA, 142 bp, Homo sapiens
tgatgtgagatatgactctgaaaagacttagccttgggaacctgtaaatctgttggattctatcatagaatgcacattagtattaaattatttaggatagatatatggagaatcctctatagttatctgtgtagatttggtg

SEQ ID NO: 211813 - DNA, 458 bp, Homo sapiens
tcattcctgttcatccttacacctttggcacccagcacaagacctggtaaagtatcaataaaaatggctaataaaaaataatagaagaaaaacctggccctggtcatcttattgcctgagaagaggcaaggagaaggtgcttggacattaaaatacataaataaattcatatagaaagactcctgtgccattaggggtctcatgtcatatgtattttaaaactgtttttgtttaatcatattatgtccttctgaagtagatggtttagcttggggtaaacactacagctcctttgtataagggctgaatttgaagggtttatgctttgcagacatgtgactttgcctctattaccttgttttgtgttcatgggaaattttcaatggtgaaaatgtgaactttggatttctactctcatcggggcagaaataaattcatactttggagttgaacttgca

SEQ ID NO: 211814 - DNA, 110 bp, Homo sapiens
ttggattatggaccatggacatggagaagttaaggactgtcattctctttttaaagtgtcaactgtacatattttggcatttatttttaaggtttataaagcaacttttt

SEQ ID NO: 211815 - DNA, 482 bp, Homo sapiens
ctctagaggatacaaggatgattagagatctcgcacctgtacctatcaaatgtgctaggattacaggcatgagccgccgcgcctggccctatggcacatttcagttgttacagctgcctcacaacaccacagagggtgatctccccttcaaaatgacagcagagaacagtcctgagctaatttctctctctctctctcacacacacacacacacacacacacacacacacacacgttgttatattgatacatatctgccttcttttataatcataattttatttgcctaaaaatattattccaggaaggagtccacagacttgcctggattgccagaggggagagggtcatggccaaaaacaagtcacagagcctgcatctgactttttctcagtatggctttgaaattacagtcatccctgagtatctgagggggattggttccaggaccccctgcagataccaaatccttcaatgcctaa

SEQ ID NO: 211816 - DNA, 457 bp, Homo sapiens
tttgacattcaaactaagaaactcatgagagtgaaagggggtgctattaattaagacaggacaacaggcttacttttaagactaccctatgaaaacatattcttattgttaacctatatgcctgtttccatttttctgtttgcctaatgaagggaaaaattgctatccttgctagttgctttagcctgtacattttttttttttgtttgctattgccttatctgaaaagaaaaaatattattgatctctgtttaccaaagtgttctgattcttgttaatagtcctgcttaagggcgagggtggataaaggagcctggattatgcagatagctatgccctgtcttccctcagctgcatgttctccgtttgcccctggagacacactctcctctattctcctctccactctcttctcagtcccgagacattgacctgggatacatcaaaactccttccc

SEQ ID NO: 211817 - DNA, 340 bp, Homo sapiens
agaagcttctgtgtgggtcactcaactgggtcccctccctcctgctggccacattctagccacagtggccagtgttctgcctcaggacctttgcacatgctgttccttttaactggaaagctcttagcctcatcttcacaaggccaccctatgctcgcccttcgcttaaatgtcacgtcctcaaagaggccttttctggatgcttcaatcatatttggcttccccagcaaagtggggttttccttcatagatgggtgttactttgtggctgtccatgaactcatgtgattattcacccactgttggtctcaacaaccagactgcagacaccaccggggca

SEQ ID NO: 211818 - DNA, 372 bp, Homo sapiens
tctcatcatgtccagtttgacaactaccattttaactgagtgacccaacattttgtaataatttgagtgaaattcagagttctaggcccaagtggctcatgcctgtaatcctagcacttggggaggccaaggctgacggatcccttgaacccaggagttctacatcagcctgggcaacatggtgaaaccttgtctctactaaaaatacaaaaaatcagccaattagccaggcgtggtggcatgtgcctgtaatcccagctacttgggaggttgaggtgggaggatcatataagcctggggaggttgaggctgcagtgaaccatgatcacaccactgcactccaccctgagtaacagagcgagaccctgtctc

SEQ ID NO: 211819 - DNA, 283 bp, Homo sapiens
gtcaaggcattccctgggcttcaagcttgttccagtgagaaacaataagatctttatgcagctattcactttgaggtataaataaccagaaccccagataagaaaattatatttacagcctaactttattattttaaaattgttgtttttctccttagcagatcagctgactgtggattgctggaaatccctgcacattttatcatgcctcagtcagcaatatattcttggcttcagaaacattgatgttgaaaaccgaacatctggtcttccctttctaccc

SEQ ID NO: 211820 - DNA, 355 bp, Homo sapiens
tggcttgtaccaccgaagtttacaatgtgccttataagcaaaaaagaaagctggatagcactgtgtttaatatacatccaaattactgtattttggcccggtagtggctcccacctgtaatcctagcacttcgggaggctaaggtgggaggattgcttaagcccaggtgttggagaccaggctgagcaacaaagtgagacctaattacccgggcttggtgggtgtatgcttgtggtcccagctacttgggagactaagacaggaggatcacttgagtttaggaagtcaaggctgcagtgagccatgatcatactactgcactccaacctgggcaacagagtgagaccctgtctca

SEQ ID NO: 211821 - DNA, 458 bp, Homo sapiens
agaattagggaaattaacaggctcctaggagtcagaatgctcagcttctattcccagcactgcttaaaattttcaggggaaagtactttataatccttgcagcatttggtgcctttattagaaaatccttttatgtgagattttgagtttcttattttctctcctcaccaggataatgcacagaaagagctgaggtgggagtccgagagacaggggtctgacatgtataatatactctgctgcacaggattatcatgagggttaaatgaaataataaatgtagattacacttagctcaggacctgccacacacttagctgagggccaggaattcaataaccaatgactatcaatgtcaatcattctagctattttgtagatgcaaagtccaatagaaacagaaagggtgcaaagctaaaacttttaaaatactcagacccagactctaatccattaaa

SEQ ID NO: 211822 - DNA, 833 bp, Homo sapiens
tcacagagatacataaaatctagtaggatagcatagcctagaagagggtgagaaggaagtggcgaatgtcgagttataaaatcaaaccaggagtaagctgctacaaattgcatatcacaaagtcccatttgcttgccaagtggagccttggttttaatttaaccactcctcggattaaaaaatcatttctacatcttttccattcttatttgttttctgtctgtgagtttttattttatgagaaactcgaggggcttgattctgcctgcatcccttagcaggggcaatcctgttgtctgtccctctgctggccacagaaccaccaccctgggatttctattagccacagaaggagaagtgaatctggtcagtttcacaatgtctacaacttgacaggaaacaaattgctcagagggtgcatagctattcctgaaactgagccagacaggaatttctcctgtgagtgtccagaacgagatgactggccaaacccaaactacgtgtaggttttctactacacgcaagatgttgatgcaggtgcagtgagggagtacaaagaagcacaagacatggcctgctctcttggagcttacagtctgatttctggctcaagttctcttcctcttcccccagtgtccttctgaatgttgatacagtgtgccaggcaccctgtgggctaaatactgcagtgcttactttgtgcccaatgctcttccaagccctttggacattatctatttaatcctcactcttcaggataggcactataaatgtgttcactttcccagtgaggaaactgaagccccaagaggttaattaactgcccaaacaaa

SEQ ID NO: 211823 - DNA, 510 bp, Homo sapiens
ttgtaccagagcagcacttggttattcacttacagtatcaagaattgactcccttaatgacagggatcagctattgcaaattgatttgctggataccctttcttgcccaaactactgtttaaaacctggtcaccaactgcaaattgtcagcatcactgcctgctgctaatggcaaaatgctttctgactgaggaaggttctatctttccacaaacaatgcacatctccactttcattttttctacttttaaagaatggtcattagagctaactactcttttgccttgaatttcctgaggccctccagcctctcccaccactgttgattccaggctactcttctctctcctgggtcctatagagcgattgtgctgaagcctttcagttgttcttctctttccaccattcctccaagaaaaggagaggtaaggtgacctagagtctccatttgctagttctgccttctctcctgaattctaggtctctaatttctattttgaggtcaaaccg

SEQ ID NO: 211824 - DNA, 682 bp, Homo sapiens
gtttagttttcgaagtaactgctaagccgtcttccaaagttggctgtatcattttgcattcccaccagcaatgaataagagctcctcttgatccacatcctcaccagcatttggtgttactagtgttttggatttttgccattctaatagatgtgtagtagtatctcactgctgcttcaatttgcaattccttaatgacatatgacatttagcatcttttcatatggttatttgtcaacctctttgatgatttgtctgttcaaatcatttgcccattttttaattgggttgttcattttcttattgttgagttttaagtgttaacagtccttgatcagatgtgtcttttgcaaatatttttcccagttcatggcttgtcttttcatacttttttttttcttttttgagatggagtctctctctgttgcccaggctggagtgcagtggtgcagtcttggctcactgcaacttccaccccgctggttcaagcaattctcctcccttatcctcctgagtagctgggattacaggcgcctgccaccatgcccagctagtttttttatgtttagtagagactgggttttgccatgttagccaggctggtcttgaactcctgacctcaggtgatccacccacctaggcctcccaaactgctgggattacaggcatgagccaccgcttc

SEQ ID NO: 211825 - DNA, 359 bp, Homo sapiens
taaccaagattaaaaactttaaatccattttgctatatattttccattctaaacctcaaggtagatatatgcaaagtggacaaactgcattaaagcttctagattaaatttttctgactacctgagatagtacatcaatgaactgcagtggctctttttgcataaaatgatgagcctcagcctctggcatccttttctccttagttcccctcttgcttgtcctctcaagtttgaaacctatctgcttacagcaaaaatgatttaagacaagtacaaaggcgtaccacattaaaaaacgtcttctttaaagaattccaagactttggcagaggatgcaaaaatctttaacttctcttaca

SEQ ID NO: 211826 - DNA, 693 bp, Homo sapiens
  misc_feature (422)..(422): n is a, c, g, or t
  misc_feature (430)..(430): n is a, c, g, or t
gagttggtcatagagatgcagcacaagaagcggagacagaagagatccagggtcagaagaatttaatatgccattcctagttttgggtgtgcagagactacctacaatgactcaaaagaggcctctaaataccaagggagatgcccagatggcagccagcaaaggaaacagacctcagttctatagacattgatttctgccgactacctggattaacctggaaatggactctcccctagagcctccggaagggaaagcagctcagcgaatgccttgatttcagtcttgtgagacttgaaacagagaaaccagctgcgcctactggacttctgacctacagaactgtgagataataaatgggtgttgttttaagcccctaaaaaaaaaaaaaaaaaaaataaaaaataaaataaaaaatttanacatatantaaaaattataaaaattaaataaaaaaaactatgtggcccgcttgggccaattgaattttaaattggagcaagtttattcatgcgggcccaaatttgggctaaattggccaaatttgccccttaggggaggccgtttcacattaactgggccgggtttaacaaggtgggaactggaaaaacccttggggtccccaatttaattggcttggaagaaatccccttttcccatttgggtttccaggcccggcccgattcgcttttc

SEQ ID NO: 211827 - DNA, 367 bp, Homo sapiens
ttgacccagtgactgggcattagaaataccgatttctgcccagctcctctgcacgcccatcctgcaagtgagggatgagcccctagtgcagcgttagagtcagaatgtgatccaaaatctccgttccaggctcacagtctttaagcccgtcactagctgggcacctaccgtatctgttctgatcacctcctattcactgtgttggtgagagagggaacttccccctgccctaaacagcattaggcgattgaacacacagcgccgggcactggacagatgaactgacagcagcttattagttacataaactgaccccctggggaggagggcaccccgtgccacacagggcgtcacgggggcagcactt

SEQ ID NO: 211828 - DNA, 430 bp, Homo sapiens
aggctccgtgagtcattgtttctgtggaagttcttcaactctgctgttatgtcaggaaagcagcttgggcactacgtaaacaagtgagtactgccatgctcctggaatagtttatctgcaaaaacaggaggcagaaaaagtagaaataggccaggcatggtggcttacatgtgtaatcccagcactttacgagtccaaagcgggtggatcgcttgaggtcaggagttagaaaccatcctggccaacatggcaaaaccctttctctactaaaaatacaaaaaaattagctgggcatggtgtcaggcacctgtaatcccagcttctctggaggctgaggcaggagaattgcttgaacccgggaggcggaggttgcagtgagccgagatcacaccactgcattccagcctgggtgacagagcaagactgtctc

SEQ ID NO: 211829 - DNA, 347 bp, Homo sapiens
cagttcatggacatagtgacatttaagtaaggcttttgagagagtagtgttcaaatgggtaaggaaggccgggcgtggtggctcacacctgtaatcccagcacttgggagaccaagacgggtggatcgcttgaggtcaggagtttgagaccagcctggccaacatggcgaaactccatctctactaaaaatataaaaattagccaggcatggtggcaggcacctataatcccagctactcaggaggctgaggcagaagaattgcttgaacctgggaggcggaggttgcagtgagccaagatcgcaccactgcactccagcctgggtgatagagtgagactctatcca

SEQ ID NO: 211830 - DNA, 352 bp, Homo sapiens
ccgtggtcgcccaggctggggtgcaatggcgcaatctcggctcactgcaacctctgcctcccgggttcaagtcattctcctgcctcagcctcccgagtagctggaattacaggtgcatgccaccatgcctggctagttttttgtatctttagtagagacaaggtttcaccatgttggccaggccggtctcaaactcctgaccttgtgatctgcctgcctcggcctcccaaagtgctgggattacaggtgtgagccaccatgcccagccaagtgattatattctcgtagtctatagctgggtgcctctcatactcccatctagtcactaaccatgcccctacgggtaagcacc

SEQ ID NO: 211831 - DNA, 616 bp, Homo sapiens
aataaggtaattagatcttatgccagaaagacaactgacaactggggccaatgtgaagaacggagcaagaaagggaactctgttaggaggcaatggccagtaacgtgggtgcagcaatgaggcctcaacgaaggtagcagcagcaactagagacaagagggcaaatcttagagggaatgggggggtaagagcaagaagagaaataaaaaattaggtatgcagctcttggtggggaggtaagggacagtgtgagagaggaaaaggtcagaagtcaaggagaacatgaggcccacatctgagcctccacttttctaacttgtaattttacctataccacacagaagtcttagaattaaacaatacttgtacaagccctcagctcactgatggaacagagtaaatggttaataaatgttagctattatttttaggcttcttgcttgaggaaatcgcttttaagaacgtagttttttcgctgggcgcagtggcccacgcctgtaatcccagcactttgggaggccgaggcgggcgaatcacaaggtcaagagatccagaccatcctggccaacatggtgcaaccccaagggggatcgtctagatcacctgcataacaagt

SEQ ID NO: 211832 - DNA, 586 bp, Homo sapiens
atctatactacatttgcaaattaccagtaatctcctgtttcaacaaataatcccatttctgaaagatagtgatggagaaattactccattaccttttggatggacgtgtagtaactctgatatcattctccactcagaaagggctcaggcagagttgacaaaactgcctgaggcagctcaacatgtatacacacacacaggtctcctggtagcctgtgcttgctccaagaccaactacctatttttcaccatgttcctgcctcctgtggctaatggaagctcaaaggcttttttttttttttttttttaagtcaatggaggagctctgctcagaaaagatttgagggaaatgaagcaagggactacagagaaacagaccccaacctgccaaggagaggggctatttttaactcaggaaaggaggcattactcttgagggaaaaaatcctttgagcctttattactgcctcttagaaggacatccttttatgttgagtgtattgatatgaattcagtgcccatgtctagaacttttattttcagagagcaaaggccattttagtgtttctgtttctgcaccattagt

SEQ ID NO: 211833 - DNA, 195 bp, Homo sapiens
catctctgggcagaggagatggtgagcacaaagccctaatgtgggaacaaacaaaaaaaggacagtgtgcccgtggcagaggaccctagtggagcggaggcagggccacagcaggttagaccatgttggagctaggatgttgaaagtgaaaacctgacgagatgaggtggcgcacgtctgtgatcccagcacttt

SEQ ID NO: 211834 - DNA, 665 bp, Homo sapiens
ttgaccctggagatatccaggtcagcttcaactcaatggccagggttattatgggtgatagaattgtcctagacttccactttgcaggccagagcagtgtgggcaattgctaatacaacttgctctacccatattaatgtctcaagccaagtgaaaaggtcagcaggatcttaagaggaaaatcacctggctttcaaaggtaaatcctagcagtttatgggatttgtttagctggttgggtctaggaccttagggggcatggttgagtttactgttacgttattggtgtcatcctattgtttggagtcttcattatctttcttatcaaagtgttacttttaagatatctgataagaatctgattcagattctttgttcctttatatgtaacagatatttctgtaagcttttagaattacttgtttacatttcatgtaattaaaaatttttatttgattgaattcagtctttctataatatgactaggaatggggtttttcttttttatcttgtgcttttaaaaatttgtgcattttcaatctgaattccttttattttttgaaactgggcctccctccgtttcccagaaggagtgtagcgggccgagatcgagccactgcactccagcctgcgtgacagagcaagactctatctcaaaaaaaaaa

SEQ ID NO: 211835 - DNA, 478 bp, Homo sapiens
ttaaaaaatatcctgccagtccatgtttatttttctttcctttcttatcccctttgggttgatttttttttttcctaattccatctttttctctactggtttggaagttaagacccttccttatcctgttagtagtttccctaaaaattttaaaatgtataattaatgtcttaaaaaccacagtttatcttgtgtctttaccttcttcccaaacaataaaagggccgtagaatgcttttccgagcaccctttacctgctcaccaaagttatatactatgttgttatgtatttttaattttacctttattattcaacataagacattatcattgttttattccttcaatatttatttagatttattcatatatttaccactttccatgttcctaactctttgtattataggtcttacatctgggctcacctaacttttgccataagtatatcctttagaatttcctttggtgaaggtcc

SEQ ID NO: 211836 - DNA, 345 bp, Homo sapiens
gggccctttataccaggtgccaaacttcattatccaccccaccaccttgcccgggagggagatctgtgaaagcgaaacgtgatttaagctgggatctggcagcaacttcgtggactctgaagggcacgtgggaaaggagttttgattgaaggtgagggatttagtgaggtaaaattatatccaaattagagtttggtaaaggcttccaggttaatgtcctgttaacgcttatcctgatttgtggaggacacttaagctgtctaggcctaaccttgtgtttgatcactcaccttaatttgtagacattctaggagctctttgtcaatgcctcttaccatttttatc

SEQ ID NO: 211837 - DNA, 437 bp, Homo sapiens
ttagttgcttatttttttctggctactttaatctctgtcatgggtgggccctctgttgattatcaagcacctggcacaagaactgggtcttaggagatacttacattttaattgatgaatctctttcccttctatacattttcactttgagatggtaccagacaattgctacttacctatctctccctgactctgactttctctcctgaaaaaaaaaagcaaaaaaaattttttcactcgagttggaatgtttttctgataattgcaagttggactgagggaatgggagtttgaaagggaacaggagaaggaattggaaattttggagtggagcacttagtggaattgctatatagggaacttttgacattcagaagccacatgaattattagaaataatactttgacagaattaggtaattgtctaaacacctgtc

SEQ ID NO: 211838 - DNA, 404 bp, Homo sapiens
taggctcttctttctttttattttccaaatatctgcttttacttatttgtccatccatatttgtgaatgattgactactttggttcattataggcaggtggcatgggttcctctggaatcttttagtcttgttttcttagtagtcttctcatctctaaatgagagggcagctgcggctccatgtagataggtaggagtatagacaaaccttgagcaatgtggcggttaggggcgttgacccattgcacagttggaaatccatatacaacttttgactccccaaagccttactactaatagcctactgttgaccagaagctttaccaagaacatcaacagtcagttaacacatgtgttgtgttgtatgtactatgtactgtattcttacaaaaaagtaaactaga

SEQ ID NO: 211839 - DNA, 403 bp, Homo sapiens
ggtgcccagaaggtcaaggcagcagtgagccaagatcatgccactgcactcccatctgggtaacaaagtgggaccctgtctctaaaaaaaattaaaaaaaaaaaaaggaaaagaaaagaaatctgatgacataactgcacagcactggaaaatgtaataagcctcctgagacctctgccacccagccttataggaggcagtgagcctcctcacatacccagtacacggctactacaaccagcatttgggaaagccaccatacaaagactacccattaccaagaaacgcttatacagactcgttgccactgaaagcacccagaaccaaatccaaaggaccttacacaacataaactatagacatctcctcagatgaggaaaaaagtcacatccaaataaaagca

SEQ ID NO: 211840 - DNA, 473 bp, Homo sapiens
tctttctgtcctgtcacccttataatatggtctttttttaaaaggaaacttgtaacttttactaactatgccagcatttaatgcacagaattatttttataccatttcatcagccacaacattagagagaaaaatccaactgaaaagagaaatgcacacaaaattaggaatactaggaaagcattatgctttaatacagaggaaagggaacagaactaccatttatggccattactctgaaaggctatgattccttctgccaaaagagagttctcttccattcagtattgattaggcttttactacagtcagaaagaagcactttcccaccaacgagttgtataggttggtcccaggaattcctctgaagctggaaaagcctaagagatgtattcttccctcatgaagtgagccatagctactttccagctcctcagtcctcagcagagcatctaccatgcaggaaaaaaaaa

SEQ ID NO: 211841 - DNA, 691 bp, Homo sapiens
agagaatccagataaacctaaaggagaaaatcaaaattgttaggaacccacctgtcatagagaaccactgttaaccgtttggtatccagccttccagatggctttatatgcatgtatatttcccaaaatatgtgtgtattttttaatggatatttaactaggccacggtgggagttcacctgaacatactgtggtttacaaagagttcccatggatgttggctccttcttgtgatgccaagaaaacggtgtgggattgttgacccactttacagagggggaaacaggggccccagagtgggtagggacttttttgtgtcacccagcttgttgatggtacaactgtaagtgggaggtgggacatggggccagctgaggactcctgggggagccacaagcctgtgagaggcatgtctgggggcacagttcccttccaccaggtctctagaacccttgagtgccccgagggagtggtatccccctgactcatagcacaatcccccaccctccctgacaacctctgcccccacccaggccagccaccctggctaaaaatagcccagggccaagacctcctccgtccctgctgctccagcccttggaaatggactgggtgggaggaaaagtcaacacagcctgggccccaaaatagactgtcacccagactccgcggtttggggcctcagcatcca

SEQ ID NO: 211842 - DNA, 516 bp, Homo sapiens
ataccattcaggcataggcatgggcaaagacttcatgacgaaaatgccaaaagcaattgcaacaaaagtgaaaattgacaaatgggatctgattaaactgaagagcttctgcacagcaaaagaaactgcatggctcccttcatccctccttcaagcctctgctcaatgtcactttattaaaggcacctttggcaaaccaccctgtacataatatcaattctcctgtctaccctggcattctaatttctcttatcttgattaatttttatttagcatttattaccataagcattataacgaatacaggcagcccttgcttttcacagcagtgcaagattgcaagaatgactgtgcagccggaaacccaggaaagcaatctccacatccaatcagaaaaacaatgatcatattgtgacctttacaattttttgtcaaaatataggaaactctcatagtgtcagttacaaatgtagaaggcaataaaaaataataaatgaatatttattagtaccctgt

SEQ ID NO: 211843 - DNA, 290 bp, Homo sapiens
tgtattggtggtgctctcttctaggaaccatttaggggagggactgccaatacatgaccccattttacagatgaggaaatgggctcagagaggttaagaaactagtccaggccgggcgcggtggctcacgcctgtaatcccagcactttgattaaaatcattcccttgacagtgctggtgagtacctactgggtgccagatgttggggagaccccacctcttgaagccagcaagacccatcacagcttacccttaaatagctctcactgtgtgagagcaccaccaataca

SEQ ID NO: 211844 - DNA, 748 bp, Homo sapiens
tggaggttgcagtgagctgagatcgcgccattgcacactctagcctgggcaacaagagcaaaactccgtctcaaaaaataaaaaagaaccctagacccaacttgctctaggaggcagaagtgaaatggcctcgaagcctacagataaatcctgcctttaccatttaccagctgggtgaccttgggcagtttgcttgacctctctgagcctttatttccttgtggacaagttgggcatgacagtggcgtctactggcatgaacaaggttgctgagagggctgccatgaggggcgtggcccagcagttcccaccatgctgagcacgtggcaggagttaagggaatggaaggcaatccagaagaacccatgacccctgagaaaggcttgcggaagaaggtgggcagggagaggtttgggaggggacctggtgggatttggggagtcctcagaactgacacagggaggccttactcaagatccagccacctgccaggcgcagtggctcacgcctgtaatcccagcactttaggaggccgaggcgagtggattgcctgaggtcaggagttcaagaccagcctggcccacatggtgaaacctgtctgtgttaaaaatacaaaaatcagccaggtgtggtgatggacacctgtaatcccagctactcgggagcctgaggtaggagaatcgcttgaacccaggaggcgaaggttgcagtgagccgagattgtgccattgcactccagcctgggtga

SEQ ID NO: 211845 - DNA, 511 bp, Homo sapiens
cctattcaaccaagaatactgtatgcagcaaagtttctcaccaaatatggaggtgatataaaggcttttccagacaaacaaaagctgagactttttatcaacaacagctctgtcctacaagaaatgctgaaggtttaaactcacaggtaaaagtaagtaaacagacaaattcagaatgctcaaatattgtatttgtgatgtataaaccactggtatccttagtatgaagactaaaagacaaacctatcaaaaataataataacaagttgttaatagagagacaacataaaatatatgaagagggaaaacaaaaaaggtaaaaatgtaggggacatgaagttaaagtgtagaggtttttttttttttttaattttctctttgcctgcttgttgttctttaattttctttgtaatcagagttaagctgtcgtcagtttaaaataattgcttagaagatttttttgcaagtctcatggaagccatgaagcaaaattctgtaggagatacacaaa

SEQ ID NO: 211846 - DNA, 526 bp, Homo sapiens
ccatgaggcagatcattcatatgggtgcaaaatactgataatgaatgcttggcaagagttctttctgcatggccacttaggggacacacaagagccgatttccaaggctggcactaacaatcgaacagtaataatgagtaaaagcagccatgctgtattgggtacctgtttataggtcaggcattaagctggtgcttacatacattatctggttcaatcaatccttacaactgaggccaattttatcatcccaatttattggagaagaaaagctgagctccaagactttgcccacagtcacacagcaagttaagaagcagcactaaaatctggaccctaggcaatccaacaactacacttctcctttccccagaggtggacaggagtgagacaggacttcagaatgtctggagaccctcctcagttctgggtgccctctcttctgcctgtggataaggcaggtgggaacgaatgctggggatgggaaatctgtgtgtcagaaataaacgtgtaaacattttctcta

SEQ ID NO: 211847 - DNA, 437 bp, Homo sapiens
tgacctgacatgtgcagtattcttcattcattggcgcaggttggatagttacagtagattacattttctacctattaattccatcactctatctcattttgcaataaacaacacttacatcaacatcattatgtactggctttctaatttcagatcaacttataagcgtgcttgtcttatcaaaattacagatctgtatgtaaagttgtaaacctcaatcatgtcaaagtaatgacatggctgaaagagaactttaattccccacattacacactaaaattcaagagaaagtatctataaactggttctaaggaaagtaattaaggaaataaacccctaaaagtaaaggttaactagccaaatttggcaagagtgagaggtagtatcagagcactaattccataattcttttttctttttcttttctttttttttga

SEQ ID NO: 211848 - DNA, 1354 bp, Homo sapiens
aagcggcgctcgcaggcgctgaaagcgagcgaccatctgagcccgggtggtccggcgggcaagggcggcgcgggagacccgcagggcgcgggcgcggatccggggaaccagggccaccgctgcgggcggatgggggtcaccgaggcggctcgtctccaggcgcacacttcgcacatctctttgctaagtgaaggggccaaaatgcacagatgggggagtctacccaggaacagaggcgcgagacgtatagccacccctgggttgggagcacgagccagcagatccccggagcgcgttaaacggacaacatgcccggtgctgcaaatagaggcttttgctggcagggacattggaaagaagggcggagagggagtacagcgaaaggtggggaccgcagaatttggaatctctgcggagaccggaaagaaaattaatcggagcacttcctacatgcagagccacggaaactgccttggaaagagaaagtggcagcgtctgggtcccctcggtcagcccgggccagtcggctgcgcgtgcgaagtctcctctagcggagcgggaccggccgcggcggtggatcgtggcggtccctgcacttctgctccagccgccgcgcctggaaacctgagcccggactcgcggctgctgcaaaacccgcttccagcccacctcactgcgaactttgcttccgaggggctggaaggagtcccaggcagctgtttcccaagctgtggaacacttcctttcccctaggcactttctgctgattccaactttctttcctgtgattttcgtcttttcccgtgcatttcatttctccgactccagctctgtactaaatcctcacaagtttctcgttttcatacgggaactggatggaatgactccccaaaaaatacagctttatttctcaaatactgacccccaaagcactatctagtaatatatttgattgatctttcaaagtcagtaaaccacaaaggtttgtgtaatggcttgtacttaacgcctgatacctgagtaaagtttgaagcattaacataggaacagttcacttggaacaaaaatttattttctgaatgacctataaaggttgtcagagaaggtcttagtacatgattgaataacttggtctaacttacaggaagaataaagggcatttattttaaacctgtgtgttccccattctataatgggctgcctaggcattaaaggctcttgacatacttaagctcttgactgagggcgtgttggagattaccccttgtttttgagtacaatagttttgtttgctttttttcttttttaagtaacatttgtttttagacgtttaaatgaaaagtaaaaaaaaaaa

SEQ ID NO: 211849 - DNA, 390 bp, Homo sapiens
agtgtgtttcagcctgcgaacttcctggatatctttacggggaatcattcccggggaaggaagggcaggctggaaataatataaggagatcaagaaggaagtcgagcaagtgacacctttaaacaggccaagcgagccgggctcttccccctgggacagttagagttatgcagagctgtaattaacccagcagcccactgggatatgtctatttctccgcacaaatgctgttgaaagaaggattcttgaagaaagaggttccaattcaaatggtatttgagtaagtcccttgtcggatatactgtttctagagtttatggctataatcaacaaaacatggccattctttcatgcaggtttctcatgactttctgaataccaatctttaga

SEQ ID NO: 211850 - DNA, 849 bp, Homo sapiens
ttggaactgactagaatatggaaaatgtttggcaatgctgttctatataaggtttctttcaagtaaaactattaagaaggaacttgaagtagtacaatgtaacgataattatgaacatcctttctgaagctataatattgtcactagacatctctgccatcttctaataacattgccctttcttccactgttcaaacacctaactgatgaaccccagctgtctgctctcagaagtggatgcaacaccatgagttaagcaacacctcgaacccagcagttttggaattcacttggatgcactggaagagtcgtatttccaagtttacagggtcacgattaactagtcttattaccttttggggatggacagctaaggtatttgagatgaagaaagataaagagtgtttggtagtgataggatttggagatgcaaacttcgacatctaaaatacagaaaattaacaaatactatcttttgaagtccttgaattgggaaattaggatgtcacagtaaagtgacattaagtgcagaagtgctctggttttctggtccgcagcagagttcacttgggtttcttcgtgaaagtacatgaggctgattgccccgaagtcacttcctgcagcatgtccttcaccccgggcttaccctgttgagtcggggaacccagcaggcggctctgcccctaccattacctactatgtctgcctctcacagtgccccagtttttgtctaaaaatgaagcagaaacaaagctggctgcgtggctgtttgaggacttaggagctgttgtccagcaccccataccatttccctggggagggctcagcactagctgaaatccactttat

SEQ ID NO: 211851 - DNA, 395 bp, Homo sapiens
aaaataaaatttttaattatgttggacatttcaggcccagcgctgtcatcctgaagaaaagtaacatctgttttgacatctccagtggtagagactttaaatcagtttccacattgcttatctgctggctaatcagaatggatgcagtattcttaccaactcattgacagggaaaaaagaaaagatatgcagagaaatagggtaaactaaaactgatatgatgaatttaaatgaaaaatgtaatggcctttgcatatattatatctaaactttcattcaatgtaaaatttgataatttcatttaattcctaactgtacagagatttatttttctttcctcttcctgatgtatacctttgcttccacttaaatataataaaacattaaagcatatt

SEQ ID NO: 211852 - DNA, 459 bp, Homo sapiens
cacagcagaaaccaggctgccaagtacactggcttccctcagaaaggaagtactctttctctaggacggtgggcactgacactcagtttctttataacataacaccaaacagtgtctacagagtctagcctgagaaatctgaaactggatgataaaactaaacctattacctccatcattcccaaagaaaatcctgcttcttttcctgctctacttgtgtcaatttgtgagtcacagtctagctaagcacttaagctagaaacttggagtcatacacatttctaactttcagaggcagggttaccattgaacaatgaaacaaatacctacagctttctatgggcaaggcctcatgttagattataatgacttcaagaacacaaaaccctggatctccgggactttcaaaaacaaaacaatataacggtacatgtaatttcaactgtttttagaggtaac

SEQ ID NO: 211853 - DNA, 166 bp, Homo sapiens
taccttctcagatattcactggacaaatgcgtgtactgagtgttggggagagaaggtagctatcaatgtgtcatggctgctcatgttcccaagggacctttaaaaagtctaatgcactctttggggatcagttgtaaacagattaattaaataaacattccttgtc

SEQ ID NO: 211854 - DNA, 367 bp, Homo sapiens
cctgcctggtcctggtgggggtcacgtgaggaaaaggtgactcagactctgacacctgctgagggagcagccaggcaggaggagtaccggtgtgccgagcgcccagggtcagccatacctgcctcacctgtggtctccccagcaggccccacctgtggcccaggccttctgcctgccacccagagcagcaggattcctctcacaatccttggctcagccgcagccccacgtggctctccacatgcatcctgcctacccctcggcagctgccaggcccagtcccccatccctgagggtggcccttgcttcctgctgcacgccctctacccccgggcgctgccagggcctgtcctcagcctccaatcca

SEQ ID NO: 211855 - DNA, 171 bp, Homo sapiens
caaaagaagggtaagtgcttgctgttcccatccctgaaacattgcatgtatttaagaaaaacaaaatgttagtggcatatttgcttctaatgttcccctaaccctacatgcatgttttatgtgcactcatatgagtatctttaaatataatccctttacatctgtgttcta

SEQ ID NO: 211856 - DNA, 329 bp, Homo sapiens
agcctgggccattggggcagcaattctgtcaaggctggggtatcactagcacagattaaacccaaaggcacaaagaaggatattaaacttcctgaagtggcttgtccatgcctagtagatgaactcaaaatgattctttagtctttcataagactgttaaatattttaatgaaatcagtaatttagaaatgtttactaatactttatattaatgttttttcctttattcccattatgactttccccaaggttaaatatgtctttgattcttcaatcacttatcatagaatctagctcaaattaaagactctaaagtgtttgggatcaga

SEQ ID NO: 211857 - DNA, 324 bp, Homo sapiens
gcacaacataaatgtactgcctaccactgcaataaacctttgaaaatggttaagatgaggccgggcacggtggctcatgcctgtaatcccagcactttgggaggccgaggtgggcagaaattgaggacactggggtgttaagtaatatatccaaggttatatgggtagtaagtggtagagctgttattgatttaggtcctctggggcttttcattttaaatacctcagaataaaatgaaaatattgcctaaactgaggcagcccacacaacatcatggcatctaggcacatacccagacagtgtgtgagtgatgggggggtgcc

SEQ ID NO: 211858 - DNA, 1596 bp, Homo sapiens
tgacaggttaggaagttttcatttcagtttcaaattcaaattcatactgtaaagtggtgatgaacacatcccatccgcaggtacttaacctccatacaaataagaactacctctcatatgggcaaaaagatcaaaattctacagaagaatctgatggctaaatggctaatttgcaaaacacaatgccctgtacattttgaggacatcctaaaacatgtgtaaacttttcagaattcagtttaccaaagttatcaaacttaaaaatgattaaaatttatttgctactgcaaagaattcaaccaatttctccaatgactactccatattcattttgaaaaacagtaccggatttaaagcttacacaacaaaattcacaaaagtgttatatgtgcctatatgacatataggcacaaataactgcagacattctgaagctaacactgctcaaccaggaaaaaaaaaggctgcaattggatatgtaataacagctatttaagacggcagtaacgtgttaaaatggttcataaaaatcacatcataaggccctgaaattctagtaaaaatatctctaagtaaacttgtgaactactactaaataactaattttctctctctctgtagtcactcattttatctttggattactttcccattctatcaccacgttgctttctctgaacttcattttacatttgcatattatttattccattagcaattgctcatcccagtctgaatctcaaaattctactataggaggcatttggcattctgtggaataagagaattttgagatggaaatgatcaaccagctcaaaacctcgtaagctagagttcagttaagcttagcacaatgatgaaaacaatttctcattaaaacttctttcattccctctacagaagcagtaaccctgggtacagttaaaactgcctgggtctttaagctttgtcacctcggacaagtcattatacctaacctcccagggcctcagcttccagagtagttaaatggaaaaacaatagcatctatctcaggttattagattatgaaatgagttaacacacgcaaacaggctgaaagagtccctggtgcgcagtgcaggtattagtcatttagaggtatagttactattacaggaaggtagtaacttagaaagacttacctttaaggtccaacaacctaatctacatatttgtatatttctaaggtaagagaatttttaaaagtctattttcaccccgtaaacctaatgcaggaggataaggcacgggttactacaggaaaaagtaatgcagactgggggatgcgaaccaaagcacagacgaatgtgccccgacgattcctccgagaacataatgaaatggcggaccttcctgccagaggagcgcacagtcacccaggcaggtgatgtgacacacacgttagggtctaaaggtcccaaggctggagtcccctttactggaccctaaacatgtctgcctcctgccccgcaatcagacttagagaactgtggacggtggaaagtcttatcatgaccaggccatccttcgctggggtgaacggaaagcattcagaaggggaaaattgaaaacaac

SEQ ID NO: 211859 - DNA, 589 bp, Homo sapiens
cagtaataatagtacagttgatcctcattcttctctggttctacattgagaatgtgcctacttgctgaattttatttgtaactcccaagtcaatacttgaaatgttttcatggccatttgtgggcatgcacagagcagtgaaaaatttgcacattcccagttaaggttcaacaaggcgtcacgctgctgctgcttgtttcagctctcctattgaatgagtgtccttctcagtctacttagtgcaacgtttttcacactttgtgcttttgctggggatttggcttttggaaatggcctctgagcctcctgctgaagagctgtgtagttcctaagcacaagaaggctaccttagggagaaagcgtgtgttagacacttgattcaggtgtgtgctatagtgccatcagcttagcattgatgaatcagcaacacatatactaaataaaatgtctttaaacagaatcatacataaaaccagattatatgctgttggttgatgaaaatgttgtgaccagaggctcacaggaacctaatactgtttgctagttcaatgttcactgtgattttatagaacataaccatcgcgaataa

SEQ ID NO: 211860 - DNA, 202 bp, Homo sapiens
cgtttatgatgtgagagaacacagatacaagttttcatacaaacaaaccaaaacatggacaaagggaacataatgtggagtcctaacagggatcctctgggtgaaattcaccatgaaaaattatttgggtgccatcacattttttccaaattgtgaagggtaacgtctttagatggcacttcctgtctctcacatcaaaacg

SEQ ID NO: 211861 - DNA, 433 bp, Homo sapiens
aaatgagtaaaccaagactgttttgcagggccatgttctctattggggagcagacatttctcacaaatttaagtaagttctgctactgaaaccaaatgttctattaaaaagaaaattagtagggcacagtagcatatgcctgtagtcccagctacttgggaagctgaggcaggagaatcacttgaggccaggtgttcaaggctacagtgcactatgatctcacctgtgaataaaccagccactgcactccagcctgagcaacatagcaggaccctgtctttaaaataaataaataaaaatttaaaaataagggcagggcaaggtggcttacacctgtaatcccagcactttgggaggccgaggcaggcggatcacctgaagtcaggagttcgagaccagcctagccaacatggtgaggccctgtctctactta

SEQ ID NO: 211862 - DNA, 493 bp, Homo sapiens
gggttcaagcgattctcctgcctcagcctcctgagtatctgggattacaggcgcgcgacaccacgcccagctaatttttgtatttttagtagagacgcagtttcaccacgttggtcaggctggtctcgaactcctgacctcatgatctgccaccccggcctcccaaagagctgggattacgggagtgagctaccgctcctggccgcttctatatgaaaaaacacacatcttcttgccatcatctttaaataagttaaaaaaaaaaaaccttcttacatggcaaatgttcagggttgtactaaaataatgaccttatttggacactttctaaagtttgaattggtttaattctgcaaactgcatttgtaaaggtaagaattaactgtcaagatagagccagtctgctgctaagataaattcccttaataaacatttccattttattttaagcagggagctttatctttaaatactgtaaaaaattacatctcag

SEQ ID NO: 211863 - DNA, 392 bp, Homo sapiens
gctgcatgagaagggctggccgctccttaaagcaaagcctgactcctgttagcagaaggggcaatgaatgctgagcaggcgaaaactagatgttcactgcctcattccagccagatgtcgtcagtgacctgtgctcccgagcttcatttttgttttttaaaagactctttagtttatctttatttatttattttagagatggggtcccactctctcacccaggctggagcacagtgctgcgatcatagctcactgcagccttgaactcctgggtgctagtggtcctcctgactacaggcacgtgccaccaggcccgctaatttgttttgttttgtttcgttttttgcaacagagtgagaatctgtctcaaaaaaaatttttttttaaatagt

SEQ ID NO: 211864 - DNA, 622 bp, Homo sapiens
ctggacatggtccaacaatgatacatttttatatgtggtgagttagataataaattttagaggacagtgcagtatagtggtgaaatgtatgaactgtgaagccagaagctatatgattatatgattgtctctgggcaagttatttcacctctcagtgccttggtttcctcatctgtaaagtaagcatgattatcatacttacagagttgttatcagtgagttaatatatgtacaatgcttacaatagtgactaatacataataattattatgtgtttgctacaataataataacattaatattatcatttttaacttaaagctctaagccatgatagtgtatctgaaacatggaaggatggaaagtattcagtaacatttagtaagtaaattaataatcaagttaggtccctattgtacagtctcataatacccagaaactttccctttgtaacctttttctaacttgttcaatgtctctctgactaaactgtaggatccatttgtgcaaggaccacatccaccgtgttcactactataaccctagcatcaagtaccatgccaagcacttagcaggcacatgtatatttgttagacataaaggttatagaggttatatatac

SEQ ID NO: 211865 - DNA, 294 bp, Homo sapiens
  misc_feature (91)..(91): n is a, c, g, or t
  misc_feature (128)..(128): n is a, c, g, or t
  misc_feature (263)..(263): n is a, c, g, or t
cattagcagactcaagaaaaaaaaccacattatcatatcagtagatgtagaaaaaaaaatttaacaaaatccagcacccattcacaatganaaatcccagtaaattagaaatagaaggtaacttcctncaaattgataaggaatatctctaaaaacctacaactaaaatcatacttaatggtagaaaactagaagccttcccagtaagagtaagaacaagtcaaagatgtatgctctcaccaatgcttttcaacatcatattnggaagtcctagctagtgcaataagcaaaaaa

SEQ ID NO: 211866 - DNA, 415 bp, Homo sapiens
gtgtcactccagattttttggcatcaattgatctttttttttctttttctttctctcttctttctgcctttgccctttgcctttgccttgcaacaagttctcactatgttgtccaggctggtctcaaactcctgggctcaagcaatctgcccacctctgcctcccaaagtgctaggagtacaggcatgagccaccatgccaggcccaattggtctgcattgaagttgcagaggggagcttctgattgaccaggccttggtcacatgctcaggcctcacagaggaaggtgggtggttgtcaggggcgtctcactttttggtttctgtagtggcgggtgggcactgccttccacaagatgaatatggtgggaattcatcaaacgaaaggtatctcaaaaaatgttaggtagctaaaa

SEQ ID NO: 211867 - DNA, 326 bp, Homo sapiens
ataacaggttcccggtttccaaattcatgcacaactggtccaggaaccaatgacaactcgtgaattgtcaggatgtatttcacagtgaaaacccctccctaagatctctgtcccgtctatccatcatggccccatcaccagggtccaggccacctggcccctcacctggatctcccacaacagcgtagggcctggcacctggtagggggtccacagatatttgttgaatgaatgaatgagccccatctgctggtctccctgcctctaatactgactccctttctacctggccattactgtagccagcaacctaaactcaaacctga

SEQ ID NO: 211868 - DNA, 328 bp, Homo sapiens
cgataacagtagttggggtcatgccccctcattccttcagtaaattttaacggagcaccttttatgttccaggcactgcattcagttctggccattcaaattgcctaagacatggtctctaaccccggggactgaacttcccagagagcatttaaattttgtttcctgctgctctctaccccatctggttttcgggtcaggaatggtctggtctctctctctctctctttctttctctctctctctctctcaaattaaataccaactatgtactggacactaaagattacaaaatgaataaaactccgtccatgctcttgaagagctt

SEQ ID NO: 211869 - DNA, 212 bp, Homo sapiens
cttgggaggctgaggcagagaattgcttgaacccgggaggctgaggcaggcagtgagctgagatcgcaccactgcactccagcctgggcgacagagcgagactctgtctcaaaacaaacaaaaaaacccccaaaactttacatagtagacaggccgccaactgatagtgctatgcagtttagtttagcacttggactgacttaatttttagg

SEQ ID NO: 211870 - DNA, 510 bp, Homo sapiens
ggaaggaatgcagagtgaatacttaataagtacagagtttccatttaggagatgaagaaattctggaaccagatagctgcataacactgtgaacatccttaaaacaactgaattgtacactttaaattcgaaatggtaaacttacgtatattctaccacaatagaaaaagaaaagatcttattctgcataaatggaaaataaaaaggctgttttactcgtctaggataattgcaccagttttttttggaagcatgttaattgatttcttaaaactgtttccttattctttaagatgaaagaatcttggaagcacgctaattgatttcttaaaactgtttccttattctttaagatcacttttcataccatgtacattgactacaatgtctttcctaaaagtgttacattttgcatatgcatgtattaagttaaaactgtgtttggttacctatttgctaagtgcttctaaaaccatgaatggctatggaggaaaaaaaatctctatgttt

SEQ ID NO: 211871 - DNA, 548 bp, Homo sapiens
ttccctgtggggtgccttctatttactctgcagtctccctgatgcctggcacaccacactgacctccagatacccctgctccaggaagccatccatgatttccctgccatcatttttgctagttggtcactcccaggtctattgctgcctattttatactttaaaaatgtaatctctttatttctgtggtgacagattcaagaaacattagccaggatataaggtcatgagagtagggactgagttgatgttgatactgttgtgcacctagcttccaaaacagtgcctggtccctggtgggttatcagtagacatttgatgaataaatgagtgagtgaatgcatgaatgagtttgctgagcacccagtaataatagccaacatgcattaagcaccattgctagaccctgtgctaactgcttcatggcaactgtcctgtgaggtgggtactattatccccatttacacgggagaactgaagcttagaaaggtcagagaccggctgggcacggcggcttccacctgtaatcccagcactttgagaggctg

SEQ ID NO: 211872 - DNA, 332 bp, Homo sapiens
aaaatactagcaaactgaatccagcagcataacaaaaagctagtccaccaggccaggagcagtagcttaggcctgtagtctcagcactttggtagccaaggcaggtagatggcttgaggccaggagttcaagaccagcctgtgtaacatggtgagtacctatgtctaccaaaaaatttaaaaaattagctgggtgtggtggcacacacctgtagttccagctacttgagaagctgaggtggaaggatggcttgggcctgggaggcagaggttgcagtgagctgagattgggccatggtactccaacctgggcaacagagtgagaccctgtca

SEQ ID NO: 211873 - DNA, 258 bp, Homo sapiens
ggaggggtggagccaggggtaagatatagcaatgaacagacagacaaatattcccaccttatggagttacattcaggttggggaggtggcaggaggggagaagatccaacaatgagcaaacaaactagcaagtacgtcaaaatgtaaaaggtgctgtggaaaaactaatggctggaaggaagatagggagtgtgaaggtgatggtaggtttctgttttaaactgaggtattagagaagtcctcaatgtaaagatggca

SEQ ID NO: 211874 - DNA, 505 bp, Homo sapiens
ggagaagaccacatgtaagcatttaaatcataacagattcctggtatttatggctttaatatccaaatgatgagcaactcctacgagtctatgacagggaattgtctggaattgtatatagctatgaattttaattttgcaccactgattcttaagtgggcgggttgtctattcatccacatataatatgaggctttgttttgtacttgtcattacaataaactttgaagtgtttaacacattgtgtctttgtggagaaatggtcatcaagtaagacaattttagggaatactgaaaatgctcttagcttgagatgtagcaaattgtatcagaaacatgtcccttgagagcagtgtggctttgaaaatgctaggagttgggagaaagatttgtttttattaatgtggagaattgcaaaagttttagaaaatccacccaccatgtcaaagatcttgtgtgtagaatttttaaagaactgctatagtagagggcattaagattttta

SEQ ID NO: 211875 - DNA, 385 bp, Homo sapiens
acttatagtccttgaagtttctggtactttggctggaagcgttaatgccctcttgaagccttacctttctaaatgtcagcctcacattgtgatcttagaattttatttcctcactctgcatatccactcctactcacctagagcttcaggttgagaaacttagtaacttccttattgtgtgtgaatttggcttcgcctcactaaccctgttccctgatgtactttagagtcacatgcagtgacaaacttagtcacaattagtttcgtcttcaccaaagggaaattgagtagaaattgcaaccaagattttggctaatagatttcacttattttagtgaaatatcattcaaaagtcgtctctaactgtctgactagaacactccca

SEQ ID NO: 211876 - DNA, 307 bp, Homo sapiens
tatagtcccagctgctcgggaggctgaggcaagaatatcgctggaacccaggaggtggaggttgtggtgagccaagattgtgccattacactccagcctgggtgacagagactccgtctcaaagaataagacagagagagaaagagaaaagaaaagaaaaagatattttacaaaataactggccagtactcttcaaaagtgtcaaagtcctaaaagataaaaaggattaaagaacactcaaagatggaaggagactaatgaaacaatacaattcaatgcaggaccttggattggatcctgaaacagt

SEQ ID NO: 211877 - DNA, 98 bp, Homo sapiens
tcccccaccctggtaagtcgggctggctcacttctccctgcaaaccagtttggtgtggactgctcctgccctgagtcacagcggccactgccggcaag

SEQ ID NO: 211878 - DNA, 604 bp, Homo sapiens
gtgacaatcttttgtggttcagtttcttcatccacaaaacggaggaaataacactacttcacagagatcttgtgaaaggcaattaaagtgttccctgtaaagcacttagaacaatgcctggaatagtcgccactcagtccgtggtgactctttttattactatagcaatgcctagtttaattgacaccaaccaaaatgagtgtcggttatatgggtggtaatgaaagggagtgcaattaactggcaaggtcagaagtagggtaagttaattcaatcttctggttaataggtgccatgtggaatctacctatgttctagggattgttattttcagtaataataattgcaattaagtcctcaactttaccattgaactgaatatgttgttgtccccagtcatatcaaatggtgaagaaacatctctaaagagccaggaaaaactactgacataactgtgtggtcactaattaaaggcaaagatattgattaatggaataatgaaaatgtctgatatataactggatactttatgtgtggaaacaacactgagatctctgcagcaaagttttggtgcagaaagcttgtattagggatttccagagtt

SEQ ID NO: 211879 - DNA, 392 bp, Homo sapiens
agtagtcattgaatgtcaattatgtctactcttcattatgtctctaagttgacagagaccttaacaggttgctaagcctctctggacctcagttttctcgtctgcaaaatgagtcccttagaatgaataatctctaaggttgattctcaaactaataaaattatatgaatccgtgacctatttcagaatgatgttgctgttttacataatggcttgcattgaatatttaaaccatctatagtcactgggttcagacaactaaatattaggtggggcaccatggcttacacctgtaatcccagcactttgggaggctgaggccgtaagagtgcttgagccccagagtttgagactagcctgagcaatatagtgagactcagtttctattattt

SEQ ID NO: 211880 - DNA, 451 bp, Homo sapiens
ctatttactgagcatttactaaatgatatatatatacacacacagatgtgggaaatattgctaatttacaaaagaggaaactggtttgtagccaatttgcatgatgtaaatgttcccaccatggccaattgcaaacaacaaatgtagtatcaatgaaaatggaattgggaagatacacacataatgggctgtcattgggctggtacaagccaggtccagcatatccctgggactagggacattaagtgagtcatagtttaggaactaaacacagaaagtcttgattttagacttgtgtacttaaccaagttgctgcactacttttatgatagttttcagctcaaataagcctacatataatactacatatttaaaagaccacagagcaactctttgtgagagagaggaactaggattactcttctggcttctagaaagtgattctacaact

SEQ ID NO: 211881 - DNA, 393 bp, Homo sapiens
gctggcaagatttgggagggatggagcagacctgggcagtcagtaataatcaagggaagccaagtaaactccagagtcttacctctggctcacagctgcttttgtgatacacaaagtcacaaagaggaaaagggaagggaggaggttgcttttcaaaatgcattcaccatggctcactgtgtggggcatgattgcaggcctgagctcatgaaagactgtccaagattttgtggtttcaacctctcttcagcctgaaaattccatccagtcgatttgtcacagatcaggatcttcctgtcccctgcagcccatggggacttcctagaaatagatatgatatgttgtagatgtggttaaaacaaatccaggccccattgtttattcagctcatta

SEQ ID NO: 211882 - DNA, 1196 bp, Homo sapiens
gcggaagcggcgccattcgtcttccgagcgctactgccagctgatgccgggagctaactaccgcgccggggccggggccggggccggggcccgacgtccccgcggggcccgggaccgcgaggaggacggcgggggcctggagcccgcggccgtggcccgcgacctattgaggggcacatctaacatgtcatttgaggagctgttggaattgcagagccaagtggggactaagacgtacaaacaattggtagctggaaatagtcctaagaaacaagcttctagaccacctatccaaaatgcatgtgttgcagataagcacaggcctctggaaatgtcagccaagatccgagtaccatttttacgtcaggttgttcccattagtaaaaaggtagcccgggaccctcgctttgatgatctgtcaggggaatataatcctgaggtgtttgacaaaacataccaattcttgaatgacatccgagcgaaagagaaagagcttgtgaaaaaacagttgaagaagcacctttcaggagaggagcatgagaaactgcagcaactgcttcagcgaatggagcagcaagaaatggcacagcaggaacgaaagcaacagcaggagctgcacctggccctgaagcaagaacgtcgggctcaggcccagcagggccatcggccatacttcctgaaaaaatctgagcagcgccagttggcactagctgagaagttcaaggagctgaaacgcagcaagaaattggagaacttcttgagtcgaaagaggcgacgaaatgcaggcaaggacaggagacatctccctttgagcaaagagtaataaggaactatcctctgctctgccactgccccagggagacatggatctgtgaggacagatttggccacggctggtttccgttcaagggcaaggatcacagctgcccttgaatctcattgcctcagagaagactagagggctcttggactatccctagggctacacaagaatagttcagccttctgccatgccacacagcctcagcttgaatctggttcattgcgtcctcgtgttcttctctcatccttgccttaaaccagggattctgataccgaagaagaggggccaatgaaaaccatggagtctgttcgtgactcccagggctgggacattatgtaggagccacttcataaacattctctttactcatctt

SEQ ID NO: 211883 - DNA, 1178 bp, Homo sapiens
gcggaagcggcgccattcgtcttccgagcgctactgccagctgatgccgggagctaactaccgcgccggggccggggccggggccggggcccgggaccgcgaggaggacggcgggggcctggagcccgcggccgtggcccgcgacctattgaggggcacatctaacatgtcatttgaggagctgttggaattgcagagccaagtggggactaagacgtacaaacaattggtagctggaaatagtcctaagaaacaagcttctagaccacctatccaaaatgcatgtgttgcagataagcacaggcctctggaaatgtcagccaagatccgagtaccatttttacgtcaggttgttcccattagtaaaaaggtagcccgggaccctcgctttgatgatctgtcaggggaatataatcctgaggtgtttgacaaaacataccaattcttgaatgacatccgagcgaaagagaaagagcttgtgaaaaaacagttgaagaagcacctttcaggagaggagcatgagaaactgcagcaactgcttcagcgaatggagcagcaagaaatggcacagcaggaacgaaagcaacagcaggagctgcacctggccctgaagcaagaacgtcgggctcaggcccagcagggccatcggccatacttcctgaaaaaatctgagcagcgccagttggcactagctgagaagttcaaggagctgaaacgcagcaagaaattggagaacttcttgagtcgaaagaggcgacgaaatgcaggcaaggacaggagacatctccctttgagcaaagagtaataaggaactatcctctgctctgccactgccccagggagacatggatctgtgaggacagatttggccacggctggtttccgttcaagggcaaggatcacagctgcccttgaatctcattgcctcagagaagactagagggctcttggactatccctagggctacacaagaatagttcagccttctgccatgccacacagcctcagcttgaatctggttcattgcgtcctcgtgttcttctctcatccttgccttaaaccagggattctgataccgaagaagaggggccaatgaaaaccatggagtctgttcgtgactcccagggctgggacattatgtaggagccacttcataaacattctctttactcatctt

SEQ ID NO: 211884 - DNA, 505 bp, Homo sapiens
gcctactactactactactactaaattcgcggccggtcgaccaaggagctgaaacgcagcaagaaattggagaacttcttgagtcgaaagaggcgacgaaatgcaggcaaggacaggagacatctccctttgagcaaagagtaataaggaactatcctctgctctgccactgccccagggagacatggatctgtgaggacagatttggccacggctggtttccgttcaagggcaaggatcacagctgcccttgaatctcattgcctcagagaagactagagggctcttggactatccctagggctacacaagaatagttcagccttctgccatgccacacagcctcagcttgaatctggttcattgcgtcctcgtgttcttctctcatccttgccttaaaccagggattctgataccgaagaagtggctcctacataatgtcccagccctgggagtcacgaacagacttcatggttttcattggcccctctggcgacgcggcccg

SEQ ID NO: 211885 - DNA, 484 bp, Homo sapiens
tagtttaaaatagtctcaagtaggctgggcgtggtggctcacacctgtaatcccaccactttgggaggcagaggcaggtggatcacgaggtcaggggttcgagaccagcctgaccaacatggtgaaaccctgtctctactaaaaatacaaaaattagccgggtgtggtggtgggcgcctgtaatcccagctactcaggaggctgaagcaggagaattgcttgaacgcgggaggcggaggttgcagtgaaccaagatcgcgccactgcactccagcctgggcgacagagcgagactccgtctcaaaaaaaaaaaaagtctcaagtagatagtgtctccagggtcctggcagaagcaaatgtaatcctttcttgaggattgttttttttttgtttgttttttgtttttgagatggagtctcactctgtcgtccagactggcaaaaattaaaatgtgagaagtataaaataaaaaatacaaaatgtc

SEQ ID NO: 211886 - DNA, 1405 bp, Homo sapiens
gcggaagcggcgccattcgtcttccgagcgctactgccagctgatgccgggagctaactaccgcgccggggccggggccggggccggggcccgacgtccccgcggggcccgggaccgcgaggaggacggcgggggcctggagcccgcggccgtggcccgcgacctattgaggggcacatctaacatgtcatttgaggagctgttggaattgcagagccaagtggggactaagacgtacaaacaattggtagctggaaatagtcctaagaaacaagcttctagaccacctatccaaaatgcatgtgttgcagataagcacaggcctctggaaatgtcagccaagatccgagtaccatttttacgtcaggttgttcccattagtaaaaaggtagcccgggaccctcgctttgatgatctgtcaggggaatataatcctgaggtgtttgacaaaacataccaattcttgaatgacatccgagcgaaagagaaagagcttgtgaaaaaacagttgaagaagcacctttcaggagaggagcatgagaaactgcagcaactgcttcagcgaatggagcagcaagaaatggcacagcaggaacgaaagcaacagcaggagctgcacctggccctgaagcaagaacgtcgggctcaggcccagcagggccatcggccatacttcctgaaaaaatctgagcagcgccagttggcactagctgagaagttcaaggagctgaaacgcagcaagaaattggagaacttcttgagtcgaaagaggcgacgaaatgcaggcaaggacaggagacatctccctttgagcaaagagtaataaggaactatcctctgctctgccactgccccagggagacatggatctgtgaggacagatttggccacggctggtttccgttcaagggcaaggatcacagctgcccttgaatctcattgcctcagagaagactagagggctcttggactatccctagggctacacaagaatagttcagccttctgccatgccacacagcctcagcttgaatctggttcattgcgtcctcgtgttcttctctcatccttgccttaaaccagggattctgataccgaagaagaggggccaatgaaaaccatggagtctgttcgtgactcccagggctgggacattatgtaggagccacttcataaacattctctttactcatctttttattctgttttttgtggccttctttttgtgtttcccccccgaaacagagtctcgctctgtcacccaggctggagtgcagtggtgcgatctcgcctcactgcgaacctccacactcccagggtacgggtgattcttgtgtgcctcagacttcccagtagctgacatccgccaccaagcccagctaatttctttcgtatttttagtaga

SEQ ID NO: 211887 - DNA, 1327 bp, Homo sapiens
gcggaagcggcgccattcgtcttccgagcgctactgccagctgatgccgggagctaactaccgcgccggggccggggccggggccggggcccgacgtccccgcggggcccgggaccgcgaggaggacggcgggggcctggagcccgcggccgtggcccgcgacctattgaggggcacatctaacatgtcatttgaggagctgttggaattgcagagccaagtggggactaagacgtacaaacaattggtagctggaaatagtcctaagaaacaagcttctagaccacctatccaaaatgcatgtgttgcagataagcacaggcctctggaaatgtcagccaagatccgagtaccatttttacgtcaggttgttcccattagtaaaaaggtagcccgggaccctcgctttgatgatctgtcaggggaatataatcctgaggtgtttgacaaaacataccaattcttgaatgacatccgagcgaaagagaaagagcttgtgaaaaaacagttgaagaagcacctttcaggagaggagcatgagaaactgcagcaactgcttcagcgaatggagcagcaagaaatggcacagcaggaacgaaagcaacagcaggagctgcacctggccctgaagcaagaacgtcgggctcaggcccagcagggccatcggccatacttcctgaaaaaatctgagcagcgccagttggcactagctgagaagttcaaggagctgaaacgcagcaagaaattggagaacttcttgagtcgaaagaggcgacgaaatgcaggcaaggacaggagacatctccctttgagcaaagagtaataaggaactatcctctgctctgccactgccccagggagacatggatctgtgaggacagatttggccacggctggtttccgttcaagggcaaggatcacagctgcccttgaatctcattgcctcagagaagactagagggctcttggactatccctagggctacacaagaatagttcagccttctgccatgccacacagcctcagcttgaatctggttcattgcgtcctcgtgttcttctctcatccttgccttaaaccagggattctgataccgaagaagaggggccaatgaaaaccatggagtctgttcgtgactcccagggctgggacattatgtaggagccacttcataaacattctctttactcatcttaaaaaaaaaaaaaaaaaaagaaaaaaaacatttgttgggcggcttctgggcccatcggaaaaggttttttaaacccttcggttggggcggcggggcccaagggggttcgtggccacgggtccaaaggcggt

SEQ ID NO: 211888 - DNA, 517 bp, Homo sapiens
gcctactactactactactactaaattcgcggccggtcgaccaaggagctgaaacgcagcaagaaattggagaacttcttgagtcgaaagaggcgacgaaatgcaggcaaggacaggagacatctccctttgagcaaagagtaataaggaactatcctctgctctgccactgccccagggagacatggatctgtgaggacagatttggccacggctggtttccgttcaagggcaaggatcacagctgcccttgaatctcattgcctcagagaagactagagggctcttggactatccctagggctacacaagaatagttcagccttctgccatgccacacagcctcagcttgaatctggttcattgcgtcctcgtgttcttctctcatccttgccttaaaccagggattctgataccgaagaagaggggccaatgaaaaccatggagtctgttcgtgactcccagggctgggacattatgtaggagccacttcataaacattctctttactcatctt

SEQ ID NO: 211889 - DNA, 706 bp, Homo sapiens
gcggaagcggcgccattcgtcttccgagcgctactgccagctgatgccgggagctaactaccgcgccggggccggggccggggccggggcccgacgtccccgcggggcccgggaccgcgaggaggacggcgggggcctggagcccgcggccgtggcccgcgacctattgaggggcacatctaacatgtcatttgaggagctgttggaattgcagagccaagtggggactaagacgtacaaacaattggtagctggaaatagtcctaagaaacaagcttctagaccacctatccaaaatgcatgtgttgcagataagcacaggcctctggaaatgtcagccaagatccgagtaccatttttacgtcaggttgttcccattagtaaaaaggtagcccgggaccctcgctttgatgatctgtcaggggaatataatcctgaggtgtttgacaaaacataccaattcttgaatgacatccgagcgaaagagaaagaggtatacagcttgagactggtttatggggaattttgtggggtggaaaatgagggcacaggttagagagttgggcagggggagtgggaagtatagtggtgggcagatttaactctctccaattcagttcatattcaaatcctggctcatcagtttactagctgtgtgattattggcatgttacttaatctctctatgctttagttttctaatcat

SEQ ID NO: 211890 - DNA, 481 bp, Homo sapiens
ctgaaatagttggagagtttaacactatcacagcctctgctgcctaggacttctaataatgattggtctgatggggtattaggattagctagctaaggaatggggatgggaagatgtcttttctgcagtgggacatgctgagctgagttgtatgtccctccccacttccacaggcacatctaacatgtcatttgaggagctgttggaattgcagagccaagtggggactaagacgtacaaacaattggtagctggaaatagtcctaagaaacaagcttctagaccacctatccaaaatgcatgtgttgcagataagcacaggtaagcaaggcttgccctagaagttggaagataactgggaccttgaataggtatgttgtcttgggtgacaggtgggaagcctttgaccaacactggagtcctcttgacttggcttttaatttctccataggcctctggaaatgtcagccaagatccgagt

SEQ ID NO: 211891 - DNA, 993 bp, Homo sapiens
ctggaacacactttgtagaccctggaacgcaactcgaaaaccccaagcgctggaactcactttgtagaccctgtaacgcaactcgacggccccaagcgcgcttggggctttcgagttgcgtctgtacggaactgcccatagagatgtccagtaggtaataccaatacagatctaaagtctgggggaagttgggggttggagctacgtatttgggaatcaccagcatatcagcagcaattgaggacatcaggatgaatgactccattttgggagtaaatagaaaggaaagacttgtgaaaaaacagttgaagaagcacctttcaggagaggagcatgagaaactgcagcaactgcttcagcgaatggagcagcaagaaatggcacagcaggaacgaaagcaacagcaggagctgcacctggccctgaagcaagaacgtcgggctcaggcccagcagggccatcggccatacttcctgaaaaaatctgagcagcgccagttggcactagctgagaagttcaaggagctgaaacgcagcaagaaattggagaacttcttgagtcgaaagaggcgacgaaatgcaggcaaggacaggagacatctccctttgagcaaagagtaataaggaactatcctctgctctgccactgccccagggagacatggatctgtgaggacagatttggccacggctggtttccgttcaagggcaaggatcacagctgcccttgaatctcattgcctcagagaagactagagggctcttggactatccctagggctacacaagaatagttcagccttctgccatgccacacagcctcagcttgaatctggttcattgcgtcctcgtgttcttctctcatccttgccttaaaccagggattctgataccgaagaagaggggccaatgaaaaccatggagtctgttcgtgactcccagggctgggacattatgtaggagccacttcataaacattctctttactcatctt

SEQ ID NO: 211892 - DNA, 943 bp, Homo sapiens
gcggaagcggcgccattcgtcttccgagcgctactgccagctgatgccgggagctaactaccgcgccggggccggggccggggccggggcccgacgtccccgcggggcccgggaccgcgaggaggacggcgggggcctggagcccgcggccgtggcccgcgacctattgaggggcacatctaacatgtcatttgaggagctgttggaattgcagagccaagtggggactaagacgtacaaacaattggtagctggaaatagtcctaagaaacaagcttctagaccacctatccaaaatgcatgtgttgcagataagcacaggcctctggaaatgtcagccaagatccgagtaccatttttacgtcaggttgttcccattagtaaaaaggtagcccgggaccctcgctttgatgatctgtcaggggaatataatcctgaggtgtttgacaaaacataccaattcttgaatgacatccgagcgaaagagaaagagcttgtgaaaaaacagttgaagaagcacctttcaggagaggagcatgagaaactgcagcaactgcttcagcgaatggagcagcaagaaatggcacagcaggaacgaaagcaacagcaggagctgcacctggccctgaagcaagaacgtcgggctcaggcccagcagggccatcggccatacttcctgaaaaaatctgagcagcgccagttggcactagctgagaagttcaaggagctgaaacgcagcaagaaattggagaacttcttgagtcgaaagaggcgacgaaatgcaggcaaggacaggagacatctccctttgacaaatgtaatcctttcttgaggattgttttttttttgtttgttttttgtttttgagatggagtctcactctgtcgtccagactggcaaaaattaaaatgtgagaagtataaaataaaaaatacaaaatgtc

SEQ ID NO: 211893 - DNA, 434 bp, Homo sapiens
gcggaagcggcgccattcgtcttccgagcgctactgccagctgatgccgggagctaactaccgcgccggggccggggccggggccggggcccgacgtccccgcggggcccgggaccgcgaggaggacggcgggggcctggagcccgcggccgtggcccgcgacctattgaggggcacatctaacatgtcatttgaggagctgttggaattgcagagccaagtggggactaagacgtacaaacaattggtagctggaaatagtcctaagaaacaagcttctagaccacctatccaaaatgcatgtgttgcagataagcacaggtaagcaaggcttgccctagaagttggaagataactgggaccttgaataggtatgttgtcttgggtgacaggtgggaagcctttgaccaacactggagtcctcttgacttggc

SEQ ID NO: 211894 - DNA, 583 bp, Homo sapiens
atttttttctgtatttagattttctttactattttttgtccatttgatgcaaacttcttcagctgtgtagaaactttatgaatagataagtgcttgagtgtctctggtctctaaagtggctggttttattctttcttcaaagttaataacatgtttcaagatttttggacaaaatattatggtacgtcatagagaaaagcagcgtgaattatatttaggtatagcaagtcagatcctttgaagtgactctgtctctgttcttagaagggttcttggaattggttgtggtttgaatctttctactgtcagaggagacccactaaaaaccagaatctgcataaagctttctttacttaacacactgaagctataggtgagccatcccatgtcagactttatactcaaagaaggaaaagccaagttgcagtgagcgggtaagacagctcagatccgaatgaaaatggggtctgaataagtaacccaagggagctgccctctagtcgggcagctagtattgcttccttgcatggatacataggagggatacattatagattaataaatgatagtgagataaacaaga

SEQ ID NO: 211895 - DNA, 185 bp, Homo sapiens
gaatcttcattggctagcccagtgcccagcacataggcacataatagtttctcaataaatattagttgcattcgggacaaattaatgatagcacctatgttcagataggtgtgtgtgcatgcatccattctagcctttctgtagaactgaatcccaggtgtggagtactgccatattgccttcca

SEQ ID NO: 211896 - DNA, 537 bp, Homo sapiens
cttttcccagatgaagctgaccagcggcagtatgaggagtggctgttccatacccagcagctcctacagatgcagctgaaggtgctagaggagcagattggtgtacaccgcaagtcccggaaggctctgtgtgccaagcagcgcactgccaaaaaagctggccgtgagttcccagaagctgatgctgagaagctcaagctggttacagagcagcagagcaagatccagaaacaactggatcaggtccggaaacagcagaaggagcacactaatctcatggcagaatatcggaacaagcagcagcaacaacagcagcagcagcagcaacaacagcaacagcactcagctgtgctggctctcagcccttcccagagtccccggctgctcaccaagctccctggtcagctgctccctggccatgggctgcagccaccacaggggcctccgggtgggcaagccggaggtcttcgcctgacccctgggggtatggcactacctggacagcctggtggccccttccttaatacagctctggcc

SEQ ID NO: 211897 - DNA, 639 bp, Homo sapiens
cttttcccagatgaagctgaccagcggcagtatgaggagtggctgttccatacccagcagctcctacagatgcagctgaaggtgctagaggagcagattggtgtacaccgcaagtcccggaaggctctgtgtgccaagcagcgcactgccaaaaaagctggccgtgagttcccagaagctgatgctgagaagctcaagctggttacagagcagcagagcaagatccagaaacaactggatcaggtgggggaaagcaaacttcagcctagcacccagaaggcagggaagagggttggcatggggggagcatgccccagcctgacctctccgaccctcccatgttaggtccggaaacagcagaaggagcacactaatctcatggcagaatatcggaacaagcagcagcaacaacagcagcagcagcagcaacaacagcaacagcactcagctgtgctggctctcagcccttcccagagtccccggctgctcaccaagctccctggtcagctgctccctggccatgggctgcagccaccacaggggcctccgggtgggcaagccggaggtcttcgcctgacccctgggggtatggcactacctggacagcctggtggccccttccttaatacagctctggcc

SEQ ID NO: 211898 - DNA, 998 bp, Homo sapiens
aggtagaattagacaaattttgaagttatttacatcccacaacatggatgaaccttgaggacattatggtaagtgaaataagccagtaacaaagacaaatattgtgtgattacacttacatggaatacttagtcaaattaataaagatagaaagtagaatggtagggctggaggaagggtggtatagggagtgattaatggatacagagtttcagttttgcaaaaattttatatatcttaacacaatttaaaaacaaaaaccttctgaaatacagtaaaactgcaaactgtattgagtgctgtcacttaccacagggtgctatgagaaataaaacctaacaagtttaaagtggaaaaaataatttttaagttgctgaagtcatcccagtgaacactaatgaaggcttaaacgaatattggcagccagcaagaacaaacaagccagatttgagcgatagagtcagcagttcttataaaaagaagggatttaagaagagtcagaaatgtgttttgaggtttttttgcctgggggttggggagctgaagctggtactgaaaaagagaataagtgagttctgaaaagaattaaatttaatctttgacattctaagtataaatatgttagtagaacatcctcttaaaaatgtgaggccagcagtagaaatttggaatttgataacatttaagagttgcacaggccaggtatggtggttcctgcttataatccgaacactttgggaggctggagcaggaggattgctttagaacaggagttcaagaccagcctggacaacatagcaagattccagctctgcaaaaaattaaagaaaaactagctgggcgtggtggcacacacctgtagtcctagctactcaactaggctgaagtgggagggttgcctgagcccaggagttcaaggttgcagtgaactgtgattatgccactgcactccagcctgggcaatggagtaagactctgtccctaaaagttaaaaaaaa

SEQ ID NO: 211899 - DNA, 543 bp, Homo sapiens
ctgttcctctggctgagggcctcgcatccacccacctgcagaccatcacagcaccccagtgagcagacggtggtttaagagcagcaaaacaggatgaggcaagagggatggaggcagcatggcggtggtgagggagaatgcagactcgagagctagtcaggaagcacgtgtagggcttggtgacggagagtgtgacagggatggctgaggaggtggtactgctctcaggcctcttgtctggcttgaataactggggaagcattcacagcagtgccacctccagccaaaaaccctgtgtgaatgcaaagcagttatactgctggccttttggagatgactacacaaatctcttcctctttcactgtcttgaagcaggaattccaaacctgccaccacaccccggccctgcctgtggggtagcatcagccacaaatgacttcacagcaaacaaagggatgccctccatttctgcagcctcagttactccacaaagcctacctcttctaaacaatagagaagatctgaaatgaaacccagggagct

SEQ ID NO: 211900 - DNA, 445 bp, Homo sapiens
agttatgttacggcataaatattcactcattggtaatgaatgataacacatacagaaaggctgcatgatattgctgaattgtaagaattttccgtaaagttgcttcttgggccattctagtttacatctaatttaataaatttagcaatttggagaacatctgcaggactgatgtaagtactgaaagtggaagtgtcagggaggcagcagaagcaggtgcttcctgatattaaccagagacggtcctggcacagatggggccgtgtgaatcacatgcagacatacgtatgcactcacgtgcgtgccattattttcatgtggaggtcaaacagtcagaaacgtttgggaagtgctgtgtaatgctaactgttcgtgcataatgttttcccatttagtaagtgctgttgcatgtgttttctgtgattctcaccacagcccaatgcaa

SEQ ID NO: 211901 - DNA, 405 bp, Homo sapiens
cttgtgatccacctgcttcggcctcccaaagtgctgggattacaggtgtgagccaccatgcccggcctgtttaacaattcttttacttcctgacatttagtttatatcaattataagtaatgttgtaatgaacatcctttgtacagaaagctttatttccttaggagtaaattcctagagacagaattactgagacaaagtatatgaatatctactttccaaaaggaagcctttttatgactataaattacatattttatgtttaaaagtaccaaataaagtataaaaaggaaaataaaaactgcctaataattgcacccatcagaggtaacagtcaatactttggtgaatactctttcgaaatatctaagtgttatgtgctcacttgtaaattctctctttttt

SEQ ID NO: 211902 - DNA, 148 bp, Homo sapiens
tcaagtgtcttctacatttgtccaattttgtgttgaatattttgaaagcacccctgcatatgcgtgtatgtgggtacagagacatatgtgcaatgtgatccttcatgttggttatcgtaaaaaaacaaacaaaaaaacactttttaga

SEQ ID NO: 211903 - DNA, 547 bp, Homo sapiens
catttattttctctgttagattttgaatagtttgggacaggaatatatattatttatctttgtgtacaatcatagagtcatttagagttttcaaggaaaacaaaacaaaaaattatgttgaagagataaataattcaaaggcatgtgcctcttgaggttttcctaattcgttgaacagagggtgtagtttccattaaataaaatggtcgccaaatgaataaagaaaactctctaatcatattatcttaatagtaggggaccagaaattagttatgagattgaaggcttcagtatgtggtatctcatctttctctgtttcagaacctcagagcttttttgttgttgttaatattaaatagttgtggtttgaaaaggcactgttattttctgggaggaattctttcctggatcctgtaacctccttgaaaacatgggacataccttgatcatcattgcatttcttgtatttaataaatgtttttttttggctggctagctggatgatggatgaactaataaagagcatgtgaccttgggcaagttattt

SEQ ID NO: 211904 - DNA, 1123 bp, Homo sapiens
ctcattgtactcccttggcatctcatggtgacgtgacttagaaggtggtgcagagacgtttgaaactattgctttgctgaaaacatctgactgccaggctaggatgtgacacttaagggacttaccaatttgggattcttccaggagctgaaaactgattgcaaatatgaaacagatttcactacaggacttgaaccctacattaaaaaacaacaagctccccaaaataattgaaaaagatcttcaccaaagagtagctgcaatgtgaatggcaggatatgaagcaagtaagagatggtgaaaagattatcttaagcttggaattaagtgatgaaagggaccttcgaaattatcaactctaaatacttctttacaggaaaattgaaagcagttaagaacctgccccctaccgtggagttcttggtgccgtgagttggagttcttggtgcctgggtgcgtccccaaggccactggtcttcagatctttcttacttgagaagaacgcctccgcctcctggctctcccaccagtggtattgccaccaccacacaccagcataaagcacagattgctgcccagctccttggagaggggccagtgcatttgtcaggaattgaaaagttttggagccagttcgaggactttctgctgcacaaagtgttggctggaagcatgaagcaataacacatggtttgccaaagaatctgcattgaataatactggtggtgaccacaagaacatgcctctctgactgcaaggaacaagagtgacccagggtttcagctgctgccttggaaattcatcacagtgcaagtctatgcttcccacgggctgctcccagcctgtgaataagcctggcatctttgttgaggcaggcctatttctggagatgcaggatcctccgatgggcgaatttggctctaggactgcttgatggccttgacagactttccttagaaatgcatggcaatttagggttcctccacccttccctctttctctccttcacctagggtcggacttgcatcatggcctgaaagctccaccagcctctcctgccctcctcctcattttctttcacaggcatatcctctaataaatttcttgcacattgaatctcatc

SEQ ID NO: 211905 - DNA, 1000 bp, Homo sapiens
  misc_feature (978)..(978): n is a, c, g, or t
tgcgccgaccgccggccccgagccgccgcgggctccgaggagtcggccgagctgctcccgcgccctggccggacgtttgaaactattgctttgctgaaaacatctgactgccaggctaggatgtgacacttaagggacttaccaatttgggattcttccaggagctgaaaactgattgcaaatatgaaacagatttcactacaggacttgaaccctacattaaaaaacaacaagctccccaaaataattgaaaaagatcttcaccaaagagtagctgcaatgtgaatggcaggatatgaagcaagtaagagatggtgaaaagattatcttaagcttggaattaagtgatgaaagggaccttcgaaattatcaactctaaatacttctttacaggaaaattgaaagcagttaagaacctgccccctaccgtggagttcttggtgccgtgagttggagttcttggtgcctgggtgcgtccccaaggccactggtcttcagatctttcttacttgagaagaacgcctccgcctcctggctctcccaccagtggtattgccaccaccacacaccagcataaagcacagattgctgcccagctccttggagaggggccagtgcatttgtcaggaattgaaaagttttggagccagttcgaggactttctgctgcacaaagtgttggctggaagcatgattatctcacacagagcgttggaattacttcatgatgatttcaaagaaaattttcttctctaaacactcttatcccaagggcatcctaaagttcctctggaatgcattgggtgggagagaaagttctatgtcaactcttctggcagagggaaaagctgaccgaggaagtcaaaatgaaagaaagaagcagacaggactgaggctccctgagatgcagaaactgaggcacagagcaaggatgtgccacagcagaagcaagttgtgttggcagtaggaaacaagatanagagaggactcaaagaattgag

SEQ ID NO: 211906 - DNA, 155 bp, Homo sapiens
ttttgagtatgtggaagctctgttgttacacgtgtacacatttgtgattgtaatgtcttcctaaaaattcacccttttctgtcttgtagtattctgtccaaaaatacacctgtttttttttttttttttttttgagacagtgtctcactctatcg

SEQ ID NO: 211907 - DNA, 568 bp, Homo sapiens
tgaaaagggaagaaccgctgctatgtgcctcgcctgatgaaattccaacatgtggagtgaaaaaggcaagtcacagaagcatatatactatacactaagaaatgacttatatgaaggttaagaatcagtaaaactcaagactgtcgtgtttacaaataataaatgggtattatggcaaaatcataagaacggcaaaggattcatgacttcaacttgactctgggtgctaagggggcaaacggctgtgagagtgagaggcatttctggataccctgggtgtgtattaatatcagctgtgcacatttatgctggttatcagaaaaattgtacattttactttatatacggttaattttgaaaggtagaaaaaaacaaaaagcaaacaggcaaaaccccccagattttctggttatagattcagaccccaaatgaatctaaataactgggctttgtgaagtttttagaccttaaaacgaaaggaacaaatctgaagggaacaactgggaggagttggatttgcttccgaggcgctgatctgaaggcgttcgtgagttgcccatacccacag

SEQ ID NO: 211908 - DNA, 524 bp, Homo sapiens
aaaaaataaaaatgaataagaagaaaatgaaataaaataaagccaaatcaaatttgtttacactaagcttaatcacagaaattacaaagttgatattcgaaaggagggaaaaatcttactgctattctgcaattattggcaggagaaatgatcatttaactagtaacattatcttttatgaatcaggataaaattattaggcttacatgactcaaaagggtttatatacagccaagaagcaataatctactaactactggctacgagcatgttgagataaattttaacaaattatttataaattaggtacagtaagttctcaaaatatctgcaatcccagtaaagaattgattgatcaaaaatgaacatacacattagacaatttttcaacaggcataataacttttcatacgctaggcatgttatagatatggtgccgagttccacactacctcataagacctgggcatctttaatcagcctggattctatatgtgaaaagaaagagctaagacattaaaaat

SEQ ID NO: 211909 - DNA, 309 bp, Homo sapiens
atctcaaaccatcagaataagctgtaaactctgagggaccctcacacactcccacagagcaagctggaccccatgtggagtttctctccttgacaaagccataaagccatggtcactggaacatgggtagaagttattatctggttgtgtgtgtgtgtgtgtgtgtgtgtgtgtgtgtgtgtgtgagagagagagagagagagagagagagtgtgtgtgtgtatgtatatagtttgaagcacagcctcagttttatagagtaaatacggccagaatttagcatgcaatatgttaagagaccctgacatg

SEQ ID NO: 211910 - DNA, 469 bp, Homo sapiens
tggggccacgccacgatggggacagcccaacgatgttaaggcagggtgtgacttcagatgagaggcatctgagctgaggcctaaaagaccaggtgttaggcaggaggaggtagggggagcgttggtaccacagggagaggaaagagcagcaggagtggggaggtggtggggagccaccagaacacagggacgcagtgggagacatggacaaaggtccaaagaggcaggctgccaggccttgcaggccaggatgtgaggggcaggtccaagggtcgctcagaggaggcacaaaagcaggttcactcaaagagtgacttgaggcaggaggaaggcagagcgcacctctctgtgctgtccctcgggacacccctcacacagaaccatccagtagccttccccacagtgccacggggacacctggtgatggcttcaagcctgtccttcatagggcagaaggccactgatgacc

SEQ ID NO: 211911 - DNA, 452 bp, Homo sapiens
catctatcactctataatcttatcttgttttgttttcctttactgcacttcttaatatttggaaattatgttttaaaaaatgatttcctatctgttttccttatgacaatggaagctccatgaagcggagatttgggttcatggagcccataaggcctcagcccataggagaaacagacaagttgtactggggattaaattccattaaattttccattaaattcatatctcgggtggatcataccttgcacatagtaggcacttgataaatatttgttgaataaattggtaatttgatattcacaggctttgtgagattggtggaaaggaaactgtattgtaaagatggccaggcatggtggctcatgcctgtaatcccagcactttaggaggctgagttggtgatccagcctaggctacggagagagaccccatctcttaaaaaaaagaaa

SEQ ID NO: 211912 - DNA, 531 bp, Homo sapiens
gtcagtattttctgtctagaaaatcccaaagaactttgtaaacgttctaccaagcaagtacaactggtcctccatatttgtgggtttcgcatctgtggattcaaccaactgcagatggaaaatatttgggaaaaaaatggatgattgtgtctatactgaatatgtacagatgttttgtcattcctccctaaacaatgcagtagaacaagtatttacataatgtgtatatttattaggtattacaagtaatctatagattatttaaagcatatggggggatgtgcctaggtaatatgcaaatactataccattttgtataacggacgagagcatttgtggattttggctctggtctgcagctcccagcgagaccaatgcagaaggtcggggatttctgcatttccaactgaggtacccagttcatctcattgggactggatagagagtgagcacagcagatggagggtgagcagaagagggtggggcgtagcctcacccacgaagtgcaaggaatgggggctttccctcccc

SEQ ID NO: 211913 - DNA, 544 bp, Homo sapiens
tattttacatgtgaatgcatctatcctccacccttctctctgctcattgtatatactccgctataagaattcacccactcccatggtttcaatgctgatgactcccaaatgtctacttttagctcagatctcacttcagtatccacctgcctattggatatttatatctacttggatatgagttgtggatatgtaccacgaacaacatattcaaaagttaactcattatctttagtgcttataatttgttctcttgtttgtttcctttctcagtgtgatttccaccaagttgcttaagtaagaatcctaagtgctatcgctggctctctttatctgccctgaggctcacatgtaatcactaaaatctgttaattttatgtcttgaatgtctctggaattcatccataatttcttcagcctattacaataactctggtctcttctcacctagatgactgcaacagctcctgtaatggtctgtcaccaataccgaatcttaaccctttcaatccattcccacacagcaaccagaatgaccttccta

SEQ ID NO: 211914 - DNA, 250 bp, Homo sapiens
atgctttccaatctaatactcattgttgaaatctgcagtgtctctcaggtcttacttaacttgtcctttctctagattatgtgactgctgtctgtcctccatccttaagcaattttctcctttttcagactctgtcctgattcccttgtcctcttcctatttctggaaatgctcttttcttttcctctactgactcttattcttttgcttaacatttaaatacctgcctggttctcctctccgtttatat

SEQ ID NO: 211915 - DNA, 390 bp, Homo sapiens
gttgcacagctccatgaatacactaaaagccactaaattacacacttcaaaagcaaacaaaatagagtaaaagtgtggaccgggcatggtggctcacgcttataatctcagcactttgggaagccaaggcaggagaatcacttgacccaggagtttgagaccagcctgggcaatatggcaaaatcccgtctctacaaaaaacaccaaaaaaaaaaaattagctaggtgtcatggcatttgcctgtagtcccagctacctgggaggctgaggtgggaggatctcttgaggttgaagcttagtgagctatgattgcaccactgcactccagcctgggcagcaagcaagaccctgtctcaaaaaaaaaagtgagaattctatgacatatgaat

SEQ ID NO: 211916 - DNA, 360 bp, Homo sapiens
gtgagccaccgcacccagcagaaggatatatttcttaacagaaattttcattatgattcccacgtgcatatctaaatagagaagtgcagaaaataaaatacaataggaattctagttcctcatccatctgccttgtgctgttagttggatgatatggtttatctcacggctgccagcacaaggctgatgggagaagatgggcctgtctgaaactctttttgtgatgttagtgttgacctaaaatgaagaagctgagtgaagagtttatttgggccaagcatgatgattgcaacccaggagcatagaccaagttgctcagcggcagttacaagtggatttttctgatgggacgaagatgcg

SEQ ID NO: 211917 - DNA, 587 bp, Homo sapiens
ctcaacagatcatcttcgggtgatgtgctgcctcacatctcagggaatcttgttccaagataatattcatacccctttcttcaaaatacaggctttggttttccactccattgaagaactgctgaagaataaatgtcttcatatgttttgccaactttgccacaagctgctttttgcgtccagctggccataggtcttttttattccctcctgcctggccccccgtcccgagatgcctggaagccatcatgttgaatctctttccatggaggtctgtttggctggcgtttcttcttgcttcagactggaatgccgattagccagtttcttggaatgattttaatctctcatctctccagcccatccatttgaagtaactaataggaccacaatgtcactgcatgagctcaccctttccttgctcaagaacaacgataatacttgtcagtgattgcaacagtggaggacagtgttggtgccagcgttccagtgactatttcaaggattaattttagtgtttctagaaagaagtagttcaaaagtcaggaaaaataaatgaaaataaatcttaaacagatttctaatag

SEQ ID NO: 211918 - DNA, 535 bp, Homo sapiens
tgaaatttaaggaaataggacagaaagttaaaaggtatatataaatgaagacattcataattgttgatacttgtgaaaaacagtttaaagcaaataaaaatatctaataaatagcgaggtaaataatgtatcaatctaatagaatattatacaccaattttaaattattgctgtcaagcccatgtggtgacatggaaagaaatattttaatatgagcttttaaaaaacctaccatttggccaggtgcggtggctcacacctgtaatcccagcactttgggaggccaaggcagacagatcacgtgagctcagaggttcaatatcagcctggccaacatggtgaaaccagtctctactaaaaatagaaaaattagttgggcatggtgctatatacctgcagtgccaggtagtcaggtgtctgagacacaagaatagaatcgcttaaacctaggaggcagaggttgcagtgagctgagatcgtgccactgcactccagcctgggcaacaaagggagactatctcaaaaaaaaaaaaaa

SEQ ID NO: 211919 - DNA, 304 bp, Homo sapiens
tcagttccgcatgcagaataaaaatttcaatggaaggcacagtgggaggaagaaaacaatagctccccaaacccacagtcattgaatgttgtgtccaggttcagatctgggaaacaaagaactgtgagatgagagatggctgtgccaaatgaacaggatgcattttccctgagcatcactgcaaaaggggcccaggggaagcctgatctcaggccaaacacacacttttcctacacctcactgctcagtagctgaactctgtaaaggtgcaactcacttgctttttagttttgtcttcataaat

SEQ ID NO: 211920 - DNA, 221 bp, Homo sapiens
acttggacttgttactcttatttttcctttttcagttctatgttgcatgtatttcttattctaatctttctaaaatgctgatttcattccatctatttgcttgatccttgccagaattccctgcaagaggcttttagctttagtttggtcgtctcactatccctgatacaaactgttgctaattaccatctttatggcctgagggtttctgcttcattact

SEQ ID NO: 211921 - DNA, 688 bp, Homo sapiens
aatcgagctggtaccaatccgacatacacccaggcctggcagctaaggccttctacaggccagctcaaatcacccttacagccttatctctcccaatattccctaacccactctcaactccagctaaaatcaataatcagattacactctgctctccacatatgtcttatgctgacttccatatttctccaactatttcctctatctggaaggcacttcccaagacttgctaaggaacagaattaccaagggaacttttttaaaaaatgcctgggctccattcagtaattctgattccacaagacagggtaggactcatgaagtgatgggtggtggtctttttaacagatttagaaacagagatccaacccatcccagtcttctcaacacaaaaactcacaaatctctcctttcccacaaaaccccagccagaatggggctcccttccctctgagttcctgtagtgtttgatttatggtttctttcggctctctagtcaagaatcagatcttgttcccagtgttcccacctcctcctgcaggccatgcacctagtactaagtgagcagtcagtatttgaaagatagtgtggtatagggggaactgggagtcaggattaggtgtgacagatatcgggctctgagcttctgtctgggaaacaaattaagggaatgacatacaaatgtcta

SEQ ID NO: 211922 - DNA, 444 bp, Homo sapiens
tccttcccaggcccaccattaccaccccagtaattcagatattgcaactgagattatgcataacctcctaacaagggggtccccgcctctgaccactcacccaccctccagtctcccctgccctgccccaagaaagcatgcttatcacctacacaaaactcttccacacttgccctttatttaccaaataaagtccacacacccaggcctggcagctaaggccttctacaggccagctcaaatcacccttacagccttatctctcccaatattccctaacccactctcaactccagctaaaatcaataatcagattacactctgctctccacatatgtcttatgctgacttccatatttctccaactatttcctctatctggaaggcacttcccaagacttgctaaggaacagaattaccaagggaacttttttaaaaaatgcc

SEQ ID NO: 211923 - DNA, 494 bp, Homo sapiens
ggtttccactgctcacatgatcaagctagaacctctaccaggctgtcccagtcttctaggagcagcgcccccacctgcctctccagataataattatttcgtttctcctgatagagaacaagttgcctgagggaagaggctgcagacaaacaacagggtctgggcctgacagccatcacttgtcatctccctgggtccagggcacatgtctgtctctttcactgcccagcactgtgcctggtgcacagaaggctctcagtgactttctgctgaatgaacaaataagtgacagaagcaggggcttgacatttcactacttgggaaagcttagtgcttgttaacttcaggagacatggctgtgccttcccacaagggccagttgtagtggctcatgcgtgatatccctaacaatttgggaggccgaggtgggtggatcacttgaggtcaggagttcaagaccagcctggccaacgtggtgaaaccccgtttccact

SEQ ID NO: 211924 - DNA, 199 bp, Homo sapiens
tggacttgttaggaccagggagaagggggctgctagagggcagggacgctgtggtggtcagctgttgcagtgtctcctgcagtcctccacagcagaggtgaacgtgaggattctttgactggggaacagtgacaggtgatggtggcaattgaggctgccagaaacaggaagggtgttttgacctcagaatacttttcta

SEQ ID NO: 211925 - DNA, 325 bp, Homo sapiens
aatgtatattgatatgctcatagataaaattacgatatctaggatttacttcaaagtaattgagaaggctgggcacagtggctcacgtctgtaatcccagcactttgggaggccaaggcaggtagatcacttgaggtcagcagttcgagaccagcctggccaacatagtgaaaccccatctctactaaaaatacaaacattagctgggtgtggtggcacacgcctgtaatcccagctactgaggaggctgaggtgggagaatcacttgaacccaggaggcaggaatgcagtgagccaagatggcatcactgcactccagcctggg

SEQ ID NO: 211926 - DNA, 433 bp, Homo sapiens
atgcggctccatttttaaaactaattgttgccccagataggcgactacatctctggaagcagcagctccatgctggatgtggtggaagaatcgagagggaatggactggaagtttggaatcaccggaaaataacaaggcatagctaagctgtgactagcaagataaacgatttgttcgaggtttgattgtcctttccctcctccactcggaagacatagttgtctttttttaaatcatgttttgtaccgaaatatttttattttataattgaatccctgttgttgggcctttaaaaacccatagaaacattgttatgtgccacgaaggtgggaaacacggctttctcagtcattgctgtactcccacaattctgggtcatgcacacaatacaggtttagtaaataaaatccgtatgtttttggccccacgcgg

SEQ ID NO: 211927 - DNA, 709 bp, Homo sapiens
tctgcccacctcagcctcccaaagtactgagattacaggcatgagccaccacgcctggccttgaatttaaaaaaaaaaaaaaagtattataaacccaatatctacaagaaaaaaaaattgtcagacttctcacatttgacatgacagtataaaaagattaacaaattatctttcagtacagctgtataaacctatttcagtgctctggaattcaatcaaaggcataaaacaaactgggagcatttatttattaagttactgaacttcaggcagaaatggtggttttcagttttgagctgctaccagactcctgcccctcccccaatcccagctctgtgggtatcagtttaagcagggcatgctgctgcctgagaggactcgttggatttggagtgttgtcaagttaatggggcaaacacggaagactagtgggttaggccagggatataacaggtagttgtaggaggtgagacagccacaagaggcttgaaaagctctccccaaatcggttgactctagacgatacacacacatataagagactggaacacactcaagccactcatacatccttggccatcagaagctgcacatacagagatttcaagagaatctggcagagaacaaaagccagggaagaactgaaaatggcctgaagtaagaatgcacttccagctcacatacagatccattagtagagagctgaaag

SEQ ID NO: 211928 - DNA, 518 bp, Homo sapiens
gtatcagttttctagtatggatcagacttgggctaactgcattttattatttgacttttgagacagggtctcactctcttgcccaggctagagtgcagtggtgtgtgatcttggctcactgcaatctctgcttcctgggctcaagcgatcctctagcctcaacctccaagtagctgggaccacaggtgcaagccaccacacttggctaatttttgaactttttgtagaaagggagtttcaccacgttggccaggctgctctcaaactcctgagatctaagggatctgcctgcctcggcctcccaaattgctgggattataggcatgagccaccacacccagcctgaattaatagttgtgattagtagtaacaccaccaccaaataaaaaatcagtcatcacaaaccatgagattactttttctccaagttctctaccctccagtcacattccttccatctctccccagtttccaactcctcctccattactcctccctctcccttctgtcgtcttctc

SEQ ID NO: 211929 - DNA, 974 bp, Homo sapiens
attggagggaaggcgtcttggcgccttctcttcgcaccgttttccggagactgttagaggaagagtcgctttttcctgcctcccaggctgcccagcggcgccggttgccggggaacgcaggcgccgtggggagggatggcgggaggatactgcttaggtgctggagacggagttgagctggtgaagaagagctcgggctcatcatgaaacaacgaaaaggccaagggtctgggggcagccgtgggcgcaaaaaaagaggtttaagtgacatttctccatctacaagcctgccacctctggttgaaggccagctacgctgttttctaaaacttactgttaatagagtcatatggaagattgcaaagcctcccacttgtgtacttgtccgagtgagatggtggggagaaacatcagatggaaccctcttttgtcccagggatgcattgcagactgaaccaaaagctgtgagaacaactacacgttacgctattcgttgtggtccaaaacagtttacctcttatctaacagatatggctgtgctggtgctggaagtaatcaccaaacttgatggtcttccaattggtagagttcagatcaatggactagctcaactttctccaacccatcaaatcaatggattttttaccattgtttcatcaacgtctaagaaacttggagaactccaggtctcacttgccctggaacctctgtcagaaacttacgacagctaccatccacttcctaccactgacatgacagaaaatgtgcttttatctaagcagggattcagagagaatactgaacccagcagtacccagtttcaggttccatcaaggcctcgcgacatacataccatcaaaattgatggaaaagagttagcagccaacagcagtagatcaaccactccgaggggaaaagaccatgtatgctttgcagagaacactgtgaaaagtaggtacgagctcgatgatcat

SEQ ID NO: 211930 - DNA, 489 bp, Homo sapiens
ttctcaaagatctttgcatattctgcctctccttcccatgagctgccagaaacatggaccctcccagcttctccctctcatgcacacatatacatgagacacagacacaaagaaagacaaggacacacacacccaaagagactcgggacaaaaaaccacacatgcagaaagtgggagactcagagatacgcaccaaagagtcacacagaggcatatacacacacagacatgcagagagacccaggaaaagacacacacttatagacacacaaacccatgtgcaccaaagagccacacagagacataaaaacacataggcatgcagagagacctagggaaagacacacaaacccatgcacacacacacatgcgcagatacaccaatacctagttaattcccaaacatttttgagatctcagctcactttctcagggattccttcctgacatcagatttcttggctatgcaattgcagagaaccccatttc

SEQ ID NO: 211931 - DNA, 302 bp, Homo sapiens
attagctgggtgtggtggcgtgtgcctgtagtcctagctacttgggaggctgaggcaagggaatcacttgaacccgggaggtggaggttgcagtgagccgagatcatgccactgcactccagcctgggcaacaagagtgaaactctgtcctaaaaaaaaaaaaagagaaaaaaaactagtccagtctgcctggtgaactttcatttgtcctctggaacccatcttggatatttaagctctctgtggtactttccgtgtcctctcttctccactctgatacagcttcctcctacttatctctg

SEQ ID NO: 211932 - DNA, 410 bp, Homo sapiens
ctatgtgagaacacagtaaaaagatggctgtccatgaaccaggaagccagccctcaccagacactgaatctgctgaagacttgatcttgaacttcaccatctctagaactgtgaaaaatacatttctcttatttataagccacccagtctttggtatgctgctttagtagcccagactagctaagacatctgacatatcaagtggcatacataatttctggaaactctgatgctaaattcttgatgccaaaaggtggtaagatctgactcagaaatgaatccatatgagccttccttccacaataaatctaagagtcaaaaaatgccaaatataggtcaaagacctctaaaagccatacctgaaagatttacaataatgattgtaatttaatcacacaaacaaccacagc

SEQ ID NO: 211933 - DNA, 475 bp, Homo sapiens
gcatgccagttactgctccttctgagggaagaatgctctaagtaattctttaagaacaggtcaccactgtttgctatcaccactcaagccacaactcataagacttggaaattaactcctgagttgagatcactatctccgagctggctgtagcccatgaggtagctatgcactaccacagtggccagtgagaatgctccctattaaatcatgacccctacagttgctgcccctgttctgactgtgtaactgctgagaagttttctttacctagaagataatcctacaataaacaaatctcttttccctgacataacctgaacatgacttacaatcagaaatgacttaaatgaccagaacagggaaaacaaaggcttaactgggacattggatgtaattcaggggagatatgatggtggcctgaactgaggccaggaatgagcacaggaatgagattcagaaactaacaaaagga

SEQ ID NO: 211934 - DNA, 293 bp, Homo sapiens
cccctaaaactttaagcgagagaagagggagtgattctccttcggaaaaacattccaaggcctttaatgggcctctggatgactgcctggtgtccacccttgtactaaaccagtttccctgcaacttccacctttggttctagtcaacattaacaccttaccaggaccattcgattgggcaaatgctactatacacttggacaaatccagaggtcaattgtttcccccactggttaggttatgtgccaatcctccacctgtagtcacataaaatgtgacattttaccagcaag

SEQ ID NO: 211935 - DNA, 505 bp, Homo sapiens
gcctgtgtggactctctggtgaatgagaagccctgagctgtaactgaagcctttgccacactcagcacatttatagggtttctctccagtgtggaccctctgatggataaggaggtcggagctgtagatgaaacccttcccacacacgtcacacacgtagggcctctctcccgtgtggaccctctggtggctgtgaaggtctgaattccgccggaagcccttcccacactcactgcatttatagggtttctctcctgtgtggaccctctgatggatgtggaggtcggagctccggccaaagctcttcccgcactcgcatttgtagggtttctctcctgtgtgcagtctctgatgcatgagaagccctgagctgtaactgaaactcttaccacacacgttacatttgtacagatgctgccccatgtgaactctctggtgagcttgaaggtacgagttgtgactgaaacctttgccacacttgtcacactggtagggcctctcgccg

SEQ ID NO: 211936 - DNA, 486 bp, Homo sapiens
caaacctgtcagaccagcatgcattgggagagctgcctgctccgcacccttcttggggatctaggtgttttgtccagctggcacatttgcacttcagaggtgggaggggcacgtagcccaggagagtatgccaggggagagagcacagccaagcctggggccgtaagactgctcatggcaagatgtatttatgttctgtaatggaatgccatcactcgctattttggaagcatgatggcatggagcaactgaaagattgtgggatgggttaaaaaccacatccattactttattgctatgggaacaataaaggaactggagcaagttcctctctggtctttagttacctccttggtaaagagggaatcatagttccaccttgtagagttataacacctccaacattcatgtaggtactcaataagcagcagctgttattaacaaactttcttttttttccctctgtaacagtctaagatacagagt

SEQ ID NO: 211937 - DNA, 288 bp, Homo sapiens
aagtggctttggaagcaacggggttaagggagaggcaaaagggttgagcagagagaggcaagaggcaatctccccctacccaactgcccctcccaggagcagatacggcaccaacagccggcgagtccctccggcctggaagacaaaggaaggatcagggcccagtggtgacggggagggtgggggcaacgactcgcgtgagctcggagacgtgagaacgcagcccccgccccgttctccgcctcccctgagaaaggcggggcccccacgccgccccgagacaggtct

SEQ ID NO: 211938 - DNA, 331 bp, Homo sapiens
aagctcagcaagatgaagatgtcttaatatggtggtatcttggctggcagagaaacaataaagagaggcagccagcagatgataaaagcccctaaaatgatccccagggtttctgtggctttccttgtttgaaagtaaatttcctgttgtactaggacactataagcatgcttgattttcatgtgattaacaagcagaggagagccagttaagcgcctttgcctctcatggaggctggggttgaggaagaagagtgagctgtgatgacctgggcagtggtgctgtgatgatggcttctggatgttcttgttgggcaatgtgtgaagatgat

SEQ ID NO: 211939 - DNA, 144 bp, Homo sapiens
cagagagaagctgcctggactgctaatgcctgccccgccgtgaggccaagtcagagggaggcagccagcgtctgcagggctaagaatggctcgattcttgggaggcggtcacgtggagtgggatctgctggcatttcctccctg

SEQ ID NO: 211940 - DNA, 554 bp, Homo sapiens
gagaaggccaagcttttcctcttagctagtcctcaactaacctgctcagggtttggccacactcagcacctccacttcctcttcccagcgtctcctgaactgatttcaatcgggcttttgtgttattcttatcaaggtcataacttccaccttggcacaattctcagatctcaggttactcctcctctcagcagtcttgaatggtagatcccacagtctgcaggaagttgtggcccttgactgagcccctcttctaaatggaggccagtctgtgtgcacaaggagaggataaaggggaacgttctgagaaggcaagaaactcacatgttcactcctatgcgtggatgaacagtgggagaaaacgtgctcatggtcataagaacactgctttgaggacacaaagatgggagtgactgattctatcttttgtgtgtttggggagatggcgggcagggagcatgtaaacatgttctataccagagaatctgaagatgacggtgacctagagtctattaagacttcactagagtaggactcctcctccaccccaaaag

SEQ ID NO: 211941 - DNA, 424 bp, Homo sapiens
aattcagggacattcataacttttggcttgacttagctatgtctgtacctcctctgagggaaattggttgccagctgatgagagtaccatttcttctactgccatggagtcacactcctctgcctttcatcatgctgccaaactctgtgaagagtggatcctttggggaaagacatcttcctgtctatgtctatgagcaatcattttttggttgaaaccattttttaagcattggttttatattcgtgtacctaaatttatttccaatttggtttcattgatcacattactggctgattattttcatttctgttgagcttcccaccatgaatagtgccgagtatttttccagcactatttggtgagatagggaaaggttagggaggaaagcctgatataaattcagaaatggccattgtcctat

SEQ ID NO: 211942 - DNA, 547 bp, Homo sapiens
  misc_feature (225)..(225): n is a, c, g, or t
  misc_feature (371)..(371): n is a, c, g, or t
  misc_feature (392)..(392): n is a, c, g, or t
  misc_feature (396)..(396): n is a, c, g, or t
  misc_feature (399)..(399): n is a, c, g, or t
  misc_feature (515)..(515): n is a, c, g, or t
  misc_feature (531)..(531): n is a, c, g, or t
ctatagtgcttccaagttcacatgttcatcgaatgttaaagtaggaagggactttttgtgggactttcgcaagtcctttctcctttctgggctgcagtttgagaagctgccatgcagcccctagccccttccctcctcctggggcctccagcccctcacactgctgttcccagtgatatttgggatctgactgaagccagaggctctgtaaaatcagaccatagnggaagtcctcagccccctggccccttccgcaatctcctcccccagtctcccaaagagccatttcaacagagaagggaaatgacaaaggggcaagctggccagataagctaggatgagagcagagactcagtgtgtgggtgtccctncctgcttccccttcaggtctnggtntgntctgaagggacgttttatagtcactatccacatgccagtgtgaaatgggcatctatgacgtggtcaggggtgtccattcctaatcaatggggcaaaatgcccacaagcatttcaangggagtcttgggggtnggccacggccccccgt

SEQ ID NO: 211943 - DNA, 506 bp, Homo sapiens
tctcaaaaaaaaaaagcccgtaatgagaactctcaagagtaccatggtaatataatatggtaatagataataaaagagtcatgatcattaataataaatataatacttctacttcaactgaggaatggaaaactaaacatcatatgttctcatatgtccctaagctatgaggatgcaaaggcataagaatgatacaatggactttggggactttcagggaaagggtgagaagggcgtaagggataaaagactacaaattgggttcagtatatactgctcgggtgatgggtgcaccaaaatcttaaaaatcgccaaagaacttatgtaactaaataccacctgttccccaaaaaactatggaaattaaaaattaaaaaataagtataatttctgctttagcgatattaactattcagtacacaataagtgagtttagcaattcagtgatttctgactgttgggtagctctctttgttaacaaataaaatataaatttgaagaaaaaa

SEQ ID NO: 211944 - DNA, 755 bp, Homo sapiens
atcgggatgcaagatttttgagactcactggtctgaaactgcctttcctcttaaatttagttaagtatttccctgggcatggaattcaaaggtggttatgacttttcttcaggattgtgaatgtatttatatcctcccatcttacgttgctattgagaattctgaagttcttctgattcctgattctttgtatgtgtattcctcattccacaccttccccagaatgcatgcagaatttcttcctttctattttcttttctctttttctgaaactcttattattgggatcttctgcctcttggtttagggctctaattttccgacattttctctgctattttttactactttatttttctcctctactttctgagagatttcctcctcttgatcttccaaatcttgtactgaatcttttatttttgttaacatgttcttaatttccaagaactcttttttcttgtcttcggagtttcaacacttattgttgttttgtgcatgtattattttttcttctctctctgaggctatttaggaaattttttattgaagctcctcccccctgcttccttcaagttgcttttatctgcttttttatttgctttttcatgcaataagtttttctcacatgtctggtaactcttggggattaccaaaaactcatagaaaattctgaccatgtgagtaacacttgccaattttgagcttcatgatagaatgatctagctggaccttttgctgcggggaaatcggag

SEQ ID NO: 211945 - DNA, 949 bp, Homo sapiens
aacaatttcattagttttaagagaatttgtaatgctttttgaaacatttttatgatagctgctttgaaatctttgttagatcattctcacatctgattcatactagtgtagtatgtgttgatggtcttttttgattcatgcgattttcttggttctcgttttgatgagtgattttagaatacgtcctggacattttgcctaggtcttgagtcctcatcttgctctgtgtcattaagtcttaatgttgctgagtggaggttttattgctggttgctggacctcactgacactaattttgtaggggaatcagattactgcctgcttctgctggttgggaatggaagatagctctccactcagacaccttaatactgtcacagcagggaaattaaagaatggcctgtttctattgggcagggaatggaggatcagccctctgctgggtcttatagacactacccctccaggggaattgggtaactgttactgcttccactttgcaggggatggaatattagctccctattctgctttgcctgtacttctcagttgaggaattgaagtgggccacctgtttccctgggggtgggttaaggtagaagataaaattcccatggtcccactaaaactggaggactgggaagggaagggttgtatgtgattttctgttggtgtgttgtcagagcagggcaggtattgctagaaagaatttctgttgttaggccatcttttttcactgatcctttggccagggaaaataggcttttcttagcacttttttggggggacagttctgggttggaggcttgtctagcaccctcttggaatacatgagaggcgataaagaagggaaggagacttactgctatgttgttcctcaggtccttcattctgtagccagtccaccttttttccacctttcagagtcttcctgtgtttgttttgatcc

SEQ ID NO: 211946 - DNA, 280 bp, Homo sapiens
tggaggacaaaggtagtgagaacccagcacagaggtcaggactgtagtcaaatagattagcattcaggacagagtccagtctaagagcgggaaatcgccatatcacactagtgatgataataattactctttctttctccctttctgtctttctccctttctctctctctgtctcctctcttttcttgtgaatcatagttgttaataaacaagctaaatctatatagtgcgaaataaacatattcacatattctcaaaaaaaattactacttgttggatg

SEQ ID NO: 211947 - DNA, 642 bp, Homo sapiens
ttcattaaatgcatagacgagaacaccgtttattacaagaacacaagagatagcttagggaggctttccggaagcactaagaaatagaactagtttgtctaatttggaattaaaagagtaaccaactgagtgtcttcagcagtgacaatgaaaatgtaccacttcccattttgataattcaaagagccttaagaaagatcgttttgcttgaaagcactatttcacactgacactggtcattcataggcttcagataagaaaaactccagcagtgtccagatcaagccatcctgactttgtctctaggcggcttaacctcaagtcacagcctggtctctgcagcagagccaggcattccggagcctgcacggcctagctcttctggagcagatgggctcacttcccagggtgctgctagcttgcattcaaagtgacttcacatctcactccctcaggtggtcaggatgatgcccatccctgatctgacacaggcactgatgtccactagactctggccagcaaaaagccctctcacagaagaaggggtcaaaaagggctaaatctgagacagaagccagtttctcagatgtgctatttctgcctaagcatcctttcttgaacaataaaaaaaaaaggctgaaa

SEQ ID NO: 211948 - DNA, 839 bp, Homo sapiens
cgagaggcatggcttgggagagaagagaggaaaacaggcaggtgggatatccaacagctgaaaaagaagtaaaacctatagcccagccatttgtaattcacatatttagcttttataaaaagtaggctctctcggggtacgtacacaaggaacggatagcctatagggtttgttttacatatcttccatgattttagggtaaagtcagaaaaatcacttgtcatttacaaatgtatccttattttttttcttctaggaggctttccggaagcactaagaaatagaactagtttgtctaatttggaattaaaagagtaaccaactgagtgtcttcagcagtgacaatgaaaatgtaccacttcccattttgataattcaaagagccttaagaaagatcgttttgcttgaaagcactatttcacactgacactggtcattcataggcttcagataagaaaaactccagcagtgtccagatcaagccatcctgactttgtctctaggcggcttaacctcaagtcacagcctggtctctgcagcagagccaggcattccggagcctgcacggcctagctcttctggagcagatgggctcacttcccagggtgctgctagcttgcattcaaagtgacttcacatctcactccctcaggtggtcaggatgatgcccatccctgatctgacacaggcactgatgtccactagactctggccagcaaaaagccctctcacagaagaaggggtcaaaaagggctaaatctgagacagaagccagtttctcagatgtgctatttctgcctaagcatcctttcttgaacaataaaaaaaaaaggctgaaa

SEQ ID NO: 211949 - DNA, 540 bp, Homo sapiens
tttgtgttaccactgtgcaaaaccatggtcagccgccaaagaactcagctgaagatggtaagaagaaatcgacaaagaaaattttaataagggattttaaaaaaaaggaagaaaagaaaaataaaaacctgttcaatctcctgccttccacctgcactgatccccacaagagaaggagtagatgatactgaaacaaagtgatttcactgccagttcatagttctggggaaagatgagttagaaaggatcacctgaattggaggtagagtcatctgtagatttcaaatatctgcttcacttttgttccatgttactgtaaataattatcaagtgacagtaaagatttataaaagcatttaaaacaatgaataaggagagttggtggagttataaggtggttttcttggttcatgaacttgtttgcaaaagacgcatggccttatacttaaacatgatataaaggtccaacaaagctattacaatctaataataaaattatacaatgtttctttcctctatagctaatgcaggctttactta

SEQ ID NO: 211950 - DNA, 850 bp, Homo sapiens
gcatgcaccaccatgcccagctaattttgtattttttttttaagtagatatgaggtttcaccatgttagccaggctggtctggaattcctgacctcaggtgaacctcccaccgcagcctcccaaagtgctgggattacaggtgtgagccaccacacctggcctaattaatctctctttttcatttaagctcattctccattacaagttaagatatgacagccaagcgtttactgagggctaataatgcagatgactgaccccaatggcagccacacctggagaggtgccgagcacttgcaactctggtcagaggcttgctccaggggtgaggggtaggagcaaagtcatccagatgagtgttcatctctctgggaagaagagatcagagaggggtctcgggataaagtagaaccaaagaccttgaaggtcaggcaagcttcagagagacttaacacaggtagttgcccaaggcagaaactctcctctatttcaccccatcccaatttatctgttaactttacctctcaaatatctcttgaccacatccacttgtaaactgccctcttcccacattgtagctcagctaccaccactccttccttcctggacggttgaagcagccttctctcaacgttctgttcctacacactcactgttctctaacccattctccatgtggcagtcagaaatgcaaaactcatccttcccttctccattgcaaacattcaaggacttcccattgtctctaggattgagcctaaacattttaatccttatgtcaaggcttaagctgatctatggctcttcagagcggattggtcccagatgttagcatggggcccgggctcg

SEQ ID NO: 211951 - DNA, 447 bp, Homo sapiens
tgatgcacaccctggggtgagatctgaatttgagactagccccctcagagaagtcaggatagtgaagtggaaaagagcgagtggtcattgccacacagaccagggtttggatttcagctctgtccacgtacagcagcatggtcttaggcaagctgctaaaccctgcctctgcttcctcatctgcaccacaggcaccatagcaatgacctcacagggctgctctcagcactaaatgcgatcatgtggatgaggcatgtggcaaatgcctggcatgtgagtacaccgtaaatgttacatcttgggtgtgagtatgtctgtgtgtgttttctgctgtactgttatatatggatagaatcctctcaagaaaagtccaaggcagaactcaatcaagaaatgagatggcagtgctctattatattagtgtaatttggtaataaggaaaccaat

SEQ ID NO: 211952 - DNA, 762 bp, Homo sapiens
  misc_feature (537)..(537): n is a, c, g, or t
ttttgagacagtctctgtggcccaggctggagtgcagtagcgcactcttggctcacgggagcgagccaccacacctggcttccgttcgttgcctgtgcttgtggggtattactcaagaaatctttgcctagtccaatgtcctgtagagtttctccaatgttttcttctagtagtttcagcttgaggtcttaaagtcttttaatttgatttttgtatgtggtgacagagaggggtctagtttcattcttctgtatatagatatccagttttcccagcaccgtttattgaagagattgtcttttccccaataaatattcctggtacatttgtcaagaatgagttcactgtagaggtacctatttgtttctgggtccattctgttccattggtctatgtgtctgtttttctgccagtactatgctgtttttgttactacagctctgtagtataatttgaagtcaagtgttcccccagttttgttccttttgctcaggatagctttgcctattctgggtcttttttggctccatgtactangagttacatcttagctgtgttaaaaatgaatttttactatggcagatatggtatggatcgtaaaattttaagcactaaaaattttttcataacctttcataataaagtttaataataggtttattaactgaatttcattagttttttaaaagtgtttttggtttgtgtatatatacatatacaaatacaacatttacaataaataaaatacttgaaattctcaaa

SEQ ID NO: 211953 - DNA, 558 bp, Homo sapiens
agtgatcatcattagtactgagaaaagtcaaaatcatatgtcacctaataagatacacagagaactcagtatagcctctgtgatattcctggcaaagatacatgacctgtatctaataataaggaagcataagctaactcagattgaggaacattctacagaatggttttctggtaatcttcaaaggttttaagatcatgaaagtcaaggaaacactgagaatgttacacgatcgaaggagattaaagagtgatgacttgggtgattctgaacctgatcaatttgctatgaagaacaatataaagatcactgaaaaaacttgaatgggatttaaagattaagtggccataatgaatcaatattgattttctgattgtgacttttgaattacagttatgtgggagcatgtacttagttgtaggtaccctaaaacttaaagtaaaaaaaaaaatagaaaaaaaaagaagacacacgctaataaatttaacaggtgatttataagaaatgttttttgctagaaattgaaattctcaaattaataaagttcataagagaaat

SEQ ID NO: 211954 - DNA, 410 bp, Homo sapiens
tgagcccctcccaagctgcagagggagggagcaggcgtggctgtcagcaccgaggtagcagagaattaacattcttgtcagcagagaatgaagcaggaatataattaaaactttgcccttggaatagctgattcatttgaattttattccacacgtttgaaagaggaaagaaaatgtgaagacttgcagcctggttctcgcctggcctgggctggcccagctgtcaggcccggttcctttctgagcattcagtccactgatgttgactgagggccaggagagaccctcagcagggtattaccatatcagcctcctatcgctgctgggagaaattaccatgaattcagtggcttaaaacaacacacgagcctctctgagcctaccctggctcaggacgctgcccaatttta

SEQ ID NO: 211955 - DNA, 487 bp, Homo sapiens
aagtctgagcttcctcatctggagaggggctggcctttagcaggctccatacacattcactcacctcccatctttcctgcatgccagtgtcaggatagttctgcccttctgtgctcagctgggaggaaaggatcttgggaagtcagctagttcagtagtgagtacgaatagtgagcgtgaggcctcattgttaccttgtgacatttacagttcactgtattggggggaatctgggaattttaaaaatatctgtccattgtcatttagaaattattgtggagggggagttgcccaggggctggcctttaaaagacctagtgtaatatatcaaagatgtagtctgctagatatgagaattgatggccagagttcctctctgaaaggtcactggatggaaaagtagttttgtgtctttacaaaaagaagcacatgatggagttctgagcaggctaagatgcgtgtaaaatgtaaatgctgagaaggacgc

SEQ ID NO: 211956 - DNA, 455 bp, Homo sapiens
ttcatctgtgttaccagagttggtatgctggctgtaatgctgaaaagtcagaagtaaacgcgttccccgggacccagggcatgcgcttcatctcagcggcttcttacaaggattgggtgcaagtgctgcagcagaaagatgtttccaggaacatgggaaccaaggctaggtctgcatcttctctgaaaaactagcctgttgtttctcaaacacacatcaacatagcctgatatttcagagaggaagggaaggtcggttacaaacggtatcgccatgagccgcaaacgaatggaagaaattccacgttaaaaaaatgtgaatttcattccataagaaaaacctttagtacgtagctcagaaaacagtcaagaggcccatgatcatctcggttcaggaaatgctaggctgctggagacagccttttgtttaacctcataaacatctaacaaacacgg

SEQ ID NO: 211957 - DNA, 563 bp, Homo sapiens
atgctttattctcatgatgatctcctatttccaaatcttctcaacggtgctcagaatcccttcaggacagagtcgagcaaaagccttctccacctgctccccccagctcattgtcatcatgctctttcttaccacagggctctttgctgccttaggaccaattgcaaaagctctgtccattcaggatttagtgattgctctgacatacacagttttgcctcccttcctcaatcccatcatatatagtcttaggaataaggagattaaaacagccatgtggagactctttgtgaagatatattttctgcaaaagtagaacatcctggtctttactatagaagatctgcaacaaaaccccaaaaaagcataaatactttatgacaaaaaaagatgaaaaaattgttgatgaaatgatgaaaaatcctgaaaaaaaaaacctgttgaatgggagaaagacaatatttgcactactatatgtagatagaaatgcaaatgtttcttcaaaaactaaaagtataaaagtataaaagtaccttcataaaatatttcaaggttgtgtaact

SEQ ID NO: 211958 - DNA, 413 bp, Homo sapiens
tatgaaaagtacttttgtttttctcagccccttaatgatttaggagattcaaatgtagagctatgggtgaatttcttttcatatgatcattggaggatattttttttctccagaatgagagaggctgagatcgattgctaagagagctcttaggacgagaaattgtaatatttgactttggttttcaactctctaagaagggatatattccctccttatggcccgtaagtgtttattcaaggtatttcatatgcaacagatgtttatgcatgtttactttgggaaggaggtgaagaaatttcaaggagaaaataatttaaaatgcagactaggaatcagtaagcacagggagtctgaatcagtgatgatcatgaaaatgtccatcacagatcacagaggatttttagggcaat

SEQ ID NO: 211959 - DNA, 761 bp, Homo sapiens
aatgagccaagaattattcctgtatactatcccctcagttcatctaggcattacctccatttcctcatgttttacttcctcctgtatctttagaatccaatctcagatgtcactgatgaagttgttgcagagaaatatgataacagctgtctagacctatcagttattgaattgagatgtcctgtagcctttgatacagtaggtcattttttgtttttgcaagaatgtaatcccgtgattctccatgtgcttccttgaatggggtagaaactgagctcattttcccctcccttttatgcttccctatagtccaccaaagtgccactgtcatcctgttccatcaacctcagggttattttcagccttttcctcttttgctttttatattaagtacatcaacagtacattatcctctgtgtctcttaaatctattctttccctgagaatttatcctcttgcttatcatttatcatatactgcctttatatgttaattaacttttcatttactcatgtctgttactcccagtaggccataaactccatgaagacagagttcatatcccacataagaatctgagacttatacttaatttataagtgactcgtcactttgaatctggggagagacactgagccacagtccccataggaactgttttcctcttttcgcccatgtgaaaatgcctagctaatggaggttccagtgagccgagactgtgccactgcactccatcctgggcaacagagtgagaccttgtc

SEQ ID NO: 211960 - DNA, 631 bp, Homo sapiens
aattgggcaaaagggttggacagatcctttatcaaaaaaggatctatgtgtgtctaataagcacatgaaaagatgtatagcatcattagtcattagataaataataacttaaaaccacaatttcataccacatgccactcactaaaatggctaaaatttaaaactcagaaaataccaagtgttggtgagaatgttaactagcctggaactctctcatatattgccggttggagtgtaacattttacaactaccttggaaaactagaagtttcttaccttatgacccaccaatttcactcgttattacctgttaaaacccaccaatttgactcctaggtagttacccaagaggaataaaactatatatccaaaaatgatgtgtataagaatgttcacagaagctttatttgtaatagtcccaaactgtggacttgtaattaccatgtagttatttttaatttttaaaaatccagtccagtaatctttgttctttaattggagtttttaatacttttacgtttaatatattactgataatgaatttaaatttaccatctatttgtttcctcttggcatcatctgttcttttttgttttttttagaattggtgttaattaaatatttattttat

SEQ ID NO: 211961 - DNA, 582 bp, Homo sapiens
cacacacacacacacacacacacacacacacggactttccatcattaacaatagggagaaagaggatgccaaaaaattacccatctgtccagacaaccaacgccaatggaatccatctgagggctggcagtgacacaaaatcgcaaattcagaaatacttttaagccccttgcttcaaaattatatgtggctttcactcatgtaggtgcagaggaaaaaagaaaggattgaaattttaacttgcgttcatctggttgggcctttgagggaaataaattattagagaaggaagtaccctaacgaagggagccaccaaagaccagaaggcactcaggaataggacccagaagacctggaccccaggaccaccgcagcccaggaccaggttgcccattgtgggaccctgtatggcaagtcacattcctgcttccgcttctagcctccccatctctgcaacagtcatactcttgtaagctcccatgccttggtgagaagggaatggataggcaaaggctctgggctggggaaatggccaggcagccatgagcagccagtgctgcattatccttagagttgcagaga

SEQ ID NO: 211962 - DNA, 394 bp, Homo sapiens
actgtgaccatcccagttcaggtctcatcactttgtgcctatactcccagcctctgcccttctctgtcaccaccaaaacactttctgctaagatagctcttaccgtgtcacctccttgttcactgtttacagcatagtctttggagttactatgggatttaggacttataccacttgggccctaatctacctctccatttacttttcccattacacagtccttctcttcatcaaaccggatagtccaccaactcttaaaatgtcatgccttgtttcatcctagctaacctaccacttctgcctagaatgtccttcctacctttcccttcgtccctttctttttttttttttttttttgagacggtgtctcgctcttgtcgtctagggagtgcag

SEQ ID NO: 211963 - DNA, 324 bp, Homo sapiens
tcttgtgtgaagacgggaaaggaacaacaatgaattactatggatttttctttttaattaaactgtgttgttagtttctgatggcattttgattgcttataattcaggatgttttccatttcctttttatacagaattgaggcttgtgaatcagggtgagtcagccacccacgaatggctaaaaaagtggccatttatctgttggcagacttattggaaaattagtgttttaattagctacagaaatagaaattaagcctggacaaaccagtatttgtttactgagtaaaaactcagtaaaccaatgagtattttagttgtata

SEQ ID NO: 211964 - DNA, 371 bp, Homo sapiens
cctttcagctcagctttcctagaagggctttgacagatggaagaggacttgtggaaacaggcccaagctgactcaaagatgagattggagaacggctctcccttcccccaccagaagggggttactgaaggtcatctcatccatccccctgcctccatacacagctgggtcatctgagcataggctgttctgcagacactaccaatgtcaccaaagtgggctggcatctttccccctttccacaccctctcactactgttgcctcctccacatagccccagggcaaccattttaaaagcccaattagatcctacctaaaatctttcaatggctcctaatcaagtaataattaatacagtccagaatcttta

SEQ ID NO: 211965 - DNA, 419 bp, Homo sapiens
tcaaagaagtgggtgatctctcattatcaggataattcaagcagaagagaatgagatgcattgtcagggagggcttggtatttttacacacaaccccagtggagacctaaggagactcaggagctaaagaaagcattctgaggaaacgctcctctcttgagttccttacaagggatttcatcccaactgatattcaggcaagaaaccctagctttcccaacctccattctgagaggtgctttttctttaaatgacgttaatgggacattgtttcttctttttcaatgaaacctctgtaagagacaacctccattaaaatatatatatatatatatatatgtatatatatatatatatatatatatccattgggcctgaggtgaaagaaataaaaagcaaaagtgaaggaaaaaaatagg

SEQ ID NO: 211966 - DNA, 388 bp, Homo sapiens
aatattacctcaagataatagattccgtctggaataaagctctgcaaggccctaaactgtgctggtggcatggttattgttctattttcttaaaccatttaaaattagatttggccaggtgcagtggaccacacctctaatccagaactttgggaggccaaagtgggaggatctcttgaggccaggagttcaagacgagccttggcaacatagtgagaccccatatgtacaaaaaataattaactgcatgtggtggtacacgtgtgtagtatcagctacttgggaggctgaggtgggaggatcacttgagtgccagaggtcgaaactgcagtgagccatgatctcacccttgcacttcagcctcagcatcaaagcgagaccctgtctc

SEQ ID NO: 211967 - DNA, 636 bp, Homo sapiens
gtacccaaacaaagcatttgccatctgcatttgccagagtcactggcaggtggcagagtaattgaactttcactctacatgtttttgtttgtttttctggcagtttactcaggataccactcatgtattgaaattttatttcacttgattccagacatctagagaccgcatcatttctgtggcacccaaacattcgggaaaagaggcagatgtaggtcattaggatttctctcccctgtgaactttttctgaagaaaaccattttctctctggtttctagccagagaggaaagcaccaattttaacatctcctaaaattgtgagatggatattttaggttttgtccttccttactcttgtccattcttccatctcttatattttgttttctcttccttgatttttctcatctctggctttactcataaattcatgaataaagacgtgattcaggttattaatgagaagagttttatcttgaaacattttgcatgtttttaaacattaaaattttgctgtgatatttatcacacatgcacgtatataatgtatatgtacaatttaaagaagatgactaacgatgaaaacacatttgtatatccctacacaggttaagaaatagaacattactaatgc

SEQ ID NO: 211968 - DNA, 535 bp, Homo sapiens
cactgaggggcaaggggccaaagggcactagacccaagtcaagacggatcctgagtctgcacacctggctttgctgcagcggatcataaggacatgctccctatggggaaggagagaccgactgcttttgctgccacagccaccacggccatcacagctaccacggccgccactgccactgccactaccaccaccatcacaaccatggccgccactgccactgccacctcctccctcttctccttgctctcctcctcctcctcttcttcctcctcttcctccctcttttccttccgtctcctcctccctcctcttcctcctcctcttcctcctcctcttcctcccaccttctcttcttcctcttcctcctcctccttcttcctcctcttccttcctcttcttctttctccttcctccttctccctccccctctttctccctcttcgccttcctttcctgccttcttctcctcttccttttcctccttcctttttcctttccttctccctcctcctcctctttctccctcttcttc

SEQ ID NO: 211969 - DNA, 684 bp, Homo sapiens
gatgagcaaacataactcatattctccattattgagttgtactaattcattggacaaaattgattgaaccaggcagtgtgctgaaaactgcatcttatttatgcttttgataaaggtgtgcttaattgtgtcagccttgttacaagaatatgttagaggagcacagatatcataagcaaggatacgtgctataatagagagagttctcatctagaaccgaggagaatggtattatttgctcattctctctacctgtgttattttattctccaaaagccccaaataaaattcctgtgtttaaattaattaatcattttgggctttgaacaagcacaaaaattaaattaggtaggtgtctaagtaggaaggaataagcaaaatcatttgggtataaaaccatgaatctgcctttaaagggatgtattaacctgttgaaaaaaatacatgacaggggagtcactgaatgttttcttgtgtcacagtgactataaccttacggtcgacttatgtttgtttgttttaatgcatattggtttctacaaagctaaatttatgttataaaaattattctactttacacatctaaagtaatgatcactgtctgtcaactctctggagcactagtttttctctgactttgagacataggataggtgcttttctgattttaattccttctatttt

SEQ ID NO: 211970 - DNA, 2611 bp, Homo sapiens
  misc_feature (1286)..(1286): n is a, c, g, or t
cctaagtctctgacatcttgtacaagaccgaagacagacaatggaaaataaatgatgatcatcaagtgtctgccaaatgctttctcttatccatccctggagcaccatgttcctctgctttgtagcactattcagaggacttgtgttacttccatttgtgagatgattttcttattgtaaatcttcttccactactttgtgaactcaacaagcagagggtgtgtgactgtcatatttgccattctactctccagcactgcacagtacctctggcacataggagatcttcaataaaatttgctaaatttatgaacaaatgagtagcttaaatgaagggaaccatgcctaaattaaagaaagactccatgcagtataaccaagtcaaacaaattctaattctgaaaagaagatagagtacatgtgctctggaacatctctttgggtggggtgttgggctgtttcttccaattatatcactcacagcacaggactgaaatgattaggactttctgacaagttcagctttgtgttactttgccttgggctcaggagacagaagtaatcctaggaaattaacaataatttatccagttataggcactggagattaaaaataaaaatataaaggaaagtaagcaacaacctctgtcatcgcaacatgcagacaggcagcatcatttttccaagaagagatgccatcctttatatccaagacccaagttatgtgcatgacttcctttatcctatatattatctttgccaaattcttccctaagacctgaagaaagggtttaagaaaatttattatcattattattttttagagacagggtatctctctgtcacccaggctggagtgtagtggccctcgctgcagcctcaaactactgggctcaagcaatcctcccaccttggctccagaagtactgaaattactggcctgagccaccacgcctacccacgggtataagaaagttaaatttgactgataacactgactgtgtaatctttaacaagttaatttatctgtgcctcagtttctccacctttacactggtgataataacagcaaccacttcccagagttattgggaggataacatggattaatattggaaagtcctggaagttgtacctgggacatagttagcactagttaagtgttggctattattaataattactataacacaaaattagtgccttaaaattttaagagaggtaaaatagcacaccactttagtagaatttcttttttccttaggcactcagagggatagaaaaangataaagatgacactcataacatgaattcagaagaacatttgatacattcttccatattattcttaccttcagtggctagacagcatttagagatagtgctactaaataataattatcttaaatagatgaaatgtcagttaagctagacacagtatcatcctcttcattatacttatagagcaattcacaataacaagctttcacatatatctcatttaacattataataaccctgagaattattaccacctctatctttagaggaaacaaatgaggctaatatagattggataactcacacaaagtcacacatctaattgatagtagcaccaaaattcaaaccagcccttctgaatgtaagcctagtatccttctaaggaaaaaaaaaaaaagttgccacaattaaacaaaaaatacagaacaaaacggtgagctcaagtgcttctttaagagacgttttttaaacggacaatttcttaaaaagagtttcatagccctaaaataaacctattttaagaaactcatttggaaacattttaataaagagtattaggaagtatgaaatatagtgctttgaattttccaatttggagtagtcaaatatcactgctaattgattcctatactatgagctagcctagtaagtaattactttgatctctcttaagagtcagggctacctaattagatggttactgaagtagccactgaatgaggtattggtaaaatcaggattaacacatattctaaaagctactcaactcaaagcatctggctcaatatgttctcaaagacagatatggtaacatattcttacatataattataaaagcaaggttttcaagtaatccaaacaaacaacaaaccaaattccaccctcagttcttgcctatgcttacaaatatttagcagtaatttacttgtgcgtatttttacaagtttatttttcaatgaaactctaatctataatgaaaagtcttccagtcacgccaaagcctaattcaattgataaataacattttgatatagatttaataatcattaacttgtgaggttttttttttaatctcagatttggattcttactctacctttgccacaagtacttctttataaaatccaaatgcctattctttaaaatctctttaaaacaagaattttagatcccaagagataaatcaaaatggagatcaattttagcttctttcaacacagatttgtggatgatattgaataattgcttcttctagactgtgttaaatggtgaacaaaatgaattcatttaagtaaatcttgatctctatttgaacatatataaaattgc

SEQ ID NO: 211971 - DNA, 450 bp, Homo sapiens
aggaatcggttcatccaaaggacataaccattgtgaaattatatacatccaactctggaacacataaatacataaagcaaatattaattgacataaatagaaaaagagatagcaatgtaacaatagtagaaaaccaatactccactttcaacaatggatggatatacggggcatgtatttcagaagctacaaagtaacagttatgtggtataaacaagtctagagatctaatgtacaatatgagaagtatatgtgaaaaatggtatatacaggattcaagctaaatggagggattttatctgctcttgccataaaacacacaaaaagtgggtatgtgaggtgatgaatatgttaatttgtttcactatagtaattttttgctatctatatgtatccaataacttggtgtatacctgacatacacacaataaaatttattttttaaaaaat

SEQ ID NO: 211972 - DNA, 629 bp, Homo sapiens
attggagtaacccacagactcatcaaatgtcactattatctgtgcagttcaagtacctgtttcccaagtttcttttattctcatcacatcatgtacttgaattactcatatttctaccaaaaaaagttctctttttgaactaaaagttgaataggggtctcatagcactcatttttaagactgagaagagaaaattttatgaaaaaaatgtttcagaacatattctaaattcacttgccaaagactagaagacacaggcagatacttgttaaatctatcccagtgcctttctgtactactgtgaaaaccaatagcaatgttattgtctcacacaatactaccaatactcccaaatgaaaaagaaataatatttcctggccaaggaagtagactccaccctattacaggccctaacaaactataaagatcataacctaatgttgcatactctaagacagtaatgtatctggttttgttactaaaatgaaggacactagcgcatttaattaacggaaattggtaattgtccaacaaagcaccttaagcatcagaaatgcactgttgtgtaggataaagaatatgggctgggtagacttggattccattcctacctctgcaattactagctg

SEQ ID NO: 211973 - DNA, 571 bp, Homo sapiens
attggagtaacccacagactcatcaaatgtcactattatctgtgcagttcaagtacctgtttcccaagtttcttttattctcatcacatcatgtacttgaattactcatatttctactaagactgagaagagaaaattttatgaaaaaaatgtttcagaacatattctaaattcacttgccaaagactagaagacacaggcagatacttgttaaatctatcccagtgcctttctgtactactgtgaaaaccaatagcaatgttattgtctcacacaatactaccaatactcccaaatgaaaaagaaataatatttcctggccaaggaagtagactccaccctattacaggccctaacaaactataaagatcataacctaatgttgcatactctaagacagtaatgtatctggttttgttactaaaatgaaggacactagcgcatttaattaacggaaattggtaattgtccaacaaagcaccttaagcatcagaaatgcactgttgtgtaggataaagaatatgggctgggtagacttggattccattcctacctctgcaattactagctg

SEQ ID NO: 211974 - DNA, 254 bp, Homo sapiens
accccgaatctaaaaaaatataaaaattagctgggcatggtgtcaggtgcctgtaatctcagctactcggggggctgaggcaggagaatcgcttgaccgggggacgcagagttgcggtgagccaagatcgcgccattgcactccagcctgggcaacagtagcgaaactctcattcaaaataagtaaataaataaaaaataaaaaaactaggatcatttctcaaataaactattggtttgtcacttaattgattt

SEQ ID NO: 211975 - DNA, 411 bp, Homo sapiens
ggctttctgatcagtggtaaaagagtatgtcacctggggacaagaggatgaacagagtcctgctaaaggccctgtgtgctttccagcttgactgcagtgagtgaagaaatgtaagcactgtaaggagtactgcagatccccaaacttctgatatgtcttagcccaatgatgaagtttggatcatttttttttcctgaagcaaaaggaaatcatttaagggtattaaacagagatgtaacatgacccattttgcccttaaaaatatttctagttgtggtagggggataaattagagggagccaaccaggaagaagaagccacctgagagggctgcagtatcctagctcctagcacggaggctaaggcaggagaatcgcttcaacccgggaggcggaggttgcagtaagcccg

SEQ ID NO: 211976 - DNA, 494 bp, Homo sapiens
  misc_feature (420)..(420): n is a, c, g, or t
  misc_feature (450)..(450): n is a, c, g, or t
aacaagatatgtcaaaaatactgtactgcttgcattaaagataaaatttattttgcatttcctttccaaaacacaaactgacaacaactctgctaaaacagaagaaaacttaagttataaatattagcatccagttggccaaatgataaaaaactaattatgaaccagatcataaatttgagaaccagtgataggacgaaaaaggcttgattgttgcttaacatgtccactgaggggacagtgtccacttggacagttttatgattgttatgctctttggcataactgaacatgaacttggtcaattcaattcagagagaaattctaaatcaaaagtaagcatcggccacaagaggtttttcaaatatttcttcaaaaatataaaataggccaggcatggtggctcttctgatgattctntattgcaccttactctccatgatacccagnagactcttcaatatcaccagcgaatgacgtattacaccaaaact

SEQ ID NO: 211977 - DNA, 691 bp, Homo sapiens
aacaagatatgtcaaaaatactgtactgcttgcattaaagataaaatttattttgcatttcctttccaaaacacaaactgacaacaactctgctaaaacagaagaaaacttaagttataaatattagcatccagttggccaaatgataaaaaactaattatgaaccagatcataaatttgagaaccagtgataggacgaaaaaggcttgattgttgcttaacatgtccactgaggggacagtgtccacttggacagttttatgattgttatgctctttggcataactgaacatgaacttggtcaattcaattcagagagaaattctaaatcaaaagtaagcatcggccacaagaggtttttcaaatatttcttcaaaaatataaaataggccaggcatggtggctcacgcctgtaatcccagcactttgggaggctgaggcaggagaatcgcttgaacccaggaggcagatgttgcagtgagccaagatcatgccattgcactccggcctgagtgaaagagtgagactctgtctcaaaaaaaacaaaaacaaaaagccatttttgacaagaagacttcattagtgttggtggttttttttcccccactcagatccttttaccccttatatactgcaatacatatatctaaaatatgtgatatttaacatatgtaagatacatgttccatat

SEQ ID NO: 211978 - DNA, 402 bp, Homo sapiens
ggagactgaggcaggaggatggcttgagcccaggaatttgaggtagtggtgagctatggtcatgccactgcactctagcgtgggcaacagagtgagaccctatgaaggtttttacctcagtacaaacagttgagtcactcatactctttagttcttactcctcagtgtcattgctgtgagagctctgctgttatttaattaatttgttaattcccatttatctcattcccatacctgccaccacagttctttgtaatttatgtatgtttctttttctatgagttgcatagtgtgtgtgtattttaagtaaatggtatcattgtctgcattgttctgtttcttttcccactcagcatcatgatgagtggtgcattttagggtttctccctgttgctgtgtgta

SEQ ID NO: 211979 - DNA, 771 bp, Homo sapiens
gcctagtgaagaaatgttttaaagttttgagggaatgattgttgtctccaaatgtctgaaggaagtacctgtagaagggcattagtgaaatagtttcctcccactgacagcaaaatccatgagaacagggaatgtgtcgtgtcattttatcttcagcatttgtggtacagattaggcactcagtcagcatttattaaatgatgaataaacgaatgaataaggtacaaaagtcagatttgggctcaagtacaggcagaccttcataaaaggagaattgttcaaaaatggaatgccctttctgggtggcaagttttacaaaatgtagtccataaaaataaaatgtggataaccatcagctgggtttaattctaagatttcctgatttatgcatgggacttccaatgagttactaaatattttctgggccaatgggttctgaaagttatacccaagtatgaatgtgattgataatcacacaaactgcttcaccagtgagattatccagtcatctagaaaatcatagtattaatccagaggcctccagaaaagaagcataaatagaaaaattcaatccatcattactgccccagtctcatttcaaaatgtttttcaaaagaaaaacataggaatgataacaagatttcaaagtaggtattctattaaactctttcaataaggcacttcaaacaatgaaaagtatgttttatgtggagaatacaattgctcatgaaaatagacaaataaaaacaacaaaaatctatcctattacag

SEQ ID NO: 211980 - DNA, 857 bp, Homo sapiens
aagtgaatgaaaatcaagagaaagaatgagtaacagaaagaacttgaggtgatccagatattggaactcttagataggcttttaaaataaccgatttatgagtttaaggaaacagatgaagagatagagagttttaccagagaactggaatctataaaatagaatcaaatgaacattttattttattattttattttattttttattttttgagatggagtttcactcttgtcacccaggctggagtacaatggtgcaatcttggcttgctgcaacctccgcctcccaggttcaagcgattctcctacctcaggctcctgagtagctgggattacaggcacctgccaccaggcccagctaatttttttttttttttgtacttttagtagagacggggtttcgtcatgttggccaggctggtctcgaactcctgacctcaggtgatcctcccaaagtgctgggattataggcgtgagccatggcgcctggccaaatgaaaattttaggactaaaaatacattagcttgagttacaaactcccaagcatgtgtttcacaaccactcaacacggaaaagatttgtgaattagaggactgatcagtaagaaatatctacagtgaagcaccgagaaatgaaaggatgaaaaaaatacagtgtagtggagacacaggacataatagaggggttaagacacatacaattgggttatactaagagaaaagagagggctaggagtgtcataagtgctaaaagtcaaggacagcaaaaaaaatctttaattgctagagaaaaaagatactaggttaagaggaataataagattggcagccgatttctcaatagataacaaaaagagg

SEQ ID NO: 211981 - DNA, 303 bp, Homo sapiens
gtgcttctgctccgactgcttttcccacgggcgtcatctatagtccggaggacagccccagggcagaggcctctgtttttccatgtccgaagactcaaagattctcattagtcatccattttttccctccgttctgctgaatatcaacctgaactttttttttgcatcactgggcattatcatttcacactttgagttcctggagctggaagtacagaatccaaaaatatgtttatattttcaaatttctcttccactccaatgtaaaaataaactgacaaatgtttatatgttaaaaaaaaa

SEQ ID NO: 211982 - DNA, 419 bp, Homo sapiens
atgtgggtaatagaggtttgaaatgtatacagccagaggctggactctaggaaattcttccaaatcttgtagcttatacatgaaataaagttgacagagcttttccccattttaaaatatatcaaaaatttacacagcattataaataatgagtcgtgatgcagaagtaaagtttttctaatattaataatagcaaaaaaatcacttatgataggaaggctaaattattttttataaaaaatgatattgtataattcatgttatttgaagtgacaatgaaaaggtctgaagacaaaagacagtagtatagcagtgtgttatgcatttaatttatagttttttagattttgtgatgcttgtggtattgtgattccttttctctttctaaataaacgtttacttatatacttacttttaaa

SEQ ID NO: 211983 - DNA, 444 bp, Homo sapiens
catctgtgagtgttgtttcagaataatgggtgaagaaatcagactacattgggttccttaatttaaggcactatgatgaacaccttctgtgctgggtgctagagtccagaatctgacataatctctgctctcgatacagcagatttgtggcagattgaaaagtaggccgggcgcggtggctcacgcctgtaatcccagcactttgggaggccgaggctggtggatcacgaggtcaggagttcgagaccagcctgaccaacatggtgaaaccctgtctctactaaaaatacaaaaattagccaggcgtggtggcgtgcgcctgtaatcccagctactcggaggctgaggcaggagaactgcttgaacccgggaagcagaggctgcagtgagccaagatcatgccactgccctccagcctgggccacagagcaagactctgtctta

SEQ ID NO: 211984 - DNA, 438 bp, Homo sapiens
aggctcttcttcatcagctagactgtctttgccttgacaagccagagcccagtgtttggagcgaagcccaagttaaatttgatgagttatgtgaccttggacaaattcatttcatttctctgatccctgagggtggtgaaaacaatcaaaaagtgcttccaaataaggaataacatttggctcagagagctctctgcagagggtccagaaagagccacccactttctggagaattctttcatcttcagaattcccaatgagacaccgaggagaagcctctgcagcccccaatcctctccctggaggtctgttcatcctaatggcttctgtcctttctaagtgacacgtctacacctccagctctgggtttaaagatgcatcccttgaagggtccacagacacttacatccaatataaggacgtcttcctgacagcaaa

SEQ ID NO: 211985 - DNA, 386 bp, Homo sapiens
agtggtgacactctgtaagagaggaagtgattgtcatcatgctgcaattgcagcggtacctactagttaagatcaaagaaccattctctgtcttctaactctaaagaggtcagacctgcaagatgtcttacaagcagtcctcccaggaacatagttaaaaggtaggactgaggttccacaagatgtcaggaaataacactgaaagcaaagccagacccatgaatgatgagttcaccagttcaagcactggcacctgttcccaagcagactggtacagagaggctcccagctgaccaaactgcactaaattttctctctgttgtcttgcatggcattgtcttacagagcaaacaaataacatcagccatccttttttaccttgtaca

SEQ ID NO: 211986 - DNA, 444 bp, Homo sapiens
atagaataaatgcactgtagctaaaaattagatggctgaatccatggctaaaatgctacttttcttcaggattaattgagtgcaatcttttatctgtttctattcagcatatgtagtatatatcggctatgcatctgaggacagctgccattctatttacagcattatctaaaaatggcaacattaaatccatcttccatctctttgagatctttttcaactacagaatcatctcagatgttctgcttttagagcaaaatatatgaggtgtgaatgtgtgtaacagtaaaagactaacaggcagaaatccacgacggtggaaatatctaccagcgcttgataaaactttcctcctttccccatctcaagaaaagctagggcaaggaagctagaaaacatcagggggcaaattaaaaaggtagaaaaccctgcccttataccccc

SEQ ID NO: 211987 - DNA, 132 bp, Homo sapiens
ttctcgcatagggggatttggcagggtcataggacaatagtggagggaaggtcaatgctgtctcttttaaaaacacatttacagccaggcgctgtggctcacgcctgtaataatcctaagcactttgggagg

SEQ ID NO: 211988 - DNA, 610 bp, Homo sapiens
acgaagatcaaaaataaagagggaaagggtcttctctggcactcgttagtcttttacaacattctaaaaaacaatgtaggtaatggaaaaaggctaatttataatcaggcaaacaaatactacaacttcctaggttacagctatctgttagtgactcaagtcctataatcacattcttttaaggctcaaaataatttaaagtttcaacagctttggtcttgaattacttattttcattaaaaaaagacatcaatgccagagttaattatattctactggtattgaatattcgaagactatgccattttccataaaccttgctcaccccgtcaagcaatccttctccttaggaaccctttatgcatcacacggtattctacagaatatggaaaccagcctagctcatagactcttatgggatagtaagtgtgagaatattaatgctgtttatctctaactttatgttacccaccagcactttgggaacagacataattcagtgtaactgaaaataaacttccatgaagttcaattcagatacagtatcttcttgaatatgttccaacattgctccattcaattggtttattgatccataactcctatatca

SEQ ID NO: 211989 - DNA, 408 bp, Homo sapiens
cggtaccactctgccattgttgtcgttattttcattaaaaaaagacatcaatgccagagttaattatattctactggtattgaatattcgaagactatgccattttccataaaccttgctcaccccgtcaagcaatccttctccttaggaaccctttatgcatcacacggtattctacagaatatggaaaccagcctagctcatagactcttatgggatagtaagtgtgagaatattaatgctgtttatctctaactttatgttacccaccagcactttgggaacagacataattcagtgtaactgaaaataaacttccatgaagttcaattcagatacagtatcttcttgaatatgttccaacattgctccattcaattggtttattgatccataactcctatatca

SEQ ID NO: 211990 - DNA, 504 bp, Homo sapiens
attccctcaattcagatactttttttttctttttgaaagagatgtgtcttgctctgttgcccaggctagcctcaagtaattactcgggccttgggctcaagtaatcctcccacctcagtttcctgagcagctggtctacaggcacacaccaccaagtctggcagtcatctactttaaactaaatgttagggtaagccatttgattgaatgaattcataatataatgttgtagagctctgttcataaaacttgtatgattttatgataaaatttggtaatgtgattatctttagtgaggattgagccaatatggaatcagagtttagccctgcctctctaaattgttctttatccttaaatgtgtagtagctggattgcctacaattctacaattttctgttagaatttatggcagtagttttcaactgtggactgagaacattttgggaactgtgcccattataaagtttgtctgaagacctaataaataatttgcctttcaaa

SEQ ID NO: 211991 - DNA, 666 bp, Homo sapiens
aaaagcctaaatagccgagagtcctcagttcactggaggctccagatatcttcacaattgtaaagacagaaacaaaaaatttgaaaaataccaaaaggaaaaataagtgcaaaccaaaacagggaatgacaaaggaagccatctgaagatgccttcatcatctgaacatttctcagttgctattttactttttgaaagtagactgttatttaagagtcaattgcatttatctgtgcctcatctcccctatttattatgcctcctcaaggcattggacaatgttaaccacattccttttaactccccagaacattgagtcttatgcatcaagtgagagcaatttataagcccttcgttatgttttcccggaaactagatgaaagtgttttaagtaaggagaaatcacttaaaatggtaagcttgtctatttctctgcatggttgaggacgtccagctgctctgggctgcagtttgtgtcctgccatccctgcaaaacttctgcctgatatctgccttcaccaccacccaacccaaagcaactctgattctggcaagctgacctctcttttttcagggcaatttatctctccctgtgccctgggagaggccagacaacagtcctgagagacgctgccagcaagttgtttatgccaggagagtgttgcc

SEQ ID NO: 211992 - DNA, 426 bp, Homo sapiens
aaaagtttgaaccaacagcctaatgtgaaaagaaactgcactgaaaggtaaaggaggaaatggtgatgaactgggcttatgtgagaatgtctatattttcataacacagccccagaatctttctctcagttacagcctcaggcaaaccacgttctggttggtgggttctgcagggatctctcccaccactgagcctctagtcccaaaaccatccttgacaacatcgtgtgtctgttacttccctttgcccacctccaggccacctggggaagcccacaggcagccaagacccaaaaatgaaactctgtatttgttcttcaacacagcagtctattatctttattgtgacacatgacaagattcggtgcacataatgtataatacgagaggagtagagaaacgtaggaaaatcgcccgatctagtct

SEQ ID NO: 211993 - DNA, 764 bp, Homo sapiens
caagggcttcatgggctgggtcagtctatggtctggccctaatattttgtatcattatttttggtttctttgtttctgtagaggactatgcctgttcctgttctggtgtctgcgttctgatctctttctcccctgggtgtccctcatctctgacagcagcaggagtcatttttcctgtcattaaccccacaaggtggaaggcagcccctgcacacagaagtctgtggtattaagagatgaattttcaagcccgtgcagcttttaccctatttccagggctctttcttggattgtattttctatcttttccccaacctttttaaaggaactagattctgaaattagcagagaagagggatgccacaagttctcatcttaggtaactttctagtggaactcctcttctgctcagctctcctacccactctcccttccctgagttgtagtaatcctagcactggctctaatgcaaactcatggatctataaagcaaagtctaacttagatttatatttgtttggaaattgggattcatagtcaaagattgttctttcctaagagggaaatataattgcatgctgcagtgtgcagagggttggtgtgaaggagggatgcagggaggaagggagggaggacacacaagcagcactgctgggaaaagcacaggcggcctggatgtcagtgtgaggggaccttgtgctgtcgttgctgcaaaaccgcatttggcctgaggctatgttaataaagatactgcctttagaata

SEQ ID NO: 211994 - DNA, 401 bp, Homo sapiens
gccaagttggctcaagactcagggtaataaactctaaattacggtaagtctttaagttacattgaaaaaaccaccaaaaaaaagaacttaaagtcagaagaatggaaccatttgtctcttatctacctaggacctggaagcccaccccgcccctcccccaccgcgccgtcgagtcctcccagctttgcttcaagttgtcttgcctttctagacctgccccgtctttccagaccgaaccaatgttcatccagcacgtattgatggatgtgttatgtctccctaggaagtgtaaaagccagttgtgttctgaccacctcgggcacaggtcgtcaggaactcctgagagtgtcacagacaggtgtgttcaactttggcaaaataaactttctggattaactgca

SEQ ID NO: 211995 - DNA, 172 bp, Homo sapiens
atcactaaagtaacattttaatatatttttcaaatttgacatcctaatattcctttttccctcctccttactcactacgggtatttgcatgggacaaacagtctttgagggcaagatttttaactgcaccacgtatttgtgccataatttattaatcacagtttaaaaaaat

SEQ ID NO: 211996 - DNA, 552 bp, Homo sapiens
tttgtagacccctttcagatttactcaagttaatttctgtctctggcaggctcttacatcgtcgactaggcagcatacctgtgctaatcaaagacagtctggagggagtgacctgctttaggctttattggtttggcaacgttttaattcttacgcaactctgggtatgtttatggcactatgtaaatgttacataagaacatggaggctgagaagtggccagaatggtgactgtgaacacaggaaggttagactgaggactttatccaaaaggaccttgggaatctgcaatcagtacaggaagaacctgcacttattttcctctaagaacctttttagatgattatgtctttcaggtggactgctgtgttataaataggtttattctccaccggtgagctaattgtaaccttgctaccaaaatatgaatcagtaaacgatgagacgtgctgcttcttccagcatgtcctgttgaagctgcttgttgcattttggaacatgagttgaattgggttgcagtctgttctcataatagctgaggagcacagggtg

SEQ ID NO: 211997 - DNA, 401 bp, Homo sapiens
agaaataaagaagaatgggatcaagagaggaaaaggcattctgctcaaaggacgtttatagctttgctgtggttatccactaagtgcatcagttaaagaagcacgttttatcttcttttttgcttctgtttagacttcatgttaaaatggctctaggcttttctattaatagctctagctagttggtctttatgaagacatgctgcactaaatttgttctcatgattagaatcttgtaatcataattacaagaaggtatcttctcaacccctcaaattactcatttgtttttatagaggctgaaataatagagggctgtaagatttgacattcatccaagttaacccctttattgggttgttatggtgaggggaataaagactgagcttctttcttactta

SEQ ID NO: 211998 - DNA, 525 bp, Homo sapiens
aagatgctctttgtggagtgaatcgttaactggggaggaggccacctagattcagttatagaacatcgtggattagattgtcatacatcaaggagccgaggaccattccctgggtagcgaaggacttcactggacctccagaatcttcttcatggatattcattgcgccttcaggacctggacttcctttggaaagtccaaacttcctttggaaaaaagactaagaggaattcttcctgaagttccttgtctgactgtggccactgtctccctggagaactgcacttatttcagaaagaagagagacttctagataaagcgaggtgatgctggcttcaaaccaaattaaaaaaaaaagctggagatatgcaagttgctaaaccagcccttccctcaggctcaaatcagaggacaattggtaacaaccacctttctctcatttggttttgcagctcaaacaaaactgtcaccctcgccaaaacccctgaaatacagaaatgtggtattaaaacagttatgactgga

SEQ ID NO: 211999 - DNA, 419 bp, Homo sapiens
tcatgttttcatgtagcttgatgttttaattattcttcaatcagtcttcacaagcataatgattaatgttttcatacagttccttcaacaaatagttattcaagatagactgtgtgcattctacattcaggtgatagagcaggggataggacaggtgaagtcacttttgctctcagggaacttgcagtggtccatatggctttaccataattaattcactagttttgaaaacatgtttactatttattactagcataacaaatgcaatggaagtctcatgtaattatgttacatatacctgattatcaactgaatatagtgtcctcaaaataagtcattggtatagtttgaagtttttgatatatactgcaaaattactttgaagaagaattttataaatatccacatgcatatctgct

SEQ ID NO: 212000 - DNA, 155 bp, Homo sapiens
gttctgccctccgttttacgattcgcctacactgaaaatgcgtgagtggagtggaaagccttcctactcctgcctcagcgaccccttctaaaatactgcctcgtttggcctgaaaatgtgatttgcaggcttcctgagcaaagtagatttcactc

SEQ ID NO: 212001 - DNA, 490 bp, Homo sapiens
agagctggctttctcactctctaaatctatcacaggctctactcatcaatatactaataattcctgctgaactctaaggaactctttcccacagaaggaatataccctgggccgctcacagacaacgctctcccgccgctggcgctggtccgggatgcggccccgagacccctgcagccgcgcgctggctcaggggacctccgcaggacgcgggcgggcgccggggccgggtcgggcttgggcagagtgacaggctcccagtcgtgagcctcacaagcagatctatttacaatatcccggataggagtccaggtcgcgtcgctcgcgtcgcccgcggggacccggcgtgaattcacacgctcccctcccaccgcctcgccgcctgtcacggccccgagacccggtcagccccttcgggggttcccttcgccgcgcagtactccgcccgtgagcagcccccgcctgcgctcctccctccctagggcggccg

SEQ ID NO: 212002 - DNA, 995 bp, Homo sapiens
aagaaaaagaagaaaaaaagtgcatagaattctgccttgaacatcactgtccacgggctgccttcaaaagacagaagggctctaccacggaatgcctgtttcagatttaaaaaataacctgctgagatatgctggcagggcttccttcagcagccacaagaagcttctcaggtgagaagaaacccactgctgttagcactatagatttctttaaggtcacaggcctcttccaattaggggtatcatccatctctggtggcctttccctcctgaagctggggaaatatttcctccccctccaacccatttaccacccgctccatataaccgccttgaagacctctttgggcttgaagaataacttaagacagttttcctattgagtgctgaacatttgcctccccctccccctccagcctgtcactctttccgggcttgtgactgcttcagaattgtgaacttcaaatttccccactgttttgttgatcctgggcttttgattcaagggcctgtctggcaggagatggcctaagcacatcagcaatagcagatgacaaatgccaaaacagaaagaaaataggatacaaatgatttcctcctacatatttacatttacctgctccagagattgtgcatttggggttctacccgttattaagtaggagcctacgttatgcctataatgacctcatcatgctgcgtgattatgggctgcagccgccaaacactttcagacgacactgtgaactttaaattggcactccaatctcccagtggcctgtcagtcatgagaatcgcgtctttatgccagcaagccccttggatggagtctgacattgcaatcttcagtaaattaccctgtcactgacaatcttgcagttatctcgcaaacaatcaagcaggcaatcaaactgttctgaattgccagttcaggacctgagaggtggccgatgtctccattcaacagcagagggaaagcggcctggccctcctat

SEQ ID NO: 212003 - DNA, 860 bp, Homo sapiens
tttgaggtttagtttcactcttgttgccccagctggagtgcatggtgtgatttcggctcacagcaacctccgcctcctgggttcaggcgattcccctgccctcagcctcctgagtggctgggattacaggcatgcgccaccatgcccggctaattttttgtatatttaatagaaacggggtttcaccatgttagccaggctgctctcgaacttctgacctcaggtggtccacctgcctcagcctccgaaagtgctgggattacaggcgtgagccaccatgcccagccattccttctaatacttgtaatttcattattcccttgcaaccaatcttttcacatatctccttacagattttcttttacacaactgaatcatggtttcaatacagttttgtatcctttggtaattaacatttcagaaatatttttctgaaatatttagtgtgattccatttttcttaaaaaaaaaaaatgtacatcaggtgtggtggctcacacctgtaagcccagccctttgggaggctgaggcgggctaatcacctgagcccaggaatttgaaacaagcctgggcaacatggcaagatctggtctctacaaaaaatgaaaaaattagctgggcatagtgtgcacctgtagtcccagctactcaggaggctgaggtgggaggatcacctgagccttgggggtcaaggctgcagtgagctatgatcatgtcactgtactctagcctgggcgacagagcatgaccctgtctcaaaaaaaaaaaaaaattctcatctgcatttaggatttttagaaaatctcctctagttagaagtacaaaaaatgaagttcttatttattcatttattgagatgg

SEQ ID NO: 212004 - DNA, 486 bp, Homo sapiens
attatttttgcatattgcatattctcttgattcagttctcagtaaagatgtattgaccttactgaagtcattttgaaatattaaatcttaacctaggtaaagcattctttaaaatattcctggtgtttgttggatacttacagattctggaacctttctttaaaaagtgttttccaaacagaagttgctctacgttagagtatgatggacttttatgtcgtaacacccccgaaacactttaatgatggcacagtgaaatgtgaaggttgagaatgtagagagaaatttctatgtaatttgggacttccaatggctaatagaccccaaaatatgtaatacaatgttcagtgaatctagaggtacccaattcattgattcttttttttttttttttttttttgtttttgagacacagttttcgctcttgttgcccaggctggagtgcagtggcgagatctaggctccctgctatctctgcttcccggt

SEQ ID NO: 212005 - DNA, 407 bp, Homo sapiens
agagttccccttaagaggatagcacctgttaaatggaaaagtgattagctattataagtttagaaaaaacacaacaaactaccatagaatctttattcataaaaatccttaaaacgagaatgaaataatcactttcattcatttcatactagcgtgtattgtgcccagtctttttaaatacggtgtcatccaggcaaagctgaatgagacatgaagcctaccctctcttcctgttccagaaagctcctggttagaattttactaaaggaactccccttaacgtactcttcctgtaaaattttctttctttctccctcatcaccttcattagttgtctctttatttgtattttgtttgaatgcttgctggtcttaattgttgaatataatgtttcatttattataaac

SEQ ID NO: 212006 - DNA, 333 bp, Homo sapiens
ctgtttctccaagtgagttccttggaatactaatagatgctataaaaatgtcatctaggtgtggtggctcacatctgtaataccagcactttggaaggccgaagcaggaggattgcttgaggccaggagtttgagacccaaagccctatctcttaaaaaaaatataggtggatgcagtggtgcatgcctgcctatactcccagctactcagtataggctgaggcgggaggatttcttgagtccagagttcaaggctgcagtgaactgtgattgcaccactgcactccggcctgggtgactggtcaaataagtttgggaaatgctaagggttcc

SEQ ID NO: 212007 - DNA, 440 bp, Homo sapiens
ccagcacttgggaggccaaggtgggaggattgcttcaggccaggaattcgggaccagcctgggcaacataatgagacctcatctttaaaagagaaaatttaaaaagatgtttcagatttgcccataccttagcacatgtacatttaaagaatacaaacatggcccagtgcagtgtctcacacctgtattcccagcactgggaggccaaggtgggaggatcacctgaggccaggagttgaagaccaacctggactacatagtgagactcagtctgtacaaaaaaatttttaaaattagctgatcatgatggcatgtgcctgtagtcccagctactcagaaggctgaggtggaaggattgcttgagcccaggaggtcaaggctgcagtgagctatgattgcaccacttcataccagcctgagtgacagtgagaccctgtgtc

SEQ ID NO: 212008 - DNA, 637 bp, Homo sapiens
aaggtaggaactttgccttttaactccttatattcttcccagcagcatttttcaaatataggccctgacccagtagcaaatcatgaaattagtttagtaagtgtcaccaacattaaattaaaataatcagaatgaaatagaacagaaaatttctgattgcaaaatatctagtgttatttagtgcatgtatatttccctcacccccaaattcatagtttgaagccctaacccccagtgtagctctatttggagtaaggaagtaattaagattaaatgaagtaataggggtggatctgataggattagtgtcattctaagaagaaacaccagagagcatgctctctctctttccctcttatatacacacatgtgaagatagtgagaaggtggccgtctgcaagccagaagagagccctcaccagaagcctaccctgaaggatctgggtcttggacttctagcctccagaactgtgagataatacatttctgtttaagccacccagtctacgatattttgttatggcagcctgagcagactaatgtgcctacaggagagttgttcagtgaaatgtgtgtggttgtgtgtgtgtgtgtgtgtgtgtgcatatgagagagagctgggttttgggttttgata

SEQ ID NO: 212009 - DNA, 239 bp, Homo sapiens
caccgcgcccggccccaaaattcttaatttaatcatgcctgcaaagactcctagccctttttgctgtaaaaggtaacattcacagattcccggtattaggctatggatatcttttgggccatttttcagcctatcatagtctcttctctgctcgtctgttccacaggcaaaatacacccatctcattccaacatccccaaaagtctcaacccattgcaacatcaactcaagcccgagat

SEQ ID NO: 212010 - DNA, 511 bp, Homo sapiens
tagctgggattacaggcgcccaccatcacgcccggctagtttttatattttttagtagagacagggtttcgccatgttggccaggctggtcttgaactcctgacctcaggtgatctgcctgccttggcctcccaaagtgctgggattacaggcatgagccaccgtgcctggccagatatggccaattcatttttttccctctcagatatcatagttttcatctctacaagtttgacttgggccttctacactcttaatctttcctttattctgtattcctcctttccactgtttcccacctatacactgcattcaaatgcaacgtggtgttccttctataatgtgtatccctcctatcctctgcatcccatatgtaatctacagcctcctcatcctgcttatttttctcacctcagcatctacatttatcttgcactactctgcttctgtccaggtaggaaacctactcaagatttcaactccacttccaactcttccacctgtcattcca

SEQ ID NO: 212011 - DNA, 487 bp, Homo sapiens
ggggcaggggtcctggcgctcctctgtcctccacatcctctgagtgttctgagcatcctgggctgctttggtgttttctactcccctgctgccctctggtcctgccaccccgagctgacaagcctgccttctgctggctgccttcaaccactcagagaaaccacagctcccccctccgcagaagccgcgctcggagcagcagaaggaaggcgagtggacaccaatctggcctccggacggcaccagggcctcccacagagcggagtggacactgggcccattctcctctcttgctctctacagccccgtggccccagcgcaggagccagcccatggcagctccaccccagaccgatccgatcccagcacctgggcccaggaatgtgcttggccaccagattcccagcgattctcaccaaagtcaggcaacctctggcctacagcttgagaatgacgtccaagcagctcgcctttccctgggcggccg

SEQ ID NO: 212012 - DNA, 446 bp, Homo sapiens
aacctattcttcctgtctgaaactttgtactttgaccatcatcaccccttccctgttcactcctccctcccccagcctctggtgactatttttctactctctactaatgtgagttcagcttttttagattacatatgtaagtgagataatgtgttatttgtctttctttgtttgacttattcacttagcacacacagtgtcctcttaaaatgacatttaatatcccatttctagttcgttattatttaagtaatttgcaagtacattctcattttaaaagattaaacgaaaggaacatgtaaagaataaagctgggggctgggcttggtggcttatactggtaatcccagcactttgggaggctgaggcgggtggattacctgaggtcaggagttcaagacccgcctgaccaacatggtgaaaccctgagtctactaaaaatacaa

SEQ ID NO: 212013 - DNA, 817 bp, Homo sapiens
gatggctcctgaaatatgtcactttggtgaagcatgacggttgggtccctagctgagagtctgagaaaatgtttaggaatgcaaccctagacttcgctctgtcttcacctttgctgtttctctccctttcttgtgatccagttggagcatcagttttagaggggtgaaaagagctgaggaggcaggaggagactgagaattagggactactggctgggaagtactttagccccagctagctgctgccaactgctgttcccggccacatggtgttatgtggcgatagctagttagtggccttccgtaagcaaaggatggcccagtattcagtttaaacaaactaaaaaaacagtgtggaaagagcaggcatcccttccacagatgtggtgagtcctgcatcatatcctctttggtgggcattactatgtaatttaaaccacatcattccaacatgtaatcaatatggaaaaaaataacaaaattatgataaaaataatttttttttctttttttttattattattatactttaagttttagggtacatgtgcacaatgtgcaggttagttacatatgtatacatgtgccatgctggtgcgctgcacccactaactcgtcatctagcattaggtatatctcccagtgctatccctccccccttcccccaccccacaacagtccccagagtgtgatgttccccttcctgtgtccatgtgttctcattgttcaattcccacctatgagtgagaatatgcagcgtttggttttttgttcttgcgatagtttactgagaatgatgatttccagtttcatccat

SEQ ID NO: 212014 - DNA, 327 bp, Homo sapiens
gctgtgtgtggaaactgggagttgcaagaagagataaggaaacccatggtgacagcaaatgtctaacaaggtagatagatggattaatcataagaacatagcgctgaatttagaaagtgagaaatactaagtgctagagcacaaaactatttgtgtagatttaaaaacacacaaatctcatctgccataataaccacatacctcaaatgattgccatgagtagggtaaaacatgaaaatagtccctgtcatgtgttaagcacttagtaaatattcactattgttagataaaaagatgttcacagtatactataaactttctattaca

SEQ ID NO: 212015 - DNA, 545 bp, Homo sapiens
tccagaatcccctgtgtgggtcagcagctccctgctctcccggttgctcagcccagacatctggaaatccctcctgactcctctgtatccatccatcaggtactcccataaattccgccctgcaaagcccctctactcttttctgtccatctcgactaccaccatcctgtaagccaccattacctcttcccaagtgctctgttccttgggtaaccacctcccttactaggcccccacttcactattacttcctccaattcatgtctgcacacagccagagtggaccttttaccaaagacctgagcatgcttcatatgaagccagacctcggcctgcatgcggtgagtgtgcagcagcccttgaccttggtccttgtctcctacctcgggtcatgaacagcaaaggtgagcacacatccctgagtgccctggacgggcctggctggggccagcgtatcatgctgtgcccagtatattattcatagctccctttcactcttaaaattgcttcagttacgacaataaattatatgatcacagaatgaa

SEQ ID NO: 212016 - DNA, 646 bp, Homo sapiens
actggggccgtatccgcgtttcactcagcctccttggcggccgagtcttagtttgcctctcggtgacatggggggaaagaaggaaactcgctttgcggggtgttcgtggattcagggagggaactaatatgtgaaagaagtgtttaacaccgacagggaacatttaatgagacttcacccaggaacttcccaagccttatttcatttaatgttcacaacggccttctggtttatcctcatttacaaaagcagaaattaaggcgcagaggggtcaagtaattttctccaagtcacagtagccacagaagtgcaaaggagtggtgccagtacctattatttattaatatttcctggtgtgagcatgtatcatctcttagtgcagagggtatttttacctagccttgggtcacaccatttaattaggggcataactctgggttttccctgacttctgggccgttgtccactatactgtggatgaaatcccattctggggttaccatagttctaaagggaaaggtttggatgaattccttgctagtgttgcggcagttagaagttgatggatgcagactccaggtctcagacacaactcaaattccctggggttttggctcaaggaagctttgagactgtaaacggtggg

SEQ ID NO: 212017 - DNA, 1012 bp, Homo sapiens
  misc_feature (52)..(52): n is a, c, g, or t
  misc_feature (130)..(130): n is a, c, g, or t
acatgaaaggatgtgaatttggaatcagagaaacctgagttccaccatgctntcttcctcttgcaatccatgaaatccacagtgggttagtggatattacaaaacctctggtcccacctcattaagatgnaaaaaaattatactaattgaaagaatgaatgtgataatgagaagaaatggcatcaataaagtttctggaacacagttatgtgcagtactgaagagcaacttcagctattgagttacacctcaatgcaacctcctggcaggccagccttaagcccagcagtcccaccatgcatctaagctgcgttctcatcagacccaacttcaattataaataactgagatgatgccagaggccagaatccctgagaacccaatttgctgtcatcaccatggctgaaacaaggcgcttggcatctagaaaagctgatctgtaggaaatttccaatagagttcaatttttctaagtttaaaatgtacaatatcatcaaggtcagacactcgagataaaactaggcttgtttttaaatataataaaaatatttgaagaatagtaagagtggtgactacttttacacaggaatgttttaaataaattgtttttttctggtgccttttaaattttgtgatttgtcaatgagatgctgatatatttttaatgaagcatgccttgtaaaataataagtgaatgaaaaatacacagtaatattcacatcaacaaagctagaagaagactgtatgtctcaagaggctccatcatctacccagtggccacttgaccaaattaagatccaaataccaaaaagaaaagtaattaaaatttgtgttgtatgccttataagaccaaacctataaaatgaggggaaacttcacaattacttgtaatttgctgtgtggaattgtaacagatggattattaagatgattcctgataacctctaaatgtggttactacaaaaaaaaaaaaaatggccttcgtggccttcaccggggaacctttccgccc

SEQ ID NO: 212018 - DNA, 851 bp, Homo sapiens
  misc_feature (40)..(40): n is a, c, g, or t
  misc_feature (46)..(46): n is a, c, g, or t
  misc_feature (60)..(60): n is a, c, g, or t
cagaagatacccggcacgcgagagcacaaaaacgggcttnagggtnactagcagtactgnattagcacttcagctattgagttacacctcaatgcaacctcctggcaggccagccttaagcccagcagtcccaccatgcatctaagctgcgttctcatcagacccaacttcaattataaataactgagatgatgccagaggccagaatccctgagaacccaatttgctgtcatcaccatggctgaaacaaggcgcttggcatctagaaaagctgatctgtaggaaatttccaatagagttcaatttttctaagtttaaaatgtacaatatcatcaaggtcagacactcgagataaaactaggcttgtttttaaatataataaaaatatttgaagaatagtaagagtggtgactacttttacacaggaatgttttaaataaattgtttttttctggtgccttttaaattttgtgatttgtcaatgagatgctgatatatttttaatgaagcatgccttgtaaaataataagtgaatgaaaaatacacagtaatattcacatcaacaaagctagaagaagactgtatgtctcaagaggctccatcatctacccagtggccacttgaccaaattaagatccaaataccaaaaagaaaagtaattaaaatttgtgttgtatgccttataagaccaaacctataaaatgaggggaaacttcacaattacttgtaatttgctgtgtggaattgtaacagatggattattaagatgattcctgataacctctaaatgtggttactacaaaaaaaaaaaaaatggccttcgtggccttcaccggggaacctttccgccc

SEQ ID NO: 212019 - DNA, 851 bp, Homo sapiens
  misc_feature (36)..(36): n is a, c, g, or t
  misc_feature (40)..(40): n is a, c, g, or t
  misc_feature (46)..(46): n is a, c, g, or t
  misc_feature (60)..(60): n is a, c, g, or t
tcgtttacaaatctctgaatagttgaagtaaagatncttnagggtnactagcagtactgnattagcacttcagctattgagttacacctcaatgcaacctcctggcaggccagccttaagcccagcagtcccaccatgcatctaagctgcgttctcatcagacccaacttcaattataaataactgagatgatgccagaggccagaatccctgagaacccaatttgctgtcatcaccatggctgaaacaaggcgcttggcatctagaaaagctgatctgtaggaaatttccaatagagttcaatttttctaagtttaaaatgtacaatatcatcaaggtcagacactcgagataaaactaggcttgtttttaaatataataaaaatatttgaagaatagtaagagtggtgactacttttacacaggaatgttttaaataaattgtttttttctggtgccttttaaattttgtgatttgtcaatgagatgctgatatatttttaatgaagcatgccttgtaaaataataagtgaatgaaaaatacacagtaatattcacatcaacaaagctagaagaagactgtatgtctcaagaggctccatcatctacccagtggccacttgaccaaattaagatccaaataccaaaaagaaaagtaattaaaatttgtgttgtatgccttataagaccaaacctataaaatgaggggaaacttcacaattacttgtaatttgctgtgtggaattgtaacagatggattattaagatgattcctgataacctctaaatgtggttactacaaaaaaaaaaaaaatggccttcgtggccttcaccggggaacctttccgccc

SEQ ID NO: 212020 - DNA, 815 bp, Homo sapiens
  misc_feature (14)..(14): n is a, c, g, or t
gactgaagttatcngcagcactgccttacaggttaaaactttgagttacacctcaatgcaacctcctggcaggccagccttaagcccagcagtcccaccatgcatctaagctgcgttctcatcagacccaacttcaattataaataactgagatgatgccagaggccagaatccctgagaacccaatttgctgtcatcaccatggctgaaacaaggcgcttggcatctagaaaagctgatctgtaggaaatttccaatagagttcaatttttctaagtttaaaatgtacaatatcatcaaggtcagacactcgagataaaactaggcttgtttttaaatataataaaaatatttgaagaatagtaagagtggtgactacttttacacaggaatgttttaaataaattgtttttttctggtgccttttaaattttgtgatttgtcaatgagatgctgatatatttttaatgaagcatgccttgtaaaataataagtgaatgaaaaatacacagtaatattcacatcaacaaagctagaagaagactgtatgtctcaagaggctccatcatctacccagtggccacttgaccaaattaagatccaaataccaaaaagaaaagtaattaaaatttgtgttgtatgccttataagaccaaacctataaaatgaggggaaacttcacaattacttgtaatttgctgtgtggaattgtaacagatggattattaagatgattcctgataacctctaaatgtggttactacaaaaaaaaaaaaaatggccttcgtggccttcaccggggaacctttccgccc

SEQ ID NO: 212021 - DNA, 806 bp, Homo sapiens
tactatgagtgaacaaagcaacacaaaagagtttagttacacctcaatgcaacctcctggcaggccagccttaagcccagcagtcccaccatgcatctaagctgcgttctcatcagacccaacttcaattataaataactgagatgatgccagaggccagaatccctgagaacccaatttgctgtcatcaccatggctgaaacaaggcgcttggcatctagaaaagctgatctgtaggaaatttccaatagagttcaatttttctaagtttaaaatgtacaatatcatcaaggtcagacactcgagataaaactaggcttgtttttaaatataataaaaatatttgaagaatagtaagagtggtgactacttttacacaggaatgttttaaataaattgtttttttctggtgccttttaaattttgtgatttgtcaatgagatgctgatatatttttaatgaagcatgccttgtaaaataataagtgaatgaaaaatacacagtaatattcacatcaacaaagctagaagaagactgtatgtctcaagaggctccatcatctacccagtggccacttgaccaaattaagatccaaataccaaaaagaaaagtaattaaaatttgtgttgtatgccttataagaccaaacctataaaatgaggggaaacttcacaattacttgtaatttgctgtgtggaattgtaacagatggattattaagatgattcctgataacctctaaatgtggttactacaaaaaaaaaaaaaatggccttcgtggccttcaccggggaacctttccgccc

SEQ ID NO: 212022 - DNA, 391 bp, Homo sapiens
aactcatcatttttatggctgcatagtattccatggtgtatatgtgccacattttcttaatccagtctatcattgttggatatttgggttggttccaagtctttgctattgtcagtaatgtctcaataaactccttctttctttgcctagttacacctcaatgcaacctcctggcaggccagccttaagcccagcagtcccaccatgcatctaagctgcgttctcatcagacccaacttcaattataaataactgagatgatgccagaggccagaatccctgagaacccaatttgctgtcatcaccatggctgaaacaaggcgcttggcatctagaaaagctgatctgtaggaaatttccaatagagttcaatttttctaagtttaaaatg

SEQ ID NO: 212023 - DNA, 390 bp, Homo sapiens
ctagaggatccccatgactgctgtcagctactgcagtagatagggatataaaggtgtgcgccaccagaccccagactacattttagtatataaagtagagacagggttaacacaaaacaggagcttctagtcccaattcagccattaactgattagttgggtgacctcaagtcactttcccagatcaagacagtcctgggggaactgacatgctacactctgtctggcaaaacaatggtgggcggtaagtagccaaaagttcactgggatccgacgctgctgggctgcatacaccggtgactcctggtcatccaaacgccgcttcattctgtgctcatgctcagggatgcactacaaccgcagagctgcttcggccgctcgtcactgcgt

SEQ ID NO: 212024 - DNA, 362 bp, Homo sapiens
ggctaagtgactcacaggtgaaaagctgttacagcgtggatctgctggacaaagggaagattcatgtcctgagagggacggaacctgacggcccaagatttcatcacactactcagaactgcagttgctgctgtaaatggattccaaaaccacttttaattgacccaccctacattgcctcagttcatctctcattctgcaccagctgcctgttgtcccaaagtttcaatgctaattccactacagcatgctcctggaaacttatgataaggaatctggaaccatctggttttagttgactttttaaaaatacgttttagtgtcacagttgtattattaaacataattatgcctggtaaaaa

SEQ ID NO: 212025 - DNA, 411 bp, Homo sapiens
tacacttggcagaaagagtgaattcagatcgagttacttctgtgctctttgtttctgaacctgtcccttgagggtgagcagctgctgtgtcctccacatccaccatgcctggaaccccttctggcactcagccctctctcacgtccatctagatgtgacattctccctccaggccaagccctgcttcctccgtcgtgtgagcttgctatcatgtcataaattgctcaaaataaatgaggcatagactggtacttggaagctgtagtaggatttgacctaccgagagtctgaaacagcagcgtaagatgtgagcctgtgaagagaaggttcctgagatcgggctgtggtggaggtcaggccagggacctgtgttcctgtggaccatgccatgaattccatgattcctctgaa

SEQ ID NO: 212026 - DNA, 366 bp, Homo sapiens
tcccaaagtgccggcattacaggcgtgagccactgtgcccagccccatataatattctgttcctccatctcctgctgcgctgatgcgagccatctctttgtagcatctcctggggtgccggtgcctgcgtttcttcagggaatatacccaggagtgcgtagcccagggcagagggtggggtagcttcagatttagtgggcgctgccacacagcctcccaaggtggtcaaatctgtgtatcctcctagcggtggtgactgaggatcttagttgctccacctcctcaccaacatttggtaccgtcagactttttggttgaccttggaacatttttattcttttttcctgcaaaagtaacaccactggt

SEQ ID NO: 212027 - DNA, 364 bp, Homo sapiens
tgcctctcctctcccttttttctatgttgtcattgccttcttctaactttacatggggccctcgttttttggtgttacagggacaaccatgtatgaggtttctaagccgaagttcacacccttattggggtgaccaagaatagagatgcaggcatatgggagtgtttgtttgtttgtttgttttgaaacagggtctcactctgttgcccaggctggagtgcagtggtacaatcttggctcactgcaacctctgcctcccaggctcaagcagtcccccgactttagccccccaagtagctgggacaaaagctgcgcaccaccatgactggctaatttctgtattttttgtagaggttggattttg

SEQ ID NO: 212028 - DNA, 340 bp, Homo sapiens
atgacttagacttttgtgaagaggacaggtcaattgtctgaatgtttcattgtgattagtttcagtctaaatatgttgcctaggatacttacaggtaaggataaatccagggttgtctatgtctagtttatatctatcgtttgggtataattattaataacatgtaattttactctcagaaatgaaccttttagctgataaattgtatggctaaccaattcataggtgaattcatactttattgttgcatcaaattaggaggcacataatgcaaattgtctatcatttgtgataactttcattacttgattaaagtggtgattaccccatctctccatta

SEQ ID NO: 212029 - DNA, 418 bp, Homo sapiens
gcagcggaaaaggatgttctacattccgctgacaccatctgatttgttgggagccgaaaaggccaaagagatcgtgaccaactcagcattccactggaggctatatgatcaaacagcaaactgtttatcatgaatacaggatgtgagcaaactcacgactgcacctgccgccagaaggtttgctgagggcggtcactccctggtgccggctccttgaagttatcttctgggacatctagggcctactgttcaaggaatacagtcttgcaagcctactctagacggagcagctgacctcttcttccacccctccttctcgctatctcttttgcctaataaatatggagggctgtgtaaagttcagggcccttgtccactagaggcaaggtgccccctgaccccttcttccaaacacatt

SEQ ID NO: 212030 - DNA, 411 bp, Homo sapiens
gctctcaggctaaattttcagctcctcacagccgggactatttcttgttcatttctgtattccaaccatcttttattatgcctttcacagttggcattctatgaaaggctggttaatctttctaagcattaaaccagccttttggaaaaataatgtaatatatttacagagaaatgatatatgatggcgaacagtagtttatgctctctgttgccttgtatttctccacaaaagtaaataacaatgacaaaaacacaatatcaaatttagaaatgaaacaagatttgtttgaaagcatttatttgaataacttaaatgaaatagtcagagcagtataaatagcatactacaagaaaataaagtcataaagaaattttcaaaactctctgccagcttttcatagacaataga

SEQ ID NO: 212031 - DNA, 450 bp, Homo sapiens
ctttgatttattcatgttaataataatgatgactaagttatagccttaataagaaagcaggaccatctgcaagactataaatgatttttactgctggtttcataaaacactgaagtgaaaatactttattctctgattacaaatcaaagtagagaacaacattcatctaacataaccacaaaccatagtttaagccaatagattcaacgcctaaagtaaatccatctataaaaatatgggctagaaatcagacaagtattcagaaaactgaagatactatgtatcctcagatgtagtaaattctactgcgaccaactgtgttaaaagtgtgtttcaaatgaaaacaagacatctacaacttttgttgaaaaaatcagctaagttacagaaaccacttttctcaaagaaatgtaaacaaaatttcattcgttgatatttaagtagatcact

SEQ ID NO: 212032 - DNA, 361 bp, Homo sapiens
ttagacacattgtgaccagttggctctgtatagaagaagaattctagctggtctgagaaagcaatgaaaggcctgtctttgactatgaaatatgagatgcaacagaggaaaaagagactgaacagttaaaaaacagcaaagaataaagagcataaatgggtaagaggccagcagagcctaatggtaattagaaggaatggggtagcaacagtagcaggcagcagaaattagaagctatgacacaggtggcaacttgtagacattttagaccacagagaatagccagccataaagaggactgggctgcatgccaaccagtaggttttagcaattgcaagagagaaagagaagcttcagcctt

SEQ ID NO: 212033 - DNA, 247 bp, Homo sapiens
ctttaaattaggagggaaaaagaacataagcataagagcatccccagcagcgatgttcattcagtgcctctgaaggctggagggctgcttgttgctgggtgagactcggaggggaaccgactcagggtcaggaatgatgacatcccacggtgggtccacagtgaagaatcttccccgctccactgtgggacgccttaacagcccttacttccacttacgctttgcgttatctcctgaaaaataaaat

SEQ ID NO: 212034 - DNA, 182 bp, Homo sapiens
  misc_feature (9)..(9): n is a, c, g, or t
  misc_feature (15)..(15): n is a, c, g, or t
ttggaaccnttctanaccccttgtaccccacgatggggcgacagatgagactttgtcttaaaaaaaaaaaaaagaaaagaaaagaaatccggaacaagagctggaagcagcaacccacgtcccatgtgggctgggcggcggcggcgctggtcaggctgagcaaccccatccaggctgcgtta

SEQ ID NO: 212035 - DNA, 372 bp, Homo sapiens
gggccatttcaagatatggcaaagaaacatatttggggttaaaatattttgatttatctgtcatgtgatgttatgccagagtcaggttggaaagtaagccacatcacatagggttaaataaaactgctttgagattttataaggtgcaactccccagccccttagataggaatttgggcaagagggaaaaaaggtcagagtttagtcctcagtagctaactgtaactccacctcctgggctcaaagatcgctcccacctcagcttcccaagtagctgggaccacaggcgcacacctgcttatttttatttattttttttagagacaggcgtaactacgttgcgcaggcaggttaagaatgccttttattata

SEQ ID NO: 212036 - DNA, 532 bp, Homo sapiens
attcaataggttggcagctgaacggcagaaggtagctttggggttctgaactaataaatgttcatgatatgtgaaaaagcatgatacatactgtatgatctcaatcacataaaaatggatgttatgtatatacacacacaagacctagaagggcatgtcaaactgcttatgattgtggatgactctgttcctcatttcttgtgtttttcagtttccaatagcgcacgttaattttttttaaaatgaagcttatttttaaaatctggaaaaaaaaatcacagtagccaagttaagtccttacatttcaattataaacatggatacgaactcatgatttatttttctcttcctaaaaattaggtattttctagctctgtcactgaaaatgcctagaataacaacccaacagtaacaaacccttaacaactgtttgttgtttctaaaaactatttcctaaacacacacaacagaacagtttttcagagaaatgactgattctaatctggagaaggatttgtacaaaatgagcctg

SEQ ID NO: 212037 - DNA, 1531 bp, Homo sapiens
ttggaggcaagggtctgcccccggctcttacttaaggagcgggacgggggacgagagcgtgcgcggcgtcacacgcacgcttagccaccccccaagaagccgccgccgcgctcaagctccgcgcgctcaggaccaggtagcgtgtagctgtcgtgaagctccctttgctccggttgggactggctgcggatacctgtccgttatccccggcaccaatgagagggacgaacaggaccacctgcaccgcccaccaccctcgctaacaacgctttaaggcctaacgcaggaggcagctggtgcgaatttacaaatcgggtttttcacccccgcgtggctgcaatgtccgcccagttcgagccccacattctcccgctggctccgcctgggggtcgggccaactcttgctgctaaggaagcctcaccagtccccttcccgtttgctacctaaatgtcctcggcgggaaactgctgagaacaatttggggaagcctgaacttgttcctagttccgcgctttattacttgtgatcatgactggtcagaactccgcccggagcctccatttgttcatctgaaaaatggggttgagaagctcaagtaccagaatgtgaaaacgctttctaaaggcgaaggcatggtatcttgtgagatagtaattccttcaaactcacgcataggctattcctattcctaactttgcgatctgctttcactaggcaatccctttccctttgtatccttataattttcacctatagattttacccccagggttttttaatgccctctgaacattatttccatttcagttaagcttgtctggccaaatttggttgtcctccagagtctgacctctttttgcttggcgcttgtttcaccaggttgaagtggtcctttaggtctcagtttttcccgtatggggtgctttacttaaaccaaggtgcctcggggccagtgctagtttcctagatactggaggaaagcaagcaaggaaggagtagagaatccagtcacttgacttcattatcctcttcaaaccgaaattttgaaggacaaggaaaagtttcaaggctgcagcctttcacagtcctctgagggacaaaactcaaatatagttcttgccttgaaggtggtcacaaacaaaaagggtaaatgatcctaaggtttaaatatagacctaaaagagagatatatacaatggaaatttaatcttgtaattctttgcaggcagcagtaatttataggttaaagtcctggttgtagtttaattataaaatatgttcttttattagtatttatcactatggtgacttctttagccaaagagtatctaaactgaactctcagagctaacagaagtaactatgttgcagtgagagcaacagtcctgggtctctacctcttgttttctatgtgaccttggcaattcaaccaacatctttgaggctgtttttttggtaaggaatggaaagaacatatggcaacagggatttgtaaagtaccgtataaatatatatatttaaattaagtgc

SEQ ID NO: 212038 - DNA, 756 bp, Homo sapiens
aataagtataaacacaacaagttacaaatatagtactgagagatccttgtgcctatggccccgcctccctcaggcagtatcttacataactatagttcatgattacaactggaaagttgccattggcacaatatcagaaactagtctgcagaccttgctcagatttcaccaggttttttgtgcactcatttgctttcctgaaaatattttaaggtttttctacatgacttatctccctgacatactgtgagataagattttttttttctctgaatgagcttagagaacaatcaatgtgagagatgggaaggatgatttggtgcaactctgttttatccatggtgagtctggacctcagagcagaaggaccctcgtctctcctctggggagtcctggtgccacctcagtgcaggctgctaagttatccgggtctgactttcttcttctctgctaatatttgtcttaagcatgtaacacagccatgcttattaatgatgaggagacagccaatgaaaattaattttttcaaagatgaatagatatctagattttttcaagcacaactcaattaagaaaatatcacctcactgagccccaaatgagttaggtctcactgagaaagtgtctcctagtgccaggcaaagtgcctcatatttgtaatcccagcacttctggagactgagataggaggatctcatgagcccaggagttcaagaccagcctgggtaacatggcaaaaccctgtccctcctgaga

SEQ ID NO: 212039 - DNA, 575 bp, Homo sapiens
  misc_feature (563)..(563): n is a, c, g, or t
tacctatgtaacaccacctgcaaatgcacccctgaacctaaaagtctaaaaaataaacataaataacttgacctaattcttatcttgatgtgaatatgttatcatttgatatatagctatatttatctgtttctgcctgtatttaatttcagggtttgttgttcttacaatccttgtttatttatttttaaaatttaaaatacttaaataattataaaagtcaaaactacataaaaattcagtctcaaagaatatctcatgcctaggcgcggtggctcatgcctgtactcccagcactttgggaggccaaggtgggcggatcacaaggtcaggagtttgagaccagcctggcaaatatagtgatgaaaccccatctctactaaaaatacaaaaaaaattagccagacgtggtggtgggtgcctgtaatcccagctacccaggaggctgaggcaggtgaattgcttgaaccagggaggcggaggttgcagtgagctgagatcgtgccattgcactctagcctgggcgacagtgtgagactccgtcttaattttagaacttgagnccaagcttttgc

SEQ ID NO: 212040 - DNA, 368 bp, Homo sapiens
ggggcaatccaatattgtacaactgtacggaaattgcagacttgacttcttcaattgcaaggtcaatggtgaaaaaaactgactctgctggtttgaaatgacaggaccaactgtattaataccttcatgaaatgaaatagaaatggaacttagaaaccacagggacttcccagtgagttggtgaaaatcccttcttctccaaagtctagttactagcttccatttcaggtataaaagttttcatgaaaacaaacctgcttaaaatgaagctatttgtgactgcaaatactttctttaaggtccaggacacattaataccttggcctgaagttgtacttaatacagaggattagggtatttgatgtgag

SEQ ID NO: 212041 - DNA, 361 bp, Homo sapiens
gggttttttttttaatctacaaaatgggtatgtagcacatacctgagtctttgagagaattgaatgtaaaacgttttaatactgtgtcaggtagggaattttgtcaacactaggcactaaattttgttaacactaaacactaaaaactttgaaaaagattggtttgctttggatcattaccaagcactttcatcactgaaataacaaaataaactcagttgttatcatgacaaatgccctgggagtacttttcagtataataaactaattttatttcttcattaacatgtgtactcctgggtgaaccctactaggactgggaagagcaagccgtggaaaggctatagggcttgcacgtaca

SEQ ID NO: 212042 - DNA, 381 bp, Homo sapiens
ttgaacttcccggggcttaaattagtagggatatgttctgacagagggtagaggacattctgtctgaggagcacatgagtgagagtggaaggctaggaaaaagctggagacaagagaaatcaaatccatgaactcaccagaatcccttcaagccctgcagagaaacaatatggtagagaggaaatctcacaggcttagctggcagcaggttcccaactcctggtcagctactgctagttgtatgaccctaggcaaggcatgcaaccttttcaaacttccatttcatcctagcaaaattggtaaaataatactgaatttagtatggaagattagagatgatctgtgtaaaggaagtgacctgtcccccgggaagttctggta

SEQ ID NO: 212043 - DNA, 477 bp, Homo sapiens
tggactgtcatgtttcaagggatcctcaggtacagcaggtggactgagagggaacagaggagaacgaggaatgttggagagacgagggccctgaatacggtgttcagcatctagatcacaattaataactttgtgtctccgttttctaccctcatttgtgctccacggctgcaaaacgatgaaatattgattccttcctctagtgaatcaatgtggatgttgtatggcaaagatgaaggcagagagctcatgctttctttgtgccccaccctgaacactatactacgagccagtgtgttgcagtggttaagcgctcaggctccggaatcagtttcttcatctgtaaaatgcggataatgataatgcatggttcataggcatgatgtgaggagtaaatgggatattgagtataaggtgcttagcaccatgcctggtccaccatgaacactgaataaatgttggcattgagtgtgacta

SEQ ID NO: 212044 - DNA, 583 bp, Homo sapiens
caccactctttgccacaccggcctttcagctctgcctagccaacgtctttcctgatccctttacgtgagtagcaggaagagatctatactcctcttccaggtctcagcatataaatatcccctactccctgattgttagattcaatcaaagtttactttctgcccctaaaattctctcatagcactgttttcacttttgtcatttatcacaaattgacattacatatttacttaatgtctgtctgccctactagactacaagtgccacaaggacaagaactatgtcactttgattctgcactacaaacccactatgtagaacaatgtctgttatacgacagatgctctatatgtatgttgaatgaatcttgctccagtacaaacttctataaccgcacttaccacactgttctgtaattgtttacgtggcttccctaccaaataagaagttctcttgaaggctttgtagctctaggatacaccataggagttcagtaaatgtttaatgaattgaattattctactaaactgtaagcctctcaagagcaggcagcatgttttgctcatacttttgtcgtctacc

SEQ ID NO: 212045 - DNA, 128 bp, Homo sapiens
tcccctccccacccccgcccccgggaccgtgcaggcaccagggttccgtgcacctatttatatttttgaaaactgaagattataatattataataataataaagacattggaagagatctatctcttt

SEQ ID NO: 212046 - DNA, 229 bp, Homo sapiens
cgaaaaattaataggtgttggtatagaatggggttcctcctccccgggatacttttgtgcattttcctggaaacaagtccacagcttttgacacattctgaaaggagcccagatcacaagtcatttaagaagcacagattttcaccccctcagtttgcagaaaagtgaactgaaagtcagagaaaaaggcttcactgaactccccactggggaactgggtttcccgcta

SEQ ID NO: 212047 - DNA, 832 bp, Homo sapiens
  misc_feature (25)..(25): n is a, c, g, or t
  misc_feature (71)..(71): n is a, c, g, or t
  misc_feature (78)..(78): n is a, c, g, or t
  misc_feature (81)..(81): n is a, c, g, or t
  misc_feature (85)..(86): n is a, c, g, or t
  misc_feature (89)..(89): n is a, c, g, or t
  misc_feature (99)..(99): n is a, c, g, or t
  misc_feature (130)..(130): n is a, c, g, or t
  misc_feature (132)..(133): n is a, c, g, or t
  misc_feature (137)..(137): n is a, c, g, or t
  misc_feature (146)..(146): n is a, c, g, or t
  misc_feature (150)..(150): n is a, c, g, or t
  misc_feature (152)..(152): n is a, c, g, or t
  misc_feature (157)..(159): n is a, c, g, or t
  misc_feature (165)..(165): n is a, c, g, or t
  misc_feature (167)..(168): n is a, c, g, or t
  misc_feature (183)..(183): n is a, c, g, or t
  misc_feature (208)..(208): n is a, c, g, or t
  misc_feature (251)..(251): n is a, c, g, or t
  misc_feature (362)..(362): n is a, c, g, or t
  misc_feature (369)..(369): n is a, c, g, or t
  misc_feature (387)..(387): n is a, c, g, or t
  misc_feature (389)..(390): n is a, c, g, or t
  misc_feature (392)..(392): n is a, c, g, or t
  misc_feature (396)..(396): n is a, c, g, or t
  misc_feature (403)..(403): n is a, c, g, or t
  misc_feature (414)..(414): n is a, c, g, or t
  misc_feature (416)..(416): n is a, c, g, or t
  misc_feature (421)..(421): n is a, c, g, or t
  misc_feature (423)..(423): n is a, c, g, or t
  misc_feature (440)..(440): n is a, c, g, or t
  misc_feature (815)..(815): n is a, c, g, or t
cccccttccccccaccccccccccntttatccccaactttttccatatatcagaaaaattctctatttttntaaatanatnttannttntccatttttnttttttaaaatatcaacctacatgcactttntnntttnaaataacanttantnttttnnnctctantnnccactattttttttnttttttatatactttaaatactggntttttttcctccttcaatctcaggcttttctccatcttttaancagcctctttaactcccttttgtccataggtgttgcgtgcctctcatctgtggggaagtattatttaataaaatttattttacaggataactttattttaatgggcatggncttgtcnatacacaaaggaatgtananntncatnaaaaaanaccactttaananttttncntattttaattttttganatttttctagagccaaagaagctctttaaagaagttgtttcttccaaaaaacaaagccaggttaatgacattcaattctaaatgatacattggaattgtgccttttctaccacactggattaaataaacttgtcaaaatatggttttgtcattttctgagacacttggtaatttgctgttctttctttcatgtgcccgttagtacatttggccaactgaccacctgtaacagggaggtctcatgtttgttagtagatacgcaggtaaggaaacttgaattcatcctctcctcggctcaggtctttgcttttcttttaatatatgcatataaaatagtaggcatttgattctgcaaggcactagactacttgaatnaacattctgtcagaggg

SEQ ID NO: 212048 - DNA, 682 bp, Homo sapiens
ggtccatgactgcctctctgtaagctccagcaaaagatggtgaggttcaagcaattgcctttcttattctaatgagccttgcttctaacagaacatgagaagggttagtgtgagtactccagaaggaaagaaattaaaggagagaaacaataaattaatgtaatagagtgggcagaaaaaaatgcttagatatgagatattcctggtttaactacatgactttcacatgtgatatggtctgtcacaacttgagcctccttatctgtagaatgaagatatcagttcacactctgctgtgagactagaatttgtatgtgatgcacctggcatagtgcctcagacacaggccctaaaattggtacctagtccaatagtggttgtcattataccaaagagtaccaatgactttaaaagctgaggtttctagccttatcaggacccacatctagagagggtagaattgtattttccatacctattagaagtggagtcctccaatgtttacctcttgggcattttatagaattgaatggtttgagggggcactgagacccaccccctcttcaggttactcatacactgtcttgaaaataaagaaatccatctaaaaaaggatagatgagtcctgcttacaatggccactcttagaaaatattaagccacttccctggataataaagga

SEQ ID NO: 212049 - DNA, 105 bp, Homo sapiens
tatgttgtactttacttgtctatatccccattaagagatatgttgcttccaggtttcattattataaatactgtttcagtgaacagctttcaatatacatctttg

SEQ ID NO: 212050 - DNA, 462 bp, Homo sapiens
acaaagtagaaaatgcaatgaagaacagttgctaagaatttagtggaagcagaaactcagctttgaaaagtaaccacccctgcccgtcctcccacctccgattccaagcacccagagatattcgtccagagatattcagggatgccaagttacctaacatatatggcgtgtaggtttgagacaatttacttaaatcttggaagacaaggttctatgggttgaatacatcccctccaaaattcaggtgttgccaatgtgatagagaggtgtgtcatttaagaagtgatgaggccatgggaacgcctccctcaatgggattaaggcttcatgcagcttgcccttccatcttcagccatgtgggaacttggcaagaagtccttcaccagaccaaatgccatgcctatcttggacttcccagctttcaaattgtgagaaataaatttcttttctttatgaatgact

SEQ ID NO: 212051 - DNA, 478 bp, Homo sapiens
gaagttcaagaccagcctgggcaacataaggcgactccatctctacaaaaatcttttttaacaaaaatcaccagggcgtgtggcatgccacctgtgctcccagctacttgggaggctaaggtggaaggattgcttgagcccagtagttcaaagctgcggtgggctacgatcacgccactgcactcctgtctgagcagcagagtgagaccccgcctcataaataaacaaacaaaaaatcgtatcaatgaacttctatattctgtcacattaaaacccaacaatctatcatacactttgattatcaagcattggtcatttggaaaatactggttaactgagttatgcacagattctgtatgttgacacattttaccaaactctatcaaaaaataacaattattaatgccaccaataatctcagcagaaagatctttaagtactgagaagttatcagctcacagtggccaagtttcccaaa

SEQ ID NO: 212052 - DNA, 904 bp, Homo sapiens
acagaaatttagatttttgtgtctttcttgcccttttctgtattgtctttagtttttagaaggactttcttggctgccttctccctcccccaccttgctccatcctctcttgcaaagtaaaatctcatcttcctgcaggaggttaggttgtaaagtttacacataaagtgaggattccaaataatcaaaattatcatggaaaatatctcaaatgacccagaaattaaagtatataaacatggttttgtgtatatgccagaacaaagttggaataccatatgaaatagttggcctgtaattaggagacattttatatgaaaaaataagtattctcaaaaactagaatcatgtacagcattcagaatgctcacaatgtgaagaggcacaccggacttagacatgctaaagtctcagattcaagtcctctcatctcatgctcatgttcatcctggtaaataacttcactttggtgtaaaacctcattgagtggaattgtgagcaaacttttgtactgtttatttttctcttcctggtcaagtttgcatagttaaatgcaagtatgttgtgattgtattttatccttcttttctgctttctgtttttctaatttctgtgcccatttaaaaatcctcactgccgggggcagtggctcacacctataatcccagcactttgggaggctgaggcaggcgaatcacttgaggccaggagtttgaaaccagcctggccaacgtggtgaaagcctctctctactaaaaatacaaaaattagccgggtgtggccaggtgcagtggctcacgcctgtaatcccagcactttgggaggccaaggagggtggatcacaaggtcaggagatcaagaccatcctggctaacatggtgaaaccctgtctctactaaaaatc

SEQ ID NO: 212053 - DNA, 809 bp, Homo sapiens
gtttttccctccccttcctttcttttttattgtctataggcactgaagcattcctttcaattgctactacccttctctctgaattctgagtttttcttaggccatttacatagtactcttaatcacagaatttgatggcttatgattctgagttgggagtcgggttcaaggaaatgaggggaaatgtcacattatactagccttggctggaaatgtcccaggaactttaggcttgctactggtcaggctgcttagaaaatgttatcagccttgaagaccaaaccactagacatttgattggttcttatgcaataagtctgtaacacggcaaacatacttttagcaaactattgtatatggatatgtgatcagacaagactttagttatttttagatggttgtctctatagtatcaactataaagatttccttcttaaaaattccagttaagccattccagaggccattctcaatgtttctcgttcacttttctatccacagttccaaactgacagtcgtgctagatgatatttttatgtggtagattctgaatgtgaaataatttcgtgctgaatgtacttataagaacattacctacattcattcatctattttctcatactatttagcatattttccatcaatcaaggtagagttacacatataaaacatgaacatttgtttcttagcacatattattcagataatcttgacgttttataaatcatctttaagtatatacataaaacggaaatgtttccccaaacagcgtcacttaaagaaatgaaaacaaggcaacagagagcaaa

SEQ ID NO: 212054 - DNA, 520 bp, Homo sapiens
  misc_feature (40)..(40): n is a, c, g, or t
tcatagctgttcaaaggatcccatgtctctcctaacctgnaacaactgtaagctctgtacacaggaaccatgttggttttccacactactgtattttcaagtcctagtgcagtgatacttagcattcaataaagactttgagtaagtgagtgaatgaatgaatgaatggtgactgcttttagtatttttagaagtgcaggatgctatcaattaagcagcctttgtctagtgtgaggatgaggaaatgtttcttagaggacttgaaaatgagtaagaagggggtatggtattcagtatccaattttccttagagggcaagtaggatgaatatagaaaattttcctttgaatttagaaatgtgggagtcattcatgaccgtaacggggtcaattttaatagagtgaaggaatgcaattcagattccatttgcttgtgaaatgaattagcgagaaaacagagcaaggagcttttcccagaaaagtagatctcagacacttattgctggcttatttgtttgttc

SEQ ID NO: 212055 - DNA, 453 bp, Homo sapiens
ttaggtcgtttctcttgcctgtgttaaattgttactcccgaaaaatgatacttagcattcaataaagactttgagtaagtgagtgaatgaatgaatgaatggtgactgcttttagtatttttagaagtgcaggatgctatcaattaagcagcctttgtctagtgtgaggatgaggaaatgtttcttagaggacttgaaaatgagtaagaagggggtatggtattcagtatccaattttccttagagggcaagtaggatgaatatagaaaattttcctttgaatttagaaatgtgggagtcattcatgaccgtaacggggtcaattttaatagagtgaaggaatgcaattcagattccatttgcttgtgaaatgaattagcgagaaaacagagcaaggagcttttcccagaaaagtagatctcagacacttattgctggcttatttgtttgttc

SEQ ID NO: 212056 - DNA, 463 bp, Homo sapiens
cctctagaattgatgtctgaattctataagcattttggagcactttggtggaaactcttcaagtcatgtttagctgtgaatcgaacagattcagtatcatagatttggattaggattaacctgtcaacaatttatcatgcacaatatcctgtgatatggaattatagaattttaagatctattttatgtataatcttgccatgtttgaagtttaaccaccaaaatttattatttagatgtatttcataatcaaatggttttggaaccataaaagaagttttaaaagttgcttaatggcatttttcttctattgcctaaaactggtttccttttttagagatggaacaatattttaaaaaacttttctcttacttctactgtacttaactatttggctcccattgtgcctttgtatgttacacataatttcttattaaaactaaagcttccttataatttaata

SEQ ID NO: 212057 - DNA, 800 bp, Homo sapiens
ttctccaatcagaagtctagaaggcagggcacgcagtaggtctgcaggatgactcagaacccgcgtatgaatgctgtctattcatgggtccaggcttttgttaaagtctgggcctgcattttaaagagggagtcagggaactggctggactggtctgacaactaaggagtggtgaacacttcccccaggctagtactcaggtggatgaagtcatcaatattttctgggcagtcctaatctgtgattaacttttatctctgctgtgaaataacagcctccttttcagcctgctaacaataagttaacctggctgcccggctgggggatattttatgctgggctccagcagaggcacacttgagaagccatgtgggactcctgccctggagagagcccagagtggagggaggggtctgtatggtggtgggagtcctctcagcaatggtccttgtgattccggtgtactctgatgtcctgacttcaaactcagcttacccaaagcaaatgtccactttcttccgtactcctttcttgtttaaagcctcaccactgaccaggaagtcttgatagagccatctagtaattcttaagtcctacctcatccaaccttgttttgactcctgcagtgagcacagctgccctcaccctcccctctctatgccctcacctttgcaggagactctcaatttctcagtccacatcagctctcagaccaccaaagcaagggttatttttctaaaagacatttgttcccattgctcctctgactaaagttcctactatgggacatttgcccttgg

SEQ ID NO: 212058 - DNA, 733 bp, Homo sapiens
ttctccaatcagaagtctagaaggcagggcacgcagtaggtctgcaggatgactcagaacccgcgtatgaatgctgtctattcatgggtccaggcttttgttaaagtctgggcctgcattttaaagagggagtcagggaactggctggactggtctgacaactaaggagtggtgaacacttcccccaggctagtactcaggtggatgaagtcatcaatattttctgggcagtcctaatctgtgattaacttttatctctgctgtgaaataacagcctccttttcagcctgctaacaataagttaacctggctgcccggctgggggatattttatgctgggctccagcagaggcacacttgagaagccatgtgggactcctgccctggagagagcccagagtggagggaggggtctgtatggtggtgggagtcctctcagcaatggtccttgtgattccggtgtactctgatgtcctgacttcaaactcagcttacccaaagcaaatgtccactttcttccgtactcctttcttgtttaaagcctcaccactgaccaggaagtcttgatagagccatctagtaattcttaagtcctacctcatccaaccttgttttgactcctgcagtgagcacagctgccctcaccctcccctctctatgccctcacctttgcaggagacttcctgggttaacttcctctctttccatccaacgtggtggcggtgcttggtga

SEQ ID NO: 212059 - DNA, 275 bp, Homo sapiens
ttaaggtgaagatttttaaaaattggcattacataatttacatgagagcaatgctatcacctcctctgtgtggatgtgggagaggactgggccattctccttagagagaagtggggcggcttttaggagggcaaggaacttcctgtaacaatgcatctcatgatatttggaatgactattttttaaaaaaagaacaacgtacaatcaatgtcctcggccacattgtagaactctgggggatgctcgctccaacagactgctgtcaccttcaccat

SEQ ID NO: 212060 - DNA, 1564 bp, Homo sapiens
  misc_feature (151)..(151): n is a, c, g, or t
  misc_feature (970)..(970): n is a, c, g, or t
  misc_feature (1083)..(1083): n is a, c, g, or t
  misc_feature (1173)..(1173): n is a, c, g, or t
  misc_feature (1175)..(1175): n is a, c, g, or t
ggacgcggccacctcgaagccacgtcagggcagccccaggtcgggcgcgtgccagcagccagaggtataactataagaaatgaattttaatgtctggaatatcaaagagatgctcagtattccttcaggctctgggaacaagaagtcatcnaactggaataataatcaaaatgattattccagtctcagtgattcccagttcctctttggatctcagttctgtccagaaaattcagaaaccctatcagcacccttggactttggtgcccacttgagacattcaaaacagtcacaacagaactatctggagggtgaacctagcattttcacaaagtaccagacaaagccccagctgttcggaggagatataaaagatggaggtttatttcctcctcctttgtcagttggaaaatcaaaaggcctcttggaacagtttgaggagaaaaagaaaagggcaaaagacaaatgtgacagttgcagacgtctgtggaaaagtctgaggaccatctcagttcaagaagccaatctattttggattctttggagactgtggccaagacatgtgagtgcctcatgtttgaggtatcagcagagggcactggtgaatgatgaacatgaactttctgaccccagcctggtttccagtggtgaggttcctcacagggtttcagatgagaggatgggtatatagggttagtcctgaagagatgtggagcacactgagctgggtagtgaggcccacctctatgtgacaatgctctggtcccatgatgccttttgtgaggcactaatcccccacctggtaaccatgttgcctcagggcaggtagctctgctaggtttctcatctcactgcctgaagtgagtcagcaacatccttgagtctcaaattgctgcctgtgctgtctatagacactgactgccccttaggagttagaaatactgtagtacctgctgctcttcttgctgcnttggtttcagtgagagctgtgttgtgaatcacagcatcattctcaattttttttttttttttgagacagagtctcgctctgtcacccaggctggagtgcagtggcgcaatctnggctcactgcaagctccgcctcccgggttcacgccattctcctgcctcagcctcctaagtagctgggactacaggcgtctgccaccacgncnggctaatttttaaaatttttagtagagacggggtttcactgtgttagccaggatggtctccatctcctgacctcgtgatctgcccgcctcagcctcccaaagtgctgggattacaggcatgagccaccacgcccagccccattctcaattttacttatagtttgtggtttataaaatcctgtgctccaccaattagtggtttacatttagatgaaaccatggcccttgccctataaacagaagagagtaaatatacagttctccttgggtgaatacttctctagaaccacctgtttcctagcaaaacgatgagctgatgactatgcatctgtacttgtttgcatttgtctgtgtgtttattttataaacaagttgaaatcaacttacac

SEQ ID NO: 212061 - DNA, 815 bp, Homo sapiens
  misc_feature (463)..(463): n is a, c, g, or t
agcgggcttttccttcatctccaaagtcctctaaactgacagggtctcattctgtcgcccaggctggagtgtagtgacgcgatctcggctcactgcaacctctacctcccaggttcaaacgatcctcccgcctcagcctccgagtagctgggaccacaggggcccggttcgatgtccccatctgcccacggcgcctctcgtgccagctgctccgcctgtcctgcccttgctcagaccacccaagtatcatctgtgctctggcccctggccaccagttccaccccacatgctgtcctcacaggtggcgccttgccattcctggggaccaggcctccttgttctggtcatacacagtggagtgtaggtcgagcgacaagtataactataagaaatgaattttaatgtctggaatatcaaagagatgctcagtattccttcaggctctgggaacaagaagtcatcnaactggaataataatcaaaatgattattccagtctcagtgattcccagttcctctttggatctcagttctgtccagaaaattcagaaaccctatcagcacccttggactttggtgcccacttgagacattcaaaacagtcacaacagaactatctggagggtgaacctagcattttcacaaagtaccagacaaagccccagctgttcggaggagatataaaagatggaggtttatttcctcctcctttgtcagttggaaaatcaaaaggcctcttggaacagtttgaggagaaaaagaaaagggcaaaagacaaatgtgacaggtatgtaaacctttcaaatggatgaaaga

SEQ ID NO: 212062 - DNA, 1915 bp, Homo sapiens
  misc_feature (151)..(151): n is a, c, g, or t
  misc_feature (970)..(970): n is a, c, g, or t
  misc_feature (1083)..(1083): n is a, c, g, or t
  misc_feature (1173)..(1173): n is a, c, g, or t
  misc_feature (1175)..(1175): n is a, c, g, or t
ggacgcggccacctcgaagccacgtcagggcagccccaggtcgggcgcgtgccagcagccagaggtataactataagaaatgaattttaatgtctggaatatcaaagagatgctcagtattccttcaggctctgggaacaagaagtcatcnaactggaataataatcaaaatgattattccagtctcagtgattcccagttcctctttggatctcagttctgtccagaaaattcagaaaccctatcagcacccttggactttggtgcccacttgagacattcaaaacagtcacaacagaactatctggagggtgaacctagcattttcacaaagtaccagacaaagccccagctgttcggaggagatataaaagatggaggtttatttcctcctcctttgtcagttggaaaatcaaaaggcctcttggaacagtttgaggagaaaaagaaaagggcaaaagacaaatgtgacagttgcagacgtctgtggaaaagtctgaggaccatctcagttcaagaagccaatctattttggattctttggagactgtggccaagacatgtgagtgcctcatgtttgaggtatcagcagagggcactggtgaatgatgaacatgaactttctgaccccagcctggtttccagtggtgaggttcctcacagggtttcagatgagaggatgggtatatagggttagtcctgaagagatgtggagcacactgagctgggtagtgaggcccacctctatgtgacaatgctctggtcccatgatgccttttgtgaggcactaatcccccacctggtaaccatgttgcctcagggcaggtagctctgctaggtttctcatctcactgcctgaagtgagtcagcaacatccttgagtctcaaattgctgcctgtgctgtctatagacactgactgccccttaggagttagaaatactgtagtacctgctgctcttcttgctgcnttggtttcagtgagagctgtgttgtgaatcacagcatcattctcaattttttttttttttttgagacagagtctcgctctgtcacccaggctggagtgcagtggcgcaatctnggctcactgcaagctccgcctcccgggttcacgccattctcctgcctcagcctcctaagtagctgggactacaggcgtctgccaccacgncnggctaatttttaaaatttttagtagagacggggtttcactgtgttagccaggatggtctccatctcctgacctcgtgatctgcccgcctcagcctcccaaagtgctgggattacaggcatgagccaccacgcccagccccattctcaattttacttatagtttgtggtttataaaatcctgtgctccaccaattagtggtttacatttagatgaaaccatggcccttgccctataaacagaagagagtaaatatacagttctccttgggtgaatacttctctagaaccacctgtttcctagcaaaacgatgagctgatgactatgcatctgtacttgtttgcatttgtctgtgtgtttattttataaacaagttgaaatcaacttacacaaatgccatggggtggactgctcataatttacaaaaattaatgcctttttgtggcctaaaaattaatccccaactgtctgcatagaagcactgtactgtctgctggatttcaacctgggcatcccacacacagggcatatgcatctgtttagaaacttgttctggggccgggcacagtggctcccacttgtaatcctagcactttgggaggccgaggcgggcagatcacaaggtcaggagttcaagtctggcctgtctaatatggtgaaaccccatctctactaaaaatacaaaaattagctgggtgtggtggtgggcgcctgtagtcccagctactcgggaggctgaggc

SEQ ID NO: 212063 - DNA, 389 bp, Homo sapiens
attatgatatagctaggcggcattttaagaaatgagtagtctggggtggtggctgaagcctgtaatcccagcactttgggatgctgaggtgagcagattgcatgagcccaggagtttcagaccagcctaggcaacatggaggaaccccatctctacaaaaaattttaaaattagctgggtgtggttagtccaaactgagacttgccatgagtgtaaaatacatactggctttcaagggtttcacaccaaaaaaaggaatgtaaaatatcttaaaacttttaaattgatgatatgttgaaagaataatatttaagatataccaaattaaataaactataatattaaaattaatctcagtcaagtgcagtgattcatgctcataatcccag

SEQ ID NO: 212064 - DNA, 578 bp, Homo sapiens
ggtccattcgtattactgattatcctatttgtaataagatagaaaatgtctaaaatgcagtgccaaatgatacagtggcaaaaatttatacagaaaaatcatttgaaatgcaaagaaaactgggcataaggaaaaaagcatacacatgtaactatcacaagtaataagctcttcagagtcagaaaaagctagtcaacaagacacaacagttttaaagaaattcaatatactcaaactcaaccttctgtgtgtcatggagacaaacacatatacacacacatttgtacaatgtataaactgaatttatgaaaacttagaaaaaatggctaaatccaaacactgaatagaaaaatcccctcactactctaaataaggaaaatattaaaaagccgttcaggtatggtggctcacacctgtaatcccagcactttgggaggctgagatgggcaaatcacctgaggtcaggagttcaagaccagcctggctaacatggtgaaaccccgttttctactgaaaatacaaaaaattagctaggcgtggtggcacacgcctgtaattccagctactcaggaggctga

SEQ ID NO: 212065 - DNA, 234 bp, Homo sapiens
acaatgcacaggggagcttctcatcacaaagaacaatcctgcacaatatgtccatagtgctgagaatgagaaactggccagaaatgaaggtgccctttatgtcaaagctgtcaatgtgaagtgctttcaagtataacctaagatcccagaatgtgaaattcaaattctttctccatcttgttcagattgcttgaaagtaggacagaagactggagaggcaaaatgcaggaggag

SEQ ID NO: 212066 - DNA, 773 bp, Homo sapiens
attcagaactgcagatagtacagcttccacaggagcaagggatgtctgagcacaagtggctgagttccgagtgactttatgaagcactttctaccttcctctccggcatgaaaacagggattctgcacctgcatcatggacagtctggcaaaagcctctgctctgcctccggggacaagaaactagagcaaataaccgttttgaaattagatcctggcaaaattaccaacaatcaatgatggaaactgaagggagattgatttaaatcttcaatgacagttgtacagaagttgaagaaacacgtcatctttccaaagaagagtgagtagcttggttggtggtaccctaaaattagggcatgattaaggtacgtcatttcttttagttcaatcaaagtgctttgctgtttccatttcagagaatttcttattctttttttcaatttctctctcttcctcttcttcctctcattagtagatgtcttttataattgatgtcatttactgtcctttcatcaaatgtatgccacatcacttaggcgaaccagcagacagggcaccaaaatacacattagaggagactggcttccatgagacgcttcgactgtctcatcggggcacttgtaataagcatcttggtgccactgaatgcaatgctgtattcaaataatagctttcatcttcactctttttaaatataaaagtaaaccttgaagccctttgaaggacctaaccaaacaacatacctatgaaaatagatcagtaaggctttga

SEQ ID NO: 212067 - DNA, 294 bp, Homo sapiens
aaactcaatagaaaccaggaagcaaagggacctggagagaccatgcctaatggctcagttccgtgtcttttactccagtttccccagccttccctaatttgtacagtgttcaagagagccctaaggaactgaaagatctggaaccctttcttttgtattggctgaaactcagttcagaaagcagttaatgggtactattaaaataccaaataggttgggcatggtaactcatgcctgtaatcccaacactttgggaggccaaggtgggtggatcacttgagcccaggagtttaa

SEQ ID NO: 212068 - DNA, 437 bp, Homo sapiens
tatcttattggtcttctgtggaaattccatcagcatcatcttcaaggtcagttcatgtcaacatttattgaggatatattatgaactagggtctgaactgtgtaggagctggtatatcaaagaaaaatacagattctgtcctcttatctagtagtgaaaaaattcatccatccatcatctattcatccattcatccacccatcatccatccatccgttcacccatccacccatccatttatcatccatcctttcattaaacatacagatacatctaatatgatggtaggaatatgacagagttatagagttgtttggtaccaaggagtagcggcttttagcctcatctgggagggattttgaaagcttcctggagaaaatcatcatctgtttagttttgatgcatgaatagaagtcatgtgagaagtagaggcaagg

SEQ ID NO: 212069 - DNA, 556 bp, Homo sapiens
aagcatgggaagtgcttggcactcactcacattggttaaagattattaccactatcacaggtagctgctcaaggccattccacagctctcacatcccactgcaggaagagaaggcgctagcgataaacacttggtatatttcctcatccatcccaccacctctgatgtgggaaactacagcagccagggcggctgctccactctagagtggctgtgctcagaccttcagtggttttcaagagccaaggaggagagaggcaaagggggccgaacagctcagcaacctcctgagggagcttcagcctttccaccgctgaaaaacaacttcacagcccagccctgacccctttctcctagcaccatgtctcccagatctccacacactggcgccacttgtaccatatcccagagcacctgagctacggcttacttcacactttaactatactcacttttatttttggcttaagtaccaactttagcctcacccaatgcagaaatagccatgggatactaggtttgacatgctgtttaaattcttttcccggccaggcat

SEQ ID NO: 212070 - DNA, 230 bp, Homo sapiens
agggctggggatggggagcatttgaaggggattgaggaggaactgctaatgactttgaggttcctttttgagatgacaaattgtgataatgggagcacactgtattaaaaaccatcgaactgtatactttaagtagatgaattgtctggtatgtgaattgtatctcaaagctgtatataaaaaataattaatgaggccagatgtggctgctcatgcctgtaatcccagca

SEQ ID NO: 212071 - DNA, 162 bp, Homo sapiens
gggagactggagcctgctgtgctgcttatcacttcctccagtccctcatatccctcagtgacctctaaagcccctttcccaaaccccggggctggctctgagaagaaatgctgaaaaccacccttctcaggtctttgtcggctctgatgggacgaagatgcg

SEQ ID NO: 212072 - DNA, 536 bp, Homo sapiens
ctctgtttattcaaggacttcaggtttactctgagtttgtgtttctagtttcatgttcagaagtatacagcatcagtgtcctagctattacgtcactgttggcacagataataagactcattgtaactgtcttaattctctttattaattttccaaaactaccttgaattgtatggtgtatttttacataattatggtacaagtgaaaggcttggggggaaagtacaactactacagtatcaaagcagaataaatatttgcagaaaaattctgccataacttaatattttgcatatgagcctctgtacaaaatctgagttattcccggggattggtccaaaagaacatgtctgtggcccagccctagaaggccagagatgatgatggatcagaaaaaggtcagcttgagtcttgatgccaagaataatgacagaagggactaaaaaggcagaataacagtgcaaccagagttccaagagcgaatgtgcatttgccgcatggctgtgagatcgtgccccatgtggctttctgcccac

SEQ ID NO: 212073 - DNA, 400 bp, Homo sapiens
gcccttggggtaatgtactttgtgatattgccacccgcccccgccggacccgcccttgtgaatctactttgtatgatacaccctccccacccttgagaagatactttgtaatattctctccccccaacttaagaagatacttagtaatattcttccccacccccatccttaagaagatactttgtaatattgtccccccctaccttaagaagatattttgtaatattcttccgcccttgagaatgtactttgtaaaatccgtccccagcccacaaaaaattgctcctggccgggcgcggtggctcacgcctgtaatcccagcactttgggaggccgaggcgggcagatcatgaagtcaggagatcaagaccatcctggctaacattgtgaaaccctgcct

SEQ ID NO: 212074 - DNA, 280 bp, Homo sapiens
ctgccgtcttaaacatttaaatcttaaaggatcctttaaaattgtggaaggatttatatactttaaacttacctacagttttgatttccacagtgcacacatattcatttgtataagtggagaaggttttttcaatcttttttatagtggtaaaatatacataacaaaaatttaccattttaaccattttaagtgcatatttcagtcacattaaatacattatgctattgtgcaacaacgaattaagggtaccggagctcgaaattcggtaaatcatggg

SEQ ID NO: 212075 - DNA, 545 bp, Homo sapiens
tatggcatctgtagtagccaagggttgacattagagaggatgaaataagcaagtggtaatggctctcaggaattatggtaacaaggagaagaggatggttcttcactgctaagcagcttgactaggtgagagacagccagcatcttactgcttcctggcacatggagtgttccactgagaatcacaggcagactcaggcaaccagccacttttcaaatgggctgtcttctgtagtgctgttccaccaccattctgtgggcccaactgttgccattctgggggatctgccattgctagcttaattccattcacttcaattcaattgctgttatgaaaggcctactagtgctattcccctgagaatctatagagacagggtagaactcttggatgaaaaggtgagggcttaggacatctggttagtggaacttacttatttttgggcctctttcatcaagtaacaccagctgatgcctaggagtgtgggagtcatatcggctttgttgtcgtctgttagaaactcttcgtgttcacaaaaaaaaaaa

SEQ ID NO: 212076 - DNA, 761 bp, Homo sapiens
  misc_feature (31)..(31): n is a, c, g, or t
  misc_feature (70)..(70): n is a, c, g, or t
  misc_feature (75)..(75): n is a, c, g, or t
  misc_feature (78)..(78): n is a, c, g, or t
  misc_feature (85)..(86): n is a, c, g, or t
  misc_feature (89)..(89): n is a, c, g, or t
  misc_feature (93)..(93): n is a, c, g, or t
  misc_feature (105)..(105): n is a, c, g, or t
  misc_feature (109)..(109): n is a, c, g, or t
  misc_feature (131)..(131): n is a, c, g, or t
  misc_feature (143)..(143): n is a, c, g, or t
  misc_feature (169)..(169): n is a, c, g, or t
  misc_feature (181)..(181): n is a, c, g, or t
  misc_feature (224)..(224): n is a, c, g, or t
  misc_feature (229)..(229): n is a, c, g, or t
  misc_feature (231)..(231): n is a, c, g, or t
  misc_feature (239)..(239): n is a, c, g, or t
  misc_feature (251)..(251): n is a, c, g, or t
  misc_feature (278)..(278): n is a, c, g, or t
  misc_feature (305)..(309): n is a, c, g, or t
  misc_feature (320)..(320): n is a, c, g, or t
  misc_feature (325)..(326): n is a, c, g, or t
  misc_feature (333)..(333): n is a, c, g, or t
  misc_feature (349)..(349): n is a, c, g, or t
  misc_feature (383)..(384): n is a, c, g, or t
  misc_feature (389)..(389): n is a, c, g, or t
  misc_feature (398)..(401): n is a, c, g, or t
  misc_feature (413)..(413): n is a, c, g, or t
  misc_feature (434)..(434): n is a, c, g, or t
ttgtgggctgtgggtttgtttttgtcatatnatttgacatccttctcagacagcttgcagcccgagtgcntggangtngatgtgnnttnaggnttcccttcgctngttnccgatgagaatttgggtcactnctactgtttcanggcaaaaagacttcaatagaggtggncattcctcatcncgcagtcactcacaggcacttcatcttcttaagacacacttcnctttncnccagtganaatttcctttcnagttctcctacttgtcaactgcccccnccccattcttcgtctcccagcttatcnnnnnttgggcgaacngatcnnttcacanggttgaggaatctttncattcttcaccttgcctcagccgcgcattaaganncctangtagccccnnnnccgcggcccaangggccctccaagttaacagangacaagtgaattcatcctatgcctttgcaaacatcctctggatcctcatgtcagctaatataacaacccaaataactcaatcctcaatctaaatatcctgaactattctctctcaacccctatattataaaacctacaaactcaatctctattgaatatatatttacttccccctttgtcttcttactgtcttcttcagatagttattcttgccttggccattataacagccttccatttggtctcctacctctaataattctgcacatccaatccatgatatgaactataccagatatctttaacaggcctgatcatattatgagc

SEQ ID NO: 212077 - DNA, 373 bp, Homo sapiens
ctcctgacctgaagtgatccacctgcctcagcctcccaaagtgctggtattacaggcatgagccactgcacctggccagaaatgttttatttatatttgtcagcaaccagcaaaggtgtaatattttaaaagataacatttataatagcatcaggaatataaagcatccaagaattaatctaacaaaagatgtacaagacctttagatggagaaaattataaaaagaaagatggtgcatagatccaaccctgaagttcatgtttgcggttgcttaaggcaaagaacctctgacttcagtaaggtgacgtctgagtcttaggaaaacctcagtcagcctgtcctgccataatgtgccccacttggggagagtag

SEQ ID NO: 212078 - DNA, 441 bp, Homo sapiens
gggcaacagatccagaccttgtctctaaattaaaacaaaacaaaaccaaacaaaaaaacagctgcataaggaaggttataacagaacactgttctctctttacacacacacacacacacacacacacacacacacatcacacgtacaggaattattttaacctatcagttacatggtggtttcacaggtttcaacttcatcaacccagaaccacaatcacagattttggctagactctgactctcatctactagtgataacaacaagttccctgtggaagtttatagccccacagattatcagggaccatttttgctttctgtaccatgtggttctttcctgctacagattcaaaatgcttttttgtccattcctaatacttttcatttatactgatttctttgatgagaataaccttaaattcatatgtcttactttcat

SEQ ID NO: 212079 - DNA, 181 bp, Homo sapiens
ggtttgtccgtgtagacccaacacagtgttcttagtcttgccgtatgcttccaggtaagcaagttgtatgtgacggtcaagttcccagttcccagagggaatggcaatggataataaggttgacctgagccatagtggacttgctctcctcaagatgctgtgtcgtaaaaatgagctatat

SEQ ID NO: 212080 - DNA, 406 bp, Homo sapiens
aacaatgcctgaatcttcagggtccatttctgccgcattcactagcaaccacaaatgtgacttaattttactttggaaataatgcttacccattgtgagatgctgtaatatgaaccatcattacatgttaacatggcacatggaattttgagtgtctaagttacatttttagagttgtttcttagtagccatgtgagtttccactccaaaaacacaagctaaaaacttgttttgagtgaaggacatctagggcaaatggtggctgaaagtgaatgagatcccaattactctttcttgtactgtataaggaaaagaaaataagtgcttttcttgttgggtgtttgctaatttataattaccgttttatgcttttcaacatttttaataaagttttttattgttggct

SEQ ID NO: 212081 - DNA, 452 bp, Homo sapiens
acagtggtagcttaaaaggactgttgagagcctttcacaagattaactctaaacctattaaatttttacaaaacaagcagatcctattgtttcttgcctggagaaaatcagaatcttctaggtgttaagtatttagggaagtctgaaggattcttctatgtactgagaatctgaatttgaaactagttagaacaggaacaatgctgtggacacaaagacatcaaagaatccaccataagaatgcattttctttctttctttctttctttttttttgagacaagctcttactctgtcccctaggctggagggcagtggcttgatttcagctcactgcacttctgctgcgactacagacacgtgccaccacacccagctaatttttttttttttcagatggagtctcgctctgttgcccaggctggagttcagtggcacaatctcggctcactg

SEQ ID NO: 212082 - DNA, 613 bp, Homo sapiens
tgtgtgtgtgcacacacatacgtatacccacatacatatgcacacacacaggcattcacacacgagtacacatgtacacatgcacatattcatgcagcacatgcacacatgtacatgtacacagacacaagtgtgcacacatagacaactgcaacaatgtcaggagtcaccagtttcttgcaatggagctaagacattactctttattagttgtatccttgttttctcacttgagtctttgggaaatgacaccttcctgcagccctgatttactgtgggagatgctttgttgagaaatgaataactaagcattttgtacagaggtatgaggagagatgctggctcatctcccagggctcacagttccagctgtcagcccaagaatgagtaggacaggtgaggcctcagcacagtgacaaaggagcagggcagaagtcacctagatctggaacatcatatcccttgcccttctgttctccggattataccttcctgttccaggaagatgtcagtcatcaaacagaaatcaactagtcacaccctctagtggtacgagggacacgccaatgaatcaggcagagactgcgccttcttatgaccttcattctagtac

SEQ ID NO: 212083 - DNA, 179 bp, Homo sapiens
ttgtgaataaaatctgatagcacatgccttattccttgatattttatcagacagagtgaattgtgtgggtataagccatgaagtggaagcatggcatgcatgtttgagaagcagcaagcagaccagcaaggcgggaacaaagttaggagaggagagttaggaagtgagtgcagaggtat

SEQ ID NO: 212084 - DNA, 407 bp, Homo sapiens
gtccagggaatagctttggaatatgagaccttgaaatagcaactctgtttccagcaacccagggaaattatctgaatgtattatttagtctggggcaagggaatctttagcggggattctcagggagtttggccccatcagtgatcgtatgggtgtcaaggctcttcacatgtcatgttcttttcatttgtagcaggtaggaatcatgcctgtctcattcatggctgttgccttggcatctgtcacagtgcttgaacaaacatgaactagaacaaacttttattccccgatttcattcttttgcttttgttcttttaaaatgttagaacattgtgaattaagtgggggagactagtgaacaggtggcagttttctataaatcgaagcaaataaatttgtatttaatt

SEQ ID NO: 212085 - DNA, 566 bp, Homo sapiens
  misc_feature (547)..(547): n is a, c, g, or t
aggatctgattcaccacctggtacatagtaggaattcatgatattgtagctgttcttataattattaatttgacctggaacttccatgtcctgattcttagatcttgcatgattatacacgtgttatctaattgatgaatttcaaatatgatctatttcaacagttaaatggctgaacagtcattaatttcaggtggtcctaaacccaaatcagtaaattctttgaggtggataaacctacatttcatttgtagtttaaaaagaaaaagtgaaaaaagtatttaaagtcctgggtcatggaaggcggagcttgcagtgagccaagtttacaccactgcactccagcctgggtaacagagcgagactctgtctcaaaaaaaataaaaaataaaatgggactgacaaattatttaataaagtctgataacactattagccaaggtggaaggggtggatactctcatgcacgctagtgagagtgctagttgatttgttgatttgacccatgcagagagtatggtgaaggaaagaagtccttagtacatgnggctggtgataggcccgat

SEQ ID NO: 212086 - DNA, 275 bp, Homo sapiens
aggatctgattcaccacctggtacatagtaggaattcatgatattgtagctgttcttataattattaatttgacctggaacttccatgtcctgattcttagatcttgcatgattatacacgtgttatctaattgatgaatttcaaatatgatctatttcaacagttaaatggctgaacagtcattaatttcaggtggtcctaaacccaaatcagtaaattctttgaggtgtgtatggtggtatggggtggtatcagagtggtatagcgtggtata

SEQ ID NO: 212087 - DNA, 350 bp, Homo sapiens
gaaacattcacttggggtaagacaaatggtattaaatgagaaaacacaccatgaattgcaaatggagctgagttaatttgttgctacagtagtgttgccctactgttaaatgaaggctgtgtaattatcttgctggcagagataatgtcaaaacctcatttctccttacatgcctcgtttttacatgagggctaattgagctgcaaggtgacaactgattatatatggctatcatctggtcctcttgctcaatttgcaaataacgttacccttttttacagtgatgatttttatcggacttcgagtaagatattaaagaaactttttgaactctttgagtaattcacaac

SEQ ID NO: 212088 - DNA, 523 bp, Homo sapiens
tgctggccctttgggacctggtggcagagggaccccgtgtcaacctgtctttggcttcctttgtggccccgtggtcactgaaaagccagaatgaatattcttcctttcggaataaaaattgagctgtggaagttttgtttgctttgatgaattacttccaggctgctgtttatttggagagcaaagctccccagctgcagggtgggtagaggctgcggtcactcccctcgtcaatgctggttcctgttcctgaggccgagagaactcctgacagcagagtgggcatatcttggtagttgcagcttttcaagacagtgtggcccagtggggagagagcagaaaacctgggttatgctggctctgccatttatcagctgtgtaaccttgggcaagtgatacaacctctgtgtgcctcagtttcctttcctcacctgtccacaggggatcataatcttggccctgcatgccttacaggagcgttaagagcatcaaatgaaacaataaaaatgaaaacatttataaa

SEQ ID NO: 212089 - DNA, 447 bp, Homo sapiens
gctcaggggtccaggcccggctcacctgggtctctgctttgagttgctcaccagctgcaggtgagctgtagtcacccccagctcagcaacagaaggatccagttccaagctcacatggctgttggcaggattcagttcctcatgggctgtgggcctaagggcctcagttccttgctagctgttgacataaggctgccttcagtcccatgccacatgggcctaactcagcagcttgcgccatcagagcacacatgccagcaggcaagggagagagtcagtgagacagattacaactgaatcacagaagtgacatcccatcacctgggccatgtgccactgggtagaagcaagtcactagggcagctcactctcaaggggaggggtttacaccatgaaggtgggaataccaggaggggaacactggaggccacctaagaagtccgccta

SEQ ID NO: 212090 - DNA, 685 bp, Homo sapiens
ctataaatcatgctgctataaagacacatgcacacgtatgtttattgcggcactattcacaatagcaaagacttggaaccaacccaaatgtccaacaatgatagactggattaagcaaatgtggcacatatacaccatggaatactatgcagccataaaaaatgatgagttcatgtcctttgtagggacatggatgaaattggaaaccatcattctcagtaaactatcgcaagaacaaaaaaccaaacaccgcatattctcactcataggtgggaattgaacaatgagatcacatggacacaggaaggggaatatcacactctggggactgtggtggggtcgggggaggggggagggatagcattgggagatatacctaatgctagatgacacgttagtgggtgcagcgcaccagcatggcacatgtatacatatgtaactaacctgcacaatgtgcacatgtaccctaaagcttagagtataataaaaaaaaaaattaaaaaaaaaaaaaatgatacatgtatacaatgtggtatgattaaattaggctaattaacatatccttcgcctcacatacttatcattacgttgtaatatattttcatattgggtaaaattaaatgtattactaaattgacttattctttttttacttttttaatgcagctattaaaatatttaagat

SEQ ID NO: 212091 - DNA, 459 bp, Homo sapiens
gtaatcccagctactcgggaggctgagagaggagaatcgcttgtacccaggaggtagaggttgcggtgagcagagatcacaccactgcactccagcctgggcaatagaacgagtctccatctcagaatgaaatgacatgacatgatgaaatgaaataatgaaattaataatgaaatgtgggtggcgcactccagcctgggtgatagagtgagtctctgtcatgaaatgaaatgggaaatgaaatatgaaatgaataatgaaatgctgggtgcactccagcctgggtgatagagcgagtctacgtcatgaaattgaaaaatgaaatgaaatagatgaaatgaaaaaatgaaataataatgaaatgccgggtgtggtggtgcactccagactgggcgatagagcgagtctctgtctcgaaatgaaatgaaacaaatgaaatgaaatgaaatgagaaatgaa

SEQ ID NO: 212092 - DNA, 534 bp, Homo sapiens
  misc_feature (150)..(150): n is a, c, g, or t
  misc_feature (158)..(158): n is a, c, g, or t
atttctaaaataattttttcttatttatatactgacttttcaaaatacaaaattaaaatatcatgtctgacttcagtgatcttttctcgggaggctttttagaaatgagatctttcagtcatcaggtagaggttgctggtaaagatggangtcttggntgtgttacccagggtggactcaaactcccgggctcaagtgataatgaaatgacatgacatgatgaaatgaaataatgaaattaataatgaaatgtgggtggcgcactccagcctgggtgatagagtgagtctctgtcatgaaatgaaatgggaaatgaaatatgaaatgaataatgaaatgctgggtgcactccagcctgggtgatagagcgagtctacgtcatgaaattgaaaaatgaaatgaaatagatgaaatgaaaaaatgaaataataatgaaatgccgggtgtggtggtgcactccagactgggcgatagagcgagtctctgtctcgaaatgaaatgaaacaaatgaaatgaaatgaaatgagaaatgaa

SEQ ID NO: 212093 - DNA, 334 bp, Homo sapiens
tcaaaaaaaaaaaaaaaaaaaaaaaaaaaagatatttaataaactttctgcatggcagagtctatacttccaaatcacaaatgaaaacctgaatttcagttcttcatagaatagttgggtgtccttgggcaagttatttaatttttctgagcttcagtttccttatctatgaaaggaaaattgagtgcctaccccagggtcaaatatataagtacttaataaatgctagttaccttcctcttatttcttacaaagtttttttggtggctaacattatttccctttaactgcaaatgttgtggtgtttatagttttaattttattgtgctatgta

SEQ ID NO: 212094 - DNA, 391 bp, Homo sapiens
tttcagtatctgcggattttggtatctgagggaggtcctagaaccaattctccatggatgactactgaaaaggggttactatcctatagataaagtgattaagagcatggagccagattggctaggtttgaatcccaattctgcaacttactagcagtataacttggaacaggttactaaacttctctgtgctacaatttccttatttgtaaatggaagataagaatagcatatgcttggtagggttgttgtgagaataatatgaattaatacaagtaatcacaataaatgctagttaatattattacttaaaagaacaagaaaatgaataagaaaaagacaaacacccttgtagaaaaataggggaaagcccaggaataagcaattcaca

SEQ ID NO: 212095 - DNA, 487 bp, Homo sapiens
tgctttttttcctaactcaagatggtacttagctcattagttttttcattggcttcaagcctcttttcctctaatacacacatgtgagattttaaattttctacaaactactactttagctttatcccacaagtttttgatatgcagtattttgatcatagttctaaatacattcaaatttcccataattctttgatgtactagttatttagtaatatgtttccaaacatatggaattttcttttttttttattgactactgaggtaatcacattgtggtttctgcaataatcagacccttgaaatttgctgaaacttgctttctgacctagttgatggtcaaaagttttaactttttcatgtgcttaaaaatatgtatctgttgagtgtgatgtactgtttgccttgtatatcagcttattctatcctttaaatttatatgttaaccaaagcacatgtaaaataaggaaacagtatattgaaaatg

SEQ ID NO: 212096 - DNA, 369 bp, Homo sapiens
aatctgagggatgattccttaattgtgcacttaagggaatgcctgtaattttctcatttgaaagaggctgaaaaaggtaaatttgtcaaaatattagtaataataattatgtttactgagtactgactctgtgccaagcactgtgctaagagctgggatttgcggcattatccatcattcatttggtgtatcagcccaggttttatctgatttgttcaactttttcttaacaaatgcccccccctcaaaaaaaatctagtgtgttctcaaattatacattaaatagaaattagtcattggatatttttaggcaaattaaaatcttcataatttacacacaaagtgcttggattttggattggtgaacag

SEQ ID NO: 212097 - DNA, 782 bp, Homo sapiens
gggctgtgaatttgtcctgatacgattctgcaagattgtttctctggctgtgctcagcagcctaaataagtaaaggagaagggaagatggattataagattgatccagagttgggagcaagctagataaatgcagtgggaggaatatgtgggatgccaggttgtttgagattttggtgacagaatggtttggttgattaaccctcagttcttacgaggttaagggcccatagatgtcatccagattggggtctttagaagtaggaattttaggtcgggcatggtggctcacacctgtaatcccagcactttgggaggccaaggagggtggatcacctaaagttaggagttcaagaccagcctggccaacacggtgaaaccctgtctctactaaaaatacaaaattagccaggtgtggtggcacatgtctgtaatcccagctacttgggaggctgaggcaggagaatcacttgaaccctgtggttggagatgacagtgagccaggattgtgccactgcactccagcctggacaacacagtgagactccatcttaaaaaaaaaaaaaggaattttatcttcaggtctattctgaagccacagggaagaattaaggataacctcaccgagatgaaagctaatatcacaaatgcctaaggaaggttcacttactgttccagcaagagagttaggtgttctccccattacaattatcattaaaacaaaaaaggatcttctgctaccttttggtggtgacaaggaagtgacaagacttcattccaatc

SEQ ID NO: 212098 - DNA, 404 bp, Homo sapiens
ctcgtttttgtcttttaattatgaaattttggagttttttatatacccttgattctaatcatttgtcaaatacatgttttacaaatatattctcctggtctgtggcttccgtattcattttcttgaattatctctctatgagcaaaaactttagttttaaataagtctaatttatcatttttaagatcagtttttagaattataataccttaaaatttgtttaaatgaattacacacaggcagttactatgaagagacagtttgagttaccagttaaagaaattgtaagccatgcatggtggtgcatgcctgtaattgtagctacttgagaggctagggcaagaagcttgcatgagtcaaggggtttgagaccagcctgggaaatatagcgagactccatctca

SEQ ID NO: 212099 - DNA, 375 bp, Homo sapiens
tctcttctttttctccaggaaagaggactattcaaacaaaggcactttgtggtccctttaacctgctaggagccaagagtgttgccagccaaacatgtcgagaagcagagagaaaaactgtcccatttccaattggtagtaatcccagctcaaagcagcattcattatccaaggtgctggctacccaggacatagagttgggaggaaagaaagggtgcctggtttgagaactttatttctagaagaataaagtggcccttgctagaaaatggtctcttgcagtaccttctagcagcaagtgaacactaggaagctttaataagaaatgtcactagattccaaataagaaaaccaaaaccggtcaggcacagtgac

SEQ ID NO: 212100 - DNA, 332 bp, Homo sapiens
agtagtttctcacagcatccagcataggttactcaagacaaaaagaggagtttggatgaaatggcatagggctgactactggactaagaattctggattttattctgcaagctggtggagacacatcaaagggtattgaacaggaggctgacaggattacatctctgtgttacagacattaggtctttgcataaaagtatatgctcccttatattatacacttacagagggctggctttgtttaacttgtcctacataactttcagtactgaaagtgagcattataccattgatgaggttgctattaaacctatgtaaaacatcaaaaaaaa

SEQ ID NO: 212101 - DNA, 396 bp, Homo sapiens
tttcagtgtgggttgtgaccttaaagatattattctctaggtccaaatgctatagatgaagaaactggggcaggacaaaactaagagcttcatttaagtttaaattgctatttcagctgggcgtggtggctcatgcctgtaataccaacagtttgggagcccaatgtgggtggatcacttgaggtcaggagttcaagagcagcctggccaacatggtgaaaccccaactctactaaaaatacaaatattagctgggtgtggtggcccatgcctgcaatccctagctacttggggggctgaggcaggagaaactcttgaacccaggaggcggaggttgcagtgagccaagatagcaccactgcactccaacctgggcaatagagtgagactgtccaa

SEQ ID NO: 212102 - DNA, 172 bp, Homo sapiens
aaatagcttgaattaaatttcataagtcccatataaaggatagcagtgttttgttccgaattatttatggacacctaaagataaccacatactacttaatgtgatataatagtaaatattataccagttaaagttctttggttaaaagcagtagaaatcaactctggctaac

SEQ ID NO: 212103 - DNA, 546 bp, Homo sapiens
cctcaaaagcggacagaacaaaacgaaaaatagacaaatgggattacatcaagctaaacgcctccacacagcaaagcaaacaatcaacagagtgaagagaaaacctacaggataggggaacaaatctgcaaactattcatccgacaagggatttttaataaccagaatacataaagaactcggtccagcgaggtggctcatgcctataatcccaacactttgagaggccgaggcgggaagatggcttgaggccaggagttcgagactggcctgtgcaatatggcgagaccccgtctctacaaaacatacaaaaattagccaggcgtggtggcacgcacctattgtcccagctacttgggggctgaggtgaatcacttgagcctaggaggtagaggctgcagtgagctgtgatcacaccactgcactccagccaggtgacagagcaagatcctgactcaaaaaacataaaaaatttaaaactttaaaaaaaaaaagtcaacttaatagcagggccgagcacgatggctcatgcctgtaatcccagca

SEQ ID NO: 212104 - DNA, 807 bp, Homo sapiens
aactagaaattcagttcagtgatgatggtggtgtctacagagtcagcattttccacgtctttgtccatgagaggttcacagaaggccccacttctgatcccagctgagatctctcttcctcctctagaccccagtaaaacccactgatcgcatccctagcacagggctcaccttgtctttattgccttcctttgacagacatggcttatctcatcaagctgggaacactgcagaggcagaaagcaccccctacacatacacgccccaggtagcaccagcacaggcttgcagacaggaggcaggaccagcttacagacagagaatgaagaggatgaaggcaggccagactctgggaaaagtagactaatggtgtctgaaaaaagtttcattcatgcatcaaacactaatagaggcttgtgctaggttctaaggagagagaggcagtactatgctctatgtcagggtgggggtgaggagcagacaggtaagctaacacctttagtgtcactggcaagggaggttctcaatagcatgggaacttcctatgatgctcatagaaaggggaggaaggaggggtgctttctgctcataatgagtcagggagagctccccagaggatgtatctgaactgggtcttggaggatgacaaaaggaaaaggacatcccaaacagggagaaaaccatgtgcaaaggccaggaggacagaagggaagagcgtgcccagagcatttgggcagaaccagcccactggccaagaggccgtgtgaggagttgggggatgcactacagaggcagcttgtgcgaatc

SEQ ID NO: 212105 - DNA, 791 bp, Homo sapiens
tgctttcatctttgataatggctcagacccttctgttatttactgtgtgtttctgactgattcttctcaacagtcaatattttaatgccttcggatgatttctactgttgtctgtttcaccacatttatcttcctgtgacccatttgtcattagtctaaccatcttcatttaaactattaaaaaggcagagctatttgcattgtatcactgaagctggtagtgaaaataatgctcccaggatagatttctttttccttttagtttttcgagaaatttcaagtagcctgtttagattttgactgaagtatttttactgcttaattgctggcagtacagaccagcatatgaactgaactctgttgttaaatatggatcatcgtctctaacccttcaaaggaaattcgtgaactgtacatcctacctcctctgtaggcagtggcaatttttatgcagtaacattcagcaataccctatttatccagctttgtccaaaagtgaagtcgttgaggaaaaatatctggaacattaaaacttttaaaacttctgtggataaaaaaagaaaaaaccactttctaaaatatattataaacatccttgccataaacagcagaccttaccaagcagaatgtgttcttataaaattgggtcattattagaaacacagttgggtactgcacaattaagcatgaaatcatccaaaatcatgtttccatctcaattgtggaacccagtgttcaaacttgttaaatcagtaacctgaattttgtaaataaaacaaatttcttatttg

SEQ ID NO: 212106 - DNA, 1109 bp, Homo sapiens
atatttcttatactcttgatgaggagaacagtattttctctaccttatatattgattgacactttgaaaacagaggtttgcctgatacaatttctagtgagactagactccctaaaatacaagcatggaaattttttgttgtcttctgcccaggactcacaaagccaccatagaatgtgtctgcataagcagtcaggcaactgtaaactttgtaaactttggggaagctgcagagtaggcttcagcgcagtcccaagggatccgggagggggtatctgacctatttctgtatagcctgaaaagttacagtaaagtctactttcagggggaatgatcacattctttgtaccaaactcaaggcagagatattcttgatctctgtgggaataatcacaatttaaccaaagtagcaaagagtaattttgttttgtgtctctgaagatggagttgcttgctgtagctggtctcctcaccagttccctgttagagagtagattctacctcactccatctcccccaacccccgattttgaaatggtgaaaaggaaatatagaaaaggttatcttctctagagttgcctggcaatatgacctagagaacatgggtagagacttgggaagtttttgttttctttctttaagcagtctgataaactcaggcagcagaggggatctttacttcatttgttggttcactttcttctgactatttagttaattatgtctagaataagaatgagttcgtaccaacattcagtttgaacccatgttttatccaagagatgaaaatagtattttcaaagctaagctttttgaaaatgaaaaactgtgaggtaattgtggcttaggttattgcaacaatgattgtcttataacttaaagtagatttcacttatatttttcaaatatgaaggatgcttgaaaggacccttgtgtgagagcttcattatgtctctctggtcttatcagagagattctgtgggacactcatttttgctgatgaggttaatagcttaaccggcctttttcccagcaaccactggtaaaccaagtggtcagattggtgatacttccatactaggatgcgtgagagttcgatcctatttccc

SEQ ID NO: 212107 - DNA, 776 bp, Homo sapiens
tctcagattcttgaccttcagaaactgccaaataataaacatttttgtttttaagctgctaaattttggaatgacttgttattcaacaatatataaattgtacaccctgataaactataaattgtgcggagaaaataattttcagagatagccttatgtactcccctaaaccttttttccccagaaatctattttcaaaaatatactctaccaagtgaagaaagaaaccaagaaagacaaagaatgtttagttgtgattggagatcagaaggagagtgttttaggcatgattcgccttgttatgctgcaataataagcaattccaaaatattagtggctagaaacacaaaggttgattttgtatctttgcaacatatccaacacaagtcagtcaagggttctgatcattgtagtcactcaggaatctaagctgattcagtctctagtattctatcattctaccgtaacaataagaagctttagcgttcaccatgtcagtcaaaaatgcgtggaaaattttaaactgactcttacatgcctctatgtaggagtgatatatgtcattttcatttcacttcatcatccaaaggaagtcacgtggtcatgcctaactctgaggggacaggggattataatcactaatatttttaagagaggtaagagaattaggaaaatattggagcattagtattacctgcaaagcctaggatccggaaaacagaacccacttggcggaaatcacgggtgcccaggggggctggcacaccttatctttc

SEQ ID NO: 212108 - DNA, 518 bp, Homo sapiens
atggagattggtattggtaggcttccttgttcattaaaaatgaacttctttatttttgccatttctgttgagctcaatttcccagtctcttttaaatcagctttagagatttgaggattgccagtggggtgtgttatttgacctcacttaatatttgtgtttggttcagatcataaagcaaaccaaattgactgcctctgctcagtacccaataggacttataaccaggcaaaatgtgggttgaaagatgtattcccaattgcaatgcagtggaagtgtttgtattaaacaaagtttcagagaactgcttaaggatctcagggtggtatgtgttctagatatttttttcttaacaaattaacactgtcaaattattcaggttgaaataattttttaacaaagtgcctttgctgtcctgtcacagtgctttattgctaatttttctcatgagatgattctccctgttgcttttgcctttgtctcacaatgtaccatctgaaactgctaagaaagttgga

SEQ ID NO: 212109 - DNA, 356 bp, Homo sapiens
ttcaacctctttgcaaacctccaacacctcttttaccataatcactgttagctaatgaccttgatacctatttgactgtcagaatggaagtctttaggaagaacttccataaactctcccacctcatctacttaactcctacatctgtgtccattcactctaccttctttcctgctatgaagaattagcttgaactgttcatactgttagctaagaccaacccctcattgatgcactataaaggcatccctttacacccactaaagcatgactctagcaattctcaacattctcttcgaccagaatcattctcttttggatcattcccgtcagcctaatgtcatttctctcacctt

SEQ ID NO: 212110 - DNA, 457 bp, Homo sapiens
agtcagtcttgttatcttcagtccaaccactgaatttgttccacatgccatgctctcttaccaccatagctttgtgtgcaacattctcactcctggaatgacttccttctttctctgcttggtacacgtcaacaaaggttagcccaagaggcaaaaatggtggacattttataaatacttaattggctaacttgtaggcaccatgcagaacactttaaatccattatttagtttccctgacaagcctgtggttagaggctattgtagttctcgttttataggaaaccgagaaaacacaggaggccatagattattacctccttttgtttcatttaacatgttttaaataacacataactttactaacattttaataacataattttatttaacacatacacatatatacatatataatatatagatataggtagatacatacatagatatagaatag

SEQ ID NO: 212111 - DNA, 268 bp, Homo sapiens
ttattataactctttaatatagcatggagaaaataagttttgtaatcactatctttgggtgatatgaaaactctaggtattgggagaagcaggactctgctgatactacttgtgcttctccacgctggcatttacctttcttgtaaacactagcaatctctgtagaggaagctaagccaaggctatgcacattgaaacctaaaagatggagactggtagcagagctcttctttgagcactgctccgtgtattgtaactttactcttct

SEQ ID NO: 212112 - DNA, 555 bp, Homo sapiens
aggcaggactgcaaggcagtgttgtgttaaatgcttgaaacctgaaatcagataaatgggggaatgaatcttggcttgacttcccactggggagcctcaactcctcatctgttaaatgggaataataataatactcacctcatcaaggtattggagaagccattcagatctcatctgtaaattgcttggcatggcaaccagcacatagtaatcattaaataactagtaatagctaaaatgcataatgaagtcaaggacttgtgaaaacagacttcctcctcactcctatatttccaatcattgaagtcactaattaacacgtcgtctctactagcctcagagagatgatatgccgagttcagttaacatcgatgatgagaaattttcagatgacctgattaatgtttttattgctcagagaaggaaaaggaagacccagagagggaaagtgaagtatctcgtccaaggtcatacaaagccaagcctagaacccagaaagatgtcctcatctctgatacagtgtcttttctgcccaagaacaccaactcccatctc

SEQ ID NO: 212113 - DNA, 419 bp, Homo sapiens
cctaaatgaggatttcctttttgaaaaacctactcagcattctgatctgtccctgcttaaacctatttagtctggtcttatagtccctgacttgagcccaaagagcaaggtttctcaaggtctctgtgcaggtctttgatgctctttcgtggaagagatttacagtggttacagccataaccggtgcctgtggctgaaccatgccttctgtagtgtgttcagcccttcccttgaattaatgcaagttccacctttgctttaatgggaggggacagaaggaccactttgaggaagcggaggcaagaagatagtctgcaaaagccatgacgtggcactgaaatgaagccctgtgtagggttttactcagacgttagagaactggctgcccctgagtgctgtgctaactagggaaagaaaaa

SEQ ID NO: 212114 - DNA, 341 bp, Homo sapiens
  misc_feature (4)..(4): n is a, c, g, or t
  misc_feature (27)..(27): n is a, c, g, or t
  misc_feature (54)..(54): n is a, c, g, or t
  misc_feature (77)..(77): n is a, c, g, or t
gctntgtcgcacaggctggagtacagnggtatgatctcggctcactgcaacatntgcctcccaggttcaagcaactntcatgcctcagcctcccgagtagctgggactacaggcgtgtgccaccacacccggttaatttttgcatttttagtagaggcgaggtttcaccatattggaagttatcttggatgaaaaagaacaccaagtatttctatatattatatacaatgtaaggaaacaggcattgggattattagcaagaactgcctggagttattctaaatgctgcctaagaattatttacattgcctgtcaaaatgtattatctaacacatgggcat

SEQ ID NO: 212115 - DNA, 1206 bp, Homo sapiens
cgtaacaagacactccaaaatttagtggttttcagcagcagtgactcgactgggcagttctttgctgttctgggctcactcatatggctggctgggcctgggtctggacctgggccgctatgtgatttttatcttgggctttgaaaattcagtgtagggacctataaatattcaaagatgatgagatgcatccttatatattttttgtattcactctgaagctgggaaagattaaaaggaactcctgcccttgggtccctaatgaagtctgggtcctaactcgctctattaagttctgtggctggtcaagtcactgatctaccttgggctttatttgatataaatcatataaatcagcaggtctcagcttttctgtccaaagccacctgagggataagataaattctcattagcaaataaacttttttaaggtataaatactattataaaaataacagatatttacagtacaacaatgcaagaggatcctaaatgaaaagcgaatgttttttctcaactctcattcccttattccagctccacagaggtaaccaattgttttttttttgttgttgttgtatggtttgtttttgttagacagtagtcttttcctgaacagtgctgctccttgtggagcaaggctaattcataggcagtgcatccagagtctgccccagttgattttgtgtgtaaccttctagcaactttttgaaaattaatttgttcttaaatatgcacatcatttttatttatttatgtttttgagacagggtctcactctgtcactcaacttggacaacagagcaagaccctgtcttaaaaaaagaaaaaaagaataatggagtttaaatatgtaaatgacaagtctaagatttcaaggtcatactttcatgctaaggagccatcacagctacatatatatatagtgtgtatacatatatagtgtatatacatatagtgtatatatatatagtgtatatatatagtgtatatatatagtgtgtatatatatagtgtgtgtatatatatatagtgtgtatatatatatagtgtgtgtatatatatatatatatttttgtttgtttgtttgtttgtttttggaagatggagtttcgctgttgttgcccaggctgcagtgcaatggtgcaatctctgctcaccacaacctcctcctcccaggttcaagcgattctgcctcagcctccc

SEQ ID NO: 212116 - DNA, 473 bp, Homo sapiens
caagcgattctcctgcctcagccgcctgagtaggtgggattacaggcacccaccaccacacccggctaattttttgtgtgtgtttttagtagagacagggtttcaccatgttggtcaggctggtctcgaactcctgacctcatgatccacccacctcggcctcccaaaatgctgattacaggcatgagccaccatgcccggtcctaagttttggatttttaatagagatggggttttgccatgccaggctggtctcaaactcctgacctccagtgatcttcccttctcgaactcccaaagtgctgggattacaggtgtgagccactgtgcccggccaggaagacaggtttcttttcagagtttcacctttagccagaattttcttatcagtcatatctatatgactactgacatacaagagaggagataggaaggtaggtagctagctagatagtcagataggtagatagata

SEQ ID NO: 212117 - DNA, 385 bp, Homo sapiens
gcttttttttttgtttgtttgtttgtttttggtctgggtcatttgttacttagttccttgaaatgtcttggatgaaaattgggttctgcacactggatctggctggttgattctgcctgcgaagactgaagttggctttgatgcctatagatgcactcacccttcgctcgggttccagaggccatgtggtgtatggggaaggcaatgtagatggtgggaaaatcacttgacttctcttgctcatctgtcaaatgaaactgttaccatccttccttcgtgcatccaaatatagatgtaaggagcacatgtgattatactgcacacaccaacagttcctgactatccaagtgctgtataattataaggttttatagtcattattctg

SEQ ID NO: 212118 - DNA, 182 bp, Homo sapiens
atcctctatggtggaaaatcaataaatgcctataaaaaggaaaattaagatataacaatttagggctgagcacaatggctcatgcttataattcgagcagtttgggaggctgaggcaggtggatcgcctgagtccaggacttcaagaccagcctgggcaacatagggagacctcatctctag

SEQ ID NO: 212119 - DNA, 961 bp, Homo sapiens
gacccaagtccaaacacaaaattcatttgttttcatttcatttatatatgccttctacacatagcctgaagataattttatacaatatttttgtgcatgaaacaaggttttttgtttgttttaagacagggtctcactctatcaaccaggctggagtgcagcctcaacttcctgggcttaagcaatcctcccacctcagcctccctagtagctgggagaagaagcatgcatcaccatgccctgctaagttttaaatttttttattgtagagatgggaatcccactatgttgcccaggctggtctcaaattcctgggctcaagtgatcctcctgccttagcctcccaaacagctggattacaggcataagccactgtgcccagccccatgaaacaaagttttgactgcaatctatcacatgagatcaagtgatggaatgaaatttttcacttctgacgttacgtcggtgctcaaaaagtttttgattttggagcatttcagattcgagatttttgcattaaggatgctcaacctgtacttgtgtgccaatgtctgatgggaatggtggccccctgtttcagggagtgaaggcaatgatggatcctgagttctggatatttgtaggaattgcagtagatgagtcttatgtgctgagagatttggagccctgtatttcagagaatgaaggaaccagtggtccctgtgacttgctaactgatgagaacagaacagaggccttatgtttcagaaactaatgggaattatggtcactgttcctggggggcttaagcaagtcccagcctaatccacaagtcatttattattcactcatctcctcattcattcacttagcaaacattttcctgagcccctgctctgagccatgcctgggtggagtgatattgaggacacagaaatgactcagacccagactgtgccctcagtaaattcccaaagacaga

SEQ ID NO: 212120 - DNA, 1010 bp, Homo sapiens
cacagataaacatggatactatattggttttctagggctgttgtaataaagtattataaactgagcagcttaaaacaacagaaattatccgggcacagtgtatcatgcctgtaatcccagtactttgggagactgagggcgggcagatcacttgaggtcaggcgtttgagaccagcctagccaacatggtaagatcctgtctctactaaaaatacgaaaattagccaggcatggtggcaggtgactgtagtcccagctacttgggagaagaagcatgcatcaccatgccctgctaagttttaaatttttttattgtagagatgggaatcccactatgttgcccaggctggtctcaaattcctgggctcaagtgatcctcctgccttagcctcccaaacagctggattacaggcataagccactgtgcccagccccatgaaacaaagttttgactgcaatctatcacatgagatcaagtgatggaatgaaatttttcacttctgacgttacgtcggtgctcaaaaagtttttgattttggagcatttcagattcgagatttttgcattaaggatgctcaacctgtacttgtgtgccaatgtctgatgggaatggtggccccctgtttcagggagtgaaggcaatgatggatcctgagttctggatatttgtaggaattgcagtagatgagtcttatgtgctgagagatttggagccctgtatttcagagaatgaaggaaccagtggtccctgtgacttgctaactgatgagaacagaacagaggccttatgtttcagaaactaatgggaattatggtcactgttcctggggggcttaagcaagtcccagcctaatccacaagtcatttattattcactcatctcctcattcattcacttagcaaacattttcctgagcccctgctctgagccatgcctgggtggagtgatattgaggacacagaaatgactcagacccagactgtgccctcagtaaattcccaaagacaga

SEQ ID NO: 212121 - DNA, 530 bp, Homo sapiens
ctcactgagtacactggataaagacatacaaacaacaaacattcatcgagtgcccaccatgtaccagacctcacacgtctgaactttgctaatcctcacaacaaccctatgtgtaagtactatcatcacccccattttccagaagaaaaaaactgaggcacagacaggttaaggaacttgcccaaaggacacgcacacctggtaaagggccggaatgatatccgaacccagggagctgtgttccggagtcagtgctcagaccctcaaaaggacagatccatttgtccagtctgctgcacggtctttataaacgatcatttttaatggctgcatcgtagaatcaaaatcagaaaaaaatcagaaagttcataaaagcttatgaaacaccttaaagactagttatgatgtattcagatttggggtaagaaaaaaaaaaaacctaccaaactctagactttcatcacaactaccatgcaaatagtaacgtctatccaatgctcataaacttttttagaaccatgtcaaccatc

SEQ ID NO: 212122 - DNA, 727 bp, Homo sapiens
ttttaccttgtagagttctttttaacagaatcctaaaaataagaattatttagtatgtcaagagttaaaaaaaatcactactcatttaatgtctaatctaaaatacaacaggctaacatctagctcagggatcagcaaaccttttttgtggctttgtgggccacgtacagtctctgtctcattcttttgtttttgcatgtgtatttatgtttataaactctttaaaaatgtaagaaacagccagatttgagccatagtggtaggtcgccaactcctggacactgttttggtaaactaaattatggcagtataatgtgtcatctatcaaatctaggaattaaaggaaaaaagcctagtaatagaatgactactataggcacaataatagatcactactgaatagccagaaataggacagtgatgcatttcggtaaatgtgagacaaataccttgtgataaataaggactgaatattgtgttgggctgaattagttttaaaagggactgatttctgattcaaaggacgttatagtgaagaatcataagatttttggggaggaaacacctatagagagaaagttagaaaaagaactaataatttctggcctgttcagtggctcacacctgtaatctcagcactttgggaggttgaggcaggcggatcacttgagatcaggagttcacgaccagcctggccaacatggtgaaaccttgtctctatttaaaa

SEQ ID NO: 212123 - DNA, 298 bp, Homo sapiens
ttataaattaggtttgcttaaggtgagaggggactctgatggtaaagttatacagggaacaattaatttttattgaggtgaggatgcaacaagtaagatttggggaaacagaaataaggaaataaaaacatcccaagtgtgtctggtgcaggttaagtggcttagtgtgtggtaaggagtatagaaaatagtttgcaactagtttgtgaaaatcctgctaagacaactagataggccggccacggtggctcacacctataatcccagcccatgtactaataaaagaaagtctttgagt

SEQ ID NO: 212124 - DNA, 565 bp, Homo sapiens
aggaatcagttttctccaggttccgttttgatttagtcagatgcaaacattgataatttctattagcccacctgcagccttggcagctctgtacatttgtgtctcccggaagatgtaggagatctgtctgccttctagagggaaggaacattgctgagctttctactgacctggtagaagtccagtgaattagcacactgtgctggactgtgccatctcgttacccattggacttttcttaagagaaggagagggtgcttggcagtcattgaacaaaagggccgggaggccagggagcagtgctgaactgctcacttcaggcagagatggagctcttgcttgtgttggaggaattgtggatttcatctcagccacacgaggccttttcctcagaaaagagagggcagttgaattactttggattcattgtgcagctacatgtttctccctcataagaagaatttctatgtaatataaccagagctcaagtctgctttaaataaaataaatcactgatattttagaaactgttccatacaaatgttctcatccatcttaccaagcc

SEQ ID NO: 212125 - DNA, 447 bp, Homo sapiens
cagtccatagaggctggatgtgtgtttgttttttcaaatgtccacatatcaacaaaatatcgtaagacatacaaaacaacaacaaacaaacaaacaagaaacaggaaaacatggcccaataaaaggaaaaaataaattaataaatctccagtaactgacccaaaagaaataaagatttatgaattacctgaaaaagaattaagaataaccatcataaaaatgcccaatgagctataaaacacacacacacacacagacaactaaatgaaatcaggaaaacaatatacaaacaaaatgagagcatcagcaaaaagaaactataaaaaagaactaaacagaaaatctagggctaaagaacaataactgaattgaaaaattcaccagaagggatcaacagtatactgtatcaagcaaaagaaagaatcagcaaacattcaagccgtcagt

SEQ ID NO: 212126 - DNA, 598 bp, Homo sapiens
caaagtgcgtggaatctgatagcacactgtagataatattaatatgaagactcatgcagaggcactcacataatatgtataattaactctgctataacaagatatatgcatttgtaaaaatcatcatgctaggcaaagcaccacaggtatcatgagagatggggtatggcagtggttctcaaccactcacaatcctccatgactttctctctctcctcaggctatatttggcaatgtctataatcactttggggtgctacactggggagtagaggaatcagggctactagcatctagtggatagatgccggccagggtggttgctaaacatcctacaatgcacaggacagccccaccccgctcctccagcaaagaattatccagccgaaaatatcagcattgctgaggttgagagaccctaggtttgagggcacaaaactcaaaaacttgtcaatgacacatcaaaaaacaaaacaggccgggtgcggtggctcacgcctgtaatcccagcgcttcgggaggccgaggtgggcagatcacgaagtcaggagatcgagaccgtcctggctaacacggtgaaaacctgtctctactgaaa

SEQ ID NO: 212127 - DNA, 495 bp, Homo sapiens
gagggtggaaacagatttctagaactgtagttactaactgctgagggcaataccagaaatataaagaagagaaaaatatgcaatgagtttatttctatttgtggtgcatagtaaattagacattaggtaaaagaggctgaatactaaggaaaacacagtgaagcccattctccaattgaaatagtgtaagccctctgataatttttcttcttaaaaccagctttattgaggcgtaattgccatataatgaattgcacatggttaaagtatacaattggagaagctttgacatatgtatacacttgtaaaaagtccatcaccataatgacgtgtccacgtagggttatcagttgtaagcaacgcaccgctctggtggggggagattaatagtccggcaggatatgcatgtgtgtgtgctggtggtgtgggaaatctctctaccttcctctcaattttgctgtgaacacaaaattgttctaaaaagaaagtctattt

SEQ ID NO: 212128 - DNA, 701 bp, Homo sapiens
attacctaaggcctgtagctaaattggtattttgttttacttttaagcaaaataataaactttccttttttgataggataaaggagaggtgaagatatataagagcctaaagaaatacataatttccttgagtcatatttttaattgatatcttaagatgccctccaaaaggtgaaatgtaagtggtgacagcatatgtaactttttctttcctgcttcagcttaatgtctgttgctcattaaaggatgagatagtttgtctcagttaacattctcatagaacatttcactttttctgtcttttgtcatttgttaacctatgtatatatttgtataactattttatatcttctgtgcaacacccaaccataagattattatattatttagggcagggactgtgcctgtcttattcacatagaatccacagtatatgaaatcctagtagtcgattaatgaatatttaataactgaataaatgaataaagtattcagcagtctcatctctactgtactcatccatcttcttatttatccatattgactgttaccccctcaccactgggcatacagggttaaaggactctccctaaccttctattcatcccagttacttaaaactattgataagcataagtctgtctattatccacaatccatgaagcagagaccttctcccatccaataaaaaagatttatct

SEQ ID NO: 212129 - DNA, 728 bp, Homo sapiens
ataggttagctctaatcttttttctctccttggatcgttcacctcaagattgcagaccctgggaggagagtgtgaatggccttgtgccgttctgggtcatgtgcctgcccttggctagaggaagacagagcacccaatttacagccccatgtagactgccttgtggagggatgggctgattctccaaaaggaaagcagctgctgttaggaaaaaggcaaagcgtgatgggtggcccctgcaccccatcaccctggagtctcccgttccagtctcccattccccggcctgtctttctgggctcttcagtaccccacattctccagccacactggacgaccagacatttcctaacactgagcacactcaggtctcagtgctatcctgtaccctgccttgcccttgatccccaaaaattctcaaacgtgttagcaaattccaccttggtaaattctttcctgactgccactttcctcgaatctttcatgtgcacagctcataaagtttctactgcatgttctaggtattcgtgtacctgcctgtctctgtctctatcacctagtggagtgttcttggagggtggacatgaggtcttccttaccttgggtccccagagtttcacacataaaggactcaatgagttaaatcctgtggcatttcccatcattgtcctttctcctcccaccattctaatactagtcctcttctaatcaagacctataacctctgt

SEQ ID NO: 212130 - DNA, 847 bp, Homo sapiens
tccgcgtctgcgcagccgcagtcagtgcggcgccagctctgcagagcccagacagggtccggttggggaggtcctcaggttctgaatcttgtgcctggagaaccagagaggaccctggagcaggaggagaaagagaagcttgtctcagaagctccacctcctcctggggcaatgcagagtctcaggcctgagcagacacgggggctgctggagcctgagaggaccaagactctgctgcctcgggagagccgggcctgggagaagcctcctcatcccgcctgcaccaaagactgggaggctgtggaggttggggcctccagccatgacagtgatgagaaagacctgtcttctcaagagactgggctttcccaggagtggagctcggtggaggaagatgacgaatcagagggctcccagggctttgtggagtggtcaaaagctccacaacaaacaaccatagtcttggtagtgtgcgtgctttttttgttcctggttttaacggggatgcctatgatgtttcacatttaactataatggtggctgttgttttaaaagtttaatttaatgaaatagatgccctatgtcatgttaaggaattgtgctagttaaaaatcaggaataggtgttgaatattttcaaatgcctttcaaacatcctttgagatgatttttaaaaaatttttggtgtgagttttcacatactttatttccatgaaatgaagacatcattgattgtaaaacattattttgtataccacggagaaagaaaagtgctaattaatcattaagatgccaccaactggaagatatctcctgactttgagaagatgaaaaaatgtgcaactgaa

SEQ ID NO: 212131 - DNA, 164 bp, Homo sapiens
acacccaccccaaaactcttcattttttagaacagtttcaggtttgcagaaacattctgaagataatacagtaagtttccatatactactcctctatccggttttccctattattaacatcttatattagtatggtacattttctatacttaatgaatattgat

SEQ ID NO: 212132 - DNA, 536 bp, Homo sapiens
ctacacccaattcagaccagatcccatatattcatctttcctcaaaatactattcaatgtaatctcacaattttgtccaattaggctcaaaactaaatttctgtatcactctccaattttccaccaaagagttcagctggcagtgaaccataacaaccacagtccaaggaaaaaaacagtaactgttcaattcactgtcttgttagttactcacaattcactatcatttaaaaacagtggatcttagcctggtttccaccccaccgcacccaggagacacaatactctcatttaacagcagcggttcacaaggttctgattctcagcataactggaaaaggacaagagttaggaaaaaaaaacagggatgggaggaagaggggtgagaatgttccttttgagagagacatccatgaaacacttaagatcgttcttttagacaagtcttaataatctgtttgaaatttatcaatgttcaaaaaaatatgatgcaaataatttttaagaaaaaaacagaaaccttaccctgcagttca

SEQ ID NO: 212133 - DNA, 510 bp, Homo sapiens
atttagaaacctggtatatgctacatggtgctgtgttatactgggtttgagaaagaatgggaagtgttacaaggattcagtggttggaaattaaggaagatagaaagttagtgttggatctgttttggctctttggtcatgcctttgtttttctcaaaatgaatgcagtgcccgtcccagaaaataccatatgagaagcgatttcataatgctgtgagagtctgttacagggacttgatcaagtctgagggccatgagagaaagtccctctgaggaagttgctttcaagctgacacctgaaggatgaagcagaattatcccagctgggatttgggaactggtgtttgaggctgaggactagcatgcatgataggaaaataacccagagtggcagaagtgggagtggtatgagatggcatcagagacgcagattcagggtcaaatcattcagagcctcctagaccatgtgaacacatgtattatgctgtggagatactgtttaataggcag

SEQ ID NO: 212134 - DNA, 477 bp, Homo sapiens
tgatgatttttgcataggtgcattttatttcatcaaaatatatttataaagatatattaattgaaatgcataaaatacaaatgaaggcttgatggggggctttaatatttccattttttacctcatactttgaatcagatagtagtatttccttttttttccctggtgctttatttattttttcttagagacagggtctcgctctgtcacccaggctggagtacagtggcacagtcatagcttactgtgacacctcaaactctggggctcaagtgatcctcacatctcagcctccgaagtagctagaccacaggtgcacaccaccatgcgtggctaattaaaaaaatgatttttggtagggacaggatcttgctatgttgccaaggctggttttgaactcccagcctcaagcagtgttcctgcctcagtcccccaaagtgttgggattatagacatgaaccactatatccagccaga

SEQ ID NO: 212135 - DNA, 623 bp, Homo sapiens
atatacatacatacatatgtgtgtgtgtatatatatatataatgattacctgataatagctttattatttagattttggaaataacagttatagtaaatatcatgtaatacaaaaaaccttattttaaaaaagaaaagtggcatagcccaatatatgttttcttaattttactttaccaagcattttgtatgtaacactttttacttctctaagtgactctgtcactagcctggtgttacagaaagaatgttaaaaatcagacaaaagttttatttttatgaagtttctcagatgatagacaataaagctgggattcccctacaggtctcttgctctcaaatccagagaatttaacaaaaatccgtgttataaattgacttccacacatatactgctaaacacatgtaatgtatcacattataaaggagatatcaaagagaaaatgcctctaatatccattaattttaaacatgtggatatattttcatattttaattaatatttttgaccaatgaaaatttacttatataatttttatatattacttgaacacataacatttttaagtctaatcaaagagttttatatattttagtgaaagtagatgtttaacagcttttcc

SEQ ID NO: 212136 - DNA, 386 bp, Homo sapiens
gagacggagtcttgctctgtcacccaggctggaatgcagtggcatgatctcggctcactgcaatctctgcctcctgggttcaagcgattctcctgcctcagcctcccaagtaactgggattacaggtgcctgccaccatgcccggctaatttttgtatttttagtagagacaggttttaccatgttggccaggctggtcttgaactcctgacctcaagtgatccgcctgccttggcctcccaaagtgctgggattagaggcgtgagccaccacacccagcctataactggctcttacccttactgtcgttaggctcttcctctgactctcggctcaattaaaaagatgaggtaaactttatacacaatcccttcatgtatattaag

SEQ ID NO: 212137 - DNA, 407 bp, Homo sapiens
gggtttggcttacatcaaagccatttgactctaggacacatttttagattcccaggagataatgattgtcacggaagacacacccactctgagtattcctactgttgggtaaaggaatgtttacagaatgttgtgcattctgtttactcctcctaaattcttccactcctggaagttaagcgtccccactaatcagcttcatctccagctggcctgcctggactctgaccagaaaatatctccccactctggatggccagggtggcacctttgtctattcccataattataatagctcacactgatgcagcattcactatgtaccaggcactatcctgagagctttccagttaactacggtcctcaccaaaaaatcccaagtaccacaatccccatttttacagatt

SEQ ID NO: 212138 - DNA, 768 bp, Homo sapiens
cacccaggcttagtgcggtggcacaatcatggcttactgcagcctcaacctcccaggctcaagtgatccacccacctcagctttctgagtagctgggactacacatgcaccactatgccccactaattttttattttttgtagagacagtcttgctatgttgcccaggctggtctcaaactcctggactctaaccctcctcccactgcagcctcccaaagtgctgggattacaggcatgagacagagcgcccggcctatctttctactttctgtagatgaattagtgctccaaactgtcagccaagaggcatctgaatagattcattgaattcctgtaagatttttaagggcaataaaaccaactgtggacagcttctccctcctcataccctcagaccggtatcagtgaccagttctgaccagtgatccctgggtatgaatttcaggagagaagtaggaatagctgaatagtcaccctctccttctccgccccaggccacatggctccatgtgctcatcatttgtagggttctgcttctcttgcattcctgagaaatacaattgatcagatactacagaggcttcagaaaatagcatgagaagctgacatgaataaattgcgttctcaagggaaacaccttttgacacactattattataacaaatggaaccacaaagggtcaggaacctgaatttaaagattatatataagtacattcttccaccttttactgaaggctttttctagtcttgggcacagaggtcta

SEQ ID NO: 212139 - DNA, 593 bp, Homo sapiens
aaatatggacttgtctctcattctttctccccaaagacttggatctggagagttggtgtccaggagagtgtcatgctagagcctggccagaagacaatctctagttgccatttcccctcagtgtgacccttgcaagtgcctagggtttttggttacctaatttccttcctagtccttaacacacacatgaaacacacagaaatactgaagaaagtactgagagctacttggataaaatagcaaaaggaagttctacaagacagagaattggatcagaccagctggtgttgcttaaatcaccaaatgtcagaggattctaagtgagcacttgtaatggaaccttttagagatgttgctctgagcatgaaggatgggactagaatgagaatttttattgtatttcttgatgaacctgtcagtcccccccttaaaatgtaagtgcctctttaaggcctgccagggtgaccctaagacctcaggccaagtctgcctcctggagcagcacctagagactgttccttcctgccagtccctggcatttgggccagcaggtcctgtcttgctcatgaactgtctgtcagtccagcctcttg

SEQ ID NO: 212140 - DNA, 889 bp, Homo sapiens
tctgcagggcagcgctcgccattgaatgacttctaggtgctccggggcacagagctacagcgccgctacaagcggtggtgcccgggccttggcaggaggatgtggcagatgctgaagagtgtgctggtcgctgtgggcccttaatggactgccgggcgttccactacaatgtgagcagccatggttgccaactgctgccatggactcaacactcaccccacacgaggctgcggcattctgggcgctgtgacctcttccaggagaaaggtacatgcccacgctccggaatggcctggaagagaacttctgccgtaaccctgatggcgaccccggaggtccttggtgccacacaacagaccctgccgtgcgcttccagagctgcggcatcaaatcctgccggccgcgtgtgtctggtgcaatggcgaggaataccgcggcgcggtagaccgcaccgagtcagggcgcgagtgccagcgctgggatcttcagcacccgcaccagcaccccttcgagccgggcaagttcctcgaccaaggtctggacgacaactattgccggaatcctgacggctccgagcggccatggtgctacactacggatccgcagatcgagcgagaattctgtgacctcccccgctgcggtaggcggcggggaccaggcctgggagggtacctgggaaccttggggaggggcgtggcttggccggggaggtcagaggggctgggcgtgacctgagagcatatcccgtggagtaccgtacacctgggaaaggcgggtttggtcccagccccagagggatctcagctgtcgctcggggccggacctatctcggtccatctaagggtccgaggcacagccccgccaagaggccacaagtgtcagctgcttc

SEQ ID NO: 212141 - DNA, 734 bp, Homo sapiens
tgtattggtggtgctctcacagaaattatgcttttatcttctctgcagtgttatatgttggtgtgcaaaaatgttaaatttatttttcctaagtaccccatctgcttttcaactctgtcctctgcctgaaaagcctccctccagcccctacttccctcccatcttagttcacaaagtcaggttgatttgcccccagctgtcaaagcagactacctgtttccacatgtaactggttatgttctgtaaagttacaaaaatagaaaggttgaatctgtggcggccgggtacggtagctcacgtcctgtaatcccagcacttcaggaggctgaggcaggcagatcacttgagcctaggagtttgaaaccagcctgggcaatatggcaagacctcatctctataaaaaaaatacaaaaattagccaggcgtggtggctcatgcctataatcccagctactggagaggctgagacaggagaatcgcttgagctcaggaagttgaggctgcagtgagctgtgatcgtgccactgcactccagcctgggtgacaagagcaagaccctgcctctaaaaaacaagcaaacaaacaaaatgtggaatcaccaggatttagtgaccaaatgctaggatataggacattgggagggaaggattcgagataatggccaaggtttgggtttggtggctgggtagataatgctgtcattcacaaggatagggaagagggaatgaggaata

SEQ ID NO: 212142 - DNA, 637 bp, Homo sapiens
tccttggctacagcacccaattaaagcctaaagccttcttccttggcaataatcctggtctcagtgatgggctttctctggggcaagcagcaggacccacaccaagcccctggtgttgtggtaacactgaatacaaaagacaaacagaaggtcttaaaagcagccagaaaagagagattacctatgcaaggctgccagttaaattgatagctggctactccatagcagcaatacaggtcagaatacaatggaataatacctgcaaagtgctgagagaaaacaatagtcagcctagagttcaagatccagcaaaatgatctttcactaataagggtgaaacaaagacatttacaggcaacaaaaatgacaaataaatatcaagtgtgtaaagtaataataataattattgtttgagacagtccccctctgtcacccagtttggagtgcaatggcacaatcatggctcactgcagcctcagcctcctgggcacaagtgatcctcccacctcagcctcctgagtagctgggactataggcacataccaccatgcccagctaatttttaaatttttttgtagagatggggtctccctatgttgcccaggctggtctggaactcctgggctcaagcaatcct

SEQ ID NO: 212143 - DNA, 365 bp, Homo sapiens
ttatagtgctgaatttgattttaaaagttttttctaatttttgcgtctgtattcctgggctatcttggtctgtattgttcccttcttaaatctgtaaccataacaggtctgttgtctgatgcacacagcaagtcaataacagagacactgggttgctgcagagaaggagtttaattatagggcctccaaacgaagagatgagaggaaacctcaaatctgtcttcccaaggagttgagaccatggcttttaaggattttggagtgggctgaagtattaagatcattgatttgtcaaagaatgctaggtgaaattatgggataggaagatgtacaagcagtattctcatgctgattctgttcccctg

SEQ ID NO: 212144 - DNA, 670 bp, Homo sapiens
atgggagaataatgttcctgtggagggaagtcaaatgggggaaaaatatttcaatcggagggaagagttagtgccaacgtactgagctggagtgtggaggggctgaggacagagcagggaaatggagggtgcagttaacctagggccttgaaggcctggagaagaaccttggcaatgtctgctagaaagcctgcgtaaaggcagaagacaggcgagggagggtggcagagctgccggaggctgtagacgcccaggtgtgcagggaaggccaggatccctccctgaaacagcttgctctcctggtcctctgcgggttcccctgccttccgccgcagtctcccttgggctttccgggacgttgtcctggctgtggtcctccgcagcctgtggaccatcctaaggctccaggtttgtatacatcacctgcctccttggcacccccagctgactgttctttcgcttttccaatacgggactcaatccctacccaggtgattgtggtggtcgtggaagaccgctgccttcaccctcccgctaaccagcttgctgccccccactcgggtcatgccagcgcctccctgagccctcgggcacaaataggtgaacgaccacacccgcctcccgctgtggactgagattcgcggtgcgaggggttcccgggttgaggacc

SEQ ID NO: 212145 - DNA, 404 bp, Homo sapiens
tgctttgctgaataccgttacaagtgccagatttattcctcgtcactctgctgttgtgaacatggtgagctggagctggaaaggttctggcaagagtcgagtggcctggctgcgcccaagtcctggatctgttactgccttgctgagagaccttggatgtgtcccttcaatctggctgagcctgtttctgcctctgtaaagtagtcttatcttggccttgtcagccccctagaagagctgggggttgactgggaatgcctcaaaccctttgtgagatatgactatgcaaatgagtaaaatgaacacactgctgctccaatgggaaggaattgttcgtaattaagtaggctctctcccatttggacagctcattatcaagctatttggtgcggtattcagcaaag

SEQ ID NO: 212146 - DNA, 586 bp, Homo sapiens
acagacctcctatcccccagccctgcgggtctcctcagctggacctctgactcgttcccaccttggacctcatgttccagccgtactgaaagcccactgtcctctgaggacacgccatttctgtccttctgcacaaactgtcttttctgcctggagcacaagtccctccctcgccctcctggggagagcctccttgtcttctaagatctctaaagcatcttctcaccctgctaactcctccgagttcctgaccggcatcctctggccacctccacctgcctcctcgaagccaccttggtttgggctgtctgagcacactgggttcgtgttgtcgctgaggatgctgtacagtcagggcagggatggtgactttttcctccccagctgtgtccccagagcccagcaggacaaggaggcctcagcaaacatgcagtcaatccgtggaactgagtgtgggtaggcacaggctgagcgatgagttccacgctgaagggggcagcagcgtgaatctctgcagatgcctgttcctgtgaacatcacccaggacaagacggggagtacgcccagcctcctggaagccttcctt

SEQ ID NO: 212147 - DNA, 997 bp, Homo sapiens
caagttgtcttgaagaatccttgctgctaactctggatcctgcttttcctatagtcagagggctccaaggtagaactctctaagtccctctcaatggcactctttgcctagaccaaactaatgaccaaacagtaatcaatctatcactgttgaagtcctggttttctcaaccaaattttaagtctttcccaggtatgtcagtcgagttgccatgaatcctcacctgtaggagtttctgggattcattttaaggaaactggaagaaaattaatgttttaatgtaaatgtttttaaaaccaagatcaccatagagttcacacaaaattttaggcagtgtttcaagaagcactcttatgtgttgttctttcagtccatgctccaggtcaccggtttttaggtaaacatgacatgacatgtacttgtaatatcagtgaaaggggcttttagtcgtctcagtatcttttttgcattcaggtattatagcgtttccaacaaattgagaaattacttatttggtgtaaaatgacaagagagagctttagaatttaataaaatgtcaaaaatacaatttgatacccttaaaaattattcatagatctggctgctctgtactactggatgggtggaatagggaagcagatcacttttgcatacaaaaactctttcaaacccaaaatattattggtggtacattttaaagtccaattgtggacttaaattagtcaaattgagagttactgagtccattcagatctccagtagggttttgtatctaatgtatttggccaccagttttacatgtaggtcatgactatacctggattttatcattaagttaactttaaagtatatacagtttgcaaaaaatgattcaaattaattggtttgtatatgtttgtgagatctagcttctgaggaatctcatacatagtaggaaccatcatagagtaaagcttgtagcagaaaaattggaagggttttgagatatcctagagaa

SEQ ID NO: 212148 - DNA, 687 bp, Homo sapiens
tttgtttaaaacttcactccttttaaaatgatatagagttgtgataatagatggaaaagtgtgcctaaagggcacagatggacttcctagaacttgatttaagagcccttttgggaaggaatgttacggtcctgagtaagggatgagtgaggctctgtgggttctgccaccatctcccatcctttcctttagtttcacctaaatgtgattgctttctctgctgtactccttcctctgtgcttccttctgtctatccttgctgctgccaccactgcttgctgcgggtacctataaaatggctatgtggtatctcaacagcaagttgagcagtggaccattagtgagaacattccattcatcctgggcacagccctagtaggtttattactatagtaggaggtctgtcttgtagcccttgagtatcttatctgaattggaagctagagaagaataaaacgtagatgactgaaacataaccagaagcaggatggtcttatttcagttgaagctctttagagccagtcaggagaggcattttggaagagatgaggtttttctatctgaggagggttagaatgggattaatagacctttaaaaactggaattgggagtgagaatcagttagtcaacaaatattctgctgtttactttgtgccagaaatgactctaggcactgggcatacgga

SEQ ID NO: 212149 - DNA, 533 bp, Homo sapiens
ccatgatataaccaggttatgtcgtgtcgttgggcataaaagtagatgcttaataaattctttaaacttttctcttttaataaatttttggttacaagaaaacacttcttccttatttttatcattttattcactttctccccacccactgtgacaatggttgcttgagtgtgactgatattagactagctttacataggcttattcatatacattgcattttaattctcacaattacgttgttagataggtgttattatctccaattttcaaaggggaaaatgaaagcccaaagagattgaacaaattgcgttggggtcacatagacagtgtcagagtagacattcaagacaggatgtagggccgtagactgagaacaccttccctcctccatgatgtctccttttcctaagacaatgtaacagtgatgctttatacaaactcttccacacattaaaaatgctgagattggccgggcacggtggctcacacctgtaatcccagcattttaggaggctgaggagagtggatca

SEQ ID NO: 212150 - DNA, 489 bp, Homo sapiens
tcaagcaaaagaaagaatttctcaacttgaagacaggtcttttgaaacaatccagtcaaaaaagaataaaaagggatgacaaagcctctgtgacatataggaagcaacaagcaaccaagtatttgagttttgagacttccagaagaagagatggtcaaaggcatcgaaaacctattgagtgaagtaatagctgaaaactccctcagtcttacaagagatatggatatacagatacaggaagttcaaagatccccaaatagatttaacccaaaaaggtcttctccaagtcatattatagtcaaactgtcaaaagtcaaagacagaattccaaaaacaagagagaagtgtcaagtcacatgtaagagaatccccgtctgtcttagttcgtttgtgtttctgtaaaagaatacccaaggctggtttatttataaaggtaagggttttatttggcttgtggttctgtagactgtccagaacctcagactgcat

SEQ ID NO: 212151 - DNA, 503 bp, Homo sapiens
gtttttgtagaatctgtgaacagatattttggagcacattgatgcctatgatgtaaaagaaaatatctaaagataaaaagtagaaagaaggattctgagaaactgctctgtgatgggtgcattcacctcacagagttaaacctttcttttgctccagcagtttggaaacactgcttttgtagaatctgtgaaggtatattttggagcatattgagggctatggtgaaaaaggaaatatcttcaaataataactagacagattctttctgagaaactgctttgtgacgtgtgctttcatctcacagggttaaaactttcttttgtttcaacagtttggaaacactgtttttgtagaatctgttaaggaatattttgaagtgctttgaggcctatggtgaaaaagaaaatatcttcaaataaaaactataaacaagctttctgataagctggtttgtgatgtgtgcattcaactcacagaattaaaacttccttttgattcaaca

SEQ ID NO: 212152 - DNA, 146 bp, Homo sapiens
gtgctggtacttctatgccttctcaacaagttttcctatctccaggcactacccagtccagtcagtcttacacaccacttcctcccagattaatctttataaaatgtcagtttggggagtcactcatcatctcaaaaatcttctag

SEQ ID NO: 212153 - DNA, 313 bp, Homo sapiens
cggagaacccctctcccatctgatgtctggggctgagggtcccacggtgggcactgttctgttttgggccacttgctggagcactccacagaccaggtagacatgatgtgccctgctggttggctcgcagggtctgcaacgccgccaaaacttgcctggaatctgcaactttttagtctacagaaaatcacttggcatatataacatataagctcctatttcttcaactggctacctctgccatccctcgggatgaactaaacctcagtctcacccctaatgctgccaccatctgtgttctcctagtaatcaa

SEQ ID NO: 212154 - DNA, 423 bp, Homo sapiens
cagttaaacagcttcagttattttttaatgcatgcaatgaaaccaaaatggatcaggtataaaacaagtgaacctgaaactgcatcatacaaatttttatgctttaatatctgatggcccagactttattaatttcatttccttgaccataacatgaagactaataaaaaactcttttaacctattttaaagcatttctttcttccttaatgtgacggattgctgtcatctccatgaatcaggcatgattttaataagataaaatacttacaaaagaaaatgtttgaaataatactcatttggactacatgtaaaatacgtggcttagagactgtaatgtaatgtaaatgaaacataaaaattttgttcaactgcaaatttttttccattcaatgcaagtattttcattttgataatacaaaa

SEQ ID NO: 212155 - DNA, 404 bp, Homo sapiens
caggtgacagagcaaaactctgtctcaaaaaaacaaaacaaaactgagaaatagtaagattggtaattcacaagctgctgctttgctaggagtggtaaggttataaattagataaactgataaccctgctcaagaaaaaagggaacataagtacacaggttagaagtaattttttaaaacagcaagtgttggatgggtgcagtggcttgtaaatcccagcatgatgggattacaggcgtgagccaccacacctggccaagatcctgtctttaaaaataaaaataggctgggagcagtggctcatgcctgtcatcccaacactttgggaggccagggtgggaggaacacttgagcccaggagtttgagaccaccgttgacaacatagtgagaccctgtctctaca

SEQ ID NO: 212156 - DNA, 378 bp, Homo sapiens
aacatatatgggagatttctgtgaataccaattgtacaggtggatttttaaataatagatttagggccaggcgcagtagctcacagaagtaataccatcactttaggaggccgaagcgggtggatcacctgaggtcaggagttcagaccagcctgaccaacaaggtgaaatactgtctctactaaaaatacgaaaatgagccaggtgtggtggcgggcacctgtagtcccagctactcaggtgggtgagacaggagaattgcttgaacccacaaggcggagggtgcagtaagccgagatcgcgccactgcactccagcctcggtgatgaagcgagacaccatgtaaaaaacaaacaaacaaacaaataaaatatattt

SEQ ID NO: 212157 - DNA, 514 bp, Homo sapiens
gaaatcaaataaatgaataaagagtctgcaataggatggtgtcaaaagaggtgaggtaaagctccctctcagttctaatatctcatgatctaaactgaaaacattacctattttgaattagaaactagagttcagtcgttctggttcaaaagtgtttcagaatattaactcaccaaatttagactatggaaccacagaaaattatcaaagataaaactccaatatacagatgtcttgttaggcccatcattcaacagtgagaccacaaaacgattacactcaaactccacgtaaccactgggctgacacactcctcctttctgtaaggcaaatgcaacgcatgcttcaaggtagctttgagcccacctgggaagcttgcaggtaggtagtcattttggcaatttaggattatctactcattcactcaggtgttactaaatcttggttttggtttggttttgttttgactcagccagtccacataacaaatagcagcaagcaaccccacaaataa

SEQ ID NO: 212158 - DNA, 296 bp, Homo sapiens
cttagcagatcctctccccatatgttaatattcaacatttggtcactcttcctcttaccggttactttttcctctcactttctctgtttataagctttttctacctacttttgtgtgagaaaaattagcgtgtgttggagggtatttctgcttatgggagtataggtcatgggtcttgggatatgtcccttgtacttatacatatgcccatggggccccatccttgctggcactggtgtgtttccctgcagccccctctgctggggtctgctgctgtttctgagggtgtgtttgtt

SEQ ID NO: 212159 - DNA, 890 bp, Homo sapiens
tgagtgggctcttcaaagcgaagccctttccacactcattgcatttataaggtttctctccagtatgagttcgttgatgtaccatgagacagtgcttcattgaaaagccttttccacattcactacatgtatataatttctctcctgtatgagtttgctgatgtgtgataagactgttcttcaaggtgaagcctttcccacatttattgcatataaagggtttctcaccagtatgagttcgatgatgtgcagtaagacgcctcttctcaatgaagccttttccacattcactacatatataaggtttttctcctgtatgagttttctgatgtgtagtgagactgaactttgtagagaaggccttcccacatacactgcatccatggggtttctctcctgtatgagttcgttgatgataaatgagccgacacttcttgatgaaggctttcccacattggctacatgtgtaaggtttccctcccatatgagttttctgatgtatattgagctgtgatttcttgaggaaggttttgtcacattcagtgcattcataatgtttcagttctgtatgagttctctgatggtccattagtctggattttctggagaaagctttcccacacatactgcatacatgaggtttttctccagtgtgaactctctgatgatcaataaactgagacaacttgaggaaggctttcccacattcactgcatacatgggcattctctatgttgtgagttctctgttgcttaatgaactgggacttattaataggttttgcaattgcaggaaacttcatttcagtataaaattgtttatggttagcatgaaaaagggatttcccatctctattaaactcagcagagttctttaggccagagctcctt

SEQ ID NO: 212160 - DNA, 403 bp, Homo sapiens
tttagaatcatctttcagaccacttggggttaaactctcttttggaaaatcccctgtgaggaccctcatgtttcctccccagtcactgagggtggggcgaaggcagcattctctcactgtggcaaggaactttggctccatgttctgtctgtgaatgaccttgaccaacttactggttcctgggaagtttctaagctataggaacaaagaccatctcttagagtttccattaggatcaaatgagacaacacctgtaaagggcctaccataggcctaataataggaagccctcaagaaatgggccgggtctgctggctcatgcctgttctcccagaactttgggaggatcacttaagcccaggagtttgagaccaccctgggcaatatagttatttttaataaa

SEQ ID NO: 212161 - DNA, 508 bp, Homo sapiens
gaagacggagacaagagaataacatggccacaagcccaggagatgcccatggcagccaccaggggctgggagaagaagcaaagtccaagtctccccttaggtctctggaggaagcgtggccctactgacaccttgatctccaatgagactgattttggacttccagcctccagactgtgagggaatcactttctgttgttttaagccaccaagtttgtggtcatttgttacagcagctgcaggaaactaacacccctggtgtgtgccctaccatcatctgacaccttgattcccaagttctgccatcaaggttccctccatgaaaaccctgagcccttaagctacctcaccttggagaaggtttcctattaagctccctctcaattttcaaataccagctcattatcagcttgttttcatccaccccctgacttacaagctccatacttacaagttgataatactgaaatggaatgccgttcttgattacacaaaaccatttaatcga

SEQ ID NO: 212162 - DNA, 386 bp, Homo sapiens
ttaggtcatatgcgaattacttacagagctatctcttggatgtgtgttcaagattgggtcccttcaaatgctaagaaaccatccttagagtacccaagaaagctaacatcacacgcgcatacatcagtctgttttttcttagttaattaaagtaaattacttcaaagaaaatttgcacagactcacttctttttgctttttctgtctctccctgcatatccatttctatactgtttccaggctgatcttgtaaacagtgtacctgtcactcatctttgaaggctgtcatacctccagggcatgtgctgatctctgtctacctgttcagtctcattttgttctccatacgcttcatttttcagaaatcgttaattattagtagttct

SEQ ID NO: 212163 - DNA, 344 bp, Homo sapiens
  misc_feature (282)..(282): n is a, c, g, or t
  misc_feature (321)..(322): n is a, c, g, or t
  misc_feature (324)..(324): n is a, c, g, or t
tttttcattttattatccataaataccaaaattatagtggtcatcattgctattttgaataccacccaggttacaacttggaccatagaatatattaatgaaaaggtccaggggaaaggattttaagaggaggatccttcaaagtggagccttcgatttactgaaataatagaaagaaaagatcaaattgtgtaataagtgcttgaagttaacttgtaggttgtgagaggagattccatcaataaactttttaaaaatttttttaataaaataagtaaatanccatgcttaagcataatgcaaagggtcttgataataatnnanctcagataaattgaagatga

SEQ ID NO: 212164 - DNA, 375 bp, Homo sapiens
aaatccctacaaacaagatcagagaccaactgagatctatctgtatcaatgtaggagggcgaaaagaggccctctctttcccctattccccatataccttctccaacaagactgttttacagtcaaattccgcctttgtatttcactcattcattcatttaagtgattttatttcgtgccaactatgtactgagcaatgtctacacacaaagagccctacccttgttgagcttatattctagtacagacattaaaatatatgtaaatttacagtacgctagaagacgaaaagaaaaaaatgaaatagtaaagcaggagaaagacaacctgaggctgggctcagtggctcatgcctgtaatccaaacactttggag

SEQ ID NO: 212165 - DNA, 285 bp, Homo sapiens
aagagtgaaagcttttcttacactgctcagagcctccccgtgccccaaagcagcgtccatctgcactgtcagcagccgcacaacccacagcctttgtggcatttggacgcagtcatcctttgtgtcaaggacatagagcaagaaaagaggagaagcgaatcccttctccctcctggggcctgagcagtgtcagtcacgaaagcggatgttgagggttacattgggtgtgctgggccaagtgaccaaggatctgtgtatcctttaataaattgtgtatgtttgtga

SEQ ID NO: 212166 - DNA, 443 bp, Homo sapiens
aactcttcgaggaaatcaaagataaaatactttacaagtgattttacaaggttcatattaccctgctatcaaattcagacaaaaattacaagaaaagaaaaccacagaaacaataatccctcattaatacagatgtaaaaatcctttaaaatatttttagcaaatcaaattcaaaagcacacaggtttatttataatgatggagtgagtttatcttgggaataacaaaagcttaccaatcaaaaatcagtctatgtaatttaccatattaatagaataaaaaagaaaaaccagatcattccaatagataaaagaaattcatttgacaaaattcaacacctattcaggataaaaactctcagcaaactaggaataacgagtaactacttcaacctgattaagggcttctaaaaataacctataatatcacttataatagcagca

SEQ ID NO: 212167 - DNA, 573 bp, Homo sapiens
actctgttcaatgagagagtctgtccgcagccacacctccacagcagtgggcacaccaagcaccaggtcttggttgctaagtactgttctccactagcagggaactggactcctcagagaaatggctgaatccaaggatgaggcaagggcagaacagtacaaagtggacctgaacattttgtagtgtgaaaaaattatgggaatatatcaaaaggacacgaagccagcttgacagagttctcctgttggccagatctggggcaatttgagcatcaacataaataatgataggaacttataaccccttgaataataaatctatacagatataaaaatatattttaaatactagagcaaaacaaccccttccttagagtagaataccaaaaaatacatagaaggaagtcattagaaacatcaccatttgtcaatcataatagtaataattaaataagccaagaagcatcgatggatgctaaaagctaatgggtgaaggttcataggaaactttcttacctagtctcaaaggacctcccattccaaaaaaagaatccttatttattaaaaaggaaa

SEQ ID NO: 212168 - DNA, 1028 bp, Homo sapiens
gtttatgttactgtagcttttaactgtaggttgtattgatatctttgaaaaatgaaatttttgacccctgagcaagaatatattgaagagtgtgtttcatattcacatatttttgaatttgccagtttgacttttgctttttaatttctagttttattcaggttttattagaaaacaacccagtgcataattttagtgtttttaaattgatttgttgttgttttgagacaagatcttactgtcacccaggctgcagtgcagtggcagaattttagcttattgtagcctcaacctcctgggctcaagtgattgttctttcacctcagttttttgagtaggtaggactgtagacatgcactaccatgtaaggctaattgtttgcttttttgtagtgttaggatctcactatgttgcccaggctggtctcaaacttttgacaccaatggatctcccaaagtgttaggattataggcaagagccatggcacccaatcagtatttttaaatttaataaaacttgttatgtgtcctaacagaatataccaggtgcaaataagaatattgtgtattatcttggttttgactggagagttttgtgtgtgtctgtgaagcctagttggtctataatatggtttggatgtctatgttgtccaaatctcatgctgcaatataaatcctcaatgttggctatgggacctggtgggacacgtttgggtcattgggggcaaatttctcatgaatggcttggtacatcctctcggtaaccaaaaagtttacactgtatcaattcaaataagagctggttcattaaaagaacgtggcttcttcacctcatacttgctctgtctcttaccatataatatgtccagttactctttaccttccaccttcattttaagctttctgaaatcctcaccagaagcagatgctggcacacacttcttatacactctgccaagctgtgagccaaataaacaatttttctttataaattatgcactctcaagtatttctctatatgcaaaagaa

SEQ ID NO: 212169 - DNA, 448 bp, Homo sapiens
taccttggaggcactgtgtttgaatctgcttagttttctaagcagatgaggatgggaatgaggagacgttagacccactagttctttggttctgtgattggttcttcttgcctgccttacaactcctgctgcttggaatcgttcatacgaaaatagatacacccagaacaaattatcttaaccagattctaaagcagaagtgcttagccaactcatagaattatttaattatttaatattggcactgcaaggagcttagagattgtcatttgacaaataaggaaacaggtaccaagaagtaaatttaatcaaaattacatgtccagttgtggttagactaggagtagaactcaactcagtacaatttccattgtggcataaatcaacataactaactgctgctgttactgtgctggctaagtgtccatactaaagtgttgaaattcgc

SEQ ID NO: 212170 - DNA, 567 bp, Homo sapiens
ctaaagtgtttatacttacagtgatggaaagtttttgacttgggccttccttattcctgcgtattatttaattttacagtgtttggtagaagcaaggtcaaaagtttactgaaaagaaaatgaagcccattaggagactattaggtatatcttaatatttcctttctcagttcctttagatccttcctcattgtattatctgggtcacactggttgagggattctaccttcctaatgtaacgtcagttgtgtttagaactgccttgacatacgtacctgcttgattggcgtcctcttctattagtcaccagagtacagagatactcagttccaatgataaaaatagtatacattccctttagttagaatcttcttagtgcaaataaccttggacctatgggtcctgtccatgataaaaggcagaacatttttcacttttttctttgagtttctcttcctgtgacttccccctccttgttatatgttttacatttgacaaagggggaaagaacactcaagattcctagtcatatgccagataaatatataatagacattattttaaat

SEQ ID NO: 212171 - DNA, 184 bp, Homo sapiens
tgcatgcaatctcctttctttatggtctttcactattactgagagtagccttagaccaccacacactctcagtcctagtgaaagaccataaagaaaggagattgcatgcagcatgaggactttgggttggctacaaagtagactgtctgttggcagaagaaattaccagacccagaaatgaggc

SEQ ID NO: 212172 - DNA, 362 bp, Homo sapiens
aattctgataacaggagcttgtctttatactgtggtgactgtatgccaggcactggcactttgagtactttacatgttttattggttaagataggctaggatatactgcagtaatacatgaacccccaaatctccatggcttaacatggtttattttcttctcgtgtgacatgtctactgaagggatctgttctgcttagcaacagcaactcagagacttagacgcatggaagctcccccttctctacaggggaagagagagactagagaagcgtatgcatacttttcacagctttcctaggtgttgtagttcattggtttgaactgtgatcttggccccacctacctagctgcaggagacc

SEQ ID NO: 212173 - DNA, 862 bp, Homo sapiens
agtctggactgtgtttctgtatctataaattgaggtttcagatatttattcagcaatattaataatctctgcctggattgcattccagagagagctttcctggccactcaaaacaagtcccctaactctctctcccctttccctgccttattttttccacaatacctgccaatatctgaaaacattgtctgtaggtgtacatgtgtgtgttgcatttattgcctgctagagcataaaccccataaaagcagaggtttttttctgtcttattcactgcaaaacctctggcacctggaatggtgtgtgctacatagaaagtgctaaatatgtatttatgaacgaaggaatgattgattgattgattctggggactcaacaatatgtagaaatgtgctttgcaaaccacaaagggcaaagcaaatgaaaggtgttcagctattattataaatctgctgcacactttagcatagttttaactcctcccacagcattttccaaggaaacgtcggtgaaatcttttttttctatttgggttttcttcaaaaagaagaattctgacaacctaatttaagagacttcctaggtgtggaactcagtgatggatcctcatctcttagcaacctcacataggagctgctcaccaggtaaatggggtgacaatttcaagtgggtgtgctcagtgtcagggatgagacatgtgataggaggaaggatgagaccttccccagccggtggaggggaacaaacctaaagcaggagtcgggaccctggtattgtagtcctgggcaagccattcccctttgagcctcctttcctccatacagtgaaggggcttggcaagatcccttccagctctagcatt

SEQ ID NO: 212174 - DNA, 317 bp, Homo sapiens
ctaggcattagcagacatcatccttgcagaatttaaaaatgaaattttgaataaatgagcagatgatgatcaaagaagccaggggggccagaagaacttttcagtttacatctttctacagccatccccagagtgcctgggtagagcaagcagagggccattaacaaaccagacaaatgcccaccgctcgtccaaggagcaaggctcgaaaatcagaccaggaacccgattcttcctgtcacaaccaggcacctgggatggtgagagaatgaactcagctgtgaatggtccagacctagaacccagacagatccttg

SEQ ID NO: 212175 - DNA, 398 bp, Homo sapiens
atttataggctttttaaactgagaagtttagtagcgcatttagcttcaggtaaagctggatctaggggttcaaacaatgtcatcagaattcaactctcaggctgaggtgggaggatcacttcaggccaggagttcaagaattgaactctctcccatctctgctttctgttgtgttgtcttccttctccagcaggcattctttttcatatgctgttttttttgacaacccttaagtactggatagagattctctacccaatactgaatcctagctgtgtcagtagcattgggctgggcctccatccttctgacccttagtaccctcatctgaaaatgggaaatatcttacccaccctgggatttattgggtagtgagtgattctctctattcaatactt

SEQ ID NO: 212176 - DNA, 182 bp, Homo sapiens
caggctgtgcacagtggctcacacctttaatcctagaactttgggaggctaaggtaggaggatcagttaaggccaggagttcaagatgagcctgggaaacatggcaaaaccctgtatctacaaaaaatacaaaatttatcagatgtggccaggcgtgctgggtcacgcctataatcccaata

SEQ ID NO: 212177 - DNA, 147 bp, Homo sapiens
gcagagctgagcagtcatgatgtgtgacttcaccgaggaccagaccacagagttcaaggaggccttccagctgtttgaccgaacaggtgatggcaagatcctgtacaaccaatgtggggatgtgatgaggcccctaggtcagaatcc

SEQ ID NO: 212178 - DNA, 357 bp, Homo sapiens
aatggaaggaaagtaaagatgaaattttgtctccttggctagctgttctataaaagtctgtgggatctgcaagccctgtgatcagtgaaacccttgtgcctttgacactgggacatgtcatggtaggaggggtgagtaaattttcctttacttggatttagcttgagtatctttcctgagggctccaattgcctttggcttgtgaaaattttcgtgagttctacaaattaatatgtgggaatgccaaagtttgtgtgtgtgggagtgagggtggtgtcaaatggaatgaaaaagtgaagatgtaatagttcgttttcacactgctataaagaactacccaagactgggtaatttatg

SEQ ID NO: 212179 - DNA, 617 bp, Homo sapiens
cagggctcatgggtacccatggatcacaggccagggcaccggatggcgctccagcaggaaggagggtgcctcacctcggcacaacactggatagggctttggtgatagctacaatcacgaaagctcaggaagctggtccagacgaaacgagcgtccacggcgtacctcggctatgcgtggggtcaggtttggcctgcttcactccctgctgtggtcgggctgggctgaccagcagtgaccggcgcttgtgcctgctggcacgcagaccagcccgcctggcaatggtgacatggcgtggtcgacactaagcccactgtatgagtgtcccggggctgctagaaccgacgaccacaacctgggtgtcctgaacaacagaaatgcattctctcacggttctggaggccagagcccaaaaccaaggtgtcggcagggccacttccctacagccgcctctcccagctctcggcggtgccagcaaccctgggccctccctggcttgtggctgcaccgctccagcctctgccttcgcgtaacatggcctcctccgagtgtctgtgtcttctcttctcccaaggacaccagtcattagatgagggccctaattcagtgcggccgca

SEQ ID NO: 212180 - DNA, 543 bp, Homo sapiens
ctctctcagttgagtcacacaggatgcgtttgattcctccagcaatgaattgtaacaacacacgtgaaatgttgtgtagcatgtccaaaattccagactctcagaagggaaacacgtgtttagcataagccacagtacataaacagtttaggcacagtgagctcctcttaccagttaggtggtaggaactctcttgaaatctaagttcccagactccagcaaaagggcagacttctaagctggtctttcaaagcataacagtaaggtctgttctgataactcttttgtacaaaagagcaaaattggacagaactaaagggaactatattcagattcataatcatggttggagacttttaactcttcttctctcaattattgaaaaaacagatagatcagaacactcatagggatttggaagctctgaagaataccgtcaatcaccttgtcatctcttaacgctactcccaagaaagctagagtacacattcttcccaagtgtaccatcaatcaccctgtcatctcttaaacaccactcccaac

SEQ ID NO: 212181 - DNA, 356 bp, Homo sapiens
caggtagtattattttcatcacccccatattaaaagtaaataggtagaaaaacatgttagcatccaagacaggttttctaactgcaaatctttagttgatcacactgatccttcaacctagtaacaactgtatgtatctgggaagtcttattctctctcttcattttctatcctgtgccctttaagagaagtaatttctatgaacccatattgaaagggtgcaaaagttgcaaacattgtaggaagaataatagtaccccctatgatcactgctatgaccagacagggacaaatactctaactctccccaccaccacatgctgcttctattgaatcctctaaacactccctttaag

SEQ ID NO: 212182 - DNA, 348 bp, Homo sapiens
ggtttccctatgtgcagacatcgagcagagctactcgtaaggggtcccaacgccttatgaaatttaaacaatcaagatgaagccactaacctgtgaaagttctattcatctagtgtagacagccaggttacaacatgcgccccaggcccctggcacggtgctctgtggagggtgctcgaggctcagccaccttgccggcccctgagcctcccctcctctggggaccttccgctaagaccagcacgtcttctcatgccccacacagagccaagctccttcctagcctgcctggattctcctacctggaatcccctgtccacatcaattaaagcaacaaacaagccacga

SEQ ID NO: 212183 - DNA, 850 bp, Homo sapiens
gttaatatgtgttttgctgtattaattttattgaccatctgacctatatttagatatggaatatgatttttttaaacattagggatatttggtcagattcttaaaatttatgaagtatatcatagataccaggatgtgctgtttaagtaataatgatagtagattacacacagtgagtaattgtgtacccaccttaggagacagaacataaccactgtccctgacattgtttggatgcccctccctgatgtggccccttctcacgtctgtagtgaccgccgcttttacgtttagcattccttgttttgtaaaataattacatcatttgtatatgagtcctataactaatatctgcagttttgcttgtttttgccctttatataaaatcatactggtgattctgtggcctgcttttctcattcaacatggtttttgagattcactcgtgttgcctgtagctgtagtttattttcactgcacagtttatctttttattctgctttcgaaggacatgtgtgctgtttccctccttccctccttccctccctccttcctttccttccactgtaaacatccctgtgaacattttggtacttgtcttctggtgtttatctacaagtggacttgccaggtcacagtgatcccttctcccgaaggttctattatcccgtctctcgatctggggattggatgtactcgactcgtagatcccagtcggaaatgacggtagcccgaaactctaacgacagccaccggaaagaagaaaatacaccacatagagggacaccagacacagaggagggctcaaaacagaacgcgagaggagaactctgatttattgcggggcggc

SEQ ID NO: 212184 - DNA, 332 bp, Homo sapiens
tggccaagtttcttggctgcaggcatttacagactatcaaaattctcaaaacagttcaaaccagttctgtgtatgagcagaatatagaatctgtcataatgttggccccctgaaattatgtttttatacactatgcttttcaaattggggccaatcaactcgtcattcactgaaatattttcagcagagattacactgacacatggggatgcatatgtcacattttataggggaggttttaaaatatgatcattccactggcatcgattccttgttaaccaaagacgaggttatttagatgcattgagtgtggctcttttggatcaactcag

SEQ ID NO: 212185 - DNA, 379 bp, Homo sapiens
taagaggaattgttaatttgctgtcttttgccacatagttattaaaatgttggaggtacgaacagaggatatctatgtttgcaagtgtaaagtaactttaaaaatactctgtcagccgggcgtggtggctaacgcctgtaatcccagcactttgggaggccaaggcgggcggatcatgaggtcaggagatcgagaccatcctggccaacatggtgaaacccctgtctctactaaaaatacaaaaattagctgcgtgtggtggtacacgcctgtagtcccagctactcaggaggctgaggcaggagaattgcttgaaccctggaggcagaggttgcagtgagccgagatcgcgccactacactccagcctggcaacagag

SEQ ID NO: 212186 - DNA, 524 bp, Homo sapiens
gaagaaagcatttgaatctttctgagtgagtagactgagtgaaaaagatccaacctcttcaatgcaggtgagaatcattcagtcattggggcccagagagaacaaaaaagtggagaaatggatgaatcctctctctcttcttgagctgagacatttgtcttctcctgctatctgacatgagagttcctggttcttggtcccctggactccagaattacatcagtgccctatcttgtcctcccacctccccagttttcaggccttcagaatcagactgggggttataccattggctcccttagttctcaggccttcagactgaattacacaaccagttttcttagttttccagcttgcagatggcatatggaaggatatctagacctccataatcacatgaaccaattctcataatcttcttttaggttctgtttctgtggagaacccagaataatatactggcttatcttgtttattgtctgtctttcctgattgattagaatgagagctccacaagggcaggg

SEQ ID NO: 212187 - DNA, 119 bp, Homo sapiens
aagggaagtgggggtggtggttatgaaagagagagaaagggaggccgaactctaccaccttcctgggttttggcaccaaaataaaaggttagccaagagaaacgacgagtagacccaaa

SEQ ID NO: 212188 - DNA, 954 bp, Homo sapiens
  misc_feature (935)..(935): n is a, c, g, or t
tattgacaaatgaaagaatttccctcaaattggaatactttactaaaactgggaaggagtaatcacataaagaacaacccaatagttctatactcatacaccaactgaagctatactagtagatagcaatatacaagtatatcaatatactacttttttatctttctgaaggtaaatcagtgtttctctctgcacttatctgcttccattcattcagttttttgtttgtttttgtgacagagtcttgctctgttgttcagactggcatgcagtggcacaatctcggctcactgcaaactccccctcctgggttcaagtgattcttgtgtctcagcctccccagtagctgggattacaggcatttgccaccacacccggctgatttttgtattttcagtagagactgggtttcaccatgttgcctaggctggtctcaaactcctgacctcaagtgatctgcccaccccttagcctcccaaagtgctgggattacgggcatgagccactttgcccggcctcattctggttttgttgtgtgctttgttctgtcttggaatatttgagggttaagaaattaggtcaaaagtctgccagcgtacaccaagctgtgtgtatagtgaaaggagggctggcaaaatgtctaccacggcatctgctttagaaaggtgaagctatcactgcaggtgtacacatcactaatgccatcctttcttatcactgggtgctggaaactcaggtaaaccagggaggagaaagtatcttcatttctcccaagagtgttatttctccatcatcatgttcaaagccttctctcaattctttgagttcttctctttatcttgtttcctactgccaacacaacttgcttctgctgtggcacatccttgctctgtgcctcagtttctgcatctcagggagcctcagtcctgtctgcntctttctttcattttgact

SEQ ID NO: 212189 - DNA, 257 bp, Homo sapiens
gaatgtcaccttctccaggaagccctccgtgatcctctccctagcccatctgaagcgctttctcacaagtattaccagaggtgatctgtaagcacattacagtttaaggagcacagctccgcaccccagttctcaactccagcagcaaattacacacatctgtggggttttcctaagtcctgatgcccaggcataagaatgataaaatggactttggggacttggagaaaaaggggggtaagggataaaaaatgaga

SEQ ID NO: 212190 - DNA, 365 bp, Homo sapiens
taggcatttacccaaggaaaactgaaatttacattcacaaagtcttgtgaagaatgctcatagcactttttttcataatagccaaaaattaaaaacagaccaaatgtctatttacagatctttaaaaactggtatattcatacaatggcatactactgagcaataaaagtgaatgaactactgatgcatgttacatgatacgacacggatgcatctcaaaaatatgttgagtttaagaagccagttgcaaaagactgcacattacatgattccactcatatgaaattctttttttttttttttttgagatggaatctcactcttatcacccaggctggagtgcagtggcaagatctgggctcact

SEQ ID NO: 212191 - DNA, 186 bp, Homo sapiens
acttcctgggctcaggtgtttctcccacctcagcctcctaactagctgagaatacaggtgcacaccatcatacctggctaatttgtgtgtgtgtgtgtgtgtgtttatggaggcttcattacaaaggcataattgaatacgttattggccactggtgatcaactcaacctttagaccttctcccgt

SEQ ID NO: 212192 - DNA, 337 bp, Homo sapiens
cattttttccaaattgtgaagggtaacgtctttagatggcacttcctgtctctcacatcaaaacgcgcgttttgatgtgagagagcaatctcaaaacgtaatttaaagatcttttttttagaaaatttcttttctatgttcaaattttatgttctttttttttttcttccttggcagtatttttcccctttatttttcttcttttgagttttgagatttaccaggaaaaaaaaaaaagtttaaacttctgggtctctcacatcagatttaccaggaaaaaaaaaaaagtttaaacttctgggtctgtcacatggatcttttagccctttatgaacag

SEQ ID NO: 212193 - DNA, 512 bp, Homo sapiens
cgttttgatgtgagagagggtcccagcttaaatgccatttactacccatagtctttaggttcctttccatccttcctttctttctgttttctttattgaaatatagccaaaaagttagtggacccataacacacaaggaactagcaagtgatagattcctcttatttctcagtggcttgtctgatgcaatctgattttggataactcatctaccattcatccgttcatttcaccctcaacataacacaccaaaaaaaaaaaatcctaataattttctttgtcaagaaactgcgttttgatgtgagagagcaatctcaaaacgtaatttaaagatcttttttttagaaaatttcttttctatgttcaaattttatgttctttttttttttcttccttggcagtatttttcccctttatttttcttcttttgagttttgagatttaccaggaaaaaaaaaaaaagtttaaacttctgggtctgtcacatggatcttttagccctttatgaacag

SEQ ID NO: 212194 - DNA, 498 bp, Homo sapiens
agctattttataattaatctgggtatatttgtaatctttgtaacttgtctgaacaagtaatccccattgaaaactttatgttgttctggctgcatggaaggccaaacctctccatcaatagtttgctggattggtaccactttcagttttagctgaattatttatttactgttgtaaattgagatgagtttttcatctcaatttctcttggggttctgaaccaaattgcccactgtatgtaaaagtacacaaatttctaaaatatgttttcatgagtcaaagaaatcatgaacttatagttagtatattaatttcagttagctataaattgaaaggtaaatccagatttaagtttatggaataacaatattgataaaaatcacttcatttttgtataatgtgttcttagtgcatagctttaaaattcagtgctgtattttatttcacaaatgttagaaagtatgtttctgatgtaggccttttactagggcttatatt

SEQ ID NO: 212195 - DNA, 386 bp, Homo sapiens
ccggctctcccatcagttaaggtcagaggatgttgaggatcactaaggaagtgcatgaagacaggaaagacatgtgggactgaaccctgggacactccagtgcttcatgatggaggaaattaggaggaatcagtaagggagaagtaggaaaatctggctagggagacaggaagagaaccaagagcaggaaaagtttcttgaaagcaaaggaggtcagctactcaaatgctgctgacatgttcaaccagggacctgagggcagagagatggtcattggatgtggccacatggaggtggccttggcattagtggatgcagtggggtggtggggatggagcctgaaaggagtgagttcaagagctgatgggagcagatgaggaagcaga

SEQ ID NO: 212196 - DNA, 552 bp, Homo sapiens
attttttctgcatacaaaataaatcatgtgtttgattcatttatttattcaacaaatatgtagtgagcacttactagaatactaaatgccattgtgctaaatgctagcaataaagcagtgaacaaaacggacaaaaacctgtcatgaactataccttctggtgggagagacagaactggccaacttaaatgaataacatacatcgtgtgttagatggtgctacagagaaaaatgaagcagagcaggaggtggtaagatgtggtggtcaaggtttgcaattttagacagtgtggaagaaaagacttgaaagaatcaagtgagtaaactcaggatatctgggagaagagcattctagacagacagaactggaggtacaaatgcccagagatgggaacatacctagaatattcaggcaatagcaaggaaaccagagtggttggatacaatgtggacaatgcattctatgtggttggagcagagtgatggaaggcaatagaatagaatagtaaccaataagatcatttagataatgatgggcatgaggagggaaga

SEQ ID NO: 212197 - DNA, 521 bp, Homo sapiens
cttggagtggcagaggcagaagaaaatctgtgtataagtggacctgcacagttcacactcatgttgttcaagggtcagctgtatgcatttttttcttagaggtaatctgttatttgggaatcaggaaaaaagttttaaaattcattttttaaaaataagttcaggttataacatttaagaagtttaatcttgttttttcagacttgcagaaaatactttagaaatgctgactctaaaatttatctttcatatgttgctggtaggaatgtaaaatgatataaccactctggaaattagtttggcaatttctcgaaaagttaaacgtacatttgacacacaatccagcgattgcactcctgagcctttatcctagagaaataaaaacgttcacaaaaaaacctgtacatgaatgctcgtagaagccttgtttataatagctaaaaaccagaaacaactcacatgtccttcagtgggtgaatggttaaataaaatgtgatagtcttgcggtagaacaccaccat

SEQ ID NO: 212198 - DNA, 331 bp, Homo sapiens
tcacacttgctggagctggagcagctatcctgaccgcaggtgcactcgagaatggaggccacacatggtgaagcaaccagatggaggctgggtctccaaggactctctaaggcagagtagccataccagtgactctggtaccagttctgaactgcccacctctgggtttttgatttttaaaaaaaagaagtaaacttctgttatatttaaaagccactgtatttggagtctgctaaatcaaatcctgttaaaaggcactgttaggtatccttaaggaaaactaaatttggtagggaagacaagacatatgagcttggaaaggtcatcaaat

SEQ ID NO: 212199 - DNA, 1206 bp, Homo sapiens
  misc_feature (778)..(778): n is a, c, g, or t
attctacagtcgtgggaaagcagattcagcgatcaacaacgttcgccagaggatgtggacgaaaccactgtggaaaggccaacttccaacgcctctgacctggtggtcagccctgcagatttactgagtgaaaacagctgcccatatgagtattacttataacaaacaaaaacctggaaacaacctaaatcttcaaccacagagcatgcaaatatattacatcagctcatttaaattggtaatcactaagacaacattaaacatggcaccatgttttctcaataatgtaaagcaggaggaaaaacagaaaacaattttgtttcattatactatatgcagctacatactataattacaatgtaaaaacagatgtacatgttagtagaaagtagaaggaaaccagaaaaaacaaaaatgaagacaacaggtgcactaggatggtaagattgtgtatgaaattttgttcacttaaaattgtctggctaggtgcagtggctcacgcctgtgatcccagcattttgggaggccaaggcaggcagatcatttcaggtcatgagttcgagaccagcctggccaaaatggtgaaaccccgtctctactaaaaatacaaaaattagccaggcatggtggtgggtgcctgtatttccagctacttaggaggctaaggcaggagaattgcttgaacccaggaggtggaggttgcagtgagccgagattgagccactgcactccagcctgggcaacaagagcaaaactccatctcaaaaaaaaaaaacancatccacccgatttgagctcactggccatttgccctatagtggccgattaaattaactgcccgcgtttacaacgggtgactggaaaaccttgggtcccacttatcgccttggagaaatcccctttgcagatggggataaccaacaggcccaccgtacgcctttcaacattggcaccctctagtgaaaggaattgtagcgttaattcgttaatccgccaaaatttgaaacaccatttcaaccaaggcccaatagcaaactctttacttaagatatcccgaaaggttaggttgtcactttaaaggccccttacggggctcacatcaggcgacaactcctttaggcgtgcccctcgcgccctcctatttttggtagcgctaacattattgcgcccatgaggcctatctatctcggcgatctgtccgccccg

SEQ ID NO: 212200 - DNA, 2222 bp, Homo sapiens
aggctgggacgacagcggggggggggttagacgggaagttccgcctcagcctctcaatcagcggcggtgtcgcacttctcccgagaggctccggcgaggggcagggccgcgttcgtccgggacccgcctcaagcctcgcagcctttcacccagtttcctcccgattcttgctgggacaacaaaattgggaagcggttctcgaaacatactgtcaaggcgtagttgcatttggtcgcccaactcacattgaagcctaagacccagctgatttctcttcatttctgcaaagttactgtaccatggcaggccaacgaacatgtcaaaggaggagcagcagagctggccccgggaaaatgcaagaacctccaaagagcattgaagaattcttaaagtttcaaaattgggattattggccaagggaaatccattttagagatgatgataaatggtcatgcactctgaaaaaaataaaagaagatagttcatttgtttcaatttatacacacctatgggaaaatgttcctcgaatatttgaagcacttttgatcatggaatcaaaattaaaggaatattcacttattttgcaaaaccacacctctgaaatatttaagtggaaaagcatgatttctgagacaagttcttatagaaaattggaacgatatggggaatttctaaagaagtaccataagaaaaaaaagataatgctttcagatgaaatggagacagagaagaatatagagggttgcagcttcacaggattcaaagcaaatgaacttactcagctacccagacatttggatgctgaacaaatttatcttttatttaaaagcccataattttgatgtatgtaaatatttcattttattgtaggatacattttgacagtatgatttaatgaatcagacctttacttaaagctatgataaattaggtgttcaacaagatttgatcctttgggcattaaatttggcaggaaagaccagtgatgtgtctaaccgctaattaccagaaaagaatatattaaactctgtgttactgctttgggaccctgaggttgctagcgtacactggcttggcatgtaaccgtaacaggtgttttttccttcttgtctgttcctgctctgtcagctcaggatgttttagcctgctcatttttgatcctgaaataagttgtgagtgcccttcttcacaacccttctgggtgtttcttttgagtcttcaagtgtctgtgggaattttggggtagtatccctgtagggtaaccaaacagtgaaaaactgcaggtgttgggaggtaattagatcaatagccagtgaatacgagggctaaaatgagggtgggatggttacctggtaaaactggtcattttgccctctatttcagttttctgctctttgtgtttatgtacattacatatgttctttttcattaaaaagtattaaatccaagttgaagctgttatcagtgtacatcatactatacttagtggcctatgaaaaagatgtgtccccacagaatacataataattttcttgccatgagagtttatatgatgtcctttttatagacctgtacttgaagaggaattcatacctctggatgcacttaaaagaaatcttgaatgttactcaatctggcattaaaacattttgtgactaagaagataaaataatctattgaatctgcctatttaaaccaaaacttatattttctagtagttacagtagacaaatttagccatttattccaattttgattaattgtttgcttaggaagaatactacacaggctcaggataggggcttattagaatataagtccatgattgattgttgatatttgtcctcagtggaaaagggggaaataatggcatgaatcttacatttttgctgttcttggtgtcctttcaatatctactagccaaatatgattattgagcatatgaaatatgactagtatgactgaggagctgaattttttattgtatttcttttaactactttatatataaatctaaaaactatatttgatttagttattaaaaagcttttaattatgtttggaagaaaattacaaacatgtattctatgaagtctaaatattaatctagtacttctgatgaaaatgtagtgttcaagttgagatatgctatcaaaaatatataccgtatttcaaatgcctagtactaaaaatagaatccaaaatattttaataatttttat

SEQ ID NO: 212201 - DNA, 2291 bp, Homo sapiens
aggctgggacgacagcggggggggggttagacgggaagttccgcctcagcctctcaatcagcggcggtgtcgcacttctcccgagaggctccggcgaggggcagggccgcgttcgtccgggacccgcctcaagcctcgcagcctttcacccagtttcctcccgattcttgctgggacaacaaaattgggaagcggttctcgaaacatactgtcaaggcgtagttgcagtgagttgtgaagaaatgttgatcccagagaaaagtttgcattttgcccacctcaaagatattttgatttttggtcgcccaactcacattgaagcctaagacccagctgatttctcttcatttctgcaaagttactgtaccatggcaggccaacgaacatgtcaaaggaggagcagcagagctggccccgggaaaatgcaagaacctccaaagagcattgaagaattcttaaagtttcaaaattgggattattggccaagggaaatccattttagagatgatgataaatggtcatgcactctgaaaaaaataaaagaagatagttcatttgtttcaatttatacacacctatgggaaaatgttcctcgaatatttgaagcacttttgatcatggaatcaaaattaaaggaatattcacttattttgcaaaaccacacctctgaaatatttaagtggaaaagcatgatttctgagacaagttcttatagaaaattggaacgatatggggaatttctaaagaagtaccataagaaaaaaaagataatgctttcagatgaaatggagacagagaagaatatagagggttgcagcttcacaggattcaaagcaaatgaacttactcagctacccagacatttggatgctgaacaaatttatcttttatttaaaagcccataattttgatgtatgtaaatatttcattttattgtaggatacattttgacagtatgatttaatgaatcagacctttacttaaagctatgataaattaggtgttcaacaagatttgatcctttgggcattaaatttggcaggaaagaccagtgatgtgtctaaccgctaattaccagaaaagaatatattaaactctgtgttactgctttgggaccctgaggttgctagcgtacactggcttggcatgtaaccgtaacaggtgttttttccttcttgtctgttcctgctctgtcagctcaggatgttttagcctgctcatttttgatcctgaaataagttgtgagtgcccttcttcacaacccttctgggtgtttcttttgagtcttcaagtgtctgtgggaattttggggtagtatccctgtagggtaaccaaacagtgaaaaactgcaggtgttgggaggtaattagatcaatagccagtgaatacgagggctaaaatgagggtgggatggttacctggtaaaactggtcattttgccctctatttcagttttctgctctttgtgtttatgtacattacatatgttctttttcattaaaaagtattaaatccaagttgaagctgttatcagtgtacatcatactatacttagtggcctatgaaaaagatgtgtccccacagaatacataataattttcttgccatgagagtttatatgatgtcctttttatagacctgtacttgaagaggaattcatacctctggatgcacttaaaagaaatcttgaatgttactcaatctggcattaaaacattttgtgactaagaagataaaataatctattgaatctgcctatttaaaccaaaacttatattttctagtagttacagtagacaaatttagccatttattccaattttgattaattgtttgcttaggaagaatactacacaggctcaggataggggcttattagaatataagtccatgattgattgttgatatttgtcctcagtggaaaagggggaaataatggcatgaatcttacatttttgctgttcttggtgtcctttcaatatctactagccaaatatgattattgagcatatgaaatatgactagtatgactgaggagctgaattttttattgtatttcttttaactactttatatataaatctaaaaactatatttgatttagttattaaaaagcttttaattatgtttggaagaaaattacaaacatgtattctatgaagtctaaatattaatctagtacttctgatgaaaatgtagtgttcaagttgagatatgctatcaaaaatatataccgtatttcaaatgcctagtactaaaaatagaatccaaaatattttaataatttttat

SEQ ID NO: 212202 - DNA, 2357 bp, Homo sapiens
aggctgggacgacagcggggggggggttagacgggaagttccgcctcagcctctcaatcagcggcggtgtcgcacttctcccgagaggctccggcgaggggcagggccgcgttcgtccgggacccgcctcaagcctcgcagcctttcacccagtttcctcccgattcttgctgggacaacaaaattgggaagcggttctcgaaacatactgtcaaggcgtagttgcagtgagttgtgaagaaatgttgatcccagagaaaagtttgcattttgcccacctcaaagatattttgatttttggtcgcccaactcacattgaagcctaagacccagctgatttctcttcatttctgcaaagttactgtaccatggcaggccaacgaacatgtcaaaggaggagcagcagagctggccccgggaaaatgcaagaacctccaaagagcattgaagaattcttaaagtttcaaaattgggattattggccaagggaaatccattttagagatgatgataaatggtcatgcactctgaaaaaaataaaagaagatagttcatttgtttcaatttatacacacctatgggaaaatgttcctcgaatatttgaagcacttttgatcatggaatcaaaattaaaggaatattcacttattttgcaaaaccacacctctgaaatatttaagtggaaaagcatgatttctgagacaatttctaaagaagtaccataagaaaaaaaagataatgggggtgtggggaatggggcctcactctgtggcccaggctggagtgcagtggcgcaaccgtggctcactgcaacctctgcctcccagattcaagtgattctcctgcctcagcctcccaagtagctgtgattacagggttgcagcttcacaggattcaaagcaaatgaacttactcagctacccagacatttggatgctgaacaaatttatcttttatttaaaagcccataattttgatgtatgtaaatatttcattttattgtaggatacattttgacagtatgatttaatgaatcagacctttacttaaagctatgataaattaggtgttcaacaagatttgatcctttgggcattaaatttggcaggaaagaccagtgatgtgtctaaccgctaattaccagaaaagaatatattaaactctgtgttactgctttgggaccctgaggttgctagcgtacactggcttggcatgtaaccgtaacaggtgttttttccttcttgtctgttcctgctctgtcagctcaggatgttttagcctgctcatttttgatcctgaaataagttgtgagtgcccttcttcacaacccttctgggtgtttcttttgagtcttcaagtgtctgtgggaattttggggtagtatccctgtagggtaaccaaacagtgaaaaactgcaggtgttgggaggtaattagatcaatagccagtgaatacgagggctaaaatgagggtgggatggttacctggtaaaactggtcattttgccctctatttcagttttctgctctttgtgtttatgtacattacatatgttctttttcattaaaaagtattaaatccaagttgaagctgttatcagtgtacatcatactatacttagtggcctatgaaaaagatgtgtccccacagaatacataataattttcttgccatgagagtttatatgatgtcctttttatagacctgtacttgaagaggaattcatacctctggatgcacttaaaagaaatcttgaatgttactcaatctggcattaaaacattttgtgactaagaagataaaataatctattgaatctgcctatttaaaccaaaacttatattttctagtagttacagtagacaaatttagccatttattccaattttgattaattgtttgcttaggaagaatactacacaggctcaggataggggcttattagaatataagtccatgattgattgttgatatttgtcctcagtggaaaagggggaaataatggcatgaatcttacatttttgctgttcttggtgtcctttcaatatctactagccaaatatgattattgagcatatgaaatatgactagtatgactgaggagctgaattttttattgtatttcttttaactactttatatataaatctaaaaactatatttgatttagttattaaaaagcttttaattatgtttggaagaaaattacaaacatgtattctatgaagtctaaatattaatctagtacttctgatgaaaatgtagtgttcaagttgagatatgctatcaaaaatatataccgtatttcaaatgcctagtactaaaaatagaatccaaaatattttaataatttttat

SEQ ID NO: 212203 - DNA, 509 bp, Homo sapiens
gtgagttgtgaagaaatgttgatcccagagaaaagtttgcattttgcccacctcaaagatattttgattgtgagaacttggttacattagtctttcgtggctatatcaatatcattatttcgtgtgctgtgtggtaatgaaagctattagaaaaatcatttgtatcttaatgatttagtttgcataaaaacacgcatatagagttaagagtactttgtgtttttccactttgaagtataatatgtggataagttattagaacatttgtccgtgcctctccccaaacaatgcgcaaacggaagtgcactctaacaactaagattttaaaacacaatggtcaaatgttgagcaatgttttattgactactctgaatttatcaagtggtagataaaggacattacaatgccctagaagtgctcacgatatcaagtaaagcatgttaaattcaagtacagaaaatgcaatattcttactactgagataaaaaatggaatttaataaattacag

SEQ ID NO: 212204 - DNA, 1151 bp, Homo sapiens
  misc_feature (1070)..(1070): n is a, c, g, or t
  misc_feature (1074)..(1074): n is a, c, g, or t
  misc_feature (1080)..(1080): n is a, c, g, or t
  misc_feature (1143)..(1143): n is a, c, g, or t
aggctgggacgacagcggggggggggttagacgggaagttccgcctcagcctctcaatcagcggcggtgtcgcacttctcccgagaggctccggcgaggggcagggccgcgttcgtccgggacccgcctcaagcctcgcagcctttcacccagtttcctcccgattcttgctgggacaacaaaattgggaagcggttctcgaaacatactgtcaaggcgtagttgcagtgagttgtgaagaaatgttgatcccagagaaaagtttgcattttgcccacctcaaagatattttgatttttggtcgcccaactcacattgaagcctaagacccagctgatttctcttcatttctgcaaagttactgtaccatggcaggccaacgaacatgtcaaaggaggagcagcagagctggccccgggaaaatgcaagaacctccaaagagcattgaagaattcttaaagtttcaaaattgggattattggccaagggaaatccattttagagatgatgataaatggtcatgcactctgaaaaaaataaaagaagatagttcatttgtttcaatttatacacacctatgggaaaatgttcctcgaatatttgaagcacttttgatcatggaatcaaaattaaaggaatattcacttattttgcaaaaccacacctctgaaatatttaagtggaaaagcatgatttctgagacaagttcttatagaaaattggaacgatatggggaatttctaaagaagtaccataagaaaaaaaagataatgctttcagatgaaatggagacagagaagaatatagagggggtgtggggaatggggcctcactctgtggcccaggctggagtgcagtggcgcaaccgtggctcactgcaacctctgcctcccagattcaagtgattctcctgcctcagcctcccaagtagctgtgattacagggttgcagcttcacaggattcaaagcaaatgaacttactcagctacccagacatttggatgctgaacaaatttatcttttatttaaaagcccataattttgatgtatgtaaatatttcatttatgtnggtnatttgncgttgattatgatcgacttactaagcatgaaatagggtcacagattgtcttgggctcattggnggagacat

SEQ ID NO: 212205 - DNA, 973 bp, Homo sapiens
aggctgggacgacagcggggggggggttagacgggaagttccgcctcagcctctcaatcagcggcggtgtcgcacttctcccgagaggctccggcgaggggcagggccgcgttcgtccgggacccgcctcaagcctcgcagcctttcacccagtttcctcccgattcttgctgggacaacaaaattgggaagcggttctcgaaacatactgtcaaggcgtagttgcatttggtcgcccaactcacattgaagcctaagacccagctgatttctcttcatttctgcaaagttactgtaccatggcaggccaacgaacatgtcaaaggaggagcagcagagctggccccgggaaaatgcaagaacctccaaagagcattgaagaattcttaaagtttcaaaattgggaaagagtttttaaaatctggaagactcattttctctcagaagcctccattgctcttttgcatgactccttttggtggtggtttctccataaatttagggtatagtgatttttaaaaatttattttttaagttgatttttggcataattaatttttcaatagagataagtctagtacaaaaatgtttttctggatgcaactacagagattagtttttgagcattccacacattagaaatcctatatgatgtctagagttctttcagaggagttaaaacttgattatagattcacaaagattcctggatctttgaattagacttcatatattatatctatcataatttatccatttgttaagtcgaggccaaggtcgcatttcaaccgaaggacagaattggaggggcgaatccgttggcaggaccggacaagaggggtatgctggtccacgggtatagaccctacggcacttgagagcgacgaaggcgctatccaggggggcccgaacatacgggggaaaggggcgccagacaggaagaaggagcccgacaagaagaggaggaggaacg

SEQ ID NO: 212206 - DNA, 2348 bp, Homo sapiens
aggctgggacgacagcggggggggggttagacgggaagttccgcctcagcctctcaatcagcggcggtgtcgcacttctcccgagaggctccggcgaggggcagggccgcgttcgtccgggacccgcctcaagcctcgcagcctttcacccagtttcctcccgattcttgctgggacaacaaaattgggaagcggttctcgaaacatactgtcaaggcgtagttgcagtgagttgtgaagaaatgttgatcccagagaaaagtttgcattttgcccacctcaaagatattttgattgaatttcaagaaagctgagaatggagtggtcaataaaggcttctttttcggacttggtttggtcgcccaactcacattgaagcctaagacccagctgatttctcttcatttctgcaaagttactgtaccatggcaggccaacgaacatgtcaaaggaggagcagcagagctggccccgggaaaatgcaagaacctccaaagagcattgaagaattcttaaagtttcaaaattgggattattggccaagggaaatccattttagagatgatgataaatggtcatgcactctgaaaaaaataaaagaagatagttcatttgtttcaatttatacacacctatgggaaaatgttcctcgaatatttgaagcacttttgatcatggaatcaaaattaaaggaatattcacttattttgcaaaaccacacctctgaaatatttaagtggaaaagcatgatttctgagacaagttcttatagaaaattggaacgatatggggaatttctaaagaagtaccataagaaaaaaaagataatgctttcagatgaaatggagacagagaagaatatagagggttgcagcttcacaggattcaaagcaaatgaacttactcagctacccagacatttggatgctgaacaaatttatcttttatttaaaagcccataattttgatgtatgtaaatatttcattttattgtaggatacattttgacagtatgatttaatgaatcagacctttacttaaagctatgataaattaggtgttcaacaagatttgatcctttgggcattaaatttggcaggaaagaccagtgatgtgtctaaccgctaattaccagaaaagaatatattaaactctgtgttactgctttgggaccctgaggttgctagcgtacactggcttggcatgtaaccgtaacaggtgttttttccttcttgtctgttcctgctctgtcagctcaggatgttttagcctgctcatttttgatcctgaaataagttgtgagtgcccttcttcacaacccttctgggtgtttcttttgagtcttcaagtgtctgtgggaattttggggtagtatccctgtagggtaaccaaacagtgaaaaactgcaggtgttgggaggtaattagatcaatagccagtgaatacgagggctaaaatgagggtgggatggttacctggtaaaactggtcattttgccctctatttcagttttctgctctttgtgtttatgtacattacatatgttctttttcattaaaaagtattaaatccaagttgaagctgttatcagtgtacatcatactatacttagtggcctatgaaaaagatgtgtccccacagaatacataataattttcttgccatgagagtttatatgatgtcctttttatagacctgtacttgaagaggaattcatacctctggatgcacttaaaagaaatcttgaatgttactcaatctggcattaaaacattttgtgactaagaagataaaataatctattgaatctgcctatttaaaccaaaacttatattttctagtagttacagtagacaaatttagccatttattccaattttgattaattgtttgcttaggaagaatactacacaggctcaggataggggcttattagaatataagtccatgattgattgttgatatttgtcctcagtggaaaagggggaaataatggcatgaatcttacatttttgctgttcttggtgtcctttcaatatctactagccaaatatgattattgagcatatgaaatatgactagtatgactgaggagctgaattttttattgtatttcttttaactactttatatataaatctaaaaactatatttgatttagttattaaaaagcttttaattatgtttggaagaaaattacaaacatgtattctatgaagtctaaatattaatctagtacttctgatgaaaatgtagtgttcaagttgagatatgctatcaaaaatatataccgtatttcaaatgcctagtactaaaaatagaatccaaaatattttaataatttttat

SEQ ID NO: 212207 - DNA, 2419 bp, Homo sapiens
aggctgggacgacagcggggggggggttagacgggaagttccgcctcagcctctcaatcagcggcggtgtcgcacttctcccgagaggctccggcgaggggcagggccgcgttcgtccgggacccgcctcaagcctcgcagcctttcacccagtttcctcccgattcttgctgggacaacaaaattgggaagcggttctcgaaacatactgtcaaggcgtagttgcatttggtcgcccaactcacattgaagcctaagacccagctgatttctcttcatttctgcaaagttactgtaccatggcaggccaacgaacatgtcaaaggaggagcagcagagctggccccgggaaaatgcaagaacctccaaagagcattgaagaattcttaaagtttcaaaattggaaatatcaatttgaacaactatccttgcaagaaaaatacctttacaagagctaaggaatccaggattattggccaagggaaatccattttagagatgatgataaatggtcatgcactctgaaaaaaataaaagaagatagttcatttgtttcaatttatacacacctatgggaaaatgttcctcgaatatttgaagcacttttgatcatggaatcaaaattaaaggaatattcacttattttgcaaaaccacacctctgaaatatttaagtggaaaagcatgatttctgagacaagttcttatagaaaattggaacgatatggggaatttctaaagaagtaccataagaaaaaaaagataatgctttcagatgaaatggagacagagaagaatatagagggggtgtggggaatggggcctcactctgtggcccaggctggagtgcagtggcgcaaccgtggctcactgcaacctctgcctcccagattcaagtgattctcctgcctcagcctcccaagtagctgtgattacagggttgcagcttcacaggattcaaagcaaatgaacttactcagctacccagacatttggatgctgaacaaatttatcttttatttaaaagcccataattttgatgtatgtaaatatttcattttattgtaggatacattttgacagtatgatttaatgaatcagacctttacttaaagctatgataaattaggtgttcaacaagatttgatcctttgggcattaaatttggcaggaaagaccagtgatgtgtctaaccgctaattaccagaaaagaatatattaaactctgtgttactgctttgggaccctgaggttgctagcgtacactggcttggcatgtaaccgtaacaggtgttttttccttcttgtctgttcctgctctgtcagctcaggatgttttagcctgctcatttttgatcctgaaataagttgtgagtgcccttcttcacaacccttctgggtgtttcttttgagtcttcaagtgtctgtgggaattttggggtagtatccctgtagggtaaccaaacagtgaaaaactgcaggtgttgggaggtaattagatcaatagccagtgaatacgagggctaaaatgagggtgggatggttacctggtaaaactggtcattttgccctctatttcagttttctgctctttgtgtttatgtacattacatatgttctttttcattaaaaagtattaaatccaagttgaagctgttatcagtgtacatcatactatacttagtggcctatgaaaaagatgtgtccccacagaatacataataattttcttgccatgagagtttatatgatgtcctttttatagacctgtacttgaagaggaattcatacctctggatgcacttaaaagaaatcttgaatgttactcaatctggcattaaaacattttgtgactaagaagataaaataatctattgaatctgcctatttaaaccaaaacttatattttctagtagttacagtagacaaatttagccatttattccaattttgattaattgtttgcttaggaagaatactacacaggctcaggataggggcttattagaatataagtccatgattgattgttgatatttgtcctcagtggaaaagggggaaataatggcatgaatcttacatttttgctgttcttggtgtcctttcaatatctactagccaaatatgattattgagcatatgaaatatgactagtatgactgaggagctgaattttttattgtatttcttttaactactttatatataaatctaaaaactatatttgatttagttattaaaaagcttttaattatgtttggaagaaaattacaaacatgtattctatgaagtctaaatattaatctagtacttctgatgaaaatgtagtgttcaagttgagatatgctatcaaaaatatataccgtatttcaaatgcctagtactaaaaatagaatccaaaatattttaataatttttat

SEQ ID NO: 212208 - DNA, 1290 bp, Homo sapiens
gccattttaggcagaatggtcggcaaacacctagaagaggtgagggagtgaatgaatgatacatgtatcttgagggaaaatagtccaggtagagtagagcagatgcttaagtcgtaaggcgttttggagggcagatgggataagtggatggatagtaggttcaggaaatagcaagcaggccagtatggctggaacaaatttagatttaaaaagctagtggtggttccactgtggctactacatactttcaagtggaactgagaggatttgctgtcagactagattgagttatgagaaaaaagtcaaggttgatggccaaagcaactggaattgtcacatatagaaaatgggagaggactgggcgtggtggctcatgcctgtaatcccagcagtttgggaggccggagtgggtggatcacaaggtcaggagtttgagaccaggctggccaacatggtgaaaccctgtctctactaaaaataaaaaaattagctgggcgtggtggtgcgtgcctgtaatcacagctactcaagaggctgaggcaggaaaattgcttgaacctgggaggtggaggttgcagtgagccaagatcatgccactgcactccagcatgggtgacagagcaagattctgtcttgggggtaaaaaaagaggggggaaattgtgggatgaaaaattgacaaataaattggaaaagcttattggatacacaattgaggatacaaaggacagagtttggtgcctcaaatgctactagtgggtttagggatctccttacttttcaataaaaagaagcataaaagttaaataaattgtttgttttctctatcaagtatactatccacatttgtagatcatatacttttgaccactaagctacttagaaaccaagttaaagcaatcattgtgttaatgctttactcttctgctagacttgctagtaggtgttcaataaacccaggtgtaactaataatggggcgcctgcttatcaacttcacaagacagcctagttaactggtgagcacctgttagatattgtaactatgacggcaggctaccagtatgtattccttccagtccgctccgtgtaagagaaacaatgaagaaaatcactgttccatcaattctgtattcattcttaactataaaacaaaaaattttcaacaaccaatttagaaaacacgttccttttttctcttaattctccaaatagttcatgtaggagaaatgaagttttggaactcttagtaaaatacctaatttgactaaacttctcacatttcctctgtgc

SEQ ID NO: 212209 - DNA, 1034 bp, Homo sapiens
gttcaaaacaaagctattgccttttatgttttcagtacaggtgcagaattcgactacttcccaccacccttgctgtcaccattctgtccaggccactatcacatattacctggattattgcagtaacttgccagtttctttgttctgatcttaagccttttgacataggtgccaggatattattgccaaaactttgtgagtcaaatcagatcactgctctcttcaagtccctccagtggtttcccagaccattaaaaataaaaaacctaagttcttactacaacctgtgggactctacatgttccgactctacattacctctctgatctcatctttgccttcttttcttattcactccagcaacacaaaccatgtttttattccttgaacataacaggtatttaacctttcaaggtaatactttcttccagtgcctgaaagctttcctgcccagttatctgcatagataccattttacttcctttattctacaactcttacagtttaaaattagttgatagcagacattaaatggtagaagcaagaaaagaatgatgtatgttgtaatagtagtagagggaaatatgggagcataactgggggcctgttccaagactaaggataaagaaagctctccttgatggtgtcataccagtaatactttgctgagaagataagatatcaaagagacaaattaatttctgataacttttccaaatggactctagttcaaaccagaaattccctagtgtatgtctttactaaattgggagaagtagagcttatatgcccctatttggcgaacttgccataacctaaattgtgatctggggtacattttgaaaccgtaaacacttttcttctaggattatgtttatcccttccaagaatcattatagaaaatgagagatgtaaatgatggggttatgttgtgtttgtgaatgatattgaggcagaataaaaataaaacccccgggatggggtaccccatggttacctttccttgggtgaggcgggtttttgccttcttctct

SEQ ID NO: 212210 - DNA, 316 bp, Homo sapiens
ccttcctgatcagattgttaagaagaccaaataagaaaggcacattaaaaaagtacactttgaagaaatacgcaaatagatgagactgttttaatgaccttagcacactctaaagactatgtttatcaactgccatttctgtgagtaatcacattagaaagtcacatcacttgtaatttggacttttgcaaagtggtccaccatgtgtaatataacattattttaattttcacatctctactgttactgattgtacaaataattttgtatattagaagaaaagtcattaaacacaatacgattttttatctgagaa

SEQ ID NO: 212211 - DNA, 495 bp, Homo sapiens
acccaaactcgatgagggaattggcccagggaggttgagtgattttcttgaatcgcacatttagttggtggcagagccaggataataatgaaggaccttgaacttcgctcagtccgtgagtttttttctattactccatcggtaattatttcctttactaaaatgtacattcttatgatatctttaaaatcatgctcacccttgtatttaacaaatgatttactaacagttgatttacatacaatttttaaggaacatatttatagcatagaaagtggtgcagagggttttaccaaatttctctggggtgtccaggtcccctggtccttccagaggtgcgtattcataagtaaatgttggcattctgtcatccattttttccagatgttcttcccaagtagtgtgttatgttttgtgtttttaatatttctcatacacgtttttaaaaatctgggcacataaatcctaataaaactctcaactatctcctctgtg

SEQ ID NO: 212212 - DNA, 352 bp, Homo sapiens
gtgatccgccggcctcggcctcccagagtgctgggattacaggcgtgagccaccgcgcccggcccattgctgacatttctaaacagcgaaacaaatgcagaacaaccacctcagactggttaccgtgtgagagggttcagtgtcttttgtgcttaagccactgttgacatggggttgttacttgtagccaaatgcacacgccaagacctttgtggtctccatcggtgtcgacttgtcagtgagggggtgcactcactgagtccccagcctgacggttccacctatgcctcctggatcagcctccttttttttttttttttttttgcccagggaaaacccaatttttttaaat

SEQ ID NO: 212213 - DNA, 675 bp, Homo sapiens
ttgactaccaacaggtggggcatggggtagacagaaacatggaaaagtgtggactggaggcaggagacccatgcctgttcctggcctgcctctgattcaattgctgtgtgacattaggcaggttccctacgctctctgtgtcatttttgccatctaaaaacctggtggctcacacctgtaatcctagcactttgggaggctgaagtgggaggaccacttgagctcaggagttcaagaccagcctgggcaacatagcaagaccctgtctctactaaaaataaaaaaaattaaccaggtgtggtggtgcatgcctgtagttccagctacttgggacgctaaggtgggaagactgcttgagcccaggaggtggagactacaatgagctatgtttgccccactgtactccagcctgggtgacagtgtgtgaccctgtctttcttttttttttttttaagaaatcaagtgtcttctttatttaattcttttaaaatttttattagaatcatttaatagaaaaagcataaaataaattaggtcataattccctcctgatgcccagataacaattttgaaattaaataagcaaataaataaatgtctcactcatcattagaaaatttatatgacaaaccttcccaaagaaaatcactattcaggttttctataacctttcag

SEQ ID NO: 212214 - DNA, 1651 bp, Homo sapiens
  misc_feature (1102)..(1102): n is a, c, g, or t
  misc_feature (1651)..(1651): n is a, c, g, or t
ctgtcagcacggggcctggcatgtaattggtctgcacccactggtgcactgaactgccataacctcaggttttctttcttgctgatacccctgggtcatgttctttggcaaataacatgattcattatgaagtagagttcagcaaaggacaaggatgaaagttgtcatttagagaactgccattcagactttcttgtctaggtaaagagcaaggtcttctctcttttcaactcattttctaaatttaaactgacgatgagaatatggatgatgtgtagcttccttctcccccactgatttttggttcaggctctgggtttttggcaagaacttacagatctcacttattattggccacccttctgctttaagacctgtcagggcttgtctgaaataaaactggaagcacttctgattccatcctcactgctttcctccttcaccgtcagacagcattactgtatagcactgagtgaggggccctgacactggaaggtggcaggtggggcctggccgccagtgaggtatcatcatttgtgtgtgctcatgtgtgcgttgggcttgttgtatctgaggcatgaacattccatatacacggcttaaagagttttcttcccataccgaaagcatatattcggagaggacccaacttattcagcatagccttgttcccatagtagccatcctattcccccacagcctctactttaggaaagctccccgtccccatatgaaatccaaaccaaaaaagatatatcactttcagctcaattattccataattacaagatattaggctagtgggctctttattggttgggtcttatattaatgttatatgctagccttgtaattttgagctcctctatggatgttaattttagtgaaactctatattgaagaaaagatgggactaagggggagacaggaggaggaaagaaagcagagacaggcaaagaatcatagcctgaaattcaacagcaagcatggcttatgaagatcaagttatatttttgcttcatgaatcattgtcagacaaattaagaacatattgtttcttatttatctattgtcaaggattcactatcagacactaagaatnaatcttgattttcataagctctgttgacaccatggagccacagagcataaaacttgcatctaataaagaaagtgcaacatggaacagcagggagtggaataccagcacaactcacagctgcttcctgttcctcgtccctgttttcaggaatgtttcttagcaggaagttttttaatagaccgagaatttgttatatgtattctaagaaaagttgtagttgtagatgcattactctcccaaatcttagagatcagggatgattatgttccatttttgtttggtgagttcccatctttgtatgtacctccttgctcccggctgtcctcctctcctcttccctagtgagtggttaatgagtgttaatgcctaaaccatacttgttttatggacacttctataatggattcgttgcataattttcatgcagtgtatagtgttactagttggaaattcttggaggactcttagctgtctgatgaaattcctagtagaaatttttgttttgaattcctaaagttgaaatatgaaaattatattttaatttgattn

SEQ ID NO: 212215 - DNA, 637 bp, Homo sapiens
cctggccagtgctttcatttttattagtccatttggttgtcataaactcttaaagggagacactatcatccccattttataaaagggaaaatttaggctcagagaggcctagtggcttgcccaaggtcacactgctgtgaagcagaaaggccaggccgagagtgaaggtattctgactttgagtgcaggcctcttcacatgtggcttgcccacctcaggcacccaggaccatacttttgtcataaataatcacaaacatttcagttgatggatagaacttcggtggaagataaatttcctagggggtggagttaagttggtaaagaaatgagatggccagtaggaaacctcagtccatgaaaagatttttgtttatcaaatgcatccatgagtttcccaccaaacataggttgacctgaaggtcaggtaaaaagaggagggaaagagaatactatacgcggtatattatattaatattattccacttgcttttaagcccacttttaaaaaatcagatttattgaggcataatttacataaaataaaattcatccactataagtgaacagttggatgggtttggcaaatatgttcaatggggaaaacgtcatcacagttataataagacttctgtccc

SEQ ID NO: 212216 - DNA, 252 bp, Homo sapiens
acttggcaaacaaaacctttgtttttagtcttcaagccatttagaccaaagactcaaacaaatctattctagtgtatcatttttaccccaagttcactatctcctatcctaatatcaagattagtgccatcaaaatacctaacaaaatcaatacctttgccatccacatttaggttccaatgtcttaactgaaaagcacaaaattaggatacatgatgtatgaaggcctattttgctaaaataagccgagtg

SEQ ID NO: 212217 - DNA, 396 bp, Homo sapiens
tacatttgttgaatgactttgtgaattctggtggaaggaatttgcaagaaacagagttgcaaaagaaaccattataacgatataggcagcagcagtgggaatagggagcttgtttaaagcatatttggaatgtaccaacctaggccgggcgcggtggctcatgcctgtaatccagcactttgagaggccaaggtgggcagatcacgaggtcaggagatcgagaccttcctggctaacacggagaaaccccgtctctactaaaaatacaaaatatcatccaggtgtggtggcacgtgcctgtagtcccagctactcgggaggcttaggcaggagaatctcttgaacccgggagaaggaagtttcagtgagccaagattgcgccactgcaccctagcc

SEQ ID NO: 212218 - DNA, 468 bp, Homo sapiens
taaccgccacacccttcaaaacaagaccatcatcctggatttggccgcttgcaggccagcaactgggctacagttcaacaactgtgcactgagtgccaaccctgggccaggccctgaatccggcccaacaaatgagacccagtcccaagcctcaaggaaccaattgtccataaaacagcaaataaccacaaggtcgtgtggtgtgtacaatgatgagacagagaaggtacaaagagacaaggcacagttcacaatacactgatttgtacttctttgtgtcaattattttcctaggacttccctccctcacatggctacaaaataaacagaaggccagtcaggggaagtaaactgtcacctggtggctaagagctctccacaggccagctccttcaaaactctgactggtccaggcacctccttcatacaatgagcttcaccagttccaccacccaatggtgtgttcca

SEQ ID NO: 212219 - DNA, 158 bp, Homo sapiens
tgtgcatttagagacgagcatggcttctccaacgatccttctttgctcttatctaaataacttcatctatttaactgttcattatagggttttggttcccctcttagccttgtgtacatgtgatacaaacaactgaatgcaacatttcctgcctgagg

SEQ ID NO: 212220 - DNA, 297 bp, Homo sapiens
aagccttaattaatacaatgtaaaatataaccagcctggcttggtggttcatgcctgcaatctttgggaggctgaggtgggaggattgcttgagctggggagtttgagaccagcctgggcaacatggtgaaacctcgtctctacaaaaaatacaaaaattagctgggcacagtggcacatgcctgaagtctcagctactcgggaggctgaagtgggaggatcacccaggaggcagacattgtagtgagctgtgatcatgccactgcactccagcctgggggacagagcgagacactg

SEQ ID NO: 212221 - DNA, 613 bp, Homo sapiens
atatcttctcctgtgtttgttagctgctgtggagcaccactattcaactggaaaacttggaaatcagctcatctaaggaccagcacactttttgcgaagagacagatagtaaatagtttagattttataggccatttagtttcagttataactactgaactctgctgttgaggcaggaaaacagtcatagacaatatgtaaatgaatgaatgtggttgtgttccattaacactttattagcaaaaacaagcaataaaccagatttgtcccacgagcatagtttgttgactcctgttctactctgattgtttctgtattcttgtttcataccttagctttctcatcctgattactgtattagtcttctattagtgtctgatttccatttaatactcatactgcttccacagtgatcttaatataaggcatatctagtcatgtccgtttgctacttaaaattcttcaacaactttgctctttataaatctcaaactgtaaccccatttgctttttgccatcttgctacatccccaaatgacacttatggctgtcccttgtttccctgaacataacaggtttgttcagcctctgtggtttgcatttaatgttaaat

SEQ ID NO: 212222 - DNA, 458 bp, Homo sapiens
  misc_feature (444)..(444): n is a, c, g, or t
cacacacacacacccaaaacagccaaccagtatggaactggctaaataaatgacacttcatccatatgacacaatgctgcgctgccattacaaagaatgatacatacctacattaatgatagagcagaatggcacacacacacagacatgcccacacacacatatacacacatactgtacttttactacttgtttaatttctgtctttttgtccgtcactaaacctccccccaccctgcaaaattttattataaaaatgttcaaacatccagacaagttgaaaagacaacatatttaacacccatatacctgcctcttagatgttgccaaatagcaagatgccctccccccgacctggcactttcaaaaaacagcccttctccataggcactgccaagaagcaagctggcctctgctctacccttttcaaccccaaggtgaggngatgactgaagaca

SEQ ID NO: 212223 - DNA, 153 bp, Homo sapiens
aacagcagccacaaagggccattgcagggaaaggaaggacatcagtgtgctatggcatgagagagcttggggacgtaacacaggatgaagctggaaaggaatagaagggtaagatcagtcgggcgcggtggctcacacctgtaatctgagcac

SEQ ID NO: 212224 - DNA, 478 bp, Homo sapiens
gaagacttcaacggggtcatgctaatgtgtggtagagatttctcttattttattgaataattgaattccaaagaacaaatttcaatatactaccattagcttctattatatagttagagatttaatgtcacagaaatattcccaaatacgcctaggttttatgaccatcaaccccatggtatgatggacattatagtccattagtaagattatgcctgtaactacatagcagtaacgtgtgtgttctttaaaaaatcttactttgactcctccccaaaacagcactttggtcaaggacttgagggcaggaagtttatttgggagctgatcctaggatgcagaaatgaggagcatagacaatgagatagggaaggaagatgtattagaagaacgcaggaatgagtttcttaccactgtgtattgagtggggggctcacccctgttagggacactctaagaaacgattgtagtatgtgcc

SEQ ID NO: 212225 - DNA, 479 bp, Homo sapiens
agacgttcagctcgtacccctcctcagcagacgcagctccccagcacaatcctgctcgaccgaattcaccttcctgaccaggcacgtcaacaatctttctgtccctctgatgccagaacgttatgtttctgagggtgaaacttgagtgattaattgacagtattcctcaggaatccttgctgattgctgaatgcataaatgagtgaaagacctggataatccccaacaggcgcctgagtctcacatccgccctgggtgattccccatggccaggggcccacctcggttcccagggatccatgggcatgatcattgtgatgagccactactctccaatctggcctctgcacctgtgtgacattttcctcccattgctttacatgttactctttcttattcagtaggatgtgcagattggtcagggtgtgtattagtttcctagagctgcgtctgctgaggaggggtaccgagctgactga

SEQ ID NO: 212226 - DNA, 939 bp, Homo sapiens
accctttcagactcgccattggcccccaccagatcaggaatctgttttcccttgttgaccttgagccactcacagagtgggaaaggtttgcctatggaacgaaaacagtcctccttccatgatttcccctttgctcccatgttcatccatgtgggctgctgtaacaaaatcccataaactgggtggtttacaaacaacaaaaatttatttctcatagttctcaaagctaaaagtccaagatcaatgcgctgggagatttggtgtctggtgagaacctgcttcttggttcagtgtcttcttaccgcgtcctcacgtggaggaaggggcgagaaagctttctggagcctcttatgtcaaggcactaatcccattcatgaggactccacactcgtgactggatcgcctcccaaagcccctacctccaaatcccatcaccttgagggttaggatttcaactatgaactttggggagacaccgacattcagactgtagcagctccccagcacaatcctgctcgaccgaattcaccttcctgaccaggcacgtcaacaatctttctgtccctctgatgccagaacgttatgtttctgagggtgaaacttgagtgattaattgacagtattcctcaggaatccttgctgattgctgaatgcataaatgagtgaaagacctggataatccccaacaggcgcctgagtctcacatccgccctgggtgattccccatggccaggggcccacctcggttcccagggatccatgggcatgatcattgtgatgagccactactctccaatctggcctctgcacctgtgtgacattttcctcccattgctttacatgttactctttcttattcagtaggatgtgcagattggtcagggtgtgtattagtttcctagagctgcgtctgctgaggaggggtaccgagctgactga

SEQ ID NO: 212227 - DNA, 292 bp, Homo sapiens
ggatgtgcagattggtcagggtgtgtattagtttcctagagctgctataacaaagtaccacaaactaggttgcccaaaacaacagaaatgtattctctcatagttgtggaagccagaagtctgaaatcaaagagttgtgagggctgtgttctccctgcagatgcccagaaaaatcctccctttctctctcccggcctctgctggaggctggccatccttggcgctctttggcttgtcattgcatcatccaagtctctgcctccatcctcctgtgtcctctcctgtgtgtttg

SEQ ID NO: 212228 - DNA, 463 bp, Homo sapiens
ttacctgttttttgtaattaattttagtgggacactgctacaccccttcagtctgcatattgttcatggctacttttgtgctgtaactgcagggctgagttattgcaacaaggatcttatggctcacaaagccttaaataatactatctggccctttacagaaaagttcacagacccctgctctaggactaaaacacaacattcttcttgcttttgaattacattttatcagttaaatactcaaacttacaaactggtaaaatgtggaaagataaaggattacatcaggctaagcatttatattttgaattccaaacactaccacatcaactataattttattttttgtatgtatgcatttagttttattatagcaaagcaacttgcacatttttaaatatttaaaactaagcgtcatcttttctttctagggaaacaacaagaaaatttaaaaacaagcagg

SEQ ID NO: 212229 - DNA, 429 bp, Homo sapiens
aaaagtattccaataaataatggctaaaattttctcaaatttggcaaaatacataagcctatagattcaaagagctgagagaaccccaaataagataaacacaaagaaatccacaccaagacatgtcatagtcaaacttctgtaaattaatgacaaagaaagaaaatcttgaaagctgcaagagataaatgccaccttacttatagggaaaaaaaagtaatttgaatgacagcagatttcccatcagaaactgtagtggtaagaagaaagtggtataacatttttcaagtgttaaaaaaaaaaatccagccaggcacagtggctcacacctgtaaccccagcactttgggaggccgaggtgcgtgcatcacctgaggtcaggagtttgacactagcctggctaacatggtgaaattctgtctctactaa

SEQ ID NO: 212230 - DNA, 558 bp, Homo sapiens
tgctcccagcaggtccacttacgggtatctctgctgtagacaatcttatctaaggacacaaacatatacacacaaggtacaaaattgaaagctgctgggattgtggttgtgagccaccacgcctggccgtatattttaaaaatctcttaaggtccagttactgttatattttggtcctgtactgaaggaggatgtaagtcattttcctaaaatgatttttatagagatagatgttggcagtttactcaaaagagaatataggaaaatcttttttaacaggtttggtgggactagccttattcactgaataaagtactttacagaatggagtatatctatatgtgtgttttaagatttgttcatacaaagcagatgttctgtgtactttgtatttgtaaacaactaattgggggtgggaaggagattgctttgtaaaaagagggtttccttgttctaaagctttgctgctggagatggtaagatggtaaataaatattgtactgttatgctgcgtttatctcttctgctttatctgtatttgcatataaaattcttgag

SEQ ID NO: 212231 - DNA, 623 bp, Homo sapiens
atggaacttcttagaggagcaccagataatactctagtcccagagatacttttttttttttaacctcaaggtataacagcaattatatttatttttataaacaatatcagtcacctagccagtagaatgaacccctctttgtctgactgttggttcagtgaaatgggaaatgcaagtggctggtagcaatctcgacttccagttcagtggaaccatgattgtgtctcttggtaaaagtacctccttaggaactaagacctgtaaatcagaagtgccaaaagttgtagaatgagaagcaaaaattctgcaagtggactattagatataattgtaagaggagctactttcatttccattaattcctaggaccttaggttgtggttatgagacagtatcagttttggtttatgtgatatcctatgctgttaagttagggtcccaacttccctaactatatctaattggtatagtagataaatcatcaaagactatttcactagaggattctgggaagatgatggagtaggaagcaccaagaatctgctcctcatctagacaacaatttcattgccagaatcagtctgatgtaacaattttgaaactgtggaccaaataatcttcac

SEQ ID NO: 212232 - DNA, 303 bp, Homo sapiens
ttcatatttctataatgatgaggatgtaaacatgtttctgcagtttgggtttacatggaatcagcaaataaatcaccttaagtaatacttctacctgcgatggtgtctttgaaaataaaattaacgtgctttggtttgacagaaaggtgcttcatgcttagcaggtaatttttcaggtggtattaagaggaattttattggtaggagaggatgtggttgtactctgacaagctggtcagaattgttcatatttgatgcattgatatcaatgtgaactcttttgatctacatttatttagacat

SEQ ID NO: 212233 - DNA, 663 bp, Homo sapiens
aaaaaagattttaaggaaggaaatgacttttattagggtttggttttatcaatttcataatccgattaatcccaccatttttaaaagatgaaattgctttcattagaaggctacataaaatataatttgattattttaggctctattattagactcacatttctttctacagtctcattattatttccaaaaattacacagtaacctaaatcatctaaaaacacataaagctactgtattctttattagatccatccccagagttatatgtacatgtacatactttgagatgtgttttgttcttaattgtattttaggttatttttgactgacttaaattctatcactattttaatatttgttaggtccgaataaaccatttagaatatttttcagtgtacaaaatgtgctgtaatttaataaggccccttgcttttaaaatttggcttaacctggtgaggccaccggcttgaagttccgaggacactccccttggtcccctgttggacccgtgggttttactccaaggaccccatgttaaccttcttaacacgagaggctttaagcctcaactggttctttggttggaccaaaatttcttggaaatgggggcccaagacaaaagggttttttatcaccgtgggtcccctgtgggcccctctt

SEQ ID NO: 212234 - DNA, 319 bp, Homo sapiens
gtctgcgattcctgtcacctttgttctcaggttttctcctctcttgtcacctccatttcttttttttccctggggctgttacttaaacttttttatcttcctaccaagtttaatcagattttcccttttgtcataaagccgtcttagaatgactccaggcagtaagaagtgagtcagaaatttatgtccagactgtgagattgttatgctcttggattcccctgccaccgcacccagcctacaaagaacatgtagagaacatttctgcaagaaggaaatctgcttacctttggttatccaactgcttctcaaacttaat

SEQ ID NO: 212235 - DNA, 223 bp, Homo sapiens
ccggtgagcgtcggcaccgggctggggccgtgctgattcccggcagcgtgtgggaatgtgcgggtgcctcgtggcctgctgacatcgcacacaggtcacagcctgtccagttcaggacatcagggccaagagtgaagtgagaatacggaggcacctctgtgtgctcaccctgctgaccgtcacccagcctccggggggggtcacagctggcccccaggaagct

SEQ ID NO: 212236 - DNA, 602 bp, Homo sapiens
ttagtagagacaagatcacactgtgttgcacaggccggtctcaaactaggatcctctttttatccctaggtgaaattttgtattgatgtgctttcgccgctatctttttaaatggaatgttctttgtactcaatgggcctgctaagtatgtggactcatgatttgtaattctgggaagtgttctttattagctctttgaaaatgtcctgtattcatttttcttcatactttctttggaacttctttagtagatgctgatccttccagattcttccactaacccactaaatgttccaaccattacactctttctttctgccttcctcctacttcaacctcccaagtaactaagactacaggtgtatgctactgcacctacctaatttttaaaatttttgtagagataaagccttgctgtgctgcttaggctgatctcaaactcctggcctcaagcagtcctcctgccttggcctcccaaagtgctgagattacaggaaggagccactatccctagtcctcctaatactttttgtccactgatatcttcttaaccgtttagttcttatgtgtccttcttcacccttttactgtcattttaatgg

SEQ ID NO: 212237 - DNA, 137 bp, Homo sapiens
ggaattcataaataaaattcagtatacacataaaatggaaatttatgcaggtatctgagaaataaaccaaatctacatactgcaatgaaaatgaaactcaaataattcttaccttcaaaataagtaacaaagcaaga

SEQ ID NO: 212238 - DNA, 1058 bp, Homo sapiens
ttcttttaaaatcaaagcagatttttttttatttcactgattaccacattattaacaatactatggggaaggaaaaaaaactctaggaaaatctgatccatcaggagccactgacatttcagctcacggcaaacctatacaatcagcttacaagaccattcatcctctaaaaggattatcatgttgagagatgcataggccttattttatcgcctgtcatagtaatatgagtatgaagccatttggagaaataggtggacatttgtgagccatcatatcatttttatctgatcttgacagctcaatttcaccacctgtctcatgctagacagatttcagagctgacatcacagaaaatgtgctgaaatgtaaaatgtaatccataaaaggccaatggtgatgatggtatgcagaaaaacatatttgcataatggagcaaaggtcatcctgggctaccgatatgaggcttccattctcaggcagatgggcagcactgtgatttgttcaggactccagttgctagtgcagtttcaagggacaagtaaggaaggaagaacaattttctgtataaactcatcacagagaattttaacatctctctagcctgaaggctggctctcttttgcatacctttatattcaaccttgcattttatatgcacatgaatacaatacctgggctgcaaagcacaaaggaacagctactaactattttccatagtctgcactggctgcctattcgtttctgacaataatttatattactaaatttaatctaaaagtctaaaaagatgtgaactttcactgcctcaaggatccccttaatcccttcttaaccaactagtacccattgctaacatttcctttagtttgtttttcttcattttatatatacatatatatttaattataggagtgaaacatgcttattacaacagcctaaaaatacaaatgagtaaagataaataatctcaccatcacatcctcctcagataaccaatttggtattattcttccatatgcattttttaacgaaattgtatacaaatacatgcaaat

SEQ ID NO: 212239 - DNA, 785 bp, Homo sapiens
atgagtgtactgcagacattgcttagatccagctgggcgcaaagccaggccagctcagacttttcaattacacgaacgaaccgccttttgttttacacttatgtcaatttgaattggatttccatcttgtaaccaaaagtctgactaatataatcaaataccaacttaagtattggtatctacgagttataggtgttttcatttccttggccaagaaactttgagctctgaaatatcacggaacggcgggttaggccagggcacttagggcaaagttttagctggactatagagaaggatgaagtggcctctctcacttctttcttcatctctttggtttagcttagccacactgagtccactcctaatagtggaggaagaggcaaaggaagcctcttatgctattgaatggggcctggttggaacttgcccctgaatctgtagatggaccaaatgcctacaacaggggttttcatatctagtccatgagggcaaagtgaatttcatacgagtggcacaatgggggcagttgtagctcctgtgaactgatggagctaccgctttggatcctgcatcttaaatgctgatgctgcctcagggttctgtcttcagcccagcagtcttctatctctgagctgtccctgagtgagttcagtcaccccataggttcacctgtcacctccatcagctgtctgtgcatcttttttcttcgcctgcagacctgaaggatgcggcacattcccattggtcatggtgatacctgcctatgctgatttttcatagga

SEQ ID NO: 212240 - DNA, 508 bp, Homo sapiens
aatcattggcatggaattcctataagtggaaatagtgaaaaccaacacaaatactatataaaaagtaggatttctcagaatgtatttgtaattaaatttcagtactgatatgaagatacataaatatatgtacatactctacatatactatatattatatgatattacaaaatacaggtcattatgcttagaatgcaatgactcattttattaggttgagccaataacaaatatattatgtttagaaaaatatgttagttcaacctatactattgatgacttttcaaaaattctactgcagtacaaacatggcttatgccctaaaaataatctataggttttgatttagaagtagaattccttccaacatttaaatgttgggtattaaaaatactatcctgggaggctgaggcaggagaatgacatgaacccgggaggcagagcttgcagtgagcggagatcgcgccgctgcactccagcctgggtgacacagcgagactccatctca

SEQ ID NO: 212241 - DNA, 470 bp, Homo sapiens
gctgctgtcactggagctgtgtgtcacactgggcagatgcaagtcttcctgccacgccttgaggctcagccacacaggagaaatcacagcgctagctgtggcctgctggctacccccagagatgcagctgtgctctatgaatgcagcccccaaccagaggaaagcaccctgaagacctgggtgctttacgcaataaaaaagacaaaccttctgatggcagaatatgttttttaaaagactaatgaattctcatgttttatttggttcaacactaaaactggtgttgctgtgttttgttttttgtttttttttgtcacaaagaaaaatatcctagtttgtgtgatattttcccctcgaagtgtcattgcatacccattggatttttctttaaatttcagggagcccaaattaaattttacataccctctgggtctagtatgaaaaagtagatttgatttaacttgatgaaa

SEQ ID NO: 212242 - DNA, 397 bp, Homo sapiens
acatagctatggcactttcactatacatgtaaacacccttacacacatacaaatgtacatgcgcgtgtgcgcacacacatatggaattagctttttctctttgtgggaggagggaaatgaaaagacccaaaacattcagattcccaaatggacacgtaagaaccccgtcatggaaataggtctgggtttttttctcttttgagggaagcagggcgtttctggttactgtcgccattgccattgtgcccctgcttaccatccccctgcaccgcccccccggcccccgcccgccactgctagggtttacaggtcatccctggattaaataagtgatattgtgtttttttttctttgacacaaagtaaaattataattaatattgaataaagtaaaaatg

SEQ ID NO: 212243 - DNA, 513 bp, Homo sapiens
tcagcgtccagccaaccaactgcagtgatgaactaacagtccacccagggctggccggggccgcttggaggaccagatctctcccgctgaagggcgaggggaggagggagacagctggatgtttgcttcatctccgtctgccagagacccctttcctttcttggcctgcctaatttctaccatcttgaaaaactccgcggaggggccacctgctgcgtgacgccttcctcaatacctgcctccctccagggccggctcccgctggggacaccggcacgacagagacaggctgcagcttagcaaacatgagctgatggaaaagaaaattacttgtttgtgacttccttggtctcacttctccctgagccccaaatcctctgcaccacccatgctgtctttcaaagaacagctcctctttttctgcatctgttgaaatcaagaaacagaaataaagaacagcttcctcggcccacttagggagcatggggaggggagcagtgtgctgctgcgtga

SEQ ID NO: 212244 - DNA, 375 bp, Homo sapiens
cttccccctttcaaaacttgcaattaaccctggtgattcagagcaaactgcgtagagtatgcaagatacagggaaacactgaatcctggggctgacagtttacatcctggctgtttaccaagtccatcttgaaaatcttactgtgattcatgaatataaatattcagtatctttcactgtatctatgcccactattgagcaggtctatattttcagtcctgtttatatgctatttacaatgatcgtcaaacacacttaagcaattcctttttattcctcatgcaatgggaagtaagcaaacattccatgaggttcattttatgaagcaataaaagaaagttagtcatcaaataaaataaaatggtaaaatcaaga

SEQ ID NO: 212245 - DNA, 101 bp, Homo sapiens
aatatcattgtatttaaaaaatactattcaatgtatttaatatattgctggcaattctagccaatgcaagaaggcaaggaaatgaaataaaaggcacacag

SEQ ID NO: 212246 - DNA, 782 bp, Homo sapiens
ggctgtgttttataaaataagaatggtttataataaaataaaaacagtgtagctcacagcagctttttgtcattcaaaatgtatagaaaaaaagacaccaacttatacaaaacttcatttgggttcttttaaagttttgttgttgctgttgttgttaaatggtaggccttttgagatagatttattggaaagtcatatgggtgtagttcttgggacagatgatttctccattcagcatttagagttataacttctgcactctagtgattcttgaagtagtttggaatatggaaatgtgaatagttttacctccatcactctggatattatcccatgttctaaaatcattacataaaaatataaactcactattgtccttgtaggcttatcatgtacttatgggctcatcaatgccaatgtccattgagggaactgagaagagggggcatatacaggtaatgatgtcttctcataaaaagaaaaaaaaaaggaaatgttttggcttttctttagtaacatataatttgtaatgttctttgcctcattcacaatcctgtccgtgtataaacagtaatttgctcttgtaaacacatactgtagttagagttctattgggagcaattggtgttctttatctgtgacatcatgagcatttaaaaaacaataattataaatatcctccagggtgaaaaaatagtaaaaagaatcagaggatctgtctagagactttagtggttgtttcttactgtcctgtctttgagtatcctccctctaccccatct

SEQ ID NO: 212247 - DNA, 343 bp, Homo sapiens
gtaactgcattggtatctctgatcccataatttatgtcagcaaaaaatattcttctgtaaagcagcaattttgtgatcagactggcaatatgaaaacagcaatttgatcaactagaaaggattgaagaaatataaatctagaaggatatttggcaaaaatattataaagacatgataatacttctaattttttattttcttgatggttaaagctaaaacatatattttagtgacagtgaagcattgcatatgtagaaacttgttctgtaaaattttaattatcaactgtgtgcaaaagtagacatttacataccgaaataaaaaagctttatagcagtaaaca

SEQ ID NO: 212248 - DNA, 450 bp, Homo sapiens
caatagcatgcattttgctaatgggtattggcctaagaagccactcccaatttcatctcttggtcccttttcatgtattctggctaggggagaaataatatcatatatcaatcacagttaaaagtttatacatcatcttgtaagacaacacttcaaacctatgaagtgttgtcacctggccagcatcatagctaagtcttccgtaggtaatttcgctgtttttttttttcagattggtttttctgcatgataggatatacggtagaaccaatgagtcatatgattatatgagccattgtttcacttttcttgctataaagtgattttcttggtcagaagcaatatttttttttattactacaagtctagatccgagttatatatcatgacgagaaataaggaatttggtaagtccacaaatggtggtcctggcaaaagcgttatggacag

SEQ ID NO: 212249 - DNA, 244 bp, Homo sapiens
taataattctttttattgtttttttaatggagtgttgatttccttacataaatttaattgtaaacatgtacataggaccgtgattttgaattaaaaaaatactttgggccttcggccttcttagtagtttttttttttttgttttgttttcgtttttgttttgatacggcgtcttgctctgtcgcccagaaaataaacaaataaaagtcttcctcagcgacaaaagcaaacgcaagcccgagct

SEQ ID NO: 212250 - DNA, 170 bp, Homo sapiens
agaaacacatatgaaaaagcttgtatcaaacacatatgcttggagggtctgaagacatcttttaaacacaaacaattcattaaatggaaatgcaaagcatgcctacatcctactactatataatgaaaatcgatgtgttatcaccaaccaacatttaacgtatcaaatcc

SEQ ID NO: 212251 - DNA, 465 bp, Homo sapiens
agggaaagatgtcacctttgataatttcagatttagatattagttcatttgaaacagaagagaatttcattctttcatgctctgtacctcaaatgggttaagcattagtgaaaattgtggtaagacctcaaactgcaaatgactattcaagagcttttggataaggaggcaggaagaagctctttatctttcaactgtatggagcttgttaacaagcctctgaggtgacctaggaggattgagtttgggggtatacatttcacacattcttttgcaagttttaggttctgcaaccaagggccagaaatcttttctttcttccagatgctagtgttaggagttaaatggaaacaagaaggacatggggcaaatgtttttactgtcaatgtatattgcaaggtgaattcaaatgcatccttttattctacttcagaaaataaatttgatatttttcaaaactgtgta

SEQ ID NO: 212252 - DNA, 406 bp, Homo sapiens
ctgcctaaatccattcagtaatttttaaaaaatatattatctaaatggccacatcttatcaggaatgaatagaaaaggaatggtttgagacacttcatctcttcggctcacttcaaactatgttttcctccactgtttgtccttcagcttttctgtccttccagtgtttttctaaagtaactcactccctctggctgaagggcatttttatatattgttccttctacctagaacagtttctcccctactattagtcatttgaagtgcatttaaattgtgatttcttcaaagaagacttaccctctaaaactagatcaatttaatttacatttgtgtgcattattctttgataaatatacatctccctgactcgacacaaaactccaagaggataaggaccaagtct

SEQ ID NO: 212253 - DNA, 553 bp, Homo sapiens
ccgtggggatcccggggcagccgagggcccctgactcggctcctcgcggcgacatggatcggatggccagctccatgaagcaggtgcccaacccactgcccatgtgctgtaggccagcggggtcggcgctgggctggaggcggcggagcgcgagagcttcgagcggactcagggtcgctgttggtctagccttgcctcccgcatacccagtctagagcctggccacatgcccatcaaaagactctcactgctctgcctgccttcttctgtcctggcgtctataccctcagaccagccttgcatacctactcctgccagcctcctccaggaagccttgcctcctcaactctcctgcaccatcctcacatttcacgctggcctacagcacatgccgctgtgcggaccatcctcaactctatggaagtcacaacagaggacacaagcaggacagatgcctatgagagtattcggggaaaaatatatcacacgagatgagactacgataaacgacgggatgtatgcggatctcagaaatgtgaggtggagcgcaggc

SEQ ID NO: 212254 - DNA, 674 bp, Homo sapiens
ccgtggggatcccggggcagccgagggcccctgactcggctcctcgcggcgacatggatcggatggccagctccatgaagcaggtgcccaacccactgcccatgtgctgtaggccagcggggtcggcgctgggctggaggcggcggagcgcgagagcttcgagcggactcagggtcgctgttggtctagccttgcctcccgcatacccagtctagagcctggccacatgcccatcaaaagactctcactgctctgcctgccttcttctgtcctggcgtctataccctcagaccagccttgcatacctactcctgccagcctcctccaggaagccttgcctcctcaactctcctgcaccatcctcacatttcacgctggcctacagcacatgccggcatgtgctgtaggccagcggcatgggcggctgccctgggctcgcctcttccagcccagcatccagctggcccgccagggcttccccgtggtcaagggcttggcggcagccctggaaaacaagcagaccgtcatcgagcagcagcctgtcttgtgtgaggtgttctgccgggatagaaaggtgcttcgggagggggatagactgacctgccgcagctggctgacacctatcgaacgcatggcctacagcacatgcccgggtaaccgaaatcgattgcgta

SEQ ID NO: 212255 - DNA, 528 bp, Homo sapiens
ccgtggggatcccggggcagccgagggcccctgactcggctcctcgcggcgacatggatcggatggccagctccatgaagcaggtgcccaacccactgcccatgtgctgtaggccagcggggtcggcgctgggctggaggcggcggagcgcgagagcttcgagcggactcagggtcgctgttggtctagccttgcctcccgcatacccagtctagagcctggccacatgcccatcaaaagactctcactgctctgcctgccttcttctgtcctggcgtctataccctcagaccagccttgcatacctactcctgccagcctcctccaggaagccttgcctcctcaactctcctgcaccatcctcacatttcacgctggccactgtcactgccagaggaggcaccactgacctgcctcatggcccagccactgcacccatctccaaccagacccttggtgtgttccccacccaatccatcacaagccactttcaagctttagggaagtgaaaagtactgcctgccctca

SEQ ID NO: 212256 - DNA, 929 bp, Homo sapiens
ccgtggggatcccggggcagccgagggcccctgactcggctcctcgcggcgacatggatcggatggccagctccatgaagcaggtgcccaacccactgcccatgtgctgtaggccagcggggtcggcgctgggctggaggcggcggagcgcgagagcttcgagcggactcagcagctgcagaggagatactcggaggaggaggaaagagaagtcacggagccctgttcttaaccgagttttgcagtcacctccccgtattcctctctcactctgaagccgagcacagaacccagcctctggtggtaccgagtgaaggttggcctggttggttggatggatggccaaatgaactccagaccactggattgtataacaggacagcaagaggcagcacagagccgtggaaagaacctgtagccataacatttgatgaatgaatcagacatgtgacattagttctgtttcttctttttttttgagatggacactctgtcactcagtctggagtgcagtggcgcgaactcagctcactgcaacctccgcctcccgggttcaagtgattctcctgcctcagcctcctgagtggctgggactacaggcgtgcgccaccatgcccagctaatttttgtatttttagtagagatggggtttcatcatgttgaccaggctggtcttaaactcctgacctcaggtgatccgcccgccttggcctcccacagtgctgggattacaggtgtgagcccctgcgcccggccatgttctgtttcttagaggaaaccttggcttccctgtgtgtcattagtgctctgtaagtgcccctgctgcagagcgtactgaggcatgtgacctggctgtaagtgcctttgctaaagccagaggtgcccactagttttcgagactgcagagaccttgtgtgcccagcactcaa

SEQ ID NO: 212257 - DNA, 387 bp, Homo sapiens
tttgctgtgcaggagcattttagttaaattaagtcccttttgtctatttttgttttcattgcttgtactcttcaggtcttagtcatgaatgctttgccaagccaggcgcggtggctcacgcctgtaatcccagcactttgggaggcccaggcaggcagatcacgaggtcaggagattgagaccatcctggctgacacagtgaaatcccgtctctactaaaaatacaaaaaattagcctggcgaggtagcgggcgcctgtagtcccaagtactcctgaggctgaggcaggagaatggcgtgaaccccggggggcggagcctgcagtgagcctgagccaagatcgcgccactgcactccagcctgggcgacagagcgagactccgtctc

SEQ ID NO: 212258 - DNA, 411 bp, Homo sapiens
tattcttttcctcaatctcaaagattcaactcaaatgccaccttgcccatgaagtcacctgggaatgttccaccaggagtgaatgttccttctatatccttgaagagtttttgtaacataagaaattagttgtattgcattattagtgtgcttgtttcgtctgtgttttactcatctttgtaggatacttggcacttgctgaggtagtgtgcacctttttgctaaaaaagagagtgaagatattgatactgatcaatcgagtgtccctggatacctaagaaatacaatgtggcagtacagagcctgacacactattttccatatttcaaaatattgaattaaaagttggccaggcatggtggctcatgcctgtaattccagcactttgggaggccgagacggttggatcac

SEQ ID NO: 212259 - DNA, 1137 bp, Homo sapiens
atccacaacacagggagaagaatcagataaggtgtccagtctcggagggtcctgggcagcaggcagcgcctccaagatcatcacctccaaccctgattctgccaagccccagcctggtaactacttctctcaaggggtcccagctctcagagctaggagtggccttcaacgccaggtctacaccccatgccaacagaatcccttccctgacctttgcaccagccaacccatcctccgtcatgcagccttcgacgatcggaaaccaacagcttctcatgacggtccctccgatttccagacaagcctgattcttaagccagcccagccaagctacagctcctatcccatctccccaagaacagacttcatcgttttctgaatttggtccacgcccatggtgtccgtgaggaaaaataacaacataagtaacatatagtacaatgctaattttttgagacgggatcttgctgttgcccggctggaatgcagtggtgcaatcatagctcactgcagcctcaacttcctaggcttccaagcaatcctcctgcctcagcctcccaagcagctgggaccacaggtgtgcaccaccatatctggctaatttttaataaattttgtagagatagagtctcactatgttgctcaggctggtctcgaactccagggctcaagcaatcctcccacctaagcctcccaaagtgctggaattacaggtgtgagccaccacacccagccaatactaatatttatacataatatattgaataatattagcagtgattccagcaataacagtgataaccaggaccaccacccatccaggtcacagcctcgtagtccatcccaatcttttcaatgaccctagggagtgattcctatcctgtctgacacacaaggaaacagaaaggttccatgttttcttcaaaattcacacagaaagaaagtcacatggtggctaagtaggcattctaaatccaatgcctcaccatgcctacattccagaaaactctagaaggctctgggagtttctagaaggttccagaagattccagaaccctccatgattcgccacctttcactttttacatatcctattcccccaggtcccacttcctcaaagcaggacagaattttcaa

SEQ ID NO: 212260 - DNA, 425 bp, Homo sapiens
cgggtggatcacctgaagtcaggagttcaagactagcctaagcaacatagtgaaacctcatctctactaaaaatacaaaaattagctgggcgtggtggcgggtgcctgtaatcccagctactcgggaggctgaggcaggagaatcacttgaacccaggttgcagtgaaccagaatcatgccattgcactccagtctgggtgacagatcaaaactctgtctcaaaaacaaaaacaaaaataatcctgtgactgtcaggctgtccattagagttgtcctagacatggctttcctggcattcatgcccttcttaatatctttgcagacataatgggaaacttgaacctacagtccttaataacaacatacttaatttctgcaaagctagcagaaacctcattactaaacaagtcaagctactattcca

SEQ ID NO: 212261 - DNA, 425 bp, Homo sapiens
catatttgctaatttttgacaaatgtgtttgcttatgaaacccaaagtcctttcaagatacaagacattgccatcaccccagaaagttatgtcttaccttgttagagtttacatgtaccaccattttccccactcccacccgtcattccaactctgctcttagacaatcactgttctaatttcttctgctgtgaattagttttgcctattttggaaatatacagtatgacgtcttttatggaaggcctctttcactcagcatgtttgacattcatctttaatgttgtaagaagcagtagttccttccttttttattaccgttgtataaatatactacaattgacttgtctcttttcctgttaatggactcttgaattgtatccagtttttggctattacgaataacactatctacattcttgcac

SEQ ID NO: 212262 - DNA, 490 bp, Homo sapiens
ggattcacctgtaagcaggacagtcttttggatgacagagggaattctcatatatccacaggcagatggaatttacaagtggaaagacctagaagttcagagacagggggactgaactttttgctttcagtcagaatctttgcttacggttgtgcaaatgcttgcattggtgggtttccatgccatataacgtgctacatatttttacgttacccttgcacataagcatactgttgggagggaaaatgaagagggtggaggtggtaacaaactcaagctaaggaaatggaatttggatgggtacaaagtccagagaattagcttgaggaaaatgaaccaggattcacacaggagttttcaaacatctcaatatcaggacccctttaccctcttaaaacttacttcgtgaggaccttaaagagcttttgtttgtgtgacttatatgtattaatatttactatattagaaattaaaagtaaggaatggttgt

SEQ ID NO: 212263 - DNA, 772 bp, Homo sapiens
caaaatatctagtgaccatgtcttctcagtaatccacaggaaacgcgtatgtatcatttacacatcctgtagtctccttcctacagtgatatcatcgtcagccagtcatgcctagtttgctggacacaggcattatccatcgcttttgatacatctctttcacctcaactgaatcaactgtcaagttccaaattaaatagttctttatttttttcttcttctctatttcttgtcaccactaccctgactcaaggcttataatcttttaactaatctcctactttctcattctactggtcttatatccattctttgcacttcagttaaagagaactaaatatattttaaataaacatccaaccatgccattcacttaatcaaaatgtgtggaggcctccctaataactatgcaataaaggcaagtctccttagcataaaataaatagccttccatgatccaaaccttcttaactctatctttgggtctaacactataatgatactggaagatatgttgctctttgcataaaccgtggtgttcctgactttatatcttcacccttagtgttacttaggatgccatttcattttttctttgttggtcttttatacataattaggtctggatatactcaacggtctattaacctcccggggtcctctaccttaatctatctcgaagccgtaccagtttttcagccgggtgcttcttccattattaatgtatttgactaccgatgggtaagactgcccggtccgtccacattgttgc

SEQ ID NO: 212264 - DNA, 1090 bp, Homo sapiens
acccgcgaccacaccaggctaatttttgtatttttagtagagacaaggttttgtttgccctgttggccaggctggtctcaagctcctgacctcaagtgatcctctcgccttcgccttccagagtgctggggttacaggtgtgagccaccgcgcccagccctctaatagaatataaggccactcagtgtcacctggaggggttggtaaaatgcagactacaggctctgccctgctgccctggagtttctgattctgggcgtctcggagggagtttgtgttctgagcaagtgtcctggtgtattgccgcctcgaggatgacactttgagaaccactgcgcttgagaatcaaaaaagaatcctgaatcctcattgctccccactctagtgaagcacacagtagccttgcccatttgaaaagcagagcaagctacaatcagtgcttgcagcctatggcttgtatttccaaagactgactttggaaccgctgacctaactttgggaattgaataggcctgtaattataagactcattagagcctttgcgattttagcatgtatttataaacctgttgggggcagaggatgtgtgttccatgtctttttgaccttggaaccttatttttatttttagaaatgggaatctcgctatgttgccaaggctggacttgaactcttggcctcaagcagtcctcctgcttctgcctcttaagtagctgagattacaggcttatgctactgcgtgccacttggaaccttatttcataaggagtgcatctctcaagatctagggtgcagtagtctttttggaaaaccccgaactagaacaaatgctctgaacctgataattctcaaatttgtcaggataacttttcttaactgtggtattgcctgctgctcctgacttcctgatcagatgtagacgccagcctaaaactcagggccttttttagtacccagcttcctcctctctgctcttcagctcctctgccctgggtgggctcagctccctgtgctcctccaaagctcagtgcctgttcctgggcctttgaacctacccctccccatgctcagccactgcaggattctcaga

SEQ ID NO: 212265 - DNA, 273 bp, Homo sapiens
cctcagttcaactcccaagattcccaacctcggtgtgtgagtcacattgcaattgcctacgatatgcatctgcacggattccttctgcttcagcagggaatttcaagctcctgcctgcctataatgaagaagaaaattagtgcgacaacgtgtccggatgctgaaaagctggcagccagcaaaacagtagtgcatttggctaattttcttttccaggctttttactgtaaagaaaattggcctccatggattaaaaatatttcaacatttgca

SEQ ID NO: 212266 - DNA, 529 bp, Homo sapiens
aaagagaaataacctgtgtgcacacaaaaatacgcacacgaatgtttatagcagcttattcataatcgccccaaacaggagtcagcccagatatatggtgaatagataaactggcactcccattcaatggaatgcaattcagcaataaaaaggcacaaaatgtcaatgtacaaaacaatgtgagtgactcttagatgcaccagccaaagtgaagccagaccccaaggggtgcagactgtgattccatttataggacattctggaaaaggcaacctagggggctaagaagaggtcagaggctgcaggggcgggattagggagtggctaggggcaggaggagggtgtgacgacagagggaatgtgagtggctgtgagggaacatctggggtgatagagttcttccgaatcacaccacagtctaatgcgtagttacatgactgcatctgtcacagttcagaactgtgtacacacacacacgcatgcacagattttactttatgttaaaacattatatatatattatatcaac

SEQ ID NO: 212267 - DNA, 437 bp, Homo sapiens
atttgttctctttgagcctaggtgtctttatttgtcagtctgggatgtaacgtccccacctctcagaattgttgcaaggattaaatgagagtgtagggataaaacactaggtatggtgctggaaagtacccaataaaagtagtagggaggccaggcatggtggcttatacctgcaattccagcactttgggaggccaacgcaggaggatcacttgagcccaggagtttgggaccagcctgggcaagaaggcaagactctatcactacaaaaactataaaaatgacccttgtatggtggcatgcgcctatagttccagctactcgggaggccgaggtgggaggatttcttaagcccaggagtttgaggctgcagtgagctatgattgcactgctgcacttagtctaggcaacagagtgagaccctgtctcaaaacata

SEQ ID NO: 212268 - DNA, 916 bp, Homo sapiens
ggacacctggatattttattatatgggttaaaattcattacttactatcattgttttgttgctcaaattcttctgcatttgcccattaggaactcctttgagttaactcctaggttctttaacaagttcccatatttttttgaacactttcttactggcaccacagaatactacaggaccatctatttttcctctcccagccctggaaacaaccacttcaaggaaccctggttcctttaattggaaaatggtatttagaaaccaacatttgttcatttaagtatactaattgccaatagggtgtcattgcctcttgggcctttcaggagatacagctgggaaatacatgtatgtgtattaatgaatatacatttatgtgtctgcttattaaaaactcatgagttttgtactgatacttctgattctaatttaacaccacaggattaatttctggttttccttatttgttattttttccaatatgggtaacctgcctcttgtctgcagtgtatttacttactgtttttttgttgttgtgtcagtgtaatatacatgtagtttcagaagagctaattcataccctaggagaaacacattaactacattgcactgttctgcaattctttttgggttttgcctcatatatcagtcaagaaacagtttttcaaagttactgacgttcttttctttcccaccctctctgatctgtggactgatttgtactcttggtccattttttactgtttgagcgttctctccacagcctggttgattttaatggtttattttttcagtatgtgaaacgtggttttcagagtgtgagctttgtaaaaggatatacatggagaagtgttgttcgtacctcattcctaccaccccattcccgttcccagctgctttctctcactttcccacc

SEQ ID NO: 212269 - DNA, 413 bp, Homo sapiens
ggacacctggatattttattatatgggttaaaattcattacttactatcattgttttgttgctcaaattcttctgcatttgcccattaggaactcctttgagttaactcctaggttctttaacaagttcccatatttttttgaacactttcttactggcaccacagaatactacaggaccatctatttttcctctcccagccctggaaacaaccacttcaaggaaccctggttcctttaattggaaaatggtatttagaaaccaacatttgttcatttaagtatactaattgccaatagggtgtcattgcctcttgggcctttcaggagatacagctgggaaatacatgtatgtgtattaatgaatatacatttatgtgtctgcttattaaaaactcatgagttttgtactga

SEQ ID NO: 212270 - DNA, 558 bp, Homo sapiens
tggtgcttcctgccctgcacctctgatctctgcggggttgacggtcttgtcctccgagtccccttagacccggtgtccttagacccggtgttctatctgctgccagggcactttggactccttatgtcccaggaccagcaggtaagaagggaagtcaccgtcttggcaggaggcattggccgggggcacgtgtgtgaaacccaggcgtctcgcctggtgccccgtgcccccttgtactggccacagggcttgagccatgccccaggggagccattgagacttgcccgggtgatagctgctgcgggtggggggattcggaatggagggagggacgtgcatcagttgtggccccgagacccctggcagggaggagaggccggtgagagcctcgaagtggctctggccaatgcccaggggagcgagtgagacagcggggagtgcggtacgcagggagtggaatgatgggcagctcccagctcctccacctcagtgggcctggccgcgtgctcccagctccgttcctgggacacacgggaccccttgcagtgctgagctgag

SEQ ID NO: 212271 - DNA, 408 bp, Homo sapiens
tccatgtgggcattccatgtccatggatgaatggataagtaactgatccacaagaggaggcaggacctattctatcaaggatcggtaattgggaataagcttctcatttcatcctaaaggattctgtcactccactgaaatcttaagagtctccagtgcttgttaggaaagtgtggaagatgaaccccttcttcatccacagatgctgagaatgctaattagaagacaggtatcaggaagcccacacagagacggttttgggattttgtcagcactgggcaagtggcttaaggtgagatagccattctggagtcacagccttactcctcctttaatgaagggaaaaaataaattttcctgtatcaaaacctagactggtctaaataaaaattccattaaaaaatcact

SEQ ID NO: 212272 - DNA, 386 bp, Homo sapiens
gcagagaattcgctggagacaatgcttcgttttcactgtttgaagatcgtaactggcctaatggtgtttgactaacacccttttctagtcggaggaggataaacaccccctccgtcaggtggtaaatacttgaagtgacagtaactgaggctgcagacccacttgtgttattgtaaatgaatcagaggggcaagaccttgttctttacggcgtgtgatttaaaatcagttttaaggtacctgccaggtgtatttagaggaaaaggcatgaaggaagccacaggcttatacattcatttttagtgcatatttctttttgttcattttcatcctattgagttcctttgtcatttctctgacttgcaaattatacccttctgtttaata

SEQ ID NO: 212273 - DNA, 182 bp, Homo sapiens
tgaggagatgagacagtgttccaaaataggctgggtgatggttgtacaattctgaatataggaaaaaccattgaattgtacactttcgaggggtgaattctatactgtgtagactatatctcagtaaagctgtttttaacaaaaagaaagaaaagtttttgcctctaggctgagagtgagga

SEQ ID NO: 212274 - DNA, 380 bp, Homo sapiens
ctttgggaggccaaggcgggtggatcacttgaggccaagagttcgagaccagcctggccaacctggcaaaagcctgtctctactaaaaatacaaaaattagacaggcgtggtggcgggtgcctgtatcccagctacttgggaggctgaggcaggaggattacttgagcctgggaggtcaaggccgcagtgagccatgatcctttctcaaaaaaaaaaaaaaaaaagtactgaaaattagctcatacatacatatttaagcataattactgggttttatatagtttacatgttctaaggtatctctgaaaaaaataatcttctaatgaaataatcagcaaatgattggctaatggcaatcattagacaaatattggatgat

SEQ ID NO: 212275 - DNA, 487 bp, Homo sapiens
actatttcaagaaatcatggctgatgactttctaaatttgatgaaagacatgagtataaacatccaagatgcttaacgaactccaaataggataaactgaaagagactcactgaagcacataataatcaaactgttgaaagacaagataaaagtgacaattttgaaagcagcaagatttcttatcagaaactctggaggacagaagggccaatatattaaagatactaaaacaaaaataaaacgaaacaaaacaaacacatacaaagaagcctgtcaattaagaatcccatatctgacaaaactgtctgtcaaaagtgaaggaaaaataaagacatttcccgataaacaaaaactgaaagagttcattgcaattagatcttccctgcaagaaattataaaaggagttctgcaggttgaaatgaaagaatatggccgggcatggtggctcatgcctgtaatcccagcaatttgggaggctgaggtggg

SEQ ID NO: 212276 - DNA, 313 bp, Homo sapiens
aggagtccctactagtgcagtgctgagcagtatagataccctggaaggatatacaaaaaactaataaaaggggttacaccaagagagaaggcagtataagtggggtggatggggaacagactggaagattggagattatctttttatagtatttgatttttgaaccatatgtactcaaaacttgttagctgttgttaaaaaagaaagctgaagtcctttccttcttctcaccccaggcagggagaaagctgtgctctagcagaggctgggtggggaatgaaaggctgaagctggggcatgagtgtgtagaaca

SEQ ID NO: 212277 - DNA, 504 bp, Homo sapiens
ttgagtagatgggacacaggcccgtgcctctgcgcacagctaatttattgtattttttagtagagacggggtttcatggtgttttagccaggatggtctcgatctcctgacctcgtgatccacccgccttggcctcccaaagtgctgggattacaggcgtgagccaccgcgccctgccagcaaaattctttaagcccccactggggcttaacatctattgatgctactgcctaccctttcactgctccttacctttagtttatcactgtaattacccccttttatgtattctccatttcttgttctgtctctcattttatgttacctggcaaaatctcagccctggtttagatcttactttttttttttgacaaagtcttgctctgttacccagggtggagtgcagtggtgcgatctcaaggctcacagcaacctccgccttctgggttcaagcaattctcgtgtctcagcctcctgagtagatgggaccacaggagcgcgcca

SEQ ID NO: 212278 - DNA, 379 bp, Homo sapiens
caagccagcagtgacacacacaaccccaaggtggcatgtgacatacctttacttcatttacagacatggcatatgtcagagtgcttggccctaccgcacagttggtttgagcaatttccattccattatgttttcttacagcttctgttttatgccccctccagcttattcaagtgtttaaatttcaaattagttgcttgtctttatcattcatttttggattagagaaacatattatagccgttggacatgtttaccatattaaaaataataacaaagaaaacaaaaatgataaccaccgctccccacccccgacatactcaaggctttaaaggttgtgttgaaatcacaggctattccaagaaatcaccttaatcca

SEQ ID NO: 212279 - DNA, 377 bp, Homo sapiens
gcagatgccagctgtggagtctcccacaagtgaagagaaggacttgagtaggtcttacataatttcttcaaaagcagaagaaagatcacaggaattagcaggctgcatggtggtccaattgagaaaaaaatgtgactgcaccactcttctgtcaagagtctatgagtggctgcaatataaaaagaagaaaacgcacctcaaagactttaaaaagcaacagaaataatggtagggtcattgtgggggtcaacatggattcacgtcaatatttgttactttcctagtcaaatctatataactatttaattataattgtcatcagataatgactataaaataggaacattttcaaccacaaaataaatattaagacaatt

SEQ ID NO: 212280 - DNA, 164 bp, Homo sapiens
atttatttattcatttgtttagggtctgtgaccttgcaatgacacattctctatgtctctgcatcaggcttctcttcaactccctgagcttcagatacttcctcttacctcctccgtccttcctgagtgctgggatgatgggtgttggaaaaggactttgaaag

SEQ ID NO: 212281 - DNA, 277 bp, Homo sapiens
tacagtgctgtggaaaaactggaacagaagtgcgtgagaataaaaagggcccagaaacactggcctgagttacttaccagctgctccctagtgagaacaagacagaataatacatttatgctgtgagaaagttaattttcatttggataaaggtcaatcttcctatcatgtggggtgttaggtactagaaaaagctatctctaaggacaataaagacaataataatttaaagtcaccatccaacaacagaatagctaacaatatgcttttaaaggtt

SEQ ID NO: 212282 - DNA, 510 bp, Homo sapiens
caactggcagagtgcttgcagcatggctggggctaaataaatgtgtataaactaaaataataaatgaaaaaagaataaacgttgaaaaatagaaaaagcaaatcactgcttgtattagtttcttgttgctgctctaacaaatttgtaaacaaagctaccacaaatgtagtggcttaaagcagcacagactgatcttcttacggttctggaggtcagaagtctgaagtcattttctctgggctacagtcagtccctgtgtcttttcctgctcctggcagctgcctgccttccttggctcatgtcctcttcctccgtcttcaaacccagcagtggagcctcttcggcctccccatcaaggggctagaagctttgatgtctggctgcttccagggttcaccctttttctattttagttttattctactagaatataaactgcagtgggcaggcccttttccgctctgctcactgttgagtcccatgcactcagaactgtgcttggtccatggt

SEQ ID NO: 212283 - DNA, 461 bp, Homo sapiens
catccacgaatggcacaggctcctttgaagagggcgagcgccccatcactggaggtatagaagcagttagtcaatgaatgctttgggggatgctcagggtgggctggggattggggccaaaacatctggcagtggggtggacccaaagggctgtgtgtgcttctcccagccttgagattctgtggctctaaaatagaaggattagggggatggcagtgggattttagtcataaaccttaagggccaggaggctggggacagttccttgcatgttctaaatggtgaagcatttgtgctattaaatatagcttttgttgacatgagctggctgaagctgttagcttcacgggaagacatacagtcatttttcatctccaaccactttggaagtaggtgggagaagacaatgaatgatcaaaacattacaaataaatccagtttaaagatgtcaaaaaaaaaaa

SEQ ID NO: 212284 - DNA, 506 bp, Homo sapiens
agttttgatttggagatatttgttatcaaaaagtggtttacctacattggaaatgctacttttgaacaaaaagtgtgactctaaaacatgaaacaaattttcttacgccgctgtaatgacaccatcattaaaatacatttatagctacattcccctcctccagtgtctgctctgtgggttatcactcatatgctctagtatgttgggtaaaaataaagttcaatcatttaatagccatacttcctactactgtaggtaaaataacaagccctgaaggtttctaaaagtcaaattattgattatttgaaagcagttacaacactgatttttaaatttaggcagctgtgattcaattctctttttttatactatactgaaaatgaacattactcttttagcatatacctgacaccagcctactcagtcaattgtctactcctgttacaaacacacacatatacacatgtacactattttttaaatcccccatacatgtattgttttcc

SEQ ID NO: 212285 - DNA, 262 bp, Homo sapiens
attctgtgtgtatatataacaagtgatttaatcttttaaaggctataattctatttatattttctatatcttcttgagtcattttcaggatgtagtttcgcaggaaattgctcatttatatctgttttaatagctcaggagttcgagaccagcctggccaacatggtgaaaccctgtctctactaaaaatacaaaaaattagctaggcatagtggtgggtacctgtaatctcagcttacaggcctcaggaggctgaggcatg

SEQ ID NO: 212286 - DNA, 456 bp, Homo sapiens
tctctgtgaactccagactcagctctgttcagtgtcttggctcgaatgtttaataaggcatctcattcttgacatgccccaaactgagctcctgctctcccccataaaacttcctcctctgaagtcttccccacccacgtttatagcattcccattgttgcacaaccatctccaccatccatctccagaactttctcatcccccagctgaaacgctacacctattaaacactagctcccccttccccagctcttgacagcccccattctacttcctgggcctgggcttttactttgatggtgtgggcgcgattggtggcctttgagcagaggagtgtatgatttgacttgggttttaaagaagccctcgggcgctgcgttgagactgacatgccaggcgtgagggagaaagcaggacgcagggggtcattaggaggagcccagaggctcagccaaa

SEQ ID NO: 212287 - DNA, 483 bp, Homo sapiens
atactccatccaattcagaaataatgtttttctccttggaatagctttttacattaactgtatttgaagatagaaaatttagatctgaatagcagcttttaatagccccataaaaataagtgaaaatatctttaattttaaatttaaacaaaatatctaaaacttaaaaggtatttaatatgtcagcatatttgcaatacaaaaataaacatgctccatttcatttttttgctttcttactcccacggccaggtgatataaatatttcaatttgtgtcactttctagctatcgaatttataaagcggctttcattttctacgtaagtttttaagcttaattttttcagggaaaaaatagatctcaagaaaaaaagtgtttgggatcataagttaataactcatcctattggtaagggaagttgaataagagtccaaactaatggattagaattgtgtaatatttgcttaaccatttgttaaaa

SEQ ID NO: 212288 - DNA, 166 bp, Homo sapiens
ctgccagcaccagtcagattcccctgctcaccactccctaatcctgggcaaatgcttaccattaccttgtaagagtgtgtgggtgggtgagcagtcagttcggagctcctgatgtgggagtggtgagcaggggaatctgactggtgctggcagggcatgagaggta

SEQ ID NO: 212289 - DNA, 404 bp, Homo sapiens
aggtgagacagaccacacaagaccctctgcccatccagaggtgccacagcaggttgtggggtggggagtgggcagagcactccactctgtaacatttttttaaaggctgaaaataaaaaacaccagcagctccagggggaagaagctgtaaaagatcatttgtgagttaactaaccacagatggggcaaaattaaccttggtgtggacaaggaatttgttgagatggaaaggaaggacagctcagagaagctgagaaggaaaaaatagcagggggttaaggactgaatcaaaaatgtgtaaagtaaaccatcagcagatatttattaccatctcaggattgtgaatctgtgccaagacagcatggtcgggctcttgaatgtgatgagacaatgaaagaatagta

SEQ ID NO: 212290 - DNA, 1137 bp, Homo sapiens
  misc_feature (718)..(718): n is a, c, g, or t
  misc_feature (860)..(861): n is a, c, g, or t
  misc_feature (863)..(864): n is a, c, g, or t
attattagattttggaagcagctctcttcttttttaatcagaattacatttgaaggacaaatatacttgctttgatgttttctgactacaaaagtaatttagtttttagacaattttgtcattaaataaccccatataaattgaattgccaaaaatagacttcttcactgttgggcttattttacagaggtaggtttatttcacaaagtttcaagccacactttagaatttggccagggtgccagtgtgataatatgggtagtctacagatgtaaggcctccattaaaaaggaaaatggcagaacttaccctcttgcccaagagaataggagtgctattttttgggtgcagagagtgagggtagtggatagaggtctgaaagtgtagacagagtttgccataagagcagcgttagattttgtccaggtttatctcatttttctctgttggagaccaagatgcttgacgtgaagtgtgtatttgtgtaatgtgtattggttcatttcagttttttataacttcaaactatgccatcaacctaatcaattttaattttgattgcatatcaatagcaaccataaattttttcaacccccaaatttatgtagctctgatttgtagaatattgttttttgcagacctttcacatatgtgcttaagtgaatcccctaaatcggaagttcggaaactggcgttggcccggttgtacttgaatggnacccggtggactaattacacccgggcgaattggtaagaaagggggggggggtgtcgaccccttaggaaggcgtcatgagtcaccgcgataccctatataaagtggtctctgttccgtcggggtcgcatagaggacctccccnncnnaccacaaagcaacaggaaacacaaaaacacacaacaccaacagaaagaagacagaacgagagacaaaaaacagaaaagaaacggaaggacagaaagacagacaacagacaaagacaccaaaccaacaacaacgaaaaaaacagaacaaaagaaagaaacaaacacacacaccaaagaccaacagacaacagacaacaagagaagaagaaagaagggaaaggagaagacaaagcaacgacgaaagaacaacagacacaggataagcacacgggc

SEQ ID NO: 212291 - DNA, 443 bp, Homo sapiens
atgtgtgctgccccaaacctcgccgctccctagtttggtattctgtgtccggcctggggtagtagctggacaccagactcaatcttgggctccagttcccgacttttcgcctcctctgggtctgtcctggggtcagtaattaacccgggtcccaggggtgtcgtcttttccctccagggtggggcgctgcctgtacatgccagggatcttttgcagggcttttcatccagatttgcttcagggttgtccgggatcgatttggactgggctcggaaccggtcctggatacgtaggtcgctgtggcaccagcatgctctgtatcatctttactcacttgaaagcttgctgaagctgttgttgaagtaaacttaaagaaaaaacttgcttaaggaaaatcagtagtttagacaccccctcccccgcctttttttgcagacatacta

SEQ ID NO: 212292 - DNA, 512 bp, Homo sapiens
tgaaatgtcggaagcatgcacttctgccctccagctccaccctgaatcatcaatgcctggagaaccactcacacatgtgcacaaagagacatgggtgagcatgctcggtgcagaattgtttgtatggtaaaaactggagccaccttatctcttcatcaggcagggctgctgcattctgggtgtggatggcatcccctggaattgtgcagaggcaccatttaccatgaacaccttttgacccatgccctctagagctgggaccctgagtgagggggagtgagaggggcgtggttgaatcaactgtgttacaggcacgcatggaatattaggtagaggttaaaacaaaaaatgaggatagccaggtgtggtggtgctcacctgtagtcccagctactcatgaggctgaggcaggaggattgcttgagcccaggaggttgagggtgcagtaagctatgattgtattagtgcactctagcctgggcaacagagtgaaaccgcatctctagaagaaa

SEQ ID NO: 212293 - DNA, 493 bp, Homo sapiens
gtcacaagctataggcaaagctgaaaaataaaaagaagtatccagaaaagtgagccttcattcctggtctcatcctccctagccatgggagactctgagtaaggcggtccacttctctgagctgaaattcccttcgctctttagggaagatcattccccctgccctgttcacctcacaggcttgctaaggaggatctaagttgtcttgaaacatgggaggcaggttgagcaagctcttcctaattatctcccaatatactccttcaggaacttatccaaactcacctgatcagaattactgtgtatgcagaatggacattgaaggctcagagagggagagggtgagaagggggctaagggatgaaaaatcacctactgggtacatacaatgtatattatctgggtgatgggtacactaaagcccaaacttcaccattatacaattcatccatgtaaccaaaagccacttatacctctaaagctgttgaaatta

SEQ ID NO: 212294 - DNA, 422 bp, Homo sapiens
cacacacacacacacacacgtacacacacaccttccacccttccttctctctacttacaggtggtaatcttgtctcctactgaaaacctctttaagcactaggacttgttttactttcactatttagaaatatttcaaaattacacacattcctgtcttcttcagtaaagtacacctggcttcatttaaccattctctctgcaactgaagatcactatgaaaaaattattctgaggggagccacagagtaaaaatattcaagagatctggatagttgtaataatcatgataatgataatgagggtaactaacctttattagtgcttactacatgctaaggacacggcaagtgttaacttattaaactcttaccatacctgtaaaaaactgttactattattatccctattttacacatgaga

SEQ ID NO: 212295 - DNA, 532 bp, Homo sapiens
aaatgtattttttctcacctagaggccattaagcttcaaatgatcatgcagcagggcttctatccagggaatgatgccagccccggccaacaagaagtcatcctgtctccactagacagagcagggtgagagttccatggtccccaagtagatagggacagtgccccaaacagcatgaagcagttacagaagaaagactgtcagtccctctacctcctgtaaatatttgatattaagtctctcaagggggaatgaggcaggagaataggatctggagacagggagccttcactttagcctctgattggtcgcaggcgaaatcttcatttgcatagggtgtaatttcacttcagcctccaattggtcatgggctacgtcttcatttacaaagggtgtaaccaataggaaacctctaaagggtactcaaacccaagaagattttgcaactggggtgcttgagcctcttgcccaagcctgcttctgctctgtggaatgtactttcacttcaataaatctgtgctttcgttgcttc

SEQ ID NO: 212296 - DNA, 375 bp, Homo sapiens
  misc_feature (17)..(17): n is a, c, g, or t
gttctagaggatcccgncatcttctcccatcagtgaaacagcaccactcagaaaaccacaggggtggccctgctagaatacacatatagttgctgaggaacaggaaacgaagccagatggttctgctgagggaagcacttttttttctttataaaaccaaaaaagtactaataggtcaaacataaaaatgcagatatggtaaagcggaaagctaacaggaagatttatgtaaataaggcaagcttaagtttgcattatgttcccatctacatcagtgagtggatgtacggggggaaaggaaaaaataatacagtatatccatcctatagatctttctgctgatgggacaatgctactagcaatcccatttaggca

SEQ ID NO: 212297 - DNA, 377 bp, Homo sapiens
ttaaatctagattggagggacagggaggaagaggtgagcaaaggcaaggaagggcggtgaagttcacagctccccccataccccactagtgaactattatgctaatatgagaagtagtatttggaggctgagtcaaaggcaggcctggcccgggggtgagggtgccgggtgcccctctgcactcattcgcaattggaacaccaggacttttttagaaagtagttctgggtctccaaccctcacactctggctccctccttctgagtctccagccccggcttcttccctccactacaccctctctattcctcccaaatctccctccagtctccaggcccagtctctaaccaagggagagggaaagaccagaacttaaa

SEQ ID NO: 212298 - DNA, 690 bp, Homo sapiens
aatacacaacggcacgcgccgcttggtcgcggcccgcgcgaaatcggatgggtaaccaaccatcctcagcctgcactccccttgagtgtattctgaatcactgggactccgttgaccctcagactgtagagaaagaggaaaaaaccttttccctcctctgtcctctcttccagccaggcatgaccatgtaacagtttgggctgctgagccagaagggaaagagtactactgctagacttccaggaaggctgctctaagaaagatgactcagaggttgcacttttttagttttgggggtttttttccctctacttcctgcttcttggaactaggacatgatgtctggaactctagcagccattttggaccatgaggtgattgtgtgactagaagacacatcgtagaatggagcaccaagacgaaagcccccaaagctgccctataagacctggacttcaaaccagcaaacttcttccatgtgagagagaaataagcttaggttttgtttctgccagtgttatctttgttttcggttatgagccactaaatgtgatcccacttgttaccccagtcattctcccaacttcctagacccattaatagcattctacactcacagtccatcagtggtgcaagactacaacacgattttaaatccaaaagtgatataaatgattttgtgattctgtg

SEQ ID NO: 212299 - DNA, 1040 bp, Homo sapiens
ctcctgctctcccagagtgctgggattacaggcgtgagccactgcgcccggccaaagccctatttttataggtagtggatgaagaagagtccttcccctatcccctatgtgagtcaggcattgtcagagagattatggaaggttgaagaaagtaaacctataaagttttatatgaacactccttagccattttgcatggatctgaccctaaacagcacatcagaggctttgaaaactagaatacacaatagactgcctctccagggccagcctggccattgggtggcaaataagtggggcagatgcaaataacatagcaaaggagttcataacaaacctgacactggaaccataacacaacctacaaacattgagtaaaaacttgaagcctaaaccaaaccagattgtctgctgaaagtttttaaaaatcaagacctagaatgatgtaacatgtcaaaatatccaggatgccatcctaaattagtcaacatactcaaaaccaggaaaatcttaacatctcaaaggaaaagacagcagacaccaacctcaaggtgacatggaccaagactttaaagtatctgtgctacaagtggtaagggtgaatactttgttttaagagaggggtcttgctttgttaccctggctggagtgtagcggtgtgatcatggttcactgcaccctccatctcctgggctcaagcaaacttcccacatcagcctaccgagtagctgggactacagacctgcaccaccactcccagctgccttttttctttttaagagactggctattgctatgttgcccaggctggtcttgaacttctggtctcgtgatccttccttcttggcctctgaaccacagtgcctggccacaacagcctttaaaaaaagagaaaacaaaaataagaaaggaaaagactgttacactgtttagttcagccatggaacgtgtttaaaagtcttaatagaaatggtgaatataactgagaaagggagggtgggatttgttagtgcgtccagtgggtaaaaaggagtatgtgc

SEQ ID NO: 212300 - DNA, 432 bp, Homo sapiens
ccataagtgtaattggctgcctttcaataggacataacagacttcaagttaaatggaaactattaaagctcaaatgatttctgccgttgtttcatgacaaatgtacagttttattattatgagtattcattcttgtacagtggtcgacagcgatttgaatatacatgattattcacatgcccgatgatctagaatggtatatatcatcacagttaaaagaggtaaccaaggtgacgttgcttcaggtgctaatgtcattataaaactgtaaagcaattattctgttagttcttgcctggggttatgaatacattgaagagtgcagagccattagatgtagctacttcaaaaagcggggaaaagaagatgaattttaatgcatgggtaattgctcaacatgaccgcattcctaataaatttttgtatattaga

SEQ ID NO: 212301 - DNA, 427 bp, Homo sapiens
tgagatggagtctcattctgtcgcccaggctggagtgcagtggtgtgatctcagctcactgcaagctctgcctcccaggttcaagtgagtctcctgcttcagtctcccgagtagctgggattacagatgtgtaccaccacacccggctaatttttctatttttagtagagactgggtttcgccatgttagccaggctggtctcgaacccctggcctcatgtgatccacccacctcagcctttaaagtgctgggattacaggcgtgagcaaccacacccagcctggagtcaataaagatttttgctccatccaaaactttggtcagctcttgagagactcatagagtccacagggtaggcctaggattcctgacaaataaaacaatgccatcaaatagcaacatcatttaaagaatacagacatgcta

SEQ ID NO: 212302 - DNA, 173 bp, Homo sapiens
cgagctcggtaccccgcgttctttttgagtttcactcttgttgccgtgagccaaaatcatgccactgtgctccagcctggcaacaagagtgaaactcaaaaagaagaagaagaagaggaggaggagaaggagaagaagaaaggaagaagaagaagaagaagaagaagaagaag

SEQ ID NO: 212303 - DNA, 226 bp, Homo sapiens
ggaaggaaagaaaaagagggagaggactcacagggagaaaggacagtgccaaagggtgacttcgaggggactttagccccgctccctgtctccataaatccctcctggcactccaaacaaacctacaatcgaagtaaagcagcgcgctttcaatagcgaggcaaggtcccttgctccaaccagaaacgggatgatacctggtgaacccccatccagcaagcccggg

SEQ ID NO: 212304 - DNA, 392 bp, Homo sapiens
cctatattaatttggtaattcttagcctatagatctatttaaaggcatgggactaggtgaagtcatccaaacccagtgagaagaaaagagagcctctggaaaactgagccttgggtcaacctaaactttaagtgcaaaaagagggaggagagccagcaaagaaggctaaaaggagctgttgtgtctcagaaaacaagagaaaaggccatttgaaggaggaggaagtgcttacttgtgccaaatgcagctgtttgttgagaggttcaataaaataaagactgagaattgaccattggatttgtggcaagatggaattttttggtgaatttgacaattggtttcagaagggtgggaaaacaaaatcctgattggaatggattaaaaaaagaatg

SEQ ID NO: 212305 - DNA, 512 bp, Homo sapiens
cgctcggcaggtgtcttgatattatcatctgctgagggtggagctgagggtggaaggggagtgagctgacgctcggaaggtgtcttgagattatcatccgctgagggtggaaggggatggagcagacactcggcacgtgtcttgagattatcatccctgagggtggaaggggagtgagtagacactcgggaggtgtcttgagattatcatctgctgagggtggaaggggagtgagcacacactcgggaggtgtcttgagattatcatccgctgagggtggaaggggagtgagcagacactcgggaggtgtcttgaggctcagggagttatcagttatagaatgttgttgagttggaggaggtggctggtggcccatcctgttttttaaagtttcagctgtgaggtagggccagtagggcaatcctgaagaatgacgatgctccgctgccgccccttcctgaccccagttgccaagagccctttcttgcagaaaggggggagtgcaatttgtg

SEQ ID NO: 212306 - DNA, 423 bp, Homo sapiens
cgctcggcaggtgtcttgatattatcatctgctgagggtggagctgagggtggaaggggagtgagctgacgctcggaaggtgtcttgagattatcatccgctgagggtggaaggggatggagcagacactcggcacgtgtcttgagattatcatccgctgagggtggagctgagggtagagctgagggtggaaggggagtgagtagacactcgggaggtgtcttgaggctcagggagttatcagttatagaatgttgttgagttggaggaggtggctggtggcccatcctgttttttaaagtttcagctgtgaggtagggccagtagggcaatcctgaagaatgacgatgctccgctgccgccccttcctgaccccagttgccaagagccctttcttgcagaaaggggggagtgcaatttgtg

SEQ ID NO: 212307 - DNA, 393 bp, Homo sapiens
ggattttgagacaggatctggcctcgttgcctaggctggagtgcagtggcacgatatcagctcactgcaacctctgcctcctgagctcaagccatcctcccacctcagcctcctgagcagctgggactgcaggtgtacaccaccacgcctggctaatttttgtattttattttatttatttttttggtagagacggggttttgctgtgttgcccaagcttgtcttgaactcctggggctcaagcgatctacccatcttggcctcccaaggtgctgggatgacaggcatgagccaccacagctggcctataatgaaatttccaacttacagctattgccattatccaaagcccagaatccctgatttccttccatagcccttcatggcctgacc

SEQ ID NO: 212308 - DNA, 533 bp, Homo sapiens
aacttaatcttggacttcccaccatccagatcataataagtaaatgtttgttatttaagccatgcagtctatgataatttattatagcagcccaaactaagacacccaaataaaatagaaatattaaaataagggcaaagttgatactgtagaaagtaaaaatgcagcagacatgatcaacaaatccagaagctggatcgctgagactaataagttgacaaacattaacaagtgttgataaggatatagagaaattgtaaccttcatacaatgctatgggaatgtaaaatggcacaggcattttgggaaatggtttgacagatcctcgcaaagtgaaacatagagttaccaaataacctaccatttccactcccaggtatacatttaagagaactgaaaacacggccgggcatggtggctcaagcctgtaatcccagcactttgggaggccgaggcgggtggatcatgaggtcaggagatcgagaccatcctggctaacagggtgaaaccccttctctactaaaataaaatac

SEQ ID NO: 212309 - DNA, 490 bp, Homo sapiens
atgtcaaaccaggcaatgtttgtctttgagcatcttccatttcttattttagtaggcatctcactggttccctgtgtcttttatcctgctctctgtcactggtagcagaacaagctaaacttccttaagcaaaactgtcctaagaaatgtacactgcagagacttcctaaagagagatggatggattcatttggaaacatctgtgtgcacactctaatttgtattcatttttccctagagaatgattacacctatataattaaaaagttgcctttgaaaactattggcaccaaaaatggacaataattaatgacccatccctcattttttaaaaccattttattgtggtaggattgacatacaaaaagctgtaaagatggaatgtatacaactcaatgagttcggagagaatcatcaccacaatctatgccataaacccatccatcacttccaaaagtttcctcctgccctcttatgtattgttatttgt

SEQ ID NO: 212310 - DNA, 671 bp, Homo sapiens
gtgaattgctcatattcatgtaatttcactttgatttttgttacgtaagattgatcgtattgttataaaaataataacactgtattgattccaggattcagtgaaactcttgaatttaataattaaaataataatgctaatagtagtaataacaatatcagagaaacattataatgataataaaacatttcaaaaaggatattacttcaagttgtccaatgacttacctgacatgttttgaagttatgcacacaaatacaaatggtggctttttgtaattcaatttaaaaaatttcttatcctattttactgagttattctgatttttacattctataaattatttctctttcagatatctatcctagaattctctaatttctaaattatataggagtcatttgcataaaattcaatatttgttagatataaaaatattcaagtctagacaaaaaaaatcaaaatcaattgtgcactagtttgggtaatgtttgctgctgtaataaaccccaaactgaacacaatagaactttatttcttgctcatgtaacagttcagtgaacgtgctcctgctttgtgggtggcttttcttcattgggtggtgcaaggattcagatttcttccttgtggatctgcacccttaagggacatagggtctcttgaattcaagt

SEQ ID NO: 212311 - DNA, 464 bp, Homo sapiens
ctagttgtcaggggagtgcagaaggtggaattctcagacggatggggctaggtcaagatttggtggaagacatgggggtggtaccagatcctgaatgatagatagggtctgagggacagaaaagcagcatagtcccaatttagtttctcaaaacacatagatgagagttgacatggtggctcacgcctgtaatcccagcgactctggaggctgaggctgaggcagaaggatcgcttgagaccagtagttagagaccacctgggcaacaagctaaaccccatctccacaaaaaaattaaaaaattagccaggcatggaggtgtgcacctgcagttctagctacttgggaggttgaggcaggaggcttgtttaagcctagaagttcaaagctgcagtgagctatgatcatgccactgtgctgcagctgcggtgatggagagagaccctgactcttaaaaaaaaaaa

SEQ ID NO: 212312 - DNA, 118 bp, Homo sapiens
gcttgctagactcgatcaactttatttatgaggagccatttataacattcacaatggactactgaacctcaaagcctctttaaaacaagctttattgcaaggtgctgcttcactataa

SEQ ID NO: 212313 - DNA, 521 bp, Homo sapiens
gaagcaatttagctagttgacagtcttatctcccagaagcacatatctcctgcagcgaacaagtctgttagttttgcttggtcttctgtgttgtctaacacagatgcagggagttctgttggcttcagttctcaaatgcctacctagggtatagtaggtattcaactaacgtttgttgaagagatagaacgaatgaacgaatgaatggttcaatggataaatggtggtgtgatttacccagggcctcataactagtgagtagaggaaccaggatttgaactggaggctgcttactccagcccataaagctcttaacagttcactcactccaatgtcctaacatctgacagcctcttccagtggagggtaaggcagtgtttcttctcctgcacctacttacatttactcactgatatggtttggctctgtgtccccacccagatctcatctcgaattgtaatccccactagggcgggacatgatgggaggtgactggatcatgggggcagtttcctcatgct

SEQ ID NO: 212314 - DNA, 632 bp, Homo sapiens
agcaacagggtctcgctgtgctgcccaggctgggtttgaactcatggcctcaaacactctttctgcctcagcgtcccaaagtgctgggattacaagcatgagccactgtgtcgggccagcattccactttgataatagacctgtggaaaaggcccatgcaatcctgaatgtgggcatggattcaattaagtagggaattccaggatcctggatacctagaatatggtgatcagactcagggtgggtgcatctccttgggccttcaggccccttgccctgtggggagaggtggagtcttttaaattatagaatctagggtaggggcctctcttggaacaggttctaagggtggtaatgagagacaaaaattctctggttcaggaagcccatcaaattccaaagcggcaaagaaggaaaggaaagaaattcatgtctaaacatatcagtaaacctgtgaacctatagaacatcaaaaccagaaacgattcttaaaaataggaagagagaaaagacagattacctacaaaggaacaacaattcatatgccagctggcttttctataccaagagtggaactactgaaacagtgttttcaaagtaggcagtgaaaataactgttgatctagaattgt

SEQ ID NO: 212315 - DNA, 368 bp, Homo sapiens
ccagaaggtaaagtacataccctggaaagcattgtgtacgtggctccgctcctagttgttgaccaaaataagcagagctaatgaaatgccatggcatttccctgtgccaagggaggcattaggctgttctcaatgaatgactcacggaggcagcgtatagaggcctccctgctggctgctggcggggcatcggctctctctggtaggcattgtgctgctgtggcttcacccactgactggcacggagcagagccctgcttcatcgcctttggtaatttcctcttaaagcatgtgtctccagtgggctttgaatggctcctctgtgatttctaaactcaacctaactgagtatacaattttaattggaa

SEQ ID NO: 212316 - DNA, 540 bp, Homo sapiens
tgcaagatagttctgtgtctacaaagaggtcagttatggccataccacttgtggaaatctagatttgaaatttcaggactcaggttcttcctaaaagtaagtttaggaagggattcattctttcaaataattaaaacttaatgagcatctcttattcttctactgagtagtctgcaagctttcacatttgcaagatagttctgtgtctacaaagaggtcagttatggccataccacttgtggaaatctagatttgaaatttcaggactcaggttcttcccaaaaattagttcaggatctaccaggaattattggagccttagcttgcaggtgtccacatcagttattgctaacatatttcctcactgtttgcagggttctttaggattcccaatacaaaagaaaaaaaaaaaacacttctgactcatatttaggcacctctccgttagcactgtctaccaaaaataacttaattttctactcccgtccacatggatagtcttatgtccactctaaaagggtatgcttcctaaaattaaaa

SEQ ID NO: 212317 - DNA, 255 bp, Homo sapiens
aactgtaaaatgtaatggttaaatgctctgcctccccagacacctgcgcctatcatgatcttgcatacgcagtggctagaaagaagttgaattgtatttggtttggagttttaggtttacagctgcactttggtgttttcactgctggaatatatatatattagcattccctaaatatttgttttgtgagtgttcacttttaactgatttttctcatttgtaatactttttcatatctacccttcataaacttgc

SEQ ID NO: 212318 - DNA, 223 bp, Homo sapiens
ttccctaccatctgggctcttgccatatcaggagtgttttttatttatctagggaaagggtaaataaaaatagaagatttggaaaagcacaatggggcagagttctagaagtgctactcaccagctctgtgatcgtggggatggcgtaataaatgtgccaaaaccatggggtcattatgagtataagtggagaagaggcatgtcagctgattggtgcagtgcc

SEQ ID NO: 212319 - DNA, 237 bp, Homo sapiens
gcaagtggaaaggtaaaacacttagagtgtattttcagttgttgtatataactccagcttctgaaatgatgtatctgacacctcctcctttttaaaaaaaatttaaaacagccagcaagaaatagcataatcgatgcggctaaagtctggccaaatataccacctccaaatactcaacctgcacctcttgctgtccctctgtgtaatggctgtggaaccaaaggaacagggaaggag

SEQ ID NO: 212320 - DNA, 1054 bp, Homo sapiens
ttaacagggtggaagaatgaaagaaaagaaagatgaaaggatgttgaatcactttgcatggctgtatgatggaaggaaacggaactgagaactcctgcagtagaacacgtggatggcttcaacaagataatgatgctaagccatggctttggaaattctctaattgcttttctcgtcctgagcagacgctgccacatagtccccaaacgaaagagtacatggagaacaagaaagttgctgtggaactaaaggatgtaccatcaccccttcatgctggctctaagctttttccagcagtcccacttcctgatattcgttctcttcagcagcctaaaatacagctttcttctgtccccaaagtaagctgctgtgctcattgccctaatgaaccctccacttcgccaatgcgttttggtggtggtggtggcggtagcggaggtaccagtagcttgattcacccgggcgcactgttagactcgcaaagcaccaggacaatcacgtgtcaggtagggtcagggtttgctttccagtctgcatcttcactccagaatgcctcagctaggaacaatttggcaggcattgcaagtgactttcccagcatgtgtctagagagtaacctgtcttcctgcaaacacctgccctgttgtggaaaactccacttccagtcatgtcatggtaatgtgcacaagctgcatcagtttccgagtctgcagggctgcacctccgctggctatttcccctgttctgatttcacaagcggggctccagggcatttggaagagcacatttcacagtcggagctaacgcctcacttgtgcaccaactctttgcaccttaatgtggtacctccggtttgtttaaagggctcactttactgcgaagactgtctaaacaagccagcaagaaatagcataatcgatgcggctaaagtctggccaaatataccacctccaaatactcaacctgcacctcttgctgtccctctgtgtaatggctgtggaaccaaaggaacagggaaggagaccacgttgttattggcgaccagtctaggcaa

SEQ ID NO: 212321 - DNA, 275 bp, Homo sapiens
ttacctcagtggctcctagcccagatgaacagcaaaatcctgaaattcttaatttaaaaaccagacatgtgtttctcaagcctaccctccagtatctgatttagtagtttatggtaagtcctggtaatttgcatttttaaaaggtccccaagtgattctgatgtgcagctgggttgaagaaccactggtttggttcatttaattcctcctcactcctgattacacatttactttaacctctcctctcctttcatttcattcttacctagttaccc

SEQ ID NO: 212322 - DNA, 351 bp, Homo sapiens
cctcaacataataaaagtcatatatgaaaagccacatcacactcaatggtgaaaactgaaagcttttcctctaaaattaggaacaagacaaggatgtctgcattcattacttctatgcaacacagtgctagaagttctaaccggcacacttaggcaagaaaaggaaataaaaggcatcaaaattgaaaagaaagaagtaaaattatctctatttgcagataggatcttataagtagaaatgcctaaagggcgtgtgtgcacacacacacgttagaactaataaatgaggccaggcatggtggcctgcgcctataatcccagcactttgggagtcagacgtgtgcagatcac

SEQ ID NO: 212323 - DNA, 148 bp, Homo sapiens
ctcacagttctgtaggctgtataggaagcatgatgccggcacttgctcctggtgagggcctcagaaagctttcagtcacggcagaagatgaattggaagcaggcctgtcatcatttatgagggacccaccccaatgatccagtcactt

SEQ ID NO: 212324 - DNA, 369 bp, Homo sapiens
agatgaaaccctcaaacagaggtgtttgctgtggaagctttgaagaggcttctgaaaggtgacgactgagagagaaaaaaaaggggcagctcctgccatctggaagctggctcagtgctcacagctgggccacgccgtccttctgtgggacataaacaatctaacgaaaccaacctctgccaagggcgctctgagaccaagataaagggagacagagtgaggtcactggacagaagcacggtccctgtatcacccacggaatacgaaacaccccctcttgactccttcccttggcttaaatgggtgactgctaggcctccaccaattctagctcatcctccttctactctccctccctgcaggttagca

SEQ ID NO: 212325 - DNA, 433 bp, Homo sapiens
aggagattgttatgacatttttcagttgcagtgtgtatttaggaaaagcaccgtttcctgttaattttaatagctggccttatctgtctcttttatctaatcctgatgaatagctgggcagacttttactttctcagcttttatagccatgaattgagcatccttctatggattccccaagtcatcatgaagtgacattagaatgttacagaagtgctttctacatattttaataacttgtggccagatgaggtggcttatgcctgtaatcccagcactttgagaggcagagatggaaggattgcttcaggccaggagtttaagaccagcctaggcaacacagcaagaccccctctctccaaaaaaaaaaaataaataaataaattagctgggcgtgttggtgcatgcctgtagccccagctacttgggaggc

SEQ ID NO: 212326 - DNA, 400 bp, Homo sapiens
agatacaaagataaataaaacatggttcttgcccttgaagagatcttgtcttaatgagaaacacagaggttaaactagacacttataatacaatgcactaggtgcaatgatagagaagcactaagaaagcaacaaggaaggtagagtaaaggtaaatttcctgaaggaggagaaatatagcctgatgacaaaataacaggtagtaattatctaggtaaagagggattggcagaaagtgaaggacgtctactgacagacacaagagtagaagtaaaggtagaaaggttagaaacagcatggaaagcaggccaaaatttatgagaattttgcagctctccaagcaaaaagtgatgagaatctatcctaccatactaatgttgtgaagagaatgaaagacagg

SEQ ID NO: 212327 - DNA, 485 bp, Homo sapiens
ttttaaaattgtgtttaaacaaaacaaaacatctggtaagtggaaacaattgcttgcagtcattttttcaaatttattcatttatgtattcattaaacacggaattctcgccatgtactaggaaagcagtgcatgctcttttaaagtttacagtaatacctgggaaagcaagtaattagagatgcgatgagggctacagaaagaattaccaggccgggtgcagtggatcatgcctgtaatcctagcactctgggaggcagaggtgggtggatctcttgagctcctgagttcgagatcagcttgggcaacatggggaaaccccatctctacaaaaaatagaaaaattagctgggcatggtggtgtatgcttacagtcatagctacacaggaagctgagaggggaagatcacttgagcctgggagggtgaggctgcactgagccatgatcacgccactacactccaacctgggtgacaggaaaaaaa

SEQ ID NO: 212328 - DNA, 333 bp, Homo sapiens
accacgcccagccttaaaaaaacagaaaattttaagttatgaatcctctagtcttgggaatgatcccaacctttccagtcaggggtcagggtagctctggaaaagattcagtctcaccaataacagagaatcatattgaaaatccgaagcccaacaagcagaatacaaatggttatatatgtgatgtaattttaatctcagtaaaataaatatatcgatacatacacggaaaaggaaaaaagactagaagaaaggttaagactgattctatactgaggtggtagaattacagcttaattattcttcttttctattttctataatgggagaaag

SEQ ID NO: 212329 - DNA, 377 bp, Homo sapiens
gggctcttgccagaggggactgtacaagcagtccacagatgttctcgaagaaactccctggaactttactactcggttatacaaagagccgtcaaggccaggcatggtggctcatgcctgtaatcccaacacttgggaggccaaggtgggcagatcacttgaggtcaggagttcaagaccagcctgacaaacatggtgaaaccccatctctactaaaaatacaaaaattagctgagtgtcttggtgggcatctgtaatcccagctgctcgggaggctgaggcataagaatcacttgaacccgggaggcgggggttgcagtgagcctagattgtaccactgcactccagcctgggcgacagggcgagacactgtctca

SEQ ID NO: 212330 - DNA, 320 bp, Homo sapiens
attttcacttgtgacaccaccacagagacagccactgcttgcatggtgtttctctgcagtcttcttcctgtgcatataggaaggggtcacgtactcagtgtgggaactcttcccctcagtagcctatttatactgagcattttccacatggatacccttgaaaaaagtatgtcttttgttgttgttgttgttgttgttgttgttgttgttgtcggcggcggctctttggtatcgtattgtttgtttattgaatcctctgtgggggttttacggtgttttcaagttctgatctgtgataaactttccttgtgcagagtatg

SEQ ID NO: 212331 - DNA, 823 bp, Homo sapiens
cccaccgtaactcgatcaacctaaagccaaattgagacccagagccaccctcatgccacggttagtggagcaaagaaaaggggtatttccttgagaaagggggaaacttggtttgttgaaataacctgtagacatactagctttgactcccagagttgtgtcagtatagaaatacctggatccatgccaattaccataatcacgagggcatcctaggttctttggatatgtcgggaatttataggatcttatatgccttgaaattaaggaacctctcagttattatttggaaatcttattatcagagagaaacgtattacccggagcgatttgttctgataataccggtaaccccaggtcagggaagatataaaccagaaggtctaatacaggccagttctgccacttaccagccatgtgaatctgggcattatttaacttctctgagcttcaacttcctcacctgtaaaatggggataatagtagcgccctcctcacagagttcctgtggggcccagatgagttcatatatatgtgaagtgtttcaagtgagcctgggacagagtaactagtccataaatattatttgctgttgttaacaatactgttctaattgtgttattatagacccttttataaactattatagaccctattgtagtctatatgtagactctttccccaggaaaaggcttcacacatgtaattgtttatgcagcgttagggactctcagattctgtggtctctggaaggatctgagacccagggaagccatagcaactgttcagccaggagacctgctctcagttgatcgagctacta

SEQ ID NO: 212332 - DNA, 1721 bp, Homo sapiens
tgagagtcttattgcatttcaccacactgccatatatggacctgtgagaccttcacttgtaggaaatttccctttaaaaatgcatctgaagactacaatgaaatggggaaaagcatagttttggttgagaaggaatgtaaggatttctctagatgtttaattaatcattttgggatgagtatatttcttgtcagattagcagcacgtaagaactggaggctcaagtgtattctattcacacagaagtggatagattccacacacagtcaataaaaagcaagaggcttatgtaaaacaaggctaagaaattgcagttaccttcccaccaaaagaaattatttcaaaagcaacatcacatagtcgcaattacagtaaaatggaattttgttatgtcctcttgctttattccgaattaaaacttccttaaattaattcactaaaattctaatcatgttttaaggaagttgagcaaatcctgcaaatacatatatctgccagtttttttcttttactttttagtattcattagcaagaaaattttgcctaagacaaagacatgaaagcatacaatgttcaaattaaatgaaattaagtaaagtcaaattaagtaaatgaaaacaaatctaacatttcacttttattaatttggggagggcataatttgatgttggcataagcagtaatgtttgtaaactgtttatggagatgcggaaagagaagaggatgaatgtatattatatgagtgaggtttgatgtctaccagtcctcattttcatatgaggaaactgagattgcacattttaaaaaaacttgcacaagatcacaccactagttaaatgacagattcataacccaaatctacttctgcctggcaccaaagttcacgttctttctttttcacttttggcatacttgatcttgttataagtcctttagaaatagtagtgcatttagttctcttaataattctatataatgaaaactgtaattaccactgctttacagtgaagaagttaaaagactgagaagtgaagaatttgtccaggtttacgcagccaggaagtagcagagctggaaattaaacccaggcaatttgagacttaagtctgtaccttgaaatacaacactgtggcatctcttgacatgctttggaaataaatggaatccatactgtcttcagtgggaatatgatactgtagcctagtttttacaaggtaaaaactctccaggaagtaatcaatgtctatattataataaatataatagtctacttacatgatcaatatttgtactatttcttggttcccacagaaacctaatagaatagaaacaccacttttttgtcctgtcactagatttctataaaaatgcttgtttgtgggcagggaatactctgaagaagagttatgaaaaggaagggcacatttattgctgtagtttgaaataaaactttttttcacccaacttagataaagcgcaaatggaattttatttgcaggggcatattaacatagaattaaaatgacaactatatagttacctagtgctgaatagcgtctatatctaacctattttctaaaagatattttatgaccctctacacttgtatgcacagtacagaaaatacactgatgtctgtagttttgtttctgtagcccctaccacttagcaggtattctgcaaatacgtgcctttggggatgaagaaaaatgatttatgtt

SEQ ID NO: 212333 - DNA, 480 bp, Homo sapiens
caccatgaaaatggactaatatatagatgtaataactttttgcaagttatgcaattttgggccatagattcctttattctgaagtggagaaaatactttccttatacaattgttatgtttacataaaataaggtgccagatacatagtagaaataaaataaatgatgttactacttcctaaaatcctaaaagtttcatttcagattgctgagtaaacccagttaaagaaaccagcctctgtgttttggtgttgtcattaatgctaagttacatttccttagggtatctgcattaagcaaatgtaagatgtttgagtttcaaagatgaacaagtgacttgtaagtgtaaagtggtatggctgtttttaataaataggtaataccacccttttggcgggtagtagagaaaagaagatgagtttttagaaaaagactcagagttactcagaattaagaaaatgaatccttactgtcaatatga

SEQ ID NO: 212334 - DNA, 493 bp, Homo sapiens
gggtgactaactcaatagccattcccagcccctctcccttccctgcttctattctagaagaggctggaaaaacccaacatcccctctgtaggccttttttggagttaagggatgacaatatgaccaaattctggctaaaaagacagagggaagtctatctggatgcttctagaaagccttttgctttcctgatggaagaaacaggcacaagagagagcaagctcaccagcactgtctctcctttgcccctggcttccatgtagacttgatgcctagacccgtgggacagtagttggcttcgtattgtgttggtccagctaagcagcatctgttacgcagaatcctcccatagttccaggttagcattggccacaagggaaatattgcatgagatctgggaggcagcaaccaagcagcagccatggtttttatgctgtgaaggacaacacaaggcgtgaggaacattggcagttctcacgcattgtcgctgacc

SEQ ID NO: 212335 - DNA, 362 bp, Homo sapiens
caattttaaatttgcccttacttgttagccttttggaatgtctgacatcttacaaattcaaaactgttctttgcatgtttggaaaatttaatagcattttctgaagtgtctccacagaatgtaacttttggtttaacttcatgtaactcatatgaaagaaaaaaagccagtttttgagactctcatcttagaatgatggcatttaatgccagagaaaaacatggagatagtccagcctaacaacacatgtgttcttaatcctgtaatctgttttccgcactccatggagaatggtattttagatttaaaagcaaatttcagcatgtctttcttctaataaaaactttaaacgatttttcagg

SEQ ID NO: 212336 - DNA, 521 bp, Homo sapiens
tctgatagagaaaaaggtacatgaacccttactatgccctcagctccagccacctctctaagaggaaattgttgggcaggtgggcgagagctagtcatggaatgaaactgtaagctgaaccgagtgtgaggaggggagatgatagaagaattataaggtgggggagcagaggttgaggaagaattggaacttgattcagcatgttgaggagtggccttgggaggggaaaaaggtcagaggggtctgaagaaaagaaggattcagaggactctgaggttggggtagagactgaagaaatggacaggagagaaagaagaaagatttagggtgagtcgcattggggtcagaggctaaggagggaacaaagtgtaaaaaacgcttggacgtaagacatctcagaccatttacccaattttcaacaaaaattatctaggtcttacaggatggagaaatcaaaagtgccattttctggccatttgaaaccactgttgagtttgtactggggccaagcagtattgcag

SEQ ID NO: 212337 - DNA, 291 bp, Homo sapiens
cagttcaacctaaatgcaggggtctggagagagacttaagagagttaagttgaaaacaaaaatccaacaaccagcctcatatcagcccgactatatataagtcctctgtatgcctaaaatggagagcttatcagtaatattcatcccaaatggcaaataatcctaaaaatcattgctgtttctcaacttacgagggttggtactgcaatttctcctaaagttaaccctagcatgcagtcaatcttcaacaagtatttattgaatgttaaataaatgaaagcttcatttcat

SEQ ID NO: 212338 - DNA, 476 bp, Homo sapiens
caggtgtgagccatcgcatctggccaagttctttttttgagttacctaaagaacttcagcatgtttccccagagttacttcttatctgccttgattgtgagaccacatttcaacttgctttacatacatcagctgggatagactactgatggcaggtgaacttgtatcacagaactggatgtgttttacacaagctttattttgggtattctcgccttgctatttcccatgaaatacggcttaccgatgacaatgggagaatcaatgaaaaggctgatgtacaatctgtgcaagtccaaataaatgctcacttggaagtttcaataaaatcttcaataagctttaacatggagtttgacatagtgttagtgacacactttgcatgacacagatgtctgccaactccattttctatttcttttttctttttgagacggagtctcactgtcaccgaggctggagtgcagtggcaccat

SEQ ID NO: 212339 - DNA, 526 bp, Homo sapiens
ctattcctagtctgtagacagcaggctgcttgttatatccttgttataagagggagagatagagggaggtcgtctttcttgtgtcttttcttataatggcactaatcctatcatgagggctccattttcatgacctaattaccacccaaagttgccaccttcacatcacatacaatcacattgggcagtagggtctcaacacatgaattttggggagtcacaagcagtgaatctgtagcaatgccataacttgaattccttcaaagtatatgagattaaatatcatcattgccttgaaaggacagattgtgtatatgttttcaactgttgtctttgaaacaaagtatcagaattaactggttaatcaacattttagaaactcattgaagcatattcagttaattatactgaagcatattcaatatagtgggccctccatctgcttgagtttcatgtccttggattcagccaactgtggatggaaaatatttgggaaaaaacaaacaataaaaaataacactacaac

SEQ ID NO: 212340 - DNA, 276 bp, Homo sapiens
gcgaagggggaagatccatgtaaaactgtgaaatcttgtgagaacttactatcatgagaatagcatgggggaacctcctccatgattcagttacctcccaccaggttccttccaccacacataaggattatggaaactacaattaaaggtgagattttggtggggccatagccaagccatatcattttgcttctgtctccttccaaatctcatgtcctcaaatttcaaaacacaataatgcctttccaacagtcccccaaagtcttagctcattcc

SEQ ID NO: 212341 - DNA, 399 bp, Homo sapiens
gctgatattatctgcgggcgaattgtaggggaagggtggctggcaactgtgtttctggaggaaacaaagcagaaggtgggggcttgtggttctgtgggaactgctggattgtccttttcttcttagggtgacccttctagtcttgtgtggctttttttttttttttttttctgcagacaccaaagaagagatgagttgacacctcctgcaaacagctccccaggctgctctcctttatgttttgccctaaagtctcacatgacttaaaaaaaaaaaaaaaaaagccaggcttggtggcttacacctgtaatctaaacacttcgggagtccgaggcaagaagatcacttgagcccaggagttcaagaccagcccgagcaacatagtaaaaccctatctct

SEQ ID NO: 212342 - DNA, 383 bp, Homo sapiens
ccttactttggctttagacatcaaagaaggcttaaatgagtgggtaaaatttgagctcagtcagaagaagtagaatttcattctcaatgattttcagaaagtaggataagtaacagataactgaataaaaccttatatgtctaatacattcaggccatgtaatatggctgtgtctcaacatatgtaagggaattatgcaggatgagacccacatggcgggtagggaccagatgatataaaattttatattctctgcttaaggaattgacgttttcctgcagatcacatggagagttcttcagggattttaaacagaggaaggggtgcaactttagaaggattatttctagttgcactttagaactggagaataccagatagga

SEQ ID NO: 212343 - DNA, 428 bp, Homo sapiens
agcaaaatgattatgacttgctgaatgctcagatgattgttggcatttcttagcaatattttaaaattaaggtctacatactattttgttaaacatagctattacacacttaatagactatagtgtaaacataacttttatattcactgggaaaccaaaggtcccatgtgacttatttaattgcaatattcccttattgcagtggtttagactacaaacctgtaataactctgagatatgcctacatgttgaattctaagacaaaatgaatttgtttcatctttttaagtaaaaaatttggctgcaaactaaatgtttctatttcaaatgaaaataatggattattttgttttctaccctcatggattcaatttctattgggtaaaccacaatgacattttaaaataaactttagcatatcatagaga

SEQ ID NO: 212344 - DNA, 611 bp, Homo sapiens
atgagaatcggtagactaaggaaagctgttgcctgggaagcaggatggacagacctgcagggatagaacacatggcagggcctggaagggagggggtccgggacatgagggtctcgtctcatctcctgctgggggtgcagtgcttgtcctgcatggcacctccagctgagcctgcagagacctctgaggtggacgcagaggctgggagcatgggtagggaacccgcctgaggcctgggtatggcgtgcaaagtagaaggtggggtaggaggtggccctccccagagtgagttggcctcacccaatctgtcgaaggccttaatagaacaaaaagacccggcttcccaagtcagaggggacttcggctgtctgactgcctgtgaatggaagcttcacagggtctccagcttgtggatgacagatccataatcacgtgagccgagcacataataaatctctctctctccctgtgcacatcctattggttctgcttctctggagaaccctgactaaccaaagaaccacaaagcaaggaacgctgctgccaccagaaactggaagaggccaggaagggagtctcccctggggcctccagagcgagcatggtcctgc

SEQ ID NO: 212345 - DNA, 403 bp, Homo sapiens
gccccagtccctgccctcaatgggctccctgtctgccagcggaggcgggcagggatactggcaagtcaagatccggagggatatgtgccaccgtggggcttaggagggacacaggggaggcctgaggtggggcttctaactcagtgcggtgcgtcatggaacgcttcctgaaagaggtaatgtgtaaaccgggagctggagatgagtaagaatgagcacaggaaagggcgagatggggacaaatgtgcaaggcagagagaatggcaggcacagaggcctgcaggcatgggagccccaagtccctgcgaggctttgccgctcctccctgtgcaggatggtggagggggtggccagccctccataaagcactggaattcttctggccgggatggggcacttaggg

SEQ ID NO: 212346 - DNA, 995 bp, Homo sapiens
ctctgtctcaaaaaaataagtaaaaaaagaagtgaacagtaaaagtactgcccacctccctgccaccaccaccctgcaaccccaagacacacactaggtttactcctcagaagtaactactgttcccagttacttgtgttatcttccaaggatttattatgcatatatgtatatatgacttgactgataaaaacagcattagtttgtttttgcattgtgggaagtctctgttactggttgagcctcacataacctcaggaccgggtagagtacagacatggattaaattctggagaactggatgcaatgcctgatgggatgtctcagggtgaaaagccttatcggggtaaccatgatctagagactgggatttgactttttggttcaagaaagtgacgtctctgctggcccaaaactggtcaggttttcgaggactgtctgatgtgagccatactggggagaaacagggatagaaattttcattacagttccagaagcacaggtagtgactggaatattctgccactctggaatgaaggtattcataagagtgatttaattgctgaaaagttgctttagtggtgctggaaaagagaagaagtgagatcattttaatcactgaagggatattagcaggtaaatttgacaggatttggtgatggattggataaaggcagcgagtaaagcaggaggaaaggaagatttgcagattgctggctgtataatgtcagggctggtggcgcctctaattgtagcaagccgtactgggagccttggaagaagtggagaaattatttaacatattgagtttgaagtgactttaagatgcccaagggaggaaaatggggtgtagtggaatgtgtataattattcaaatcctggtgtggttgagatttcttagagaggttacagatagaatgagaagaaaacagaagtactgatggaccctgtaaagatggagagagaagagaaagagaggtaggaggaaatccaga

SEQ ID NO: 212347 - DNA, 527 bp, Homo sapiens
ttgatttgccaccaagattgctctgaatctgtattcgcctttattgccaagtttcttcttaactgggagtttgaaaatataaactttaaccattttttctggataccacagaacccacaacgtattactgttatcagtttacagaaaaacacaatgactaatacgtgactaatgactgatgtagttgatatgagaaagactaatcatatcaatgactaatataggttcatatgagaaagaggaatgggaacctctttattccacatatgcttattattcaacattgccaaatttcaaaaaaccaattgcagcctccatgtgactcagttgtagccacattctccccttttccattaaactgccacacagctcttttcacttatgacctgatagagccaccccaggaaaagagaaaatggttttcagacaatttgtgtctgtaaattgtcatttaacttactttgtttttaaatttttatccctttcgaattttctggagctttgtgaagttagttactacttaataa

SEQ ID NO: 212348 - DNA, 279 bp, Homo sapiens
ccactgtgcccagcctgatttttaataggagcaggaatgctggttgttccctctggtttgataggttccttcatcagattttctttgttgtccctcatgtatgtcacaaagtcaagaaaaagcatggactttgaaattagaggacacagactcacatccctgctcgatcacctcctatttaacttgaatttggacatattttcttaaccttgattaaactaccttatagttgtattgtcagggttgaatacgaatacctttcatcgatagtgttttagc

SEQ ID NO: 212349 - DNA, 416 bp, Homo sapiens
ttaaaaatccagtgacatttttcacggtaatggaaactacaattctaaaatttgcatgaaactacaataggctttgaaaaaccaaagcaatctagaggaaaaggaacaaaacaaccaaacttcatactttatgatttcaaactatattttaagactgtagtaaaaaaaaagatgatacatgcaaaatatggacacaagaaaacaatgaaacagaatagagcccagaaataaacccaggcatataaagtttactaatctttgacaagtgcaccaaaaatacacaatgaacaaagtatagtctttttaatatttggttctgaaaaaactggatacctccaggcaaaagaataaaactagcttatttttcttacaccatgctaaaagttaaattacagacttaaatatgaatccttaaa

SEQ ID NO: 212350 - DNA, 436 bp, Homo sapiens
cgccagagagtgtctggcctcagaagggccagcgagcaaaggggtgttagccccgagcccggatggaggaggcagcagtgtgggtttggatgacagagggaaagtagagatttgggaagaagagggtggaaacagggtgggtctccgtggattgcaggggagggtttgtctgcaggtgtacagggagtgctggccctggtttggtttaaactgatgagggccctgggcacatgcaaatgcgtaaatctatccttcaggcaagggatgaaaaaccgttgaagagttttggcttcttcttcttccttcttccttccgtcttccttccttcttccttcttccttccttccttcttccttcctttcttctttctttctttcttcttcttcttttttttttaatagaagaaaagttacttaagaaaagttatccttgcgta

SEQ ID NO: 212351 - DNA, 557 bp, Homo sapiens
cagaggcgatgagcagccctgatgagggcttgctgcctctgacgacatttcccagacccagggaggtgggtcagttttgcttggtcattttgtgttagcatccagctctttctggccacctgtggaacctcatggcctgtagcgttggttggtatgtgaggattccaactcccagatttgggaggtggctgtagttaatcagacatgactagcttcctgttccagaagcggtcagaatgagtgtgtgcctggggatggctggaaagccagcctctggcttctataggcacctcactctccatgggaagtaatttgcagtctcaaaatatctcctttcaaagtcctttaacttctgttttgggaaattttgctctgaaacccagatgtgcagagaaagcagggctcaaaagatcatttgagaaacagacattacacctttgtttccccttttgaactgacatccacccaccccacggttagctcatgcagttaatggcctgtgtcatagactccctcacatgtctcctgttgtgtgagcgggagcctttctggaatgg

SEQ ID NO: 212352 - DNA, 1274 bp, Homo sapiens
cacggcctggaagacaaccagcactatccaccagacacattgaacgaggcctaataggaccacccggccctagttaagccaccagatggctggaaccacatgggtggccacaggaaagaccaaaagaagaactgctagggtgtgtctggtccaaattgctgactcacagaattgtgagcaaataaaattgttgttttacgccactaagtcctggaagttgttcattacacagtaatagataactgacaaaagtgagagggaaaaacatggagatacatgtagaacttgattcatatctcccctagaaaagagtttgatgtgacttgtaaatatacaaattatctctctcctatagctgcccaagatgccgaaagaagaccaagggcaagacggggccccagcccctgctatcttgaagcaacaggccaagaaagtggtgaatcccctgttgagtaaaggcctaagaattctggcactggacaggacatccagcccaaaagggacctcacccactttgtgaaatggccccactatgtcaggctgcagcagcaaagagttatcctctacaagagcctaaaagtgcctcctgtgatgaaccagttcacccaggccctgggaccaccaaacagctactcaactacataagctggcccataatacagaccagagacaaagcaagagaagaggcagagacttggcccaggctgagaagaaagctgttggcaaaggggatgtccccactaagagaccacctgtccttcaagctggggttaacaccgtcaccaccttggtggagaagaagaaggctcagctggcggtgactgcacatgacgtggatcccatcaagctggttgtcttcctgcctgccctgtctcataaaatgggggtccctgactgcgctgtcaagggaaaggcaagactggttcacaggatgacccacaccaccatcaccttcacacagattaactcggaagacaaaagggctttggctaagatggtggaagctatcaggaccaattacaatgacagacacgatgagatctgctgtcactgggggggcaatgtccttggtcccaagtctgtggctcacactgccaagctggaaaaggcaaaggctaaagaacctgccactaaactggattaaatgtacacggttgagttttctgtacataaaaataattaaaataatacaaattatcctttgaaaaatatataaattaataatatacacaactcaaatgtttgtgtttaaaatactggttgagatcaccatc

SEQ ID NO: 212353 - DNA, 566 bp, Homo sapiens
ctacagaaaatggaaaaaggaccccatttgccaatgagaagaccacatcatcctcagcagagcctacagaacacgcagaaaggactccactggccaatgagaacaccacatcatccccagcagagcctacagaaaatagagaaaggacagccaatgagaagaccacacaattcccagcagagcctacagaaaatagagaaagcacagccaatgagaagaccacaccattcccagcagagcctacagaaaatagagaatggacagccaatgagaacaccacactatccccagcagagcctacagaacatgaagaaatgaccccattggccaatgagaagaccacactatccccagcagagcctacagaaaatggagaaaggaccccatttaccaatgagaagaccacaccatcctcagcagagcctacagaacatggagaaaggaccccactggccaatgagatcaccacaccatcccgagcagagcctacagaacatggagaaaggatagccaatgagaaggccacaccatccccagcaaagcctacagaacatggagaaacgaca

SEQ ID NO: 212354 - DNA, 753 bp, Homo sapiens
agaaaacagatactttcatcgaatccattatgtgccaggcactattctaagagcttcacaacaagcctatgaaataggtgctaccactctttacagatgaagaacggatgcaagttcacacaagcagtgcatttcagagttgaaatcagaaactatatagtttagatccagagacttgctgcacttaaggaacacactgaacaagggaagttctagaattgggcagacctggacttctgtccttgggcatatcacttaagttctctgaatcttctcttactcatctgttaaatggccatatttcacatgagtgtaaaatggagtaaattaggtaagtcctataaagccctgagcaaaaattctcaatcaatattagtgttgaattaagtttcacttaaagctgcctccttgcatattttaagttcaccctgacagtttttctgtacatagtaaactataacctaactggatgtgtaaacagactgtaacctactcctgtgccactcacagttttggccaatcaaaggtggccaaccattcaaaccatgttaaaataaggcaaatgctgggctgtaaccaacacttccatttctgtacctcacttctgttttttataggtcattttcctttttctgtccataaatcttctaccaggcagctgcaccggagtctctctgaggccactctggctcggaagtctgcctgattggtgaataattctttgctcaattaaactctactaaatttaatttg

SEQ ID NO: 212355 - DNA, 346 bp, Homo sapiens
ctactttccccacttctccaaccaaaaattaatttaacttatttctctatgtacattcataaatgattcttgtctttgacaggcctttatctccatctatgtatctgtaagcttttaatggtctgatactgaatctgaccaaatcactctgtggaagaatggttaagtgttaaacatttttgaaagcagaggatactttcctcaactgaattcatatacatatgctcaggagcaaacatagagaagagagagagctgattgatgaggaggtagaagccagaactcttcttggtggcagccctagaataattgtgactggagagaattactatattttgcaatcagt

SEQ ID NO: 212356 - DNA, 500 bp, Homo sapiens
ctttaatttctgaccactctatgttatatagccagataaatctccctccaactagaatcacctttgcaccaagaatcaccttttcttctagtgatgagtaacagatatggggagaaacagcttactacatatggatgaataggaaccatcaggatattcaaatctggtctctggacaaaacactccatatccagctcacacatacaaggccatcctatgcctccttactatctgctcatatttcccacaccaacaagtcacctggtatctcaacttaattctttctgctatggtctagggtgtgttgacacagttttaggtaacattatcaatgagaaatgctcccatctctgatgttacttctctctctacctaggcggtccttccccagatcccacagagcccattctctctcttgcttcaggtcattactaaaaggctgccttatcagcacagccttccctgataccctattgagaactacaatacccacctccaca

SEQ ID NO: 212357 - DNA, 1191 bp, Homo sapiens
gtcagcagccccgacagccgacagtcacagcagctctgacaagagcgttcctggagcccagctcctctccacagaccacaagcacccagcagagaccatgggccccccctcagccgctccccgtggagggcacaggccctggcaggggctcctgatcacagcctcacttttaaccttctgggacccgcccaccactgtccagttcactattgaagccctgccatccagtgctgcagagggaaaggatgttcttctactggcctgcaatatttcagaaactattcaagcctattattggcacaaggggaaaacggcagaagggagccctctcattgctggttatataacagacattcaagcaaatatcccaggggccgcatacagtggtcgagagcaagtataccccaatggatccctgctgttccaaaacatcaccctggaggacgcaggatcctacaccctacgaaccataaatgccagttacgactctgaccaagcaactggccagctccacgtacaccaaaacaacgtcccaggccttcctgtgggggccgtcgctggcatcgtgactggggtcctggttggggtggctctggtggccgccctggtgtgttttctgcttctctccaggactggaagggccagcatccagcgtgacctcagggagcagccgcccccagcctccacccctggccatggtccctctcacagatccaccttctcggcccctctacccagccccagaacagccactcccatctatgaggaattgctatactctgatgcaaacatttactgccagatcgaccacaaagcagatgtggtctcttaggttcctctgggagctgctcttgtgggttgatggagcgtccccgaagctcccagccctggggacggggaaggacatggagcctgagccagagaaccagctctgagtcctgaggagacacaggcctggggacagggagggatgggagtccctgctgaatatctggagaccctgacaggttgccctgggctctgggtgggccgggacaaaggcctctcatcaccacaggaagcgggggcttgcaaggaaagtgaatgggcctgtggcccacccggggtcaccaggaaaggatctgaataaagaggacccttcctctcattggctctttttctgctcacgggaacttagcagaaactcacctg

SEQ ID NO: 212358 - DNA, 1606 bp, Homo sapiens
gaaacccataagtctgtttattaaatctcaggctaagaatactatacacaccttcattttattttgtcataattcttgtgaggcattccttagatgggttcagtatttaattttaaaagacaaagctattaagagaaaacataatgttactgggttttttttgtcacttttcttggctctatcaaattagaagtgcttgagatgtgacatgaccaattgaaataacatttccagattttgcagacttttgtaggaccatcttggttttacccagacataagacatctgttttcataggcttaacagtcttattctcattctttattttgctcagttctacttccaaacatatgaaatgaaatgacaaatgacatgagtgctatgtaattaggagagaattattttacctcagagagatttttcatcctcatttattttatattaagcatagcacactttcaatttcattttccttcttttgaatttttatcccatctgtttaggggattttaaaaacttagtctttaaaatgacttctgataagcagtagctgacttttttaaaagaaaatgtaaccaaaaattgttactttattcctgtgaagtatattgtaaagataggacatggtataatgtattggagtgggttttggtggtgtttttgttttattctgttttcttaactgttacatgatggcatttaataaagcatctgtaacattctggattaatcttaagaagaactaactttttctttgggcaacaagctactctggaaataataattttccctatgttggttatttctcatggcagccttccactgcattttctttgtttgggtactttcttttcttcctgccgttcttagctttctatttttcaacttgagtttacaaaaggatgtgtattcaaagggtttcctacagttcccagtaccttgttaatcctgagaaattacccagtgagccaattctcacagtaaggtataaaaatagtcatccagaaagattacagaatgtggtaccactgtggttttaactaatggaagacttttaaaaccaagatggggagaagaaaacagcacaaatgttactatttccttcgatttttatctgcacaatctattttaggagagccttcaaatttaaaaaagtaatagagcttcaccactgctttattggatacactcaaagatcatcataattggggacaagaaagaaatcacctgcaaataaatcacaagaacagagcctacctgtgattactattgagcatatatccacaatgttcatttaaccaattttattccacaaatttagtccagcattttattgagtgctttaataagttctggtgtgtgaagttgggtggcttaacttctctaagtctgaatttccatattgtagaataaggaagtaattaacctttttttattttaataaactttattttcaagaacagttttagatttacagaaatactgtaaaaatagtacaaagaattcctgtatactctgttattaactctattattattaccttgtattattatggtacatttattataattaataactcaatattgagatgttgttaactaaattc

SEQ ID NO: 212359 - DNA, 814 bp, Homo sapiens
tcacacttctctctgcaaaaacaaatatagcacaggaagagtcacttgtgtagtttaagagacctcaatacttattgaccgctatatggaaaaaagttatttttgcaaggccggagactgccacagtgctgtggtcagctgaccaaactttctaaagagaaactacacttcctggtgaaccactaactcctacaccctctgaaaatttcatttttccctttattaccctactaaaattacttttagcaagtcaccaataatctccaacaggcatcaaaatcttaatagcttcaattcctatgaagtatttcatatagatgattcaacagacacaattttacatccctgtatgacttagcaatccactcgaaccattgtgatggctactatcaaaaaaccaaaataggctgggcacagtggctcataactataacccaagcactttgggaggccaaggcaggaggatcgcttgtgccacttgaggagttcaagaccagtctgggcaacacagcaaaacctcaactctataaaaaacaaaaaacaaaaaacaaaacaaaacaagccagaataacaggtattggcaaggatatggagaaactggaacccttgtgctctgttgtgaaatgtaaaatgatacagttactataggaaacagtacggtggttcctcaaaaagtaaaagtagaattatcatatcattcagcaattccatttttgggtatataccccaaagaacggaaagcagggtctcgaacagatatttgtacaaccatgttcacagcaggagcattcacaatagccaaaaggtggaagca

SEQ ID NO: 212360 - DNA, 168 bp, Homo sapiens
gtcagactggtctcgaactcctgacctcaggtgatcaacccgccttggcatcccaaggtgctgggattacaggcatgagccactgcgtccagctaaaaactcattttcaatgctatatataataatttggttcttataagagcagacagaagcctacttagtcctata

SEQ ID NO: 212361 - DNA, 398 bp, Homo sapiens
tctaaaaatgaattggttataaaggatgaagaaaggaaggaggaaagggagagagagaagcccttatagagtgggtgcatttcttgtatgtggggccactttgtaagaacaggatttttcaaactgggcccatactggtatgtgtgaaatcaatttagttggttatggccatttttttttaaaaggaaatatcagtgatcactatagtgtaagtatattgtttcgtgaaagccatcttagttatgtattatgtctgtatgtgtaagattgtgatataaaatgtatttctgtggttaaatattcaaagaaattggagaaccattgctacaaggggacagaggactccgtgtgagctctcctgccttccctgaataaacttacacaatttagtgctggga

SEQ ID NO: 212362 - DNA, 201 bp, Homo sapiens
gccttttctacagaggatatgatttgattttttttaaaagacatttatgtgataaccttaatataaagataaaagaagatcaggaggggctgggtgcagtgggtcatgcctgtaatcccagaactttaggaggccaaggagggcggatcacttgaggtcaggagttcgagaccagccctgtccaaaatggcgaaaccacgt

SEQ ID NO: 212363 - DNA, 442 bp, Homo sapiens
gcaggtaaggaagctgtttaaaacttagagttaacccactgtggatatgccttaaaactataggtaaaccactgtgggtatacctacagatacaaagccaaaaagataacatgaacattttgagactctgagtatagaaactgtaaattaccttggcatggttaacagtttactgcattaggctgataactttatctgacaatattgacattaaataatccttattgatctgatgtcatgctggggtcagtcttcacattggatatggcagcatttgatggagaaaatggattcagtgctgaagtttattccatttatataagattattattctctttagtttgtttaacattttggtttgacaataagtatcactttttagtgctaatactgtgtctttccaatactgttcaaatttctatagattttcttattaatattt

SEQ ID NO: 212364 - DNA, 275 bp, Homo sapiens
aatatatattgtgattattaaaaattgcttcatgagtgaaagaaaatataatgcactggctttataaggacatcatgaaatttgcagttaagtggatattggctttttatttttgtcttccttctggaatgagggttgaaaataaatttgtaattgggtcaggctcagtggctcactcctgtaatcccagtgctttgggaggctgagacaggaggaacacttgaggccaggagtttgagaccagcctggacaacatagagggaccctgtctctta

SEQ ID NO: 212365 - DNA, 339 bp, Homo sapiens
tgctgtgtaaggtaacatattcacaggtaccaggtgttagaaaagggacttctttgtgggaccattctacctaccatggcttcttattaaaatagatgaagaaatagcttgaggaaaaaggaagagttcaaagcactgtatagaagaggtggtcaacagaggtttcatttttgactttgataatagatcaaatgagtttcaaaataagaataactttggggctgggtgtggtggctcacacctgtaatcccagcaatttgggagaccaaggagggtgaatcacctagggtcaggagttcgagactagcctggccaacatggtgaaatcccgtctctact

SEQ ID NO: 212366 - DNA, 243 bp, Homo sapiens
ccaactttcagtcaagtgctgcatggagaaacaaaatgtgacattagtaaaactgaacaacattcagctctaaaaaggaatgaaatacttattaatgctaccacatgactaaatctcagaaacattttaataaatgaaggaggtcagattcaacggaataaatatcgtacgatttcatttacatgaaatgtctagaaagggtaaacttacagacagaggatatcacggtagcctgggatggga

SEQ ID NO: 212367 - DNA, 213 bp, Homo sapiens
gagccgagatcgggccactgcactccttcctttgcaacaagagcaaaactccatctcaaaaaaaaaaaaaaaaaaaaaaaaagtcttcagtggtctctcattgaaaatctaaacccctcagtcattcatggcattctgtgtctcggccctatcctactttctcactttatttcttgccatttcttttaacgagcctttcttgcacttgctttc

SEQ ID NO: 212368 - DNA, 347 bp, Homo sapiens
ttgataattagaacctaattcccatagagcacccatgtcataaatggtcctatctagccactggctgtattttggatatgaagtctgttctacagcaccagaaagcaagtgggctgtctgctgttgatcatgactagcagtctaaagcagttaataactggtcatattctactgaaatgaaagatgctattttcattgtatctatcaaccaaaccttagatgtcaaatatattttgagaaccagataaaaataatgacatgaaaggatctaaaaagaatccaagagggaaacaaaaaattgaaattcagtttcaaaatagtcaaactgattttagtaactagtgtaa

SEQ ID NO: 212369 - DNA, 194 bp, Homo sapiens
acctgaactttttgtgaacaggagaagctgacttcaactctgatagccgtggcaaccatacacttgaaatccaaccctgactagattcatagaaatgtggttaatataggcccagcagaatgtaatgtgtgatcgtctccatgaataaaataataaacacaagaaaataaattacaagtgaaatgcaaactgga

SEQ ID NO: 212370 - DNA, 430 bp, Homo sapiens
tgtatagaatgacatagggcagagtcaggacagccctgagcaccagctgtgtcgcttcaactccgttccttttttaaaatgttaattcactaggaagaccaatttctttaaacacctctcttgagacatgagaaagaagataaaagtagaagagttttgccacctctctttggaaccaagtgagaaagacaagtgttaatgatgagctgaaataactccccgtgtgagtgataactaacgtcctaaatcttggtcccagtgattacgactgaagcattcatatgatatgagctgggtatactctaggacaccgagttttttcatgaagttgaaactcttgcatgctgtcagggagtttgcgacagtctaggtactttaaacaaatgcgcttactaattgtgtaatgatgtcactgagcttggcaccccat

SEQ ID NO: 212371 - DNA, 305 bp, Homo sapiens
tgtatagaatgacatagggcagagtcaggacagccctgagcaccagctgtgtcgcttcaactccgttccttttttaaaatgttaattcactaggaagaccaatttctttaaacacctctcttgagacatgagaaagaagataaaagtagaagagttttgccacctctctttggaaccaagtgagaaagacaagtgttaatgatgagctgaaataactccccgtgtgagtgataactaacgtcctaaatcttggtcccagtgatttaacattttaaaaaaggaacggagttgaagcgacacaggca

SEQ ID NO: 212372 - DNA, 511 bp, Homo sapiens
cttcacaattgaggtgagcatcactaacccgtacggttttcttgaccaaaactttcagtgctctgtttttcccatctgtaaataatgttcatacatctaaatcctaggaggttgcagggacagtggcttagaaagtcaccacattctctaaaggagtgacagagaggatgaaagaagcatgctctataattaggttttattacatgctttttaaggttaattgaaggacttcccagcagcttccctagccactttttcaaatactgaaagcttccagaaagcagcagacaggtgttcctcacaatctgacacagacttcagttactgttgaaaagtgaaagagggctgggcgcggtggctcacacctataatcccaaagtgctgggattacaggcatgagccaccccatgcccagctggaattttttaacttaaaaaaaaaaagtttcagtgtttgtccttacccattatgtgcccagttagttctataccagtgaaagttccccccaaaa

SEQ ID NO: 212373 - DNA, 788 bp, Homo sapiens
ctggccagtgaaaatttttgtatgactgcagtccatagcattaacaagctaaaatcaataccatttatatatacaaacagcaaccagctagaagacataatggaaaataaattccaatttacagtagcagcaaaaacaactaaatacttaagaatgaaattaataagtactacacaatctacatggggaaaattaagaacacttttgaaagatacaaagcagacctgtacaaatgtaaaatgtgttactcttggataggatgagttaatataatactttctaatttaatttataaatttaacacaatcccaataaaaatatcagtaagcttttttacagcattagaaaagttgctactaatagaacttgctacgtaaagctcatagggaaaagtaaatatgtgagtataaccagcaaagctgtgaaaaggaaaaactatgagggcagctagcgttaccagatgtcaaaacatactataaagcctttacaagtaaagcaatgtgctactggtacatgaattgacaaactgatcagaggaatgactagaaagcccaaaaattgactcaagtacatacagaaatttactgtatggtaaaggcatctcaaatcactggtcagagatgaacttttgaattactagcactgggacaagtcgtagccatttataaaaagaatgagaccacaccatatacaaaaacaacctctaaatggattaaggatctaaatgtaaacaacaaaaccatgtaagtattagaagacattagtgaattcttctgtaatctcagcag

SEQ ID NO: 212374 - DNA, 629 bp, Homo sapiens
gagcgtccgctggctccaacggagaagatccgcgcaaggcttgtaatccgctgctggcaaggcttatttgacaaggaagttcctgcgctgcctgtcctctgagcatccagaggccccttttgagacttcggcagcattaaagtaaatccagcaacggggaggattcgcgtggacttgcttgtggagacaggaacctcagaaccagcctgggtcttccagcatctgcttatgtaacgtaggatttcagagctctctgccctctggttattttcggtatttaaaacactctcattcctaacaatcggaaaacgtcttggtgccacagttctttctcagtgtgtcttaaacattaagagaggattcaaccaacaagtggctaaaggatcagtctgaaattactaagaaatgcattcagagaaagaaaaacaagctcctttcgctgctgagtggtgactcacttcctagcccaagcctgatttttgccaccaaaggaattaaagcattttaaaagagaacctgagacttggggtgggagatacagtaccgggagggggaaaaggcgggaatgggaggggggagggatgggtaggctggaaataataaaggaacgaacttgtactgaatatgta

SEQ ID NO: 212375 - DNA, 1011 bp, Homo sapiens
agaaaggctatttaatatgatcccaattagagggaggaggatctgggatggttgttggaacatggcagacgggggagacccggagggaataaaccaccccaggatgctgtgtgaccacctgaccctctgcaaagcagcatcgtggcactctgttccctttcaaggttcccacagtgagtgccacccatttttaccacaatggcaacaggatttatgctcccacccactctcagttctgaactttctatggctttgcccctcattggtcataaaacacgtgtcacctgcctctctgacttggcttttcttgcaattacatggtttcctttgcgatcttcctggccagtggaagcagaaggatgcttttacagacagggtattatagatgggttggcagatgaggtgatttctgagggcctggcacaatgcccaaagggacgtgagtcagctctcagaggaggtttggtttttccttccaaattcatacaaacagcagtgaagtttaaaagatcctcaagtggattacaacccccattcatttggcagcagaggagcacaactgtcaaaaagtccaggtactttaagctgtggaagaggcacagagtcactctcaagttggacagggcttcaagctatttccaaaatttacattcggggcctttcgttccctttcgaggttcctttgaggaatgggtgaaagccacctcttcttgaccacagcagtgactggatttatttttgtcctgtcttcctcctccacattctcagttctcgaggctttttattgtttttggttttagccaggcttgggctggttgcttactctccggtgtgcagggcttctagaagtgttagccacagccagcgggaggcagccgatcacccatcccacctgctgagtgtcgcgggcagacatctgttgagctcctccccagcaccagccgcaagaatgtacctgatgtggtctttgtctgcaagagctctcagtttagagcagtctttttgagaaaa

SEQ ID NO: 212376 - DNA, 270 bp, Homo sapiens
cataaaaagagatgcaagggccataggagaatactagatcttaagtctgtggaactgcacagacccaaatgtatatttaatgtattttaaatgtttgtttaatgagaatagctggcacataatactttattattgaaatcatatttatatgtcacctcatcagaatgttacttctaaaaaaatgtgggcttcttgcgaagtcccacagtggagtgagtggattaaaataaccttgttaaataaagctgtagagccagacttactgggtac

SEQ ID NO: 212377 - DNA, 172 bp, Homo sapiens
cagacagtaaatgaaataggagaaaagaacagtaatgtgagagagaatgatttagttggggaggatactattattattatttttttttgagacggagtcttgctctgtcacccagcctggagtgcagtggctcgatctccgctcactgcaagctccgcctcccgggttcacg

SEQ ID NO: 212378 - DNA, 393 bp, Homo sapiens
ccctcccagctctctctcctcctgccatctcgtcccctgctgggctcctgctgggtgagtccatttgccggagggtccagagccggtgacatctttacccagggtaggtgacaaacgatggggtcagggcctgcagaagcaaatgtgagattacccattatctgagtttcccttctggaatattctgcaaagagtctcctgccacactgacctattctttcctcaacccaagacacagccgggatggaggcctggctgtccctggaatggatggcagatgcactcatacttggaagcttcgggaaagcctgtcaggctgagccaggtgtgagcaacaggccacggtgtctctgccccatcaaaagtggctgctgcttaaatctaagtcattat

SEQ ID NO: 212379 - DNA, 191 bp, Homo sapiens
tcaggccctacaccaccctacactcaagctctacacaactgcttcctgtaattccatgggtctgcatgctttggccacagtgttccctgtcatcttcctcccccactgactttacctggccatactaccctttcttaaaatttagcaaagcattacttacttaaggaagctttcctagattctctcacaca

SEQ ID NO: 212380 - DNA, 859 bp, Homo sapiens
  misc_feature (46)..(46): n is a, c, g, or t
  misc_feature (48)..(48): n is a, c, g, or t
  misc_feature (50)..(50): n is a, c, g, or t
  misc_feature (95)..(95): n is a, c, g, or t
  misc_feature (97)..(97): n is a, c, g, or t
  misc_feature (110)..(110): n is a, c, g, or t
  misc_feature (131)..(131): n is a, c, g, or t
  misc_feature (136)..(136): n is a, c, g, or t
  misc_feature (138)..(138): n is a, c, g, or t
  misc_feature (145)..(145): n is a, c, g, or t
  misc_feature (148)..(148): n is a, c, g, or t
  misc_feature (152)..(152): n is a, c, g, or t
  misc_feature (155)..(155): n is a, c, g, or t
  misc_feature (157)..(157): n is a, c, g, or t
  misc_feature (162)..(162): n is a, c, g, or t
  misc_feature (172)..(172): n is a, c, g, or t
  misc_feature (195)..(195): n is a, c, g, or t
  misc_feature (201)..(201): n is a, c, g, or t
  misc_feature (212)..(212): n is a, c, g, or t
  misc_feature (214)..(214): n is a, c, g, or t
  misc_feature (221)..(221): n is a, c, g, or t
  misc_feature (223)..(223): n is a, c, g, or t
  misc_feature (243)..(244): n is a, c, g, or t
  misc_feature (247)..(247): n is a, c, g, or t
  misc_feature (249)..(249): n is a, c, g, or t
  misc_feature (256)..(256): n is a, c, g, or t
  misc_feature (276)..(276): n is a, c, g, or t
  misc_feature (278)..(278): n is a, c, g, or t
  misc_feature (282)..(283): n is a, c, g, or t
  misc_feature (285)..(285): n is a, c, g, or t
  misc_feature (295)..(295): n is a, c, g, or t
  misc_feature (298)..(298): n is a, c, g, or t
  misc_feature (303)..(303): n is a, c, g, or t
  misc_feature (305)..(305): n is a, c, g, or t
  misc_feature (311)..(311): n is a, c, g, or t
  misc_feature (319)..(319): n is a, c, g, or t
  misc_feature (321)..(321): n is a, c, g, or t
  misc_feature (324)..(324): n is a, c, g, or t
  misc_feature (345)..(345): n is a, c, g, or t
  misc_feature (363)..(363): n is a, c, g, or t
  misc_feature (375)..(375): n is a, c, g, or t
  misc_feature (378)..(378): n is a, c, g, or t
  misc_feature (381)..(382): n is a, c, g, or t
  misc_feature (394)..(394): n is a, c, g, or t
  misc_feature (475)..(475): n is a, c, g, or t
  misc_feature (499)..(499): n is a, c, g, or t
  misc_feature (505)..(505): n is a, c, g, or t
  misc_feature (522)..(522): n is a, c, g, or t
  misc_feature (535)..(535): n is a, c, g, or t
  misc_feature (551)..(551): n is a, c, g, or t
  misc_feature (554)..(554): n is a, c, g, or t
tggcgggggcgcaaccagcgggccgaggcggcggcgccagcggccntntnaaatagcatccagagccggcgcggggcagggagtgggctgcagtnanagccggcggcggnagcggccggtccacggagganaattnancttaaanaantatnaananaaganaatgcaagcncatgaactgttccggtattttcnaatgcnaaaactggttnanttccganantacgtgcgtactcttccgannaanangcttatnggcttcggagcttttgcagnantcannancttctggtangcnacgananccaaanccctgaancngcnatgcgacctctccatgcagtnagtggaagtggcgggtantggtggtgcacnaanatnngcactacttganagcgacgagcccttggtgataatttcaaataaatgaatgtcacaacaattaaacagaaggctttccagaaggggaatacanggtgtcaaaataaatggccccttngtttanggctctcggaaaaccangaccaaaccctantgaactggcgtttcanaanaaacagggttgcagaattgtcggagtgcataggctcagcactgatccagaagggcttcaagactgccccagatcagttcattggcatctttgctcaaaatagacctgagtgggtgattattgaacaaggatgctttgcttattcgatggtgatcgttccactttatgatacccttggaaatgaagccatcacgtacatagtcaacaaagctgaactctctctggtttttgttgacaagccagagaaggccaaactcttattagagggtgtagaaaataagttaataccaggccttaaaatcatag

SEQ ID NO: 212381 - DNA, 145 bp, Homo sapiens
ttgcctagtatgaaaatatacccaataccaccttctttattgctgactgggaatgtcctctcaaagctcctaaaattcttgactgtctccttttttgcctttctctagctggactattttgattatacccttctgtcgtcttctc

SEQ ID NO: 212382 - DNA, 656 bp, Homo sapiens
caggaaagtggggatcgcgcagtgcgtactgcatggcactgttgccaggatcaagacaaggtacctaaagctcgaggttcgacgtatgtaagtttggtgacatgtgctaagccaaggagtatgtgaattgtgctcacctgagtgtaaacgcttgcaggcagatgattcacttcggtcactccatgcagccacacatgatggccacacaacaaacgtgtatccccaaatgagatctctaagccatggctctagcagaaggctgtcaggatagaattggtgccctggctctggatggagaatgaatgggcagggaaaagctcagaggccaggagatgagttaaaaggttgctgtcaaatcccttaagagaggatggagcctgaaccaagcaggggtcttggtggcaatggagagagaggacagaggcaatgaagagaagaaggctgatggccccggggaacagctctatgttgggggtggaaggaagagtattcaggaaggctcccaggcttctgtcagggccatgagataggaacccaggtggaggaagagatttgggctggggttgggaaaagaggcttgagatcagcttcagaagggctcaaatggaggtgcctgtggagtatccaggggagatggcccttagtgagctggtgtt

SEQ ID NO: 212383 - DNA, 377 bp, Homo sapiens
gaaagagaagaatctgatttttagagtttctacattatatgaaaatgtccaattgccaaaaaatgtaaaagacgtgagaagacacaagaaagtgtgactcataagagagggaaaaaatagtcaaaagaacctattttatgtatttaagaagtgatggaagccatgtctaaagaactaaacgaaagtgctttttttcctgaataaagaaatcagcaaagagataggaaatatttttaagtaccaaatagaaattctggagttgaaaagtatagtaactgaaatgaaagtaccttcatggactcaacagtatatttgagcaggcaaataaataatcagttaaatttaagatagattcatagagattatccaatctgata

SEQ ID NO: 212384 - DNA, 947 bp, Homo sapiens
ttcatctatttattcctagtgtattcagttaattgggagattgggaggttttttatgtcaagaaactaatggttatgcatattgatatttacagatttgcttatgtatgtatgtatgtatgtatgtatgtatgtatgtatgtatgtatttatttttgagacggattgcccaggctggagtgcagtggcattatctcagatcactgcaacctctgccttccaggttcaagccattctcccacctcagcctcccacgtggttggaactacaggcctgcgccaccaggcccggctaatttttgtgtattctgtagagatggggttttgccacgtttgctggactggtcttgaacttctgacctcaagtgatcctcccaccttggctgagccaccacacctggcccaaatttgctgatttttaaagtgattttgtccaatgcttttaagcctctaaacccagatattcgataaatgcttacttctagatcctttaaaatttgttgataattactaacaatgggataataataatgacaacagataccctttattgaatgactacttggagccagttcctgggatgagtatttgttatacattatatcattgattacacagaaaccttattattagaaactattattatcccaattgtaaggatggaatactgaataggatgcagttctgaatagcgagttgcccaagctcacaaagtatgtgatggagctagagattcaaacccaggcctctctggctccttctttggggtgggcttgctctgggaaaatatgctatttctaaggattgacactgggtacatttaaacttgtcatgcacacaaattcatgtatgattaagaaggaccctttgtcagacccctcactttcacttacgatctagagttactgtcattctacattcaccctggatgccctgtagacagatcagg

SEQ ID NO: 212385 - DNA, 516 bp, Homo sapiens
gctttctcattaggaaatgttcgcatgccctcagaaaaggtgtttggaatagaaagactccccggaatcagattaaaatgccagcagagttgagtatgttcttccccattttgagctagttaaatgagaactcacgccattctccacacagggaacttcttaggtaaaactattaaagccatggaaccatttacttagtgtggttattaaaatcctatggcactctggtgaacagtgctgtggactggcagccagaatatcttttccaattctagcccctatatttcctggatttatagaagcaaagcaactaggaaagctgtaggtcttctcacccattttgtagatatttgttgagtacccaatgttttaggcactggagtacaataataaaccagatctagcacagtccttgccttcacagttcagagtcatgaaggaaacaaaccagtaaaaaggcaattgtaacgtcatacccattagcatggccatgataaaagagagagagagaggagg

SEQ ID NO: 212386 - DNA, 431 bp, Homo sapiens
caggaagtatataatttgtataacacaactaactgttcatctttctgtgaagtgtactcacttcacagtggggacaggcttatggcagtagctgtacaactttgaaaatctgcctttgtctcttatttattttgaaatgggggtctttttaaactccttaaaacttgaagtaagtctcagagaccccaactaaaactaccaattaagtttgcacaggaaattttattttccaaatgtaattacagggcagatatttcaggatgtatatatgtgatagtattttaataatttgttgagccttaaggtacagtatcaaatactgctcattcctaccagtttggaggggaggggtggaaaagatagggaagcagaatggaatgacttattcaactttccaattctttaatatagcattgacctttgtaaaaaaa

SEQ ID NO: 212387 - DNA, 157 bp, Homo sapiens
acacccagccagatttagtgtaattcctaagggccctaggatttctggaatcataaagtcaccagctgcatttagaccctaacaggagagtcagcctgtcctttgaagctttgaagctaggcaatgatttctcctctctagctatgaaaatcctaga

SEQ ID NO: 212388 - DNA, 749 bp, Homo sapiens
catatgggagaatttgctgactattctctttatgttggtaaatgtttgaaaattttcacaactaaaaaaacaaaacaagtccgggcacactggcgcatgcctgtaatcccagcactttgggaggctgaggtgggtggattacctgaggtcagaagctcgagaccagcctggccaagatggagacaccccatgtctactaaaaatataaaaattagccaggcatgatgggtgggtgcctgtaatcccatctacttgggaggctgaggcaggagaatcacttaaaaccaagaggcagaggttgcagtgagccgagattgtgccattgcactccagcctgggcaacaagagcaagactccatctcaataaaacaaacaaacaaacaaaaaaacccctcacaacaatgctataagtataaccatcccatcttacagataatgaagctgaggccagtggaggttatggaacttgcctaaactcaaagtaagtaattggtaagatttgggtttcaggtttgggtctgtctcacttcaaatcctgtgtgtttacccatcaacacaaagaaaataaagaagcacgttatgttcacttctgctagagtagcagaaggaaagcctaaaaccttcctcagcccttttggaatcgacaatttaaggcgagacatggaacacgtataggcaatccccagagctgagccttaggaagcatggctgcagcacacacaggatgacttgaagaggggacaaagaga

SEQ ID NO: 212389 - DNA, 594 bp, Homo sapiens
actatctatgacatgacaagcttgattaatttaactgccctcttggaatctccaccactatcatgcaggggctggcctgtcaatgataggaatatttttacattgtgacacattatcataaatttaatattttagttactttggttaatgggaaagtaatgatgttaaaaaaatctttctaaaatataaaagtctacattcttcggtaaatacagtgtattagatataattaactctctgttcaaagattcaggatatttaattgcctcaggttttttttttaataaatttcacttttcatttgaaatcttttagccataaataatgcaggtgtttaagaattgagactgaatctggccgggtgcagtggctcatgcctgtaatcccagcactttgggaggccgaggcgggcatatcaggaggtcaggagatcaggagatcgagaccatcctggctaacacagtgaaaccccatctctactaaaaaaatatttaaaaattagccaggcatggtggcaggcgcctgtagtcccagctactcgggaggctgaggcaggagaatggcatgaacccggaagttggaggttgaagtgag

SEQ ID NO: 212390 - DNA, 686 bp, Homo sapiens
ctctacactcagtgatcaagcttcatgtatactttgcacttcagcagactttagataatacgattgataatattcataaataaaccatctcctataataactctctggtaaaactttacctctgaattaattcatttcaaaaacaattcatgctcattgctgggggagaaaagaaatgatacagaaacatatcagaaagtgtatttttgtctactaccaatgcttttcccaaatccttattagtgatatactgtggccagtttgatggttttccttacaaatctttatatgtgcatatctgtgtgtgtatttaacgtgctatcttattctgttataaataacatcacactatataactttttttcatacttaataaaccttgggaaaatgtttatgtcagtatatatagagtttacttttgaataactgatgttttttaagttactgtctaaaaatacaagtaataggttgggtggtcagataacacagataatactaaaagtgtttaagaactataaagtctcactcctctgtgataactactgtcaacaaaaagtaccttttgggctaggtgaggcggctcatgcctgtaatcccagcagtttgggaggctgaggcgggtggatggcttgagtccaggagtttgagacctgcctaggcaacacggtgaaactctgcctctacaa

SEQ ID NO: 212391 - DNA, 292 bp, Homo sapiens
ttagcatttgccgtgaatccctggtaaaagcctgtaattagctggtaagctggactttctgaacacttgttttcctgtgtgggaggaggatttgtctgcaattttctatcaggtggtttctgcagctgaagtttaaaaataaaaaatgaaaagaggggtaaaattgcttttcaccgcccaagatagcaacacacagcccagagggcttccaggaaattcaggaaggtttactgaaccaaagtaaagtggagctggccactgaggtgattgggcttttactggatgttgggaa

SEQ ID NO: 212392 - DNA, 461 bp, Homo sapiens
tctgagaattagggttggccaaatcattggagacatttgccaatcacattcagattaatttctggttttcctatttggtttactgttagacagctttcttccaaaaagtcttaattatttatccttacttatatccttgccagcacttggtgttactgtacttaagttttggctaggccaatgggcaaaaatggtatcttcttgtttgaatttacatgctcctgatttcagccatgcatggcatctttttcaatatttattgcccatttgaatctcttctgtaaatttcctgtttcacatattttctgtgtttttctattgagttatttttcttagtgatttatgttaggtatttatttgtatttttgatatctaggccagttagcttagtagacatctcgaaaatattttggttgtgcacccctacaaataaaaagtttttgagtatataccctcaagta

SEQ ID NO: 212393 - DNA, 453 bp, Homo sapiens
taggaggcagaccccaccatcacccccattctgcaaagaacggagccgagaaagagagagaaacggctgcccacggccgggaagagcaggaattggaaccagggtttgggtccagaggaggagctctcaccacagcgctgctggaggcctggggcccccggaactgaggatatatcatgaataatttcaagccccttgggtttatctaggtacagggccatcctgaagacagacgccccactctctagaagccattactcagtggggcaaaggacgtgggctttgatgggagacacacaggcggctgtgagagcccagcagaaacaattccgctcccacggctcccgtccatgccctcccactgctacctcagtggctggctcccatctccttcaaacatcgaataaatgcctccctcactgggggataccacactgcccccttcccttacca

SEQ ID NO: 212394 - DNA, 499 bp, Homo sapiens
tgaccacagttaacaacaatgtattatatatttcaaaatagtcagaacagaggacttagaatgttcccaacatttagaaatgatatacttccatttcatatgaatattatataataaacaatatatatagtaataattaactacttaacagatttctttagagtacctttacataatgtaaatttgtgagcattaaaaacaacctacctaggcaacatagggagactctgtctctacaaatatttaaaaaattagccaggcatggcgcatgcacctgtggtcccagctacttgggctgctgaggcgggaagatcccttcagcctgagagatcaaggctgcagtgagccatggtggtgccacttacactccagccttcatgacagagtgcaatcctacctcaaaaacaaacaaaaaaaatctaccagctaagtataaaaagccaagtcaaatatttcagatgtcaagaaattaatacacaatagccgttagtatttctat

SEQ ID NO: 212395 - DNA, 162 bp, Homo sapiens
ttcagctgcaatccctgaaattgccttcattgctctacttgctctgaacgtaatttaaaaggcctttgggactctctaatactttttgcaatgctctactcatcaggacgtctcacgagccttgtaggtctttggtgtttgtcttagtatacgtgtttgaga

SEQ ID NO: 212396 - DNA, 830 bp, Homo sapiens
ggaggatgaggctgcagtgagctgtgattccaccactgtactctagcctggatgacaaagtgagaccctgtctcaaaaaagaaaagaaaaataaagactacagttttgaatttagatagctaggagaatagtagtgtaattaaagaaattcaggaactcaagtaaaatatgaatacaattttggatccattgcatttgaaatgacaataagacttccaagtgaaaaatacttttgaatatgtgatactgaataaaggtgataatttgtaactattggagcagatgagattcccaaatggtgaaatatgaagacagaaatataattttaaggacagaactttgaagtccttagttagagaatgggaggtgaaaatagagtcagggaataacagaaataaactgttcaaggtggacaatcacctgtagggctttccacgtggagaatgtgccttgctttgtttcccggacttgttcctaaacttagggggaagaattcagtcttttatcattaagtatgttagctgtaggttttttataggtgccctttaaagggttgaagaagtgcccttctattgctagtttactgagggattctgcagtgaatgaatgttataaactgtttttttcttcatcaccgcgttcccacatggacgccttctcagacctcgagtcgcacccaatgacgaatcctagggtcgaccacctcggacaggcaaaaaccccacaagggggggcaaatggaaaaaaatcaccaccaggagaggaacccccggcccccgtaagcggaaacgagcagaacaccgcaaccgggcacgcaccagcgcgaccgc

SEQ ID NO: 212397 - DNA, 524 bp, Homo sapiens
tattttttttgagatggagtctctctcttgccaggctggagtgcagtggtgcaatctcagctcactgccacctctgtctcccgggttaaagtgattctcctgcctcagcctcccgagtagctgggactacaggcatgcgccaccatgcccagataatttttgtatttttagtagagacagggtttcaccatgttggccaggatggtcttgagctcctggccttatgatccacccgcctcggcctcccaaagttgctgggattacaggcgtgaggcaccatgcctggccaaaaaatgtcttttttaggaattagaaaggcagttttgtatggactctattgcaactcatgaaaaatatttgaaaatgcttctgttattagttaactttgtttaatgtttattatctgcaatgcagttaaaactcaatattttaaaaagaaagtaaacatatggtctttatcctcatgtattttatctgtgaaaataagtgtgcttaacttctcaactcaaatattaaactgtagt

SEQ ID NO: 212398 - DNA, 416 bp, Homo sapiens
cacttgttatcatactttggacttcttagcatggttcaggaggtttatttcaagtatcaacctctcctacacacacacacgcacaccacctgatgttcctcacagtgagtgtctatcatggctgtaaacgtgttcctgcccaaggaagaggatctctgtaacccctctcatacttcctattgcccaggacactggacctgcaatgcctcctatgagactacatacagtgggcgtgttatggatggctgaagcacagcacggtactgttgtaacaagaaacagcctcttctgtaagggacaaattgccgagagtgcagcttttggtttgagtaaaacagaaaaggagaaaattgacccacatgtgccaataaaaaagaacatcatttaaataaaagacccgtattaaccatttaaaa

SEQ ID NO: 212399 - DNA, 374 bp, Homo sapiens
aactcccggggattaaggcttgcttgcaaatagtattttaaaatcataaccattctcagtatacaactgtctgcatcattttctcatttaatcatctttcatcctaaagaggtattaacctccttaaaatgcctcactgccctacaaactagagatctagggaggaggggctccctaaacaaatttggaaaatggagttccttaggccttattactcatgaaacagattctaacattcctgcaatgaagaggatgggtatggctttttctttttagtctcactctgtcacccatgctggagagcagtggtgggatcatagcttactgtagccttgaactcccaggcacaggtgatccccccgggaagcctccca

SEQ ID NO: 212400 - DNA, 747 bp, Homo sapiens
catgtacaaatccgcttaacagatcgccttctttaaaatgggacatcttatctttcctgaaatatatatattttttgagacggagtctcgctctgtcacctaggctggagtgcagtggcaccatcttggctcactgcaacctctgcctcccgggttcaagcaattctcctgcctcagcctcctgagtagctgggattacaggcatgcgccaccacacctggctaatttcttatatttttggtagagatggggtttcaccacgttggccaagctggtcttgagtatctgacctcaagtgaggtctgcccgccttggcctcccaactgctgggattacaggcgtgagccatcttgctcggctaagaggaattttcttccatgagagatattatagtatgtttttgttttcaggcttattggcattattcagaggaaatatgagaaatggatgatgtgagagagaaaggagatagttgcctaaatgaagaggttgaaaggagagatcgtttatatattgtgataggaaggcagtcagactataggaacagacacaggtaggaaggtaggtagatatatggtgggcacttgtggcacttttctgtttgttactgcttcctatctgactactgctgtgatcagataggaagcaaaattagggacaatgaagaaaggggagatgggatgaaatagttttttaggagagtggtagagggaatagattagggaagtgtattggcagcaccaaggg

SEQ ID NO: 212401 - DNA, 531 bp, Homo sapiens
caccaggtgatgataatttggactgcaagttcatgcatggcttcattctttacctgagaatatagtcctttggagtctcagtttactgtacacagggagatggtatcttattacactaaactttgggtgggccctaggacctgatttctgatccattcccttatgataccatcagaaccaaagttcatatattcttgtgttggcaaatgttttcagggcaaaaatgacttttgtcttctacttgactgtccgggttcccacttttctttcagttttagcctagggattactttcttggcagcttttcaatgcttttagtgattttttttaaaaaaaacaaactatcattacttagttgctttcattgtagaggttgatctgaataacataactgtttctagaaatagacatcattattaaagaaagtaaattaagattagtaatctggtagaaatgactgtttagagggatgttttgatattttcatatatttgatgactttctcaataaatctctgaaatataatgtaaa

SEQ ID NO: 212402 - DNA, 467 bp, Homo sapiens
acaggatgtccagctgccctcacttatcgtgcccctgggcatttgaggggttcagagagagaaacgcagtaacttattaccctcacatgatatattttcactttcttctcctgattgtcagctcaattagataagggaccttgtgttttattccgttgtaccccgtgcctgacacatggtagctgctggatagagatttcttcgatgattgattataaaacacactaatttagagcttactatgttataagatctccatcttcagtgactcacttattcctcacaagaagcctaggaggtaaggttttccaataaggagagccaggcaccccataatgaacgtgcacggtgtcacattcccagcaagtgccgaagctggggtcagattcaggcaacctggcccagtgccctcacagttcatccggcctccacatggccattttgtccatgaataaatgaataagtga

SEQ ID NO: 212403 - DNA, 467 bp, Homo sapiens
cttaacatataaggttaatatgttaccttacatggcaaaagggactttgcaaatgtgactaaagctatggactttgaagtgggaagattatcctggattatcagaatgggactaatgtaacctaatttaatttctcaattttcttaatttgtttctctagccctaccctgtattgacttcttatactctatgttcaaaggtgacaactcttcatgagatgcatcaactgtgttcctcgaactcaggcaggttgttgaagatcacaaggtactagtggtataagaggatgggaggagagtaaagttaaatcatttattcctctggctcctttcctttctggctatgggtttgcagtggttttgtttttctctggccttctcctgaaccatttgttgaaaagactgctctttcccccattgaattattgtattcaaaatatttgaataaaactttaactctgtagaaaa

SEQ ID NO: 212404 - DNA, 438 bp, Homo sapiens
caggctgatgaccagtttccaaataatcagtgtatactacagtgcaacaaaattacaccaattccaatttatctttgctttgtgattcagaagtgcctcagggcattatattgactttttaattgtgtatggaagttaccattaatagtgttccagtgactgcttggaaacaaagagttcattgtattgatttatttatttttgctaatattctttatggtggtttttacagtgtcaatcacctagacaatctggagacttgttttcttttatatttgatttacttcattagtagtagcagtagttattagtatttgctttttgaccatgtttaaactgctataggagaaactctggtaaaacatactcaagtaataacattattccaaaaaataaagtgctgttagaattcaataaactgacgtttactaaaactaa

SEQ ID NO: 212405 - DNA, 469 bp, Homo sapiens
aaaaaaaaagaaaaggaaattttaatgttaatttaagaaccatggaggtagcagtgtgccaaccagcttcttgctaccttggtctggacctaagaatctataggcagagccctgctggcattctgtaggctgctgttggaattttgtctgaatctccttaattagaattcttctgtagctggttttgtggtacctgacagaaacccagagacctggcaagttaggacaatgcaaaactctctaaccctattacaagaaaaactctcaggagagaatctttctccctcttctgcatatcgaaatatcatcatggaaatcatggctctgacactgtagagaccagaaagtctaaaattctcttatgctttttgatgaccatactttttagaatactgtttttggggaaataaggggaagtaggaagagccatttttagtttattattttattttttaaatcatctctccta

SEQ ID NO: 212406 - DNA, 432 bp, Homo sapiens
tcgttggtgttcttaaattattttcaggtcctctagaaaataagataattatagcaaaaaataaaattgttttgaaattttgataaatatataaatgtatagaacctatttttttcaatgaaagaaaatgggaaacattttttaacattgctagattggcagtgctttcttttattatttcaagttatggaaatttgcacagttgaaaactggggataaattctacaaaagtgcaagaaaacaattcaaattagccagagccctgctaaaacttttaatgtaaaatttatttatttgcactgagctgttttaccttctttaaggccattgggacctctcaatgatgcatatgtttcatacatcttgtattttccaggtagaagtcagacttggttaataccaataaatacttctgtaatcctaaaaaatcag

SEQ ID NO: 212407 - DNA, 366 bp, Homo sapiens
ccttggtgagggtcccagcactgcgggcagccaagagctctggcagtgtgcggtcccagacacccaagaggcctccccacaggcgggtggcacgcccaccacccggattcctagggtcttccacctccgaccacagcccttgtctgccgtccagcaaggagcaggccctgctggtgttcccgggttccccggttgtgcgccccaccccaggcccctttcccatggctgcctgtcccgcggctcagggcagccctccatgtacagtgctgcctgcacagagcctgtggcatgcaggccccaaggccgtggggagagtccggggtcactgcagacccgagccccctttcttccatggagtcaggcctg

SEQ ID NO: 212408 - DNA, 376 bp, Homo sapiens
ctcagcctcagggctgatccaccatcctggcctcactcatcttcccccaaggggagcgttgaatgccgtccacctttgcctgcttgattcctagttttccttgagtctccagctgactggcattccctgtccagccaccaccttctactggtgcctgccacagctaccatctcacttctgtctgtgttacttaaaattcatcctgcttccactgaagctggggatggcgggggcagcagggaccgcatgagaccaaactaactgatgtgaggacgagtgggttcaaacaccagcttccaaccgcgggagccgggcagtctccctcctgccatgtcctcgtttgtaaaataaactgcttcagttgttgtgagatcaa

SEQ ID NO: 212409 - DNA, 401 bp, Homo sapiens
agaggtgagtttttctctttatagtttaagttttaatggctaaaccatactgaattgttccattaagtaagcttattatagtaagctatatttatcatctgcatgttagtacttgagaatttttctatcccttttaatgactgttgaattaatgggaagcaatgcaggttctggtttgtgtcattcttagactaattctatctttaagctgtcagtgaaaattgaaatgttgcagaccttactgcacaaaaagcacattttcatacttaatttgggatttatatgatagtaagggctggacttcattccatttttcagatctcattcacatgttttgctgcagtgcttgttttattcatcaacattacttaaattcactaggagaaggttcatgccatata

SEQ ID NO: 212410 - DNA, 398 bp, Homo sapiens
ataccctggggcctgggcaaagggcagattcctgctcaaaactgctcaaaatgtcagggtgggacctgaggttctgcatttctgacaagctcccaggtgatggtggtgtgcctgggggaaccacattctgccatctactatccagggtggacaaaaccacaaggcaggggagtttcctggtcacccaggggtcaggacgtggggacagagatctagcctggtcagaggctcccaggcccccattcaggctttgaagtctcagagccccagacccgcccatggcactgggagaccagtgtcaaccagaggggctgtcatgagtgctaagacctggggtcatctgtaccaccccagggcagggaagcaccagcccagatataaaatgattccaagacagt

SEQ ID NO: 212411 - DNA, 420 bp, Homo sapiens
acatattttttcccagtgcctccagaaagaacgcagccctactgacaccttggttttggcctggtgagaccaactttggacttttcacttccaaaactgtttaaagaaaaaagtctacagttccagttagtctacttttgtaacaggacctgacaactccactctacttccaatcctgaaagactacaggaaaaactagcccaagcgactgagctggggggtcctagtcatcggtagcatgggtattttgctttggaatattatcaaatagcggggggaccagcacagtggacttagtgtcaagtctaggatttgattcttagctaacaaaacaagtttcctctctgagttgtgacgattaaatgcaataaaatggaaaagtgcccagcagtgatgggctttcaggagatgccatagaca

SEQ ID NO: 212412 - DNA, 454 bp, Homo sapiens
acatattttttcccagtgcctccagaaagaacgcagccctactgacaccttggttttggcctggtgagaccaactttggacttttcacttccaaaactgtttaaagaaaaaagtctacagttccagttagtctacttttgtaacaggacctgacaactccactctacttccaatcctgaaagactacaggaaaaactagcccaagcgactgagctggggggtcctagtcatcggtagcatggaaaacgaagagtgctctggacagtgggtggagaagattcaagtacatcttcgttgctgacaatatgctctcctatcttttgtaagagtacgcaatttaaatttctaaaaattcattacaatacaaagcaaaacaatccctcatagatttataatcaaactaatatgccacttagaaaagatttgaaataaatgcaaatacctaggtacaaaa

SEQ ID NO: 212413 - DNA, 310 bp, Homo sapiens
acatattttttcccagtgcctccagaaagaacgcagccctactgacaccttggttttggcctggtgagaccaactttggacttttcacttccaaaactaaaacgaagagtgctctggacagtgggtggagaagattcaagtacatcttcgttgctgacaatatgctctcctatcttttgtaagagtacgcaatttaaatttctaaaaattcattacaatacaaagcaaaacaatccctcatagatttataatcaaactaatatgccacttagaaaagatttgaaataaatgcaaatacctaggtacaaaa

SEQ ID NO: 212414 - DNA, 1209 bp, Homo sapiens
atttgtaggcatctgtataaaacaaaatacttattgatcatctactaagcattataccaggctttataacttcctcattcttcttctaagtgttcagtgacttgtggctatttctctaattaaattgaaactcctggtgagaaactttaaggctctccaacaagcaatgtatgttccctcactgtaacttctgtcccagccatacaaactccttctcagttcaccttctctcaagtccaggctttcttcagtgttacttgtgtacctaaaatatgcctatagttcacctcacctccatcctacgtcctatcactgatacaaggggaaatatatatatataatacataaagtcttccttatgatgacttcaaaagaccaagggagggtgtatggttttttttcttacctcaatattcaaatccctgaggttgtcacaaacaatatcaaatcatgattaaataatgatttaattttcttttgtaagttcttaaaattagtatattaatgataatctgcttgaaatcaagccttattgctcttcccatggaattcgaatgatgacaataaattataaacccatcactgtattttcttcattctgtaacatgtcaagtatcagcttaataaattctctgggctacatttgaagtttcttggttaaaaatcagagatccaatgtatcttaaagttaaatttttagatatctaaaaaacatagcatactgcatctgtaaaaatggcatgctgaactttcacaaattattcagaaacaaattttatttagagaaatttaagctaaaaatgcagcaaaccagaaatcagttactgaatgcttcacaatccccagaaaatgagaattatgtaagaaaggaataaaggcaaattttacattgaccctcacagagcaaaattacaggagttctgttctctttgattactaactcagaaataatttatttcaagcttttagcactgaagatgttagttcaaaaaccacatgtttattcttatgcctgtgttgataaaactttgctaaatattttatatgtattaaaaatggagaatgaaagagatgtgtttcaagagccttttacagataaatcctaacaatcaaataggaaatagaacattaatgtgaataaaatgctctggcaaggtaggaagaaatgaataactggaagtagagagtccttagcattacaaagtggta

SEQ ID NO: 212415 - DNA, 1084 bp, Homo sapiens
ttcttcattgcaatattgatttaactccggacaaaaaagtactccttttcgtgagttttgtttgcctgagtctctctgaacttgggcaggtttcacttggcaaattacagtggtgcagtgggaggcagaggttggacatgagggaatggaaatttgcaattagacaggcatgcttagggtagttaattttatgaaatggaggcaaaagtaaaagcataatttggtggatcaacggaaagccaagtttgatggttttacgttaaaaagtgataagatgtctgtttttgtccatcaaggctccattttcagctcagacaacaataaagcagttgctagctctacaaaagagggcaaaatagaacccgtgtcctaactggagaacatggggtggccatgtgcggaaagctgcatgtaacctgtggctagagaatagtgtctggcatcaagcaagtacaacaagtaggcaaaagggataaaaagttacaggatgaaccattattagtggggtattttgaaggcaaaatttccttgtactgaagatactcaatgtaccaaaaaaggcaacttatttttaaagaagatagtaataaaggtcccgaatgaaggaactacaaccactgtaggcaagtgtggaacaagcacagtgtggataagggtctctactagtttcttcagtggaactggccctttaataaagcaatgcaacggggtggtctatgcatgtgttgtccaatagccaccagccacctgtggctatttaaatttaaattaattaaaatgagatgaaataaaatattctattcctcaagcatatttaccacattttaagggctcaattactacacgtgcccagggcctagcatactgggcagcacagacaaatcagttccattattgtagaaagttctattagacagcactgaaagagcattgtcttgggagcctgggagtgaatcatgagtctgcaacttagtaatggagtggccactgtttcctcatatttaaaatagggctaggtgatatagtacctacctcctggagctattatgaggattaaataaatgagttatttttaaataagatg

SEQ ID NO: 212416 - DNA, 470 bp, Homo sapiens
acaaattaagagcattgagaagtagggtacgactgtcacctgtggagtcttgaattcagagttgattttcttgtctgccgatttttttcaataccaagataagtgtcacaaatagcaccctttctcagaggatttccaggattcgaataacagacacaaacttaataaaatgacagtagtgcagcataatcaggaagcccacctgccgtcagatcacttgtttgcagtagataccgtgtgatctcaggagcagagtccacatctcttccatttattttctaacataaaattcttggttttttcttaaagcgtagatctggaaaggtgtgcaaaaatcaccttccttgatggactgcattacaagtctcctccaatcttgttaactggatatgcatcctcctagagttgagaacacatggtcagaggaaaatcaaatgtatcattgtttgaattcacttattttttgattc

SEQ ID NO: 212417 - DNA, 511 bp, Homo sapiens
tcaaagaatgagttagggaggatatctctccaccttgatttttttggaatagtttcagtaagattggtatcagctcttctaccaacatctagtaaaatctggctatgaatccttttggttcagggctttttgtggttggtagattttattatgtattcaacgttataactcgttattggtctgttcaggattttgatttcttcctggttcactcttggaaggctgtgtgcttccagatgtttatctatttcctctaaattttctagtttgtgcacataaaaatgtccacagtagtctctaaggatctttgtatttctatggtatccactgtaatgacatctttgccatttttgtgcttatttgaatcttctctcttttcttggttcatctagctggcagtctatcaattttgtttaccctttagaaggacaaacagaactttccgttttgttgattctgtgtgtaattttttggtctcaattctgtttagttctgcacaaatctttgttat

SEQ ID NO: 212418 - DNA, 542 bp, Homo sapiens
gattaaagtgacataactaaatgcattatagcttttatttttccttcaaaaaatatttgatctaagtgcttattttttaagccaattgattagagctttttaaatataaacattatacacataatacatatgactacacagacagacagaagatgcagcagttataagggttttttgtttgtttgtttatcaatctccatattagattaccagcctcagggtgaagcccttaaagagaagggctaggaaatcatgcagtttctagggcctaataaacaggcatacctggtatacaaaaacagattttgagaggaatctatttacctccaattcctggtgttccatgaggaaaatagagatttctcccaaaatggaatccatggcgtcttttcttttttccaaggagtcccaggccattagaagttgtcctagggctttttatgcatgcattaagagtggcaagaaacagtggagaaaagtaatttagttgactgagggaaaaaaaaagaagaaaagaaaacctttccagaaaaacaagatcc

SEQ ID NO: 212419 - DNA, 343 bp, Homo sapiens
cacgtatgtctatatatataattatatatatttacataatatatatctatgtatataatttttttaagtagaaataagcagcgaaacagtgttttaacttctaccgaatggctgtcatttcttagttttaagacttgtagttcggagggaggtggaatgagaaggctgaaaattttacatgagctctgatttaaggatattagaaaagtcatttctaagtgtggcggtccacgcctgtaatcccaaccaacactttgggaggctgaggtggaaagactgcttcagcccaggagttcgagaccaacccaggagttcaagacgatagtcggaccccatctctaca

SEQ ID NO: 212420 - DNA, 678 bp, Homo sapiens
ctctttgtctagcaaattaaaacctaataccttagaccaggattccagtaccaactctccactaagacttctgtaccagacacctactcatctataagattctcaccttctcatttttaaacatccgtattgctcttttccttacttcttcccgtcaaaaaaaatcctaccgtcaaaaaaaatcctaccagttcaaggttattttttgttaagtaagtcagaatagcacttaccccttctttgactaggaaggggcaaaaaggaactctttacaattttggatatcttttgtatcttgacctgagtgggagttagaaggatatgtgtttgaatgtgcatatagacagatatataggtacaaatatatgtaaaaatacattgaggccgggcacagtggctcacgcctgtaatcccagcactttgggaggccgaagcaggtgaactcagtactaggcctttcaaacaccctagaaacaaataagtggtgggaaggctgattcagccctgattctagcctaaaagcagtttatcatttagaaacccatacttgctaatctggcctctcagtgcaactgtttattttactgacctctccagagtcaggctaactccaaaaaatattttgacactgacttagagcccaagtggtagttttcatctctctggaggcaagctttg

SEQ ID NO: 212421 - DNA, 544 bp, Homo sapiens
atacattcaataaatagttgttttttgatcgattgagaaacataccttctgttgctgtgtcttttatgctgaacacccagggggatccatacccttccagactagaagtcctggtgatgttggttttgattgccatagtggaaaaaaactttgaactcaatgattaaccatttgtgtggactttgtcaccatgactcagtgtgtgtctctgtgtgtgtgtgtgtgtgtgtgtgtgtatgttttgggtttacatgcacatagattggtatagttggctttggtgtatatgaatgattctgtatcttattattctgtcacaataatttgtcaaatacatgcattttaatatttagcttatactttgaaaattatttatgcctgttatatttctgaaaaaaatctgtgtaaatgtatctatgattcttgggaaattactgaataactagcttgttaaattctgatgactaatccttatcttttagaattcataacagttaaattatatatcaagacctaagcttacaaaagaaatgtcaagattttg

SEQ ID NO: 212422 - DNA, 393 bp, Homo sapiens
taccccttaaatcttcatcttccatcttcttcacagttttactactctgagtgattttattcatgctcatggctttgtatatggttataatatgaaaccctaaagctgtatcttgaaaaagtggcctagaccacttttctgggccacgagaaccatatgtcccatcccactcttggcatatagactcctcttttaatgtaattagtattctgaacttattcaacgtgagttatcttaacttcattttcccaatcttgaagtttctgataattaaaaaatatattggcaatggacacagacttgtttgatgtttttataatcatcacacactagttatacaacccaaagcaaattatttaacctacttttattagttttctactgctgcataac

SEQ ID NO: 212423 - DNA, 290 bp, Homo sapiens
aaaaagccaaaggcagatagagctaaggcctctgaaattttctaaaataaccaaaaggttattttaaaggggctttaaaattatctggggaacaagaaggacaagaaaaggataaagtctcattggaaccaatagtgctatgtttatagataacagaatgtatatctgttcaggtattatcttgctataatctttatcaaagagtggtttttcatttggaagggtagaaaatgtatttgaatttgtaatagttaaaaagaacacctgaattgataatactaaataataaa

SEQ ID NO: 212424 - DNA, 949 bp, Homo sapiens
taatcctcgtcgtctctccccagttgacccagatttggggctgtaattcagtacagctgactcagaggggctctgggtcccttgagctgaggtctgtggtcaggctccactctggacacactctaagaccttggcaaatctggttgccatggaactcaggatgtcagctcttccctgtccacacacttgatctgtgctgctttcccctcagagctgcttccataccccctcccatcatatcatatccccagacccatccttccagcccaggtcagcccccacacccaccccccatcaccctgcacctaccactttcccaaacaacaagggtcagtcacctgtagagttttcaagtcatttcaacaaaattacagcccacttggtaaaaatgtgtaggtcagaaaacatacatgtgccatgtagagcatttcatgacagcaatctacactataccttatacttatcattggaaggtacaacttcttgctttttttccccaaaatcttattttctggcaaataaggcatttaaaacacacatctaagagacagaaaatagactggtggttgcttagagctagggggatagaggaattagaggatgggacataaagtgtgtagggattcttaggatgatgaaaatgaaaatattctaaagtatattgtggtaattattgaacaactctctgatacactaaaagccattgaattgcatactttaaatgggtgaattgtatggtgtgtgaattatatctcaatagagctgttaccaaacacacacacacacacacacacacgagtgacatcctcctggcctcttctgttgtatgtgtcagcccatagatcacccacaatggcaaaagttgtccttacacagccacttgaccccagactccaatactgttgaaccactttcaacaaatttagagcaacagtttttagaagaaaaa

SEQ ID NO: 212425 - DNA, 329 bp, Homo sapiens
ctacttgcggggctgagatgggtggatcgcttgaacacaggaggttaaggctgcagtgagccgagatcgtgccactgcacactagcctgggcggcgggagtgagaccgtgtctcaaaaacaacaacaacaacaacaacaacaaaaaacaaaaaatggaccgaggttggggtggcaaggctgggctggaatggaggctgaggacaggccctggcagcgcccagggggtagagggcgtgcagcaggaagcaagggccaccctcagggatgggggactgggcctggcagctgccgaggggtaggcaggatgcatgtggagagccacgtgggg

SEQ ID NO: 212426 - DNA, 211 bp, Homo sapiens
ttcactgatcttttgtatggatttttgcatctcaagttcattcaattctgctctgattttggttatttctttccttctgttagttttggggttagtttgttcttgtttttctagttcccctaggtgtgatgttagattgctaatttgagatctttataactttttgagatagatgtttatcactacaaactctactcttattactgctttt

SEQ ID NO: 212427 - DNA, 541 bp, Homo sapiens
ccaggttatttaatggaatcaagcctccaaaggaatgaaaacattagccagaaagtgctctagcaacagggcagccccctctctctactccgacttcccttctttccttagcaccctccatctgcacaacacaacctggctctctctggctcaggaggtctccgtggtgccatctggtctgttctcagacatgaaggactacaagggaccacaggggtctgttctcagacctgacccacttcctgctggtcaggagtgggagcatggatggtgatcagacgccttaagggggacatccagagagaagcgagacaatctaaccactgttagtctatcactggactccagcgccatgccaccctacacccagctccatgccaccctacatccagctgtgttgccagttctcctgcagctctgggagggaggaaacttctcctctggggctgaaagagctgtgtgggtaaattccaggactcttaaaaataatctggtctatataagttttccacttaaatataaactccacgaaggcaggaac

SEQ ID NO: 212428 - DNA, 156 bp, Homo sapiens
gcattcctcagataaagtttcttttctttctcaatttctatacagagatccctcaagttgcaggaaatatggacaggtactcaggccttttgatttccagcacacaagtttctatacccttgccaacagttagctgcctgatcttttctaaaaggg

SEQ ID NO: 212429 - DNA, 1039 bp, Homo sapiens
tgcaaccggagcctcggaccggccacatccaggacaaatcccagccagaggcgcagccccagcaagaggaggtgtcctgacaggctgacgagggggccacactcacgcagtcaccccagaaggccaagtgtgacagccaagtgtccagcctgacccagagatgatgggcaaaccaaactcctactgaggtgtcctggaaaggcctggaaggtgcactgcccagtgggtctgctgaattttaaacaatcgccgttttcagtcccagatcttgctctgccttggggttcaaaggttaaccagaacttttagaccccacaatgacagtatttaatgcttcaagtgctggccttaatttggggtggggtggggggtggagaatgtatagttgcatgcttgatagggttttaactgggttcattccttgagatcacttaagcctcacaacagtgaatgaagcacatagcattcttcagttttgcgcatatgaaaaccgaaggtgtggggagaggccccctcaagtgtctggctgaaggtcatacagctaagaagagaatagagcaaaattttgcacagatgagtctggtgttagaatctctctgctctttttattacattccattgcccgtaactattgcgtcactccacctgcctaaagcagacatgggtgcgcaaatggtcgcaaagcttctttgttgtaaggttaagtagcggcacagcattgacaaagtccctattgagagctttgtttagaagtgcatggctcccaaaatgagaaggctgagtgagccaggattaaaacacacagccccacccgtcctctgtcctctcctccttcccaagctcagtttcaatgctgtaaacttaaagctgacagctcacaataccagccacgctgcctctcggcctaagcatgtagcaaatgctctcactgccctacgcattacatgcttctcgacggagtagggtaaaccaagcctcccaaacaaggcagcccattctccacatgccgtgggtgctggagctcagaagatagcgtggg

SEQ ID NO: 212430 - DNA, 486 bp, Homo sapiens
agcccctcacagcccccaccctgctctgcagcctggcccacacaggtgtctgggatctgctgccacccaccaccatcccttgcaggaagctggtcctaccctggaagactgtgacaatctgtgtcatgagggcaggggtcaaatgcaagtcttttctgcacccccagatcatgcaagagctgtggcagctgactaaacaaacgaacaggactgagacctttaggcacagcagccccagcctcacaatgcccattctgccgagatgggcaggcatgcaaggagccagccactttggggtggcactgcctaccaaatatactacaggtttgtgtgtgttagggggcctaatgcacagggagatgggatgggacacctgcactgctcaacagagacagagacaggccaggggtcaggggcctgccactccttagctacacagccttgaggaatggcgcccactctcagatgggtggtaggctccaacta

SEQ ID NO: 212431 - DNA, 487 bp, Homo sapiens
ctagagaaccaagagtaaaaaagaaaaaaaaaaggccaaagctagcagaagacaagaaataaccaagatcagagcagaactgatgggagaagactgcgccgccctacctccagcattatggattacaagttcaatatgagatttgggcaggtacaaatatccaaactctgtcagtcaatatctagaataaagtgttttaagtgctttgaaagtatttacagtgtacagtatggagaagaattggacagaagcaggagtggttgcacatgggagctcatgcccataataccattgctttgagaggcagagacaggaggattgcttgaggccaagagttcaaaaccagcctgggaagcatagcaagacctcatttctacaaaaataaaaaaatcaaaaattagccaggcctgtggtgtgcacctgtagtcctaatgaggagggtgaggtggaaggatctcttgagcccaggagctcaaggttacagtga

SEQ ID NO: 212432 - DNA, 444 bp, Homo sapiens
aaaaaataatacagtatatccatcctatagatctttctgctgatgggagcaattgccgccctacctccagcattatggattacaagttcaatatgagatttgggcaggtacaaatatccaaactctgtcagtcaatatctagaataaagtgttttaagtgctttgaaagtatttacagtgtacagtatggagaagaattggacagaagcaggagtggttgcacatgggagctcatgcccataataccattgctttgagaggcagagacaggaggattgcttgaggccaagagttcaaaaccagcctgggaagcatagcaagacctcatttctacaaaaataaaaaaatcaaaaattagccaggcctgtggtgtgcacctgtagtcctaatgaggagggtgaggtggaaggatctcttgagcccaggagctcaaggttacagtga

SEQ ID NO: 212433 - DNA, 448 bp, Homo sapiens
tgctagtgaggaagcaggaaacgcaatcattcgtacattgctgatgggacacagtcttgccgccctacctccagcattatggattacaagttcaatatgagatttgggcaggtacaaatatccaaactctgtcagtcaatatctagaataaagtgttttaagtgctttgaaagtatttacagtgtacagtatggagaagaattggacagaagcaggagtggttgcacatgggagctcatgcccataataccattgctttgagaggcagagacaggaggattgcttgaggccaagagttcaaaaccagcctgggaagcatagcaagacctcatttctacaaaaataaaaaaatcaaaaattagccaggcctgtggtgtgcacctgtagtcctaatgaggagggtgaggtggaaggatctcttgagcccaggagctcaaggttacagtga

SEQ ID NO: 212434 - DNA, 296 bp, Homo sapiens
atcagcaggatcgtaagcttggtcaggaggaagactgggacaggaatggatagatggatggaacagaagaggaagcacatacatatactataagtataaattttgcatatgattatgtcatacattggaatgtaaagaaagttatttttttaaatggtgctggaaatagttaaatagttacatggagaaatgccacatattacgtactatcctataaatacaattgagtggatttgaacataaacgataaaaccataaaactgaagaaaatattggtgaatggttctatctgacca

SEQ ID NO: 212435 - DNA, 504 bp, Homo sapiens
taagggtagtgtacatataaagcttctaagtcgtagagataaagtaggaatccatttcatgccaacaatgactggcagctgtcataagacacaaaggatagaatcaaagttaaccatcatagatcaactgtatttggaaggatttttaaaaagctcttcctgctccccaagtttctaagaaagggtcaagatctaaggatgttcataaatcaaattgcgtggctatcctggacaccacagaagtatgctggacagacatcaaagagatgagacatttgttgtttcccagagtcctttgaacttcttggtgtaatgccgcccagtggactcctggttccaagacccacctctaccacttacaatctttttgatcttagaaaaatcacctaaacttttcagcttagtttgtttaccttaaaattgataatatctttattgataatatctcaaaagttttaatatctgattatcaggtagacttaaaagaatctttataaagcacct

SEQ ID NO: 212436 - DNA, 855 bp, Homo sapiens
ggcaaggaagacgggatgggccccaatcgggaagcacgcgccaccagctctggagagaaccgtctgaggagacgcgggggagagtttgggtcacaggagcaggaaggaactggcaggtgtctgtcaccttatcatcccggacaccatgtttacattgtaattggcttctttacagagagggagggaccaggttcccagtgtgagtgatgtttagaggttttctgagaagcacaaggactggactttgacaggaagcaacgaggcaagagggaagctcgagaacaggttttgctgaggattccccccaagaaaagtgctccccgggaggccgttcctggcaccaagactggcggagccaccacacccgttaaagggatccacctggacagcgatcaggccacctccaaggatcacgtaggaccagcagaagcagcgtaaagtattggaactttgaatctgacatcagaaagacctgcactcagccgggcacggtggctcacgattgtaatcccaggccgaggcggtggatcacttgagattcactgattctaggtaaatcagaggaacaagcaacatgaacagaaaaaatgtagaaaatgcaattatgctgaagtacaattgttgtttcagaagtccagcatctggtgtacttaacaatagagaatatattaaatttttccaaaataaaagaaaacaagtaggagactcgctagtgaaaattcaatggcatatgcaaagtctttaatacagcatttggtacatgagagggactccgtaaaatctcgtaacttatgattacataggttagactagtgactgcccccagtccatagatccgctatctgaggcttatct

SEQ ID NO: 212437 - DNA, 454 bp, Homo sapiens
ctccttttcacatttagaagtaggagactttcacagtgtcatattttcacccccatcaatattattgatgcttgctcattttctaatgtgggacctgaaatttaccaggtgcttaaagaatctttttgtttttcagattcactgattctaggtaaatcagaggaacaagcaacatgaacagaaaaaatgtagaaaatgcaattatgctgaagtacaattgttgtttcagaagtccagcatctggtgtacttaacaatagagaatatattaaatttttccaaaataaaagaaaacaagtaggagactcgctagtgaaaattcaatggcatatgcaaagtctttaatacagcatttggtacatgagagggactccgtaaaatctcgtaacttatgattacataggttagactagtgactgcccccagtccatagatccgctatctgaggcttatct

SEQ ID NO: 212438 - DNA, 393 bp, Homo sapiens
aagtcaaatgtcaagaccccatattttcttcctggaaaatagctgaaaaatgatatacatgaatactaccataagagttactcatagggatagacgaagggcatgaaaggaagaaaataggtcagtaacagaatatgtgacacgggaaaggggcacacttagatttttccactcacatcaagagttctctctactatccctctcaatgggcttaggaaatctccttgtaagaaacttctagataaacccatacgcaactcaaatatctgctctgccactttttagatagctaatttggggcagatttcttaactcctgtgagccccagtttcaacagtttgcatggagatatctactttacagggttgctttgacgattaaattgactaacgt

SEQ ID NO: 212439 - DNA, 466 bp, Homo sapiens
catctcctttgcttctttgaacatactagatccagagaaactactatttccacctcagctcactgcctttcctatactcatggttataaacaagagatctgcacgctgcttttgtaccttagatcgtgacatttgccctcataaaattaatttttttcaaagacttttgagatctcccagcaatgagtcttcttattgctaagacttctctgttcagttttttgtctcctctttgttcatcgaaatgctgcttggtctcagctggatttggcagccctttcacataaattagagtctggtgattaaaactgccctgtagtttcaataaaaagtgaaatttacagacttttatttttctccttgttgcttttcaatgctttcctggaggaaagggagagaatgttgctttatacagccacataaatgaagtcttttccaattgttaaatagttatgatagatttaaa

SEQ ID NO: 212440 - DNA, 360 bp, Homo sapiens
cacacacacacacatatatatggtttgtagagctctgaagtctggaggctagacttcctaagagaaagccaagaatatagagcacattgcaggagttaagaatggcctttggaacctattatatattcctacagtggagcaactgtcaaatattccacattgtctcatttttctccattttagtaatgtaatgaactaagataaagaaaaaatatagtataactgcatcagtgacaagaagactcaaaaaacaaacagaagtgccaatccatgtctgaattttcaagttccctattggatgaccagactggcaaccatttcaaatcctgtttaatcggtttaaataaaatctatttcatt

SEQ ID NO: 212441 - DNA, 444 bp, Homo sapiens
cattctccttgcctcagcctcctgagtagctgggactacaggcgcccgccaccacgcccggctaattttttgtagagacgggatttcaccatgttagcctgacctcgtgacccgcctgcctcggcctcccaaagtgctgggattacaggcgtgagccaccaagcccggccaaataattttctttttttttaaaggaacaaggaagatgaaggctgtaatgctacccatttttgattctttggagagtggcaagattctcttaacaatacaacatgtacaacagggcaaatgcacattacaatgaaaaaaactctgccttcaactcagttactcccagtataaccttctattgcccaggctgagtgcagcggcacaattttggctcactacaacctctgcctcctgggttcaagcgattctcctgcctcagccacctgagtagct

SEQ ID NO: 212442 - DNA, 339 bp, Homo sapiens
ttgtattctcattagtctcacattaaagatgaaggaacagagacataaaaacggtgattaccccaacgtaagaagtgagagagccaggattcacaacccagcagtccaattcaagagtccacactcttcacagttctgcagcactgcctctgtgggggacaggcactttataaatttcaccttgcttcacacattcattcattgtcacagaagtaaaaaatgtggttccttcccaccttcatcctcaaagatttaaaagagagaaaaatagaatgtcttctgaaagttaaattctaaatctacacttcaagaaacaaagcaaagatattcagagtaatt

SEQ ID NO: 212443 - DNA, 231 bp, Homo sapiens
accatgcctggataatttaaaaaaaaattgatggggtcttgctatgttacccaggctggtctccaactcctggtctcaagcgatcttcctgccttggcctcccaagtagctgggataacaggcatgagccaccatgcctggtttaaaaaaatttaaattgctgggcgcggtggcttgtgtttgtaattccagcatgctgggaggcttacgcaggtggatggcttgagccca

SEQ ID NO: 212444 - DNA, 562 bp, Homo sapiens
atatatagtcatgaacttttacgtacccataaaatacagaaaacaaaaacttgaaaataaaaggagaaacaggaagaaaaaaatcagttacaataggagacttaagcatactttccagaaatggacagaacatgaggataaaaaacacacagtaataagggacttgaaaaacacaattaaccagtttgatgtatttttatatgtacttataaaacaatacacatcttttcaaaaatccatggaacaattacaaactgatcatgtgacaggccacaaaaaaaacctcaataacctttttaaaataagaaattatacaggccatattccctgaccacaaagcaataaaactaaacaaaagccacaaaaagtttaaccacttggaaatgtaacctaaaggttatttggaggagtatttttttttttgagaaattaaaaagtgcagactatttaaaaatgaacaatgagagcactatatagcaaaacccatgggatatttccaaagcagtcactcaaaaaagaaatgaactgagaagaataaaatcaaaataagccaaaagaaagc

SEQ ID NO: 212445 - DNA, 141 bp, Homo sapiens
tacggtggagctggagtcttactatattacccaagctggttttgaactcctggctaaagagatcctccctcctaggcttcccagagagctggggttacaggcatgagccaccacatccaacccccttctgtcgtctttgac

SEQ ID NO: 212446 - DNA, 482 bp, Homo sapiens
tgttaagttcttaaacagacctcaccggtaagaaggtaagcaagcatttattagtgaggttattcacttaatatatatattgagcatctgctatgtacagatgtagctacagtaaatattgtggggattatttttttaaaaaaacattaaacatgagccttttaaaagaaatttctaatctagtaagaaatagctaaactgagcttgaaactaatgacatcattcaaagacttagttttttttctctgagattttatcaagtggagcaatagtccgtgcattctagtctacagttgtaaactaaaattatctaacaattttatggtgagatgtatgaccacatgcaatatgaaaaagaataattcaggcctaaagtacatgttaaactgaatcatgtattcaaggaagacagttatgtgtgttgttagatttaataaaattttactctacctgatgggtatagtcttaataaaaaaaaaaaa

SEQ ID NO: 212447 - DNA, 398 bp, Homo sapiens
accatcacctactccaagtgaccatccctgactgctccatctgaatgttgtttcatctgtatctctgccttaccactccacagcatttatcatgatctgcagctatcttttatttctatttgatttcttgtttcttgtctgtctcttcccctagaatgtggatttcaccccctaagggcaggaattcttgtctgttttttttcccacttcttgattcctagcccctaaaatagtacctgacaataaatgttgaaagacagaggggcagaaggaaacaaagaaatacaggctaaatgactgagggaataaatgaatgaatgaatatatacatgtaaggctaaataaataaaatgggataaatgaataaaagggactttgggggaaagggaccccattcc

SEQ ID NO: 212448 - DNA, 266 bp, Homo sapiens
tcatttcaggcttctctgtgacctcttcccgggtcggttttcagtggggacagcgtgcaaggtgggctgagttgcagagggccaacaggtagcaaagtggaggagacacagcactagaaaagagaaaaaccagtttgcagagatgattcctgggtgttgaggtcagttccacccttagaggtcaccagatcccagaggtcctcactatgtatccagctttgaagttgtggtgactgatgtgcaagggcccagaaaagcagatggaa

SEQ ID NO: 212449 - DNA, 277 bp, Homo sapiens
tgccatgagccctattttccagatgaggaaaactgaggcttagaaacagttaagtggcccgtcccagatcacatggccagtaagtgacttgtgcccaatttgaaccctaatctgtttgaatctttgacttcggtatttacaaatatgtcttgccagctgggagaggcaggaaatgggcaagtgtttcttcaggaatcaagaaccagaatcttccgtgccctttatctcatcgaagcgccacggcagcacttcaaagtagatgttttatttgttttga

SEQ ID NO: 212450 - DNA, 485 bp, Homo sapiens
  misc_feature (12)..(13): n is a, c, g, or t
tacgcatattgnntggacgaccatagcactcctttaaaaatgctcttaaatttattgcctggctttagccatgccgagtggccaatattcctggattttaaactcacaggtgaaacctgcaagcctcaactaaggttataacttaaccacaagtatacaagatatcttcaaagtggtggtaagcagtttttataaaatctagaatctttagaagtagctcagaggaaggaagatttaagaagagaacttggaagttgtttgtggaaggggaagagaatcagcaaataataaaggtcgcacagacattaaccagatagttttcattccctaagccaggattgaacctgggctgctgtggtaagagcacagaccaagagaaagtactgccacgtggttacaatgtcatgctcccaaggacatgactgaccagtttgctgggccatcttgaacagcgggcttatggggacctaggctcacattctatc

SEQ ID NO: 212451 - DNA, 195 bp, Homo sapiens
ctagctcggcttcctttcaaacagtttttttcaacagtgagagctttctgagaaatgcatttatataggtacaaagcatgtgtctctgtggcagcaggagtccttatttgcatcagattttctttaacacctgtttgtttcagagggcactgccttcctaggaaacactccagaaaaggaattacataaagaaag

SEQ ID NO: 212452 - DNA, 471 bp, Homo sapiens
tctccccaccatcaccctgttgccctgccacactccgcctcaccaagagagtaaaaatgatgatcgctgaatactgagggaactcagagaccggcgccggtgaaggtcctcacatgctgaatgtgccaggcccctgggcccactattctttctctatactttttctctgtgtctaatttcttttctcagtctctcgtctccacctgatgagagatacccataggtatggaggggcaggcccccttcaaacaggattttgctttgttgctcaggctaatctctaactcttggcctcaaatgatccttctgacttggcctcccaaactggtggaattacaggagctagccaccataccagtcagggcgcatatcttaaggatactcctgaggtggagctgggctttccctgcagaaccgcctctgggaattgtgccctttaccctccttgttacctagggaactacattaccc

SEQ ID NO: 212453 - DNA, 534 bp, Homo sapiens
acgtgcacagacatgaacgcatacacatgtgcccgcaggcactcatccacatactcagaccacatcacactgcaaggggcattcgcatgtacacacacatgggcacagagctgtacctgtcagccgccccccacccccgccgccaagtgtctagacagaggtcagagcagtggcatgcttcacgctggctgtgtggggtgggggggcggtacccatgtgcgggtggatttgtcttcccagctgaaccgcagggttcgtcctcatctctgcatgctcaggtgctggtcctcatgccacagggctagcgtgtcctgcacgcatcccagtctgcacaccacagggccagtgctcatctctgcacgcactggtgctgaccacacctggtacacagcaggcacttactaatggcagcccctcaaagggatgtggcacgtacactacaacagacactggggggagtgggcacagatagggccccaggccccaccctacccccaagcagtggagaaagggaagaaaacgtctcaaaaaaaa

SEQ ID NO: 212454 - DNA, 523 bp, Homo sapiens
caatatcctcaaatttcagttatcatagtttagttaaataacaccaattacccaatgacacaattcaaatttcagttaccactgtatactaattgtgagtagctgaatatagtacaaacttcactgctacatcttaagtccacaaatcagtatacaaataacagaagtacatcaccatcagtgaccaaccaggtcacttctttcactgtctgttgatgatcagtcacagtgaacctggtaccagttattcagttcatgtacagaaagcaaagcatgtagttgagttgcctccttgtctcctggtgataaacttatgtgccatgttacaaaattgagtaacagaaggagagaattggccaagaatgatgtaagggtagcagagaaacaaaaatgtataatgttggaagtgaaattccaatcaaacataaacagaattatagaagaaatagctaaccataagaatgctgacgctactgccattcaagggactctaaatatgtagtctgaggggctgggtgcagtg

SEQ ID NO: 212455 - DNA, 445 bp, Homo sapiens
gggctcccagggttggctggacttagggagcatcctggatgaggcaggagatgagcagagcgaggcctgcaaaaggagctcagtgctgaggtcgggaatcaaccagcatcaacccaaggtccctgagaagtcacgctgggcacaagatgctgaacaccaagctgccccaagacaatcccattctgaaacctgcatccacccagacaatttggcccctcctatgttcactcataccgttgaggcctcagcaagcggaggaacaactgaccacctttaatagagcctatgcagttaaaagtatctgtggagtttcagaataaagggaggggagaggtgtttttaaaccggtacagtttactccctcctttggccccaggagtgatgtgactgactgctggtgtcagtttggggctggtgtcagaaaggccaaaagtgaggaacaaag

SEQ ID NO: 212456 - DNA, 573 bp, Homo sapiens
gaattacacaaataaatgtcagatgacaacagtggtaaatgtcacaaaggagaggtagagaatgccaccaggagcctaaggagggggtcccaggtaggctgccctgatgaagtgatgtctgcattgacgcaatgaagagtagatgaaggtgagtgaggagggagaagaatattccagactggtgataacatttgaaatgagaatacttggcacacaggaggcacccagtgagtgagagggaatatgtattagttagttatagctatgtaacaaatcagccccaatggcccctgagttaaaattcagtgtatggtgatcttctttcctctggtaaattacaagaggaatgaaggtcgaagtcctgtttacaccgatttttcacaaccatctcttatgtgcctggtacttctgagtgcctttttctgtctcctcaagtttcctggtcattttcttcccattgactcatacttgggatgctgggaggtgcacgcagtagcactgacttctttccgacttgacaggggaagtgaaaattgatgaaccagagtgaggaagggcagaagggagtttgtg

SEQ ID NO: 212457 - DNA, 499 bp, Homo sapiens
gatccttggataagggggtcactacacagaggtatagattcataatgatgtgtataagccccaggaagctttaatttgccttccatttactctaaaccctctggaaaagaatgagaaaaatataacaatgaagaagaggttagagttacaatctctcaccactccggctgcctctacatgccaaagatgagaaaaaggaggtgcatcttgcgggagcatcaaggcttgggaagctggattcttttcgtttgggcccacagagatcaaaaacttcagtccctgggaccagcagggaaacgagaactacatggaccaagaccagtcctgttgccttagtctgaggcaacctcagcaccattcattctaacaagcccggtgatgggtctgattgtatcagaagtgacctggccagcaccactcaccttagggctacctcatagaaagagattaggctgtccagtggaaactaaatattcagaagactggagctctcttcaaa

SEQ ID NO: 212458 - DNA, 514 bp, Homo sapiens
atgcacttggggagggaatgagacaggggacattcagaatggctgtttgggctcacagttgagtgggaaaaagatgggagctgcatcccaaggagtcatgaggtctcccccggcacctgtttcaggaaaggggagaagtgttgcttttctcccctgctgacagattagtctgtcatgagagtggatttttgcaggttgtgggggaggggtaccaagaccgtggggagtgggagatgcctggctggcttcccgggtcacctcatgtgcagagttgacggcttgggccagagccttggattcctgagaagcttaccacctgctcactcttgctgctacccagagtcactgagatttctggaaacttagagattgctattttatgtttttgttctgtgggatttggggtcagattgcttcctttcctccttcacttttgttaaggtttcagatctggctctcaactctgtgttcaggaatcttgacagtagtcacataaaagaattgtaggagtgcc

SEQ ID NO: 212459 - DNA, 338 bp, Homo sapiens
caggagcaaaagatgaaaaaaagaactataagtgcttgacttgagtgttgattatatttttgtggacttattagacattttattttatataaatggtgtttcaaaaattaattcatttttatatattgtcgagttatttgttataagtagaaaacactatctgtagttttgactagaaataatacaaaagtgcatttctgaacctgtggttcaataattgccaatgatttataaaagtgtttcaggtgtcattcagtgtggtaatgcagttccatttcacttttttaaaattccataaggtaaaagaaaaagagcaataaaaggaaccagaagaaagt

SEQ ID NO: 212460 - DNA, 431 bp, Homo sapiens
ctctttccccctagtgtgtctagatctcattacctagaagcaatcttcattaatattttggtatcttttctttgcgaatattgtctatccttattgctcttgcctgggctttctctagactgaggacgcatggtgggaagagctctggcaccatccactgtggatccacaccttcctgtctgtgtgaccccaggcaagttacttaaccttagggtgcttctgttttctcttatgttagaaatgggacctattgggccagacgcagtggctcacacttgtaatcccggcactttgggagaccgaagcaggtggaccactggaagtcaggagtttgagaccagcctggccaacatggcaaaaccccatctctactaaaaatacaaaaattagccgggtgtgatggcacatgcctgtagtcccagcaactcagg

SEQ ID NO: 212461 - DNA, 478 bp, Homo sapiens
tcagtcttttttggactcttctagtgcatactcatggcgtcagtcaagttttcatccatgcacgtctggctgtcagactctgttctacatagatggagataacgtgtgcaaatgtaaaagataaaatatacctctgttttagttaacgggactaaaacatagctgttaccatggagatctgggagctggggataatggaaaaaaccatgtttagattctcacttagaactgtgatgtaaagagactttgttcccttgctcattgtttaagtaatattgaataattgcctgagatgagctaagcaatctgttaaccagtggaatgtgcaacagtgaataaaacaagtaattttgcctttgagactcgccctgttaactataccacagtggccaccaatccataagagagagagagaatgtgtgtgtgtgggttggcgggggaggggccaagttcccctgccccacccccagaaattacg

SEQ ID NO: 212462 - DNA, 646 bp, Homo sapiens
atgcctgttgatcaagtgtgtgctgttcactctgagtttacagcatgagtggcttctcctcctctggtggtgggtgctgttggattctaaggacaggaatgccaagagaagatgaggaaatgaaaacagtaactcttaaataggaaatggccataccaagtgggtgaaatcccagcatgagtaatgtaaatgtgggtccaaggaaaagaaatattattttaaattacattactaaaccttttatctaagactttataagccctgtgtgctgtgcatactataatgaccttaggatatgcagttttatttaaatatccatcagggctcagctgcttctgtccatggagtgatcaaccccagtgtgtggctcagcctctctcttcactgactgctgctgcagctgttatgccacccctgcctcttatgtgggaagttacaggggttctttactgtctttggaatcaatcaccaaatcttgtagattcaagcagcttaatatcgtttgtatgtatcccttttctgaataattattataattatttaatttattgaacacatgttatgtatcattcatttacttttctaagtgcttcacatgtattaactcaattatcttcacacatgtgtgagtgcatgtgcacacaca

SEQ ID NO: 212463 - DNA, 925 bp, Homo sapiens
tcctaagaaatccctactcccccaaaattgacaatgcagccttctttatatgaaaccttgtttataggccacaattctcccgacagatttacaagtgtctgtggagttttaaaagacgattgcttaacaggcattaagtgagacacataggactgtgtaaatattttagctggaataggatttttttaaatgtctgagccaaatattgcattaaatctgaagacagtggcaaactgattagcagtggctgccagctccatgctttgccagtgattctggagccaagactagataccagaattcatccaccagattaggttgtgtgttttaaaaataactttccatcctttttttttttccctctcttctctttatgcctttctgtcatttctcctttattccctcatggttcatttagatgtaaacactttccagagtagaaaattacagttaatgtgactaaccagcgagggctgaaacgggaacatgggctcagaggtcagagaaaccgtggaagacttgcagctgtcctggtggagcaatgtggggacaggttgctttttactaataggccttgtgtatcttaatcactggcctctttgtagccagctgttgcactgctggaaggggactagtcctaagaccagcattgctgttacctcttcctcttactgagttccttgattcataaagaggctcaggcctgtggccttcaagacgtgtatgtgtgagagaatcctcaattctagtaaaaattgccacaaaatatgcattttgacttcagaggacatatttagtatttaagcattcctataggagtactattttcctgattagagcagtggataagatgtgttgctataattttgggaggagtgaggcgttctagctaacaactttgctctgcctttgctgacttttaacc

SEQ ID NO: 212464 - DNA, 508 bp, Homo sapiens
agtggctgcctgaaagtgcaaggtatgatgtgctgtcagggaaccaggaaaaggcaatcgccaccttaaagaggatagcaactgaaaacggagctcccatgccgctggggaaactcatcatctccagacaggaagaccgaggcaaaatgagggaccttttcacaccccattttagatggacaactttgctgctgtggtttatatggtaagagctgtttgttgaccactttgacccctttccactccctgtgccctgttttgggttttgttttaatgcaatggacagatagcactttgatttcaggcagcgtttgcaaatttcagtagttcgaacatcatcctcctgatttccgtcatatccaggttatcatctgtacgtactatcatttccttcatctttttctttaacttgactgcttttaatcaccgtgcaggctggagtgcagtggcgctctcctagcttactgcagccttgaactcctgaactcaagcaatcctccctcctcag

SEQ ID NO: 212465 - DNA, 497 bp, Homo sapiens
gcttcgaccctgaaatgttagtgttctgggacatttatgggaacaatgggacagagggttgggatcagaattatcctaagaatactaaatagtggtttactttccccagctcagctggcccctggctcaattcctgctccaccctcagccaaattcctgtctgagctttccactatttatatcacttctccctaatcttgtgcccatcctgggcaccacaggtgttcccatctctcagcctgttactttgaggaatgattaacttacaaaagcaggactgtcaagatgatactgaaatatgtgtgcctgcatgtctgtatcaatgagcatcggggaggggtaacctttgccaattgctagggcattgatactgcctgggaagataggactatgctgaaacaagcagacagaaaaaaatgccatcatctgcctttatcctcctcctagaaatgtgctcactctgttactcttcattgcaagagcgtttatttctggag

SEQ ID NO: 212466 - DNA, 2537 bp, Homo sapiens
  misc_feature (1111)..(1111): n is a, c, g, or t
  misc_feature (1125)..(1125): n is a, c, g, or t
  misc_feature (1136)..(1136): n is a, c, g, or t
  misc_feature (1139)..(1139): n is a, c, g, or t
  misc_feature (1144)..(1144): n is a, c, g, or t
  misc_feature (1158)..(1158): n is a, c, g, or t
  misc_feature (1166)..(1166): n is a, c, g, or t
  misc_feature (1168)..(1169): n is a, c, g, or t
  misc_feature (1174)..(1174): n is a, c, g, or t
  misc_feature (1179)..(1179): n is a, c, g, or t
  misc_feature (1181)..(1181): n is a, c, g, or t
  misc_feature (1185)..(1185): n is a, c, g, or t
  misc_feature (1191)..(1191): n is a, c, g, or t
  misc_feature (1194)..(1194): n is a, c, g, or t
  misc_feature (1196)..(1196): n is a, c, g, or t
  misc_feature (1205)..(1205): n is a, c, g, or t
  misc_feature (1209)..(1209): n is a, c, g, or t
  misc_feature (1214)..(1214): n is a, c, g, or t
  misc_feature (1219)..(1219): n is a, c, g, or t
  misc_feature (1226)..(1226): n is a, c, g, or t
  misc_feature (1237)..(1238): n is a, c, g, or t
  misc_feature (1240)..(1241): n is a, c, g, or t
agtggctgcctgaaagtgcaaggtatgatgtgctgtcagggaaccaggaaaaggcaatcgccaccttaaagaggatagcaactgaaaacggagctcccatgccgctggggaaactcatcatctccagacaggaagaccgaggcaaaatgagggaccttttcacaccccattttagatggacaactttgctgctgtggtttatatggttttccaatgcattctcttactacgggttagttctactcaccacagaactcttccaggcaggagatgtctgcggcatctccagtcggaagaaggctgtagaggcaaaatgcagcctggcctgcgagtacctgagtgaggaggattacatggacttgctgtggaccaccctctctgagtttccaggtgtccttgtgactctgtggattattgaccgcctggggcgcaagaagaccatggccctgtgctttgtcatcttctccttctgcagcctcctgctgtttatctgtgttggaagaaatgtgctcactctgttactcttcattgcaagagcgtttatttctggaggctttcaagcggcatatgtttacacacctgaggtctaccccacggcaacgcgggccctcggcctgggcacctgcagcggcatggcaagagtgggtgctctcatcactccgttcatcgcccaggtgatgctggaatcctctgtgtacctgactctggcagtttacagtggctgctgcctcctggctgccctggcctcctgctttttgcccattgagaccaaaggccgaggactgcaggagtccagccaccgggagtggggccaggagatggtcggccgaggaatgcacggtgcaggtgttaccaggtcgaactctggctctcaggaatagtgaccgatgggggactgagctggtctttgaggctgcagagcttggggggctggcaggccccaactggggcactgattgtcactgccgacatcaagaactcacccaagagtatgacctggaccaacagggttttgtgtcttgactcagtttgctcatcttcattgaggtccacccagggatgggggagatgtttgctctatgggggttctctgtatatgtggtgaaagctntgttcataacctgnggatctacatnggnagacnacccatattagganggtctggnanngccancaacnantcanacccancanantcacccggncaanccctngtgancaacaanatacttctgtnnannccgccaggctcaggcccatgtgacacctgctgtccacccaccggacctgttcagtaggtttctcccacacccacagccccaggctttcttctttgaaattgcaggcgatctaggtgtggtctgagcagctatttcctggcaggggccccccggtttgcctccctagagcctgaccagtggattctctggcagatggacatggtgcattcaaactggagccacatgcccccacccagccccctctggagttgccgttgttggcaccaagagatccagatgtgtccctggggacagctggtcttgcaccaggtgacaacctcagaacgccgttaccccctgggaactgaggactgaggccaaagtgaatcaagctgaagtcagagcacgggcctccccttctgaagcagcgaaggccacggttccgacttctttcctggccccctccttggtcaggctgaatggtgacttttattgttttttgagacggagtcttgatctgtcgcccaggctggagtgcagtagcgtgatctcggctcactgcaactctgcctcccgggttcaagcaattctcctgtctcagcctcccgagtagctgggattacaggtgcccacctgtactttttagtagagacagggtttcaccatgttggccaggctggtctcgaactcctgacctcaagtgatccacccgcctcggcctcccacagtgctgagattacaggtgggagccactgcacccggcctgaatgatgactcttgaggggaaaaagtttactcaggtttgcaggtacaaaatccaaaatccagggctttgggttttgtgcatgggtagacagctgaatgggcagagaaaccagaaggatgctacacccaccatctcatcccatggggatcaggggaccaggattccctgatgcgaagctgctcctctgtccagggacgtcttgatcattacacaaaggcagcccctggagttccattcatggagcctgccgtggagtggagaggggtgggaggactcaggtgtgtgaaatgtatatgttttcaaaggaagcagtgggaggccagttggttttgagttggtctccgcaggcaacatcacttctgggatttggtttactggagccttttttcccatggtgaaggcaggggacatagacaaggagggaggaagctggcagatcccatcaaaggccagagcagacagacctactgcttgaagtaaacattgcaaggaagccaatttgtgcgttcatctcttattaaaacatgtcagtgatggacattgcaagagcc

SEQ ID NO: 212467 - DNA, 1179 bp, Homo sapiens
  misc_feature (1129)..(1130): n is a, c, g, or t
  misc_feature (1133)..(1133): n is a, c, g, or t
catctgagacagccatatccagaaggaagaggagccgcgttccgtggctcacacctgtaaccccaccagtttgggaggccgaggcgggcggatcacctgaggctgaggccgggggtttgagaccagcctgaccaatatggagaaaccccgtctctactaaaaatacaaaattagccgggagtggtggcgcatgcctgtaattccagctactcgggaggctgaggcaggagagtcgcttgaacccgggaggcggaggttgcggtgagccgagatcgcgccattgcactctagcctgggcaacaagagggaaaactccgtctaaaaagaataagagggttacaagtagcctgaattttcctctcttcaaatagggacttctcaaagaaggtgaatctataatagtggtgtagattcagatataaggacacgtatttggcgtaaaggagaggcaaagttagaggaaccagaaagaatgctacacaaaagatggccggcttctcgcgtgaaggaagattcggatacgggggcctgatggatttagttgtaggcggtttgcctgcagcgagtaaattattcaaacgttcggacttcacaagactaaacttactggggataaaaattgagatttggccgggcgcgatggctcacgcctgtaatccctacactttgggaggccgaggcgggtggatgatctgagatcaggagttcgagaccagcctggccgaaatggcgaaaccccgtctctattaaaaatacaaaaattagccgggagtggtagcgtccgcctgtaatcccagctactcaggaggctgaagcaggagaatcggtggaacctgagaggcagaggctgtagtgagccgagatcgcgccactgcactccagcctgggcgacagagcaagactccgtctaaaaaaaaaaagaaaaaaaaaattgagatttggtcccatgcagtaagagggaatggagaacaggagccacccaactttggacattaaagttggagcaggcaaagatgaggccagctgtgtcgcgaagcctgggacatgggcagctcttattgcccaggctggagtagctcttattgcccaggctggagtagctcttattgcccaggctggagtagctctnntgnccaggctggagtagctcttaatgcccaggcaagagtggaccgagct

SEQ ID NO: 212468 - DNA, 1056 bp, Homo sapiens
  misc_feature (1006)..(1007): n is a, c, g, or t
  misc_feature (1010)..(1010): n is a, c, g, or t
tcccgggtcgactactactactaaattcgcggccgcgtcgaccaaaattagccgggagtggtggcgcatgcctgtaattccagctactcgggaggctgaggcaggagagtcgcttgaacccgggaggcggaggttgcggtgagccgagatcgcgccattgcactctagcctgggcaacaagagggaaaactccgtctaaaaagaataagagggttacaagtagcctgaattttcctctcttcaaatagggacttctcaaagaaggtgaatctataatagtggtgtagattcagatataaggacacgtatttggcgtaaaggagaggcaaagttagaggaaccagaaagaatgctacacaaaagatggccggcttctcgcgtgaaggaagattcggatacgggggcctgatggatttagttgtaggcggtttgcctgcagcgagtaaattattcaaacgttcggacttcacaagactaaacttactggggataaaaattgagatttggccgggcgcgatggctcacgcctgtaatccctacactttgggaggccgaggcgggtggatgatctgagatcaggagttcgagaccagcctggccgaaatggcgaaaccccgtctctattaaaaatacaaaaattagccgggagtggtagcgtccgcctgtaatcccagctactcaggaggctgaagcaggagaatcggtggaacctgagaggcagaggctgtagtgagccgagatcgcgccactgcactccagcctgggcgacagagcaagactccgtctaaaaaaaaaaagaaaaaaaaaattgagatttggtcccatgcagtaagagggaatggagaacaggagccacccaactttggacattaaagttggagcaggcaaagatgaggccagctgtgtcgcgaagcctgggacatgggcagctcttattgcccaggctggagtagctcttattgcccaggctggagtagctcttattgcccaggctggagtagctctnntgnccaggctggagtagctcttaatgcccaggcaagagtggaccgagct

SEQ ID NO: 212469 - DNA, 805 bp, Homo sapiens
gggacttctcaaagaaggtgaatctataatagtggtgtagattcagatataaggacacgtatttggcgtaaaggagaggcaaagttagaggaaccagaaagaatgctacacaaaagatggccggcttctcgcgtgaaggaagattcggatacgggggcctgatggatttagttgtaggcggtttgcctgcagcgagtaaattattcaaacgttcggacttcacaagactaaacttactggggataaaaattgagatttggccgggcgcgatggctcacgcctgtaatccctacactttgggaggccgaggcgggtggatgatctgagatcaggagttcgagaccagcctggccgaaatggcgaaaccccgtctctattaaaaatacaaaaattagccgggagtggtagcgtccgcctgtaatcccagctactcaggaggctgaagcaggagaatcggtggaacctgagaggcagaggctgtagtgagccgagatcgcgccactgcactccagcctgggcgacagagcaagactccgtctaaaaaaaaaaagaaaaaaaaaattgagatttggtcccatgcagtaagagggaatggagaacaggagccacccaactttggacattaaagttggagcaggcaaagatgaggccagctgtgtcgcgaagcctgggacatgggcagctcttgagtacaccgggttcgaggccaggggaaaccctcaaggtagagatggggttataaagcaaaccaataaaaaccggtgtatgagtcaaggagaggccttagtttagccatctgcccata

SEQ ID NO: 212470 - DNA, 208 bp, Homo sapiens
ctgtcacccctgaacctccctcctcctacagtggaatctgcctgtcctctggtggaagacattaaatttctatagaattcaattttggtgctagaaattcaattccagaccactctatcatttattttacttccctggactgttgaagaattgaaacaaagtatgtattttgtttttcccctaaatatgaaggccccaaaaattggca

SEQ ID NO: 212471 - DNA, 616 bp, Homo sapiens
catctctgcttgtaggtcctcaaggcctgtgatggccgaccgtatgctggggcagtgcagaaatttctagcttcagtacttccagcctgtggggaccttagtttccagcaggaccaaatgacacagacctttggcttcagggactcagaaatcacgtgagacttgtggaaccaaccaaagtcaggcatctggtgcttccctgcctccctccagttccatccagcctgtcctcctgtttttttggtgaacctgccagaaaagctgccaaaaagctgactcttcttgttaataaaatgacccaagtttgtattcctccccacaagagaggaggcctatcttacctgggccttagaaagagccctgaaatagaattcagttcttggtggcttatcaaaagcacacaggggcctggcaggaagtgtaaaagcttgatgttaatcatactgggactaagaggatagagaatggtaggagctgggatacccctaaacattcacattaaaacaaaaaaaacccaaagctaaaaaacaactgggcaggagctaaataaaaatctaattttgagaggctgtatctggctcaggcctcctactttgtaacccatggaatatgtgaa

SEQ ID NO: 212472 - DNA, 575 bp, Homo sapiens
tagcaagaataatagttgctaaccttttctagttcttaataaatgtatgaagctggtaagattatcttatacttactgaccaattgaattttctctgcaacctatgaggcaggtactattatcttcacttgacagatgaggaaaatggagttctttgcaaaataaagtaacatgttcaggtcattctgctagtgcactttcagatccaggccatgagctgctaactattgtgacatatcactttctttgcatttattttatgtcattgttctcctttgaccctcataaaaaactattttgtgagttgcattatttatcattttaaaaataaagaaatataaaatgccaatattctttctttaaattaaaaaaatcctactaaataaaaactatttgttctaggtcagaggctggcagaatttttctgtaaagagtctgatagtaaatatttaaggctttatgggccttatgttttctgttgcagctccttcaactttgctatttagcatgaaagcggctatggacaatatttgaacaagtgggtgcaactgtgttccaataaaactttatttaca

SEQ ID NO: 212473 - DNA, 319 bp, Homo sapiens
gccaggtgcagtggctcatgcctgtaatcccagcactttgggaggctgaggcgggtggatcacctgaggtcaggagttcgagaccaccctggccaacatggtgaaaccccatctctactaaaaatacaaaaattatgctgggattacaggtgtgagccacggtgcctggccttaattttcataattaaaaaaaaattggggaaggggcagcaactttaatgtataaactaaatatgtagcaggaggtccagtgtggtggctcatgcctataatcccagcactttgggcagctgacatgggaggatcacctgagtctggg

SEQ ID NO: 212474 - DNA, 177 bp, Homo sapiens
tacctccaaaccaagaccagctacaaaatcttcatatgcttgacttcctcctgtattggtgagaatggagtgtttgtcttcttgtccttcagcaacataaaatactgcaatcttgtgtgtctctcggcactgccttgaatccaagttcctaagttctctaagtagcttttcattttt

SEQ ID NO: 212475 - DNA, 443 bp, Homo sapiens
cttggtgtgtgtatgcatgtgtttgaaggcatgtgcatttgaggggtgtgtgcacttgtgtggggatagattgcttgaggggcataggcaggtttgtgtgtgtgtgcatgtgcgcacacgtacctgtctgaagggcgagtctatgctggtgtgtctgggatgatgtggggtagggtaacactgggatgctgtgttagctggaaggaaagttgattggtgggaaagaatagactccccactgtcatcaggtgggttaggatttcatttggaggcccctaggagaggccatatctctacttttggggtctgcttttgccctgaactgggattatttcattacaaacgcacatatgtatgtacatacatacacatgtgaattttatatggatgacttcgctgtacgagcctgtggaatgcatctcacccaagccaccccattgtag

SEQ ID NO: 212476 - DNA, 627 bp, Homo sapiens
ccagcatctccatgtggttaacagcttctaaaatttatctcatgtgtttaaggttttttgtataaatttaagggacttcacatttctaaccagtgtgttaacacttagattaagaccacacttacacacccttttcttacttaagagcaattaaatggtgtactaacaagaagaaagttactttatttacagtgttgatggaaaaatattggcaatgtgataactattactataaaaatatgattttttaatacttctaaactaacctttgaaaaaggctgtgtcttttttctttttttcaaggcaaggttcttggaaccacttggtgagtctatatcgaatattttactttcttttttctgtgagacagcaaaaagttcatccaaatagaaccatgcttctaccacataaatcactcagaaaatctggtaactttccatgtgattcagttaaatcctttaaatcccacaggagaatttacttgcttttggcatatttcaccatattaggaggaaaaccagtctccagggacgtggtggttaacgtgaatgggccaaaggcagatgtcctaaactcagttttgttagcttaggcattttcagatggtgtttctcttggtcaaagttc

SEQ ID NO: 212477 - DNA, 89 bp, Homo sapiens
cagttcatataagttgaatccctgatgcagtgagcactcacatctgccattaaattaaatcaaattaaagcactttaatttgagtggtc

SEQ ID NO: 212478 - DNA, 438 bp, Homo sapiens
aaaatatatctaaaaactcaactcctgtggtcatctctttcaagtatttaaacctcagaattttctccagcaagcatataggccccatagagtccataagcttgcaatgtcttggccatgtgtacccatgtggtacattcaaccaccaaactggaatacgatattgcatttcctgggcaggattaagagtgagctctcttaggctcagatgacccccacaatcaaaggtaagagggctgtaactgaaatatcactcaacagtcatgccaggaataatggacactgaaacgactaccatgccttgtggtgagtgccctcctttggggattagcaagatggtaggggatgtgcagaagactgcaatgggtctcttaacccttccttccttcagtatataatccaggttattttagaaatagaacaccagtgatgtgtttg

SEQ ID NO: 212479 - DNA, 430 bp, Homo sapiens
tactcaagggtataggtaaaagatggtaacaatatactgtttagtaagataatagattaacatctctagtgattttttttttttgccagtggctttcaactgcaaataagttaaagaatattgtttctgtaggtaaatttttattctgtttttaatcatttaaatttattttaattttggtggctgcatgagtatctatttatgcaatatatggcatgttttaatacaggaatacaatatataataataatatcagcattaagtgaggcatccttcacctgtagcatttatcctatgttttacaatccaattctacacttttttttaaatttaaaatgtacaattaaattgttattgactacagggttatttttatggtcgtaataaaaattatatatgagtataaataaaattcattgttaaattctta

SEQ ID NO: 212480 - DNA, 423 bp, Homo sapiens
tcatctaccttcccactctccaaacccaggtgttccttatggggaataaacaaagaatccatgaaaaatagataactgcattaaaaattcagggatagagccttaataacacatatatactaggtcctaggtattacccatttcagactttttttttccagtttttgttttgaatctaaaattaactcctttttccatgtatgctgacacagaaagaaacagaaaagtgaggcaataattgagaaaactaaagcaaaatgaggaattgtctctaaaataaaatttaggaacaacttactcaggtttgtttatttagtctgtttcttctttaacccactgggttatttctccattttctacttttttgcaaacaatacctaacatacaataacttttataggttttcttcatccagaacactaa

SEQ ID NO: 212481 - DNA, 450 bp, Homo sapiens
cgttttgatgtgagagactatctcaggcccatcttctggacccgcactggtcaatatggtcaccattcgttatacattttatatcacccaaatcccagcatgtaatcaatataaaagttattgagtacttaacacttttttttttcacctcaagtctgaaatctggtgaatgtttgacatttacaacttgtctctgtatggactggccacatttcaaacgcagtaacgaatggtgaccatattggcgttttgatgtgagagagctgggatggcccatctggagacagaaaacgagagtggtttctgcagatcacagggcggcagagcccactgtggacagcaggagtcaggctgaggcagcgcagcttctcacgggggctcgggggaacccttgccagatgtggaagcaccagggctacggggccagccaaggcgggtgactctaggagc

SEQ ID NO: 212482 - DNA, 490 bp, Homo sapiens
gggaggggtgtggctgaggtgcttccctcgtgggctgctttgcccaccaggggatctcccccaagtactcacgggactctccaggggaccccctgtagaaccaggaccacccttaccaggcctaggaccctccaggactcctcatctgtgggactgggcctggctggtccccatgactgaattgagtggtgaagccaccttctcctggctccaggaatctcatggacccgggatcttgggtgttcacccctaaatcctccctaaggcccctcaggccaccctgccctgccaggagcccaccctaaaggtgagtgagaggcctccaggcagaggagacagccaggcagggccatgagcagggccggggaggaagctacgtggtgagcccggaaaggccggctctttgctttgggactcaatgttactgacctcattttttatgtatccgaagtgatcgtttcaaagaacaagccataaaactggactctgc

SEQ ID NO: 212483 - DNA, 615 bp, Homo sapiens
ccaggctggtctcgaactcctgacctcaggtgatctgccctccttggcctcccaaagtgctgggattacaggtgtgagccactgtgcccggccctctattcctaatacatgctggtcagcaaataattgattctaacagccacaacagaggcagcacagtgtgcttatccctgaaaaacctgagataaaaggcaagagagaaaggaaaaaagggaaaagataaggaaaaaaaccaaaaagatcatgagaagaaaaataaagacgggaaaaggagaagaggtggttatacatgccataaaggagcattagtactccatgttgatgggtctatgtttctttccatttgttatgctcccaccactgactggccaatcttctctctaccaatacctgttatagatcaacagatcaccatttgcttctctgaaggcctccagatgatttctggatgaaccttccactgtctattctaaaggcccacgttttccattctcccacactgcactgatccccatgacactttatgtccagaatgctactctctggccattcctgtcatccccaaacatttttgtttttaattccaacataacattttcaccttccaaaaacctt

SEQ ID NO: 212484 - DNA, 457 bp, Homo sapiens
tgagagtacccaccttctcccatcagctaaggtcagaagtatgactgggcttaatgaggaactctattagataaatctaagttgtctctccttcaggcagattaagctttttgtgtaaatactgcgtgttcactgaaaactgtgacttacatttgaccaatcctgggatcaagtccaatttcaatttgtagtaatacatgaaaaggttaggaagtatagggaaatgtatatctggatgatgggagcaagactggcgctcttctcccatcagtgaaggagaaaatatcaatgttctgccatgttgagcctgaacaagtgatctgtgtccacggtgtctcatccatctaccgagtccccttgttgttagaggagcaaggggtcgtagattattttcttcgaagacttgaccttcctattgagaggcagccaagaaaaatgctgatgggagcaagactgg

SEQ ID NO: 212485 - DNA, 384 bp, Homo sapiens
tgagagtacccaccttctcccatcagctaaggtcagaagtatgactgggcttaatgaggaactctattagataaatctaagttgtctctccttcaggcagattaagctttttgtgtaaatactgcgtgttcactgaaaactgtgacttacatttgaccaatcctgggatcaagtccaatttcaatttgtagtaatacatgaaaaggttaggaagtatagggaaatgtatatctggatggagccaagcgagcaaacctgcagggggtttggaagtggacttggtcaccgcagaagcgtgtgcgctgatcgcatcttctcccatcagaccttagaagtagctgcaatcttgtctgtcagatccctggaacacgagtcttcatacac

SEQ ID NO: 212486 - DNA, 488 bp, Homo sapiens
ccccaccctgcaaaaactgttaaacagaagagctactatgggtgaaccaggttgactcagaggctcttggttaggcctgtggacatgtacagccctggagggaaccttcctaactagatttgcagctgcataaacagtcagatccgagtagtgttgattggagggtcttctgccctggcatgccatgggggctctgcttttgttcttttcgtggtcagctatttcgtaataattatttttaatagttatatgttactaaaactttaaaaaaataaaagcttagacagtataaagaatgtctttttcctattctgctcaccttcagtttcctcctccaaggcccactgttgtgtttcttgcggttctttcaaagatattcttggaatatacaagcgtatgtatatatattccttgaaaaaacacacacatgtgtatgcacacaaactcacaaatgatagcacaattatacattgttctgcactttttcg

SEQ ID NO: 212487 - DNA, 894 bp, Homo sapiens
atggattgccaagaaaatgagtactgggaccaatggggacggtgtgtcacctgccaacggtgtggtcctggacaggagctatccaaggattgtggttatggagagggtggagatgcctactgcacagcctgccctcctcgcaggtacaaaagcagctggggccaccacagatgtcagagttgcatcacctgtgctgtcatcaatcgtgttcagaaggtcaactgcacagctacctctaatgctgtctgtggggactgtttgcccaggttctaccgaaagacacgcattggaggcctgcaggaccaagagtgcatcccgtgcacgaagcagacccccacctctgaggttcaatgtgccttccagttgagcttagtggaggcagatgcacccacagtgccccctcaggaggccacacttgttgcactggtgagcagcctgctagtggtgtttaccctggccttcctggggctcttcttcctctactgcaagcagttcttcaacagacattgccagcgtggaggtttgctgcagtttgaggctgataaaacagcaaaggaggaatctctcttccccgtgccacccagcaaggagaccagtgctgagtcccaagtgagtgagaacatctttcagacccagccacttaaccctatcctcgaggacgactgcagctcgactagtggcttccccacacaggagtcctttaccatggcctcctgcacctcagagagccactcccactgggtccacagccccatcgaatgcacagagctggacctgcaaaagttttccagctctgcctcctatactggagctgagaccttggggggaaacacagtcgaaagcactggagacaggctggagctcaatgtgccctttgaagttcccagcccttaa

SEQ ID NO: 212488 - DNA, 939 bp, Homo sapiens
atggattgccaagaaaatgagtactgggaccaatggggacggtgtgtcacctgccaacggtgtggtcctggacaggagctatccaaggattgtggttatggagagggtggagatgcctactgcacagcctgccctcctcgcaggtacaaaagcagctggggccaccacagatgtcagagttgcatcacctgtgctgtcatcaatcgtgttcagaaggtcaactgcacagctacctctaatgctgtctgtggggactgtttgcccaggttctaccgaaagacacgcattggaggcctgcaggaccaagagtgcatcccgtgcacgaagcagacccccacctctgaggttcaatgtgccttccagttgagcttagtggaggcagatgcacccacagtgccccctcaggaggccacacttgttgcactggtgagcagcctgctagtggtgtttaccctggccttcctggggctcttcttcctctactgcaagcagttcttcaacagacattgccagcgtggtaagggtggctgcttcatgtttcacatgaatcaggaacaaggctcttattggcagaagagagggatgttctggggttgagagacaatgggccttttctaccatgcttgaaaaccccatgaatagtcttctgttggcctggggaactatctggggctgcaatggaaagcatgggacttaagagattactgaagccaaccctgagagtttagaagacctggttcattatgtttcaggggattttaaaggaatgtggcacggtgggaaacccctcaggaaaggaatcgggagacctaggttctatgtctacctctaaatcaccgtgtaaccttagacaagtcatctagcctcttcagacctctttcttcctaatctttaagataagagataggattggatttgttgatttctgggttcttttcc

SEQ ID NO: 212489 - DNA, 90 bp, Homo sapiens
gcataatttgttgacggaatatatattcttgggcatgcaaattacatgaactgctgataagattcgagaaactcccttcttccccttgga

SEQ ID NO: 212490 - DNA, 1078 bp, Homo sapiens
aaaggagcctggaggagttggtcagcgctgcggggcaggattgcgcggaagtggacgccatcctgagggagatttccgagcgctgcgatgaagcccttcagagccgcgatcccaagcggccccgactgctgccagagcccgcgaatactgacaccaggcccgggaacctgcatggcgccttccgggggctgcgcacagactgcagccggagcgcgttgaacctgagccacagtgagctggaggagggcggctccttcagcacccgcatccgcagccacagcaccatccgcaccctcgccttcccccagggcaatgccttcaccatcagaacagccaacgggggttacaagttccgctgggtccccagttgagctgtgatgtggtcccccaaaacactgccctgtgtttccactgaagtgcctgggggcttcccagaactttgccttcaggttgaatgccaccctgaaacactttttcaggaacaaaagcatcttgataccgatgcattgtaaatttctgctacaaaacattgtatagcccctccccttgtcacagtgaaactctgtttatatatgtatatgtcacatatgtcacagccaattttaaaagtatttatttttagcagctttgaattatgtatttttagagcagggaaggatttagaaaccatagttacttttataattatgtaatgctctaatattataagaaggaaaagaaggctctaagagattaagtaatttcctgcaatgggaaacactggaacctttcaatcactttaactagtcacttaaggactctaggcccagaagcctggtttctgggtgaatgtttttatacatcactcaacttccctcgtcctaaaaggacacctaattttgttactattgaaaatttttattttggtggccagaatacgaaatcgggagaggtaacccaaacagttgtcttaggaaaaggcagattctcagaggcaatgggctatcaacaaaataggtgctaagcacatttgtttgtaatgatcattcatataatttagaagatttatggtaacagtttatattcattatccatacag

SEQ ID NO: 212491 - DNA, 382 bp, Homo sapiens
ataagaagaaataaactcgctagtaaaaattgcagacacacaaaaggcttgaacaggcacttcacaaaatagattatccaaatgaccaataaatacataagtactcaacatcattagccattagaaaaatgcaagttaaaaccacaatgagataccatttcacactagaatgaataaaattttaaaagactgacaatgctaaatattcccaggatgcagaacaaccaaaaccctcatatattatgggggacatggaaaattgtacaactcctttggaaaacaggtagtttctacagaatttcaatatatacataccatacaactcagccattgcattcctatttacccaacagaaataaaatcatttgtctactgaaaaatt

SEQ ID NO: 212492 - DNA, 1301 bp, Homo sapiens
ctgaggcgccgggagcctgcgccggcgtcctgccggcttcgtctcctcagcggccatgaggcggacaggccccgaggaggaggcctgcggcgtgtggctggacgcggcggcgctgaagaggcggaaagtgcagacacatttaatcaaaccaggcaccaaaatgctaacactccttcctggagaaagaaaggctaatatttattttactcaaagaagagctccatctacaggcattcaccagagaagcattgcttccttcttcaccttgcagccaggaaagacaaatggcagtgaccagaagagtgtttcatctcatacagaaagtcagatcaacaaagagtccaagaaaaatgcgacccagctagaccatttgatcccaggcttagcacacgattgcatggcatcccctttagccacttcaaccactgcagacatccaggaagctggactctctcctcagtccctccagacttctggccaccacagaatgaaaaccccattttcaactgagctatctttgctccagcctgatactccagactgtgctggagatagtcataccccactggctttttccttcaccgaggacttggaaagttcttgtttgctagaccgaaaggaagaaaaaggggattctgccaggaaatgggaatggcttcatgagtctaagaagaactatcagagtatggagaaacacaccaaactacctggggacaaatgctgtcagcccttaggcaagactaaattggaaagaaaggtgtctgccaaagaaaacaggcaggcccctgtcctccttcaaacatacagggaatcctggaatggagaaaacatagaatcagtgaaacaaagccgtagtccagtttctgtgttttcctgggacaatgaaaagaatgacaaggactcctggagtcaacttttcactgaagattctcaaggccagcgggtcattgcccacaacactagagctccttttcaagatgtaaccaataactggaattgggacttagggccgtttcctaacagtccttgggctcagtgccaggaggatgggccaactcaaaatctgaagcctgatttgctctttacccaggactctgaaggtaatcaagttatcagacaccaattctaaatgtttgaagctttgtttctaaaagtaccttgaaatgatagagatgtaggaaaatatagttgtgggtggagagaggagtgagtttgtttaggtgggaaggtggcatgggatgaagttgtcattactgagcatcttctctgtgtaaataaagggcagtaccattgttaagaca

SEQ ID NO: 212493 - DNA, 1353 bp, Homo sapiens
ttctttgcatatttccttcattctaaagtgttccctggccgggagcgtggctttcgcctgtaatcccaacacttcgggaggccaggtgggcagatcacctgaggtcaggagttcgagaccagcttggccaacatggtgaaacctcatctctactaaaaatacaaaaattacgattctcctgcctcagcctcccgaatagcagggactacaggcatgcgccaccacgcccagctaattttttttggatttttagtagagacgaggtttcaccatattagccaggatggtctccatctcctgacctcctgatccgcccacctcagcctcccaaagtgctgagattacaggcataagccaccgcgcccagccagatgtgtgagcttttaatctctggctgatcttaacccacatcagcctaagcttgggatgattactcttgacccttttttttcagtgattagcaaatctccccacaacccaggtgtggagagaagagaggtagaatggtgctagtttcctattttatttttgtggtaactgtacagcactttaaagttatatactctatgtttaaatatctcccttaaaaagcctgagctgtacaacaatctggatgtgactctgttacccttttcccacaagataggagggaatcccctttgtaaaactatgaatccaaataaatgtttacaaagtggctcttgtgataattggtaattaaaccattaccaattttatttttgaaaaggcaacactgtaatagtatatgctgtcattgccctgagcctgatctgaaccagagtctagtttgacctgtcttctacccaaggcattattccttgttgttgatgtggtatctaagaggcttaaacaacctctaagggacaaacttgcaaggttataagagaactgcttctttttttttttttaacttaaattttatttttttgagacacggtctcgctctcttgcccaggctggagtgtggtggcatgaacacggttcactgcagcctggacctcctgggcgcaagtgattctcccacctcagcctcccgagtagctgaactataggcacatgccaccatgcccagctaattatttttaaaatattttgtagagatgaggtcttgctttgttgcccaggctgatcttgaactcccaaagtgctgtgattagaggtgtgagccactgtgcctggcctaatttaaatgttaaattctacttttatcgtgtatgtcatctctccagtcattttcctggaagacctgcttttaagaatgtatggggcttagtgcggtggctcatgtctgtaatctcaacgctctgggaggctgaggtgggaggtttgctt

SEQ ID NO: 212494 - DNA, 1124 bp, Homo sapiens
ctgaggcgccgggagcctgcgccggcgtcctgccggcttcgtctcctcagcggccatgaggcggacaggccccgaggaggaggcctgcggcgtgtggctggacgcggcggcgctgaagaggcggaaagtgcagacacatttaatcaaaccaggcaccaaaatgctaacactccttcctggagaaagaaaggctaatatttattttactcaaagaagagctccatctacaggcattcaccagagaagcattgcttccttcttcaccttgcagccaggaaagacaaatggcagtgaccagaagagtgtttcatctcatacagaaagtcagatcaacaaagagtccaagaaaaatgcgacccagctagaccatttgatcccaggcttagcacacgattgcatggcatcccctttagccacttcaaccactgcagacatccaggaagctggactctctcctcagtccctccagacttctggccaccacagaatgaaaaccccattttcaactgagctatctttgctccagcctgatactccagactgtgctggagatagtcataccccactggctttttccttcaccgaggacttggaaagttcttgtttgctagaccgaaaggaagaaaaaggggattctgccaggaaatgggaatggcttcatgagtctaagaagaactatcagagtatggagaaacacaccaaactacctggggacaaatgctgtcagcccttaggcaagactaaattggaaagaaaggtgtctgccaaagaaaacaggcaggcccctgtcctctttcaagatgtaaccaataactggaattgggacttagggccgtttcctaacagtccttgggctcagtgccaggaggatgggccaactcaaaatctgaagcctgatttgctctttacccaggactctgaaggtaatcaagttatcagacaccaattctaaatgtttgaagctttgtttctaaaagtaccttgaaatgatagagatgtaggaaaatatagttgtgggtggagagaggagtgagtttgtttaggtgggaaggtggcatgggatgaagttgtcattactgagcatcttctctgtgtaaataaagggcagtaccattgttaagaca

SEQ ID NO: 212495 - DNA, 2772 bp, Homo sapiens
ctgaggcgccgggagcctgcgccggcgtcctgccggcttcgtctcctcagcggccatgaggcggacaggccccgaggaggaggcctgcggcgtgtggctggacgcggcggcgctgaagaggcggaaagtgcagacacatttaatcaaaccaggcaccaaaatgctaacactccttcctggagaaagaaaggctaatatttattttactcaaagaagagctccatctacaggcattcaccagagaagcattgcttccttcttcaccttgcagccaggaaagacaaatggcagtgaccagaagagtgtttcatctcatacagaaagtcagatcaacaaagagtccaagaaaaatgcgacccagctagaccatttgatcccaggcttagcacacgattgcatggcatcccctttagccacttcaaccactgcagacatccaggaagctggactctctcctcagtccctccagacttctggccaccacagaatgaaaaccccattttcaactgagctatctttgctccagcctgatactccagactgtgctggagatagtcataccccactggctttttccttcaccgaggacttggaaagttcttgtttgctagaccgaaaggaagaaaaaggggattctgccaggaaatgggaatggcttcatgagtctaagaagaactatcagagtatggagaaacacaccaaactacctggggacaaatgctgtcagcccttaggcaagactaaattggaaagaaaggtgtctgccaaagaaaacaggcaggcccctgtcctccttcaaacatacagggaatcctggaatggagaaaacatagaatcagtgaaacaaagccgtagtccagtttctgtgttttcctgggacaatgaaaagaatgacaaggactcctggagtcaacttttcactgaagattctcaaggccagcgggtcattgcccacaacactagagctccttttcaagatgtaaccaataactggaattgggacttagggccgtttcctaacagtccttgggctcagtgccaggaggatgggccaactcaaaatctgaagcctgatttgctctttacccaggactctgaaggtaatcaagttatcagacaccaattctaaatgtttgaagctttgtttctaaaagtaccttgaaatgatagagatgtaggaaaatatagttgtgggtggagagaggagtgagtttgtttaggtgggaaggtggcatgggatgaagttgtcattactgagcatcttctctgtgtaaataaagggcagtaccattgttaagacagtgggattggcatcatggctttccctcaggaaggtggtggctggtaaattccctgaatgagtctatgatgaacactgaggcagcacagtgggtatttatctctatgaaagtgccttttactcagcctgcacagagccatctctttgcccttccagatgtctgactgggaccttgcttatggatgtgtttttttttttttttttttgagatggagtctcgctctgtcgccaggctggagtgcagtggtgcgacctcagctcactgcaccctctgtgtcccggattcaagcgattctcctgcctcagcctcccgaatagcagggactacaggcatgcgccaccacgcccagctaattttttttggatttttagtagagacgaggtttcaccatattagccaggatggtctccatctcctgacctcctgatccgcccacctcagcctcccaaagtgctgagattacaggcataagccaccgcgcccagccagatgtgtgagcttttaatctctggctgatcttaacccacatcagcctaagcttgggatgattactcttgacccttttttttcagtgattagcaaatctccccacaacccaggtgtggagagaagagaggtagaatggtgctagtttcctattttatttttgtggtaactgtacagcactttaaagttatatactctatgtttaaatatctcccttaaaaagcctgagctgtacaacaatctggatgtgactctgttacccttttcccacaagataggagggaatcccctttgtaaaactatgaatccaaataaatgtttacaaagtggctcttgtgataattggtaattaaaccattaccaattttatttttgaaaaggcaacactgtaatagtatatgctgtcattgccctgagcctgatctgaaccagagtctagtttgacctgtcttctacccaaggcattattccttgttgttgatgtggtatctaagaggcttaaacaacctctaagggacaaacttgcaaggttataagagaactgcttctttttttttttttaacttaaattttatttttttgagacacggtctcgctctcttgcccaggctggagtgtggtggcatgaacacggttcactgcagcctggacctcctgggcgcaagtgattctcccacctcagcctcccgagtagctgaactataggcacatgccaccatgcccagctaattatttttaaaatattttgtagagatgaggtcttgctttgttgcccaggctgatcttgaactcccaaagtgctgtgattagaggtgtgagccactgtgcctggcctaatttaaatgttaaattctacttttatcgtgtatgtcatctctccagtcattttcctggaagacctgcttttaagaatgtatggggcttagtgcggtggctcatgtctgtaatctcaacgctctgggaggctgaggtgggaggtttgctt

SEQ ID NO: 212496 - DNA, 1257 bp, Homo sapiens
ctgaggcgccgggagcctgcgccggcgtcctgccggcttcgtctcctcagcggccatgaggcggacaggccccgaggaggaggcctgcggcgtgtggctggacgcggcggcgctgaagaggcggaaagtgcagacacatttaatcaaaccaggcaccaaaatgctaacactccttcctggagaaagaaaggctaatatttattttactcaaagaagagctccatctacaggcattcaccagagaagcattgcttccttcttcaccttgcagccagatgtgtgagcttttaatctctggctgatcttaacccacatcagcctaagcttgggatgattactcttgacccttttttttcagtgattagcaaatctccccacaacccaggtgtggagagaagagaggtagaatggtgctagtttcctattttatttttgtggtaactgtacagcactttaaagttatatactctatgtttaaatatctcccttaaaaagcctgagctgtacaacaatctggatgtgactctgttacccttttcccacaagataggagggaatcccctttgtaaaactatgaatccaaataaatgtttacaaagtggctcttgtgataattggtaattaaaccattaccaattttatttttgaaaaggcaacactgtaatagtatatgctgtcattgccctgagcctgatctgaaccagagtctagtttgacctgtcttctacccaaggcattattccttgttgttgatgtggtatctaagaggcttaaacaacctctaagggacaaacttgcaaggttataagagaactgcttctttttttttttttaacttaaattttatttttttgagacacggtctcgctctcttgcccaggctggagtgtggtggcatgaacacggttcactgcagcctggacctcctgggcgcaagtgattctcccacctcagcctcccgagtagctgaactataggcacatgccaccatgcccagctaattatttttaaaatattttgtagagatgaggtcttgctttgttgcccaggctgatcttgaactcccaaagtgctgtgattagaggtgtgagccactgtgcctggcctaatttaaatgttaaattctacttttatcgtgtatgtcatctctccagtcattttcctggaagacctgcttttaagaatgtatggggcttagtgcggtggctcatgtctgtaatctcaacgctctgggaggctgaggtgggaggtttgctt

SEQ ID NO: 212497 - DNA, 787 bp, Homo sapiens
tgtggctttgaacaagttatgtcttttccattttgtcatttccataatgaatataaagctaacttataaactagaatattttgataattagtgattataaaacaaaggactagagatacaacttttattataatagtgaaaagtgaaaatggaactggctatataggaagaagccattaatcttgatgacagaaactttgggtcagattcccacaacagattcttcacaggatctaacagaatcatccagtaaggaatggggagcatgtccttttgctcccatgcctccataggctcagtccagtctgacctcagaaacaggctcttgccctgggcaggaggaatgtaaagattccctccacccaaattccgagctcaaaattaaattccatttttttgctgttggtgacagcatctgctgtacacacaagatgttgcctgatctctctggtgtccgtttctggcttttggttggccaaacccacaagtctccaaattcttagttggagtcctcatgcctactgcctgaccattctctcctcactgcttgtctccttgagcttacttccttgcctgaacatcactgtctcagccagcttccatcttgcagcctctgatatgcagaagacattaactcccaccctaccccagcctccttggcagcccacctggtttgtcactgaccttccagatccaagcatgacagtttaatctccatatccaatcctcccctgacctgattaattttgcacttaagcaacttccatgataagttatactttttttc

SEQ ID NO: 212498 - DNA, 505 bp, Homo sapiens
aggctccattcccttcagttagaactattactatatatagattgaagcctctcaaaagcccttggtctttctgtgctctatttctagctgaattcctcagtcctttcgttctttctttccttttgaaatatgccatacatatagaaaaacttaattattattgttcatatgtttttttaaaagatcatccatgtaataaatcacccagcataagaaatcggtcactgacagcacccagaggctactctccttccagaggcaaccaccatcctgtcctatgtgatgattaagaaaagataaaaatgttactacatgtatttgcatctctaatcaatgtagtttagtttttacttgtttaaactttatataactggaagtatagcctatgtattttttgtgacttacttcctttactcaagattgctttagcgccatccacagagaacagtactctgttcatttttattgatgtatatagttcattgaataaatgcaccaatctgtg

SEQ ID NO: 212499 - DNA, 1448 bp, Homo sapiens
aagtgagaagagttagtttctattccaaacttgaccaagaatttggtttgactgagaacgttttcctctcagtttttgtacatttatttagagcagtggttctcagtggaggtcagttttgatcgccaggggacatctggcaatgttgagacattttggttgtcacagcttgggggtgggttcaggggagggttgctactggtgtctagtagttagaagccagagatgtttctaaacatcttataatgcacaggacagcacccctccactgtaaagaattattggttcaaaaatatcggtactgccaaggttgagaaactctgatatagaaggagtgataaatattgttttcacccaaaggaatacttttaaaggatgaagcttactaaacatatatgatggaagtattattcagataacattaatattctgctgaataattttttctagtttaatcatactagaaaaagaaaaaaaatctacaaattgtcctataaaataaggacaaacatgcaaataatttaactctcagaaagtactaattcattctgattatctttcatacctctgtgctcctctgcactgacgaagacataatatgattatacctatgaactagtgcacagccttttctggcaagaaaatagtttgtagcagatacgtggttgctctttggatttttttctattgttgaacatgctgggactagctagaatgcacattcctacttcctttaccaaacgtttgcatgcttcctgcaaagcacttaccaagtgatttctcttgaaccatcggatataattttgtatgtacatgtttgaggaaaaaaatgtaaagcaaaaccttttactgaacagtgttctatagaattatgacactaaaacaaaattgtttgtggaagccctgaaagctttatagtcctggacatcaaaaattttatttgagatgatgaatgttttgttttcatcttttcttatattaccacaattgagatattttagtaattgaaggaacatacacagatatttggcagaagtcgagtaaggaggggaaaaaaagagtccgtgagtttcagtcattttcactgctcttttcaaaaagattgtgttgagctggtagaagactaaagatgtcactgaagacatcacagatactatatttatcttttggctttgtgtacattagagaatgttgattatttttatacaaaaatacagcgggtaatttttttaatctttagatgcctcttgtttgaatgtatgctttgtggaattctttgtgtagtaatgttttaaaaaaagatgtttactgatagttacatgtaggattagaatatgtaatataatataaggctcatgttccagacctacgatagcttgtagtctatgttacgtatttctttatatcacatttttaatcattggattaaagtatcaaggaaagctaaa

SEQ ID NO: 212500 - DNA, 861 bp, Homo sapiens
tgtccctgctgccagaggactacggcgggctgggcgcggggtccccgcctctcgctcaccacacagaccccgcgcctcctctggcagccgcggtggtggcggcggcagagcctcgcccactccaatccccaccctctccatccttagtcattaaagaacagcagcgcctggcacgttcttggaggaccccgggcgcagaggaggaaagggagcaggcgcagggggactggaaaggcagcatgcgctcgccaggagcaacctcggcgcccagggtctgaggctgcagccccagttcgccattgtgagccgccgccgggggagtccgctagcgcagccgtgcccccgagtccccgtccgcgcagcgatggggcacctgcccacggggatacacggcgcccgccgcctcctgcctctgctctggctctttgtgctgttcaagaatgctacagctttccatgtaactgtccaagatgataataacatcgttgtctcattagaagcttcagacgtcatcagtccagcatctgtgtatgttgtgaagataactggtgaatccaaaaattatttcttcgaatttgaggaattcaacagcactttgcctcctcctgttattttcaaggccagttatcatggcctttattatataatcactctggtagtggtaaatggaaatgtggtgaccaagccatccagatcaatcactgtgttaacaagtaagcatcatgtgtaatattgtcccgtttcttcttattgttcccctgtttcttcccgtagggctcgaattgacagactccacccagaatggcaaaatcacttgccttaatgccaagtgacgtagattcaaagttatgagctatatta

SEQ ID NO: 212501 - DNA, 5691 bp, Homo sapiens
tgtccctgctgccagaggactacggcgggctgggcgcggggtccccgcctctcgctcaccacacagaccccgcgcctcctctggcagccgcggtggtggcggcggcagagcctcgcccactccaatccccaccctctccatccttagtcattaaagaacagcagcgcctggcacgttcttggaggaccccgggcgcagaggaggaaagggagcaggcgcagggggactggaaaggcagcatgcgctcgccaggagcaacctcggcgcccagggtctgaggctgcagccccagttcgccattgtgagccgccgccgggggagtccgctagcgcagccgtgcccccgagtccccgtccgcgcagcgatggggcacctgcccacggggatacacggcgcccgccgcctcctgcctctgctctggctctttgtgctgttcaagaatgctacagctttccatgtaactgtccaagatgataataacatcgttgtctcattagaagcttcagacgtcatcagtccagcatctgtgtatgttgtgaagataactggtgaatccaaaaattatttcttcgaatttgaggaattcaacagcactttgcctcctcctgttattttcaaggccagttatcatggcctttattatataatcactctggtagtggtaaatggaaatgtggtgaccaagccatccagatcaatcactgtgttaacaaaacctctacctgtaaccagtgtttccatatatgactataaaccttctcctgaaacaggagtcctgtttgaaatacattatccagaaaaatataacgttttcacaagagtgaacattagctactgggaaggtaaagacttccggacaatgctatataaagatttctttaagggaaaaacagtatttaatcactggctgccaggaatgtgttatagtaatatcacctttcagctggtatctgaggcaacttttaataaaagtacccttgttgagtacagtggtgtcagtcacgaacccaaacagcacagaactgccccttatccacctcaaaatatttccgttcgtatcgtaaacttgaacaaaaacaactgggaagaacagagtggcaatttcccagaagaatccttcatgagatcacaagatacaataggaaaagaaaaactcttccattttacagaagaaacccctgaaattccctcgggcaacatttcttccggttggcctgattttaatagcagtgactatgaaactacgtctcagccatattggtgggacagtgcatctgcagctcctgaaagtgaagatgaatttgtcagcgtacttcccatggaatacgaaaataacagtacactcagtgagacagagaagtcaacatcaggctctttctcctttttccctgtgcaaatgatattgacctggttaccacccaaaccacccactgcttttgatgggttccatatccatattgaacgagaagagaactttactgaatatttgatggtggatgaagaagcacatgaatttgttgcagaactgaaggaacctgggaaatataagttatctgtgacaacctttagttcctcaggatcttgtgaaactcgaaaaagtcagtcagcaaaatcactcagcttttatatcagtccttcaggagagtggattgaagaactgaccgagaagccgcagcacgtgagtgtccacgttttaagctcaaccactgccttgatgtcctggacatcttcccaagagaactacaacagcaccattgtgtctgtggtgtcgctgacctgccagaaacaaaaggagagccagaggcttgaaaagcagtactgcactcaggtgaactcaagcaaacctattattgaaaatctggttcctggtgcccagtaccaggttgtaatatacctaaggaaaggccctttgattggaccaccttcagatcctgtgacatttgctattgttcccacaggaataaaggatttaatgctctatcctttgggtcctacggccgtggttctgagctggaccagaccttatttaggcgtgttcagaaaatacgtggttgaaatgttttatttcaaccctgctacaatgacatcagagtggaccacctactatgaaatagcagcaactgtttccttaactgcatccgtgagaatagctaatctgctgccagcatggtactacaacttccgggttaccatggtgacgtggggagatccagaattgagctgctgtgacagctctaccatcagcttcataacagccccagtggctccggaaatcacttctgtggaatatttcaacagtctgttatatatcagttggacatatggggatgatacaacggacttgtcccattctagaatgcttcactggatggtggttgcagaaggaaaaaagaaaattaaaaagagtgtaacacgcaatgtcatgactgcaattctcagcttgcctccaggcgacatctataacctctcagtaactgcttgtactgaaagaggaagtaatacctccatgctccgccttgtcaagctagaaccagctccacccaaatcactcttcgcagtgaacaaaacccagacttcagtgactttgctgtgggtggaagagggagtagctgatttctttgaagttttctgtcaacaagttggctccagtcagaaaaccaaacttcaggaaccagttgctgtttcttcccatgtcgtgaccatctccagccttcttcctgccactgcctacaattgtagtgtcaccagctttagccatgacagccccagtgtccctacgttcatagccgtctcaacaatggttacagagatgaatcccaatgtggtagtgatctccgtgctggccatccttagcacacttttaattggactgttgcttgttaccctcattattcttaggaaaaagcatctgcagatggctagggagtgtggagctggtacatttgtcaattttgcatccttagagagggatggaaagcttccatacaactggcgtaggagtatatttgctttcttaaccctgctaccctcatgtctttggactgattatcttttggcattttatattaatccttggagtaaaaatggtttaaagaagaggaaactgacaaacccggttcaactggatgactttgatgcctatattaaggatatggccaaagactctgactataaattttctcttcagtttgaggagttgaaattgattggactggatatcccacactttgctgcagatcttccactgaatcgatgtaaaaaccgttacacaaacatcctaccatatgacttcagccgtgtgagattagtctccatgaatgaagaggaaggtgcagactacatcaatgccaactatattcctggatacaactcaccccaggagtatattgccacccaggggccactgcctgaaaccagaaatgacttctggaagatggtcctgcaacaaaagtctcagattattgtcatgctcactcagtgtaatgagaaaaggagggtgaaatgtgaccattactggccattcacggaagaacctatagcctatggagacatcactgtggagatgatttcagaggaagagcaggacgactgggcctgtagacacttccggatcaactatgctgacgagatgcaggatgtgatgcattttaactacactgcatggcctgatcatggtgtgcccacagcaaatgctgcagaaagtatcctgcagtttgtacacatggtccgacagcaagctaccaagagcaaaggtcccatgatcattcactgcagtgctggcgtgggacggacaggaacattcattgccctggacaggctcttgcagcacattcgggatcatgagtttgttgacatcttagggctggtgtcagaaatgaggtcataccggatgtctatggtacagacagaggagcagtacatttttatccatcagtgtgtgcaactgatgtggatgaagaagaagcagcagttctgcatcagtgatgtcatatacgagaatgttagcaagtcctagttcagaatccggagcagagaggacatgatgtgcgcccatcctcccttgcttccagattgttttagtgggccctgatggtcatttttctaaacagaggccctgctttgtaatatgtggccaaggagataatttatctcacagaagcaccgggaagacttagccttaaagagcctacagtgtccttttggactctttcacttcgggacatttaataatggaccaaattcaacagaacaccaggaaggtcaagacgctctccaaagggcaggaagtacagcacttccgaagagtttagttggccctttgctggttgggctgagttttttatttttaagtgtttgtttttcagtgcaataatttttgtgtgtgtgtgattcttatcagaaagttgaattgttttctgcctacaccgttcatcagccccataacccaggaaggaacaggcattgttagcatcagattatacctcattattaaaaggaggcatggccacacatgaagaaatggtcattctacttcaaagaaattgagccagcactatctgtactccaacattaccggatctggattggggaggttggtcagggaagagaggggttctacccacagatcaactgtgtaatcttttactattcaagctataattcagcttcaaagtagagtagaaaaaaaattgtcttaactgttctagttcttgatggttttcttccttattaacagttggtgtttcttccttggcccttttggactaatgttactgtccaagttctttctcaagaaaccacatctggttcagaagagtgtcaagttggactctttgaactctgttgctgtctgagcaatcgtggtgcctagactttgcattccttgttctgttgacctgcatacatgtgagagctatttctttaagaactatataggctgtgaaaacgcactttctttcccccaaagagctgggaatttatgaagttatggcaatgaactgcagcatgctgggacaattatttgactacttttttttgtaatattgtcaaatgtctctatggattctgacagagatttctttttgttttgttattcttttggttgtcagtttcattttaacgagtgtaactagtaacattttattctttggattttgtataattacagtacatgattgtgtattgtgacatgaatgctgtcaaaatgacattgatggcattgtgaagcctgttactttgtgtcacttcctgataaataagaggtgatgacatggatatacaacagaaaacactttgagttgaaagtaaacacaagctggctgcttccctgtggcaaaaaaaaaaaaaatagcattcctgcacatctgtacccacgccttcttcaaagccatactatttatgtgctccggatccatcatccacaaccttaacaatgaacaagatattcgaaaaataggaggactactcaaaaccatacctctcacttcaacctccctcaccattggcagcctagcattagcaggaatacctttcctcacaggtttctactccaaagaccacatcatcgaaaccgcaaacatatcatacacaaacgcctgagccctatctattactctcatcgctacctccctgacaagcgcctatagcactcgaataattcttctcaccctaacaggtcaacctcgcttcccc

SEQ ID NO: 212502 - DNA, 4328 bp, Homo sapiens
aagtaaaaaaatggaagggggaaaaggcaaagtattctgccttccaagttagatagctatctttatgaaaggacatatttcaaaggcaatataaagtctttatggtgctcttacctacctatatttgaattgggggatgcttcacctgcttattagtgaaagaagaaagaatacacttagtaaattaaattttttttaaaactttgtctttgctcagaaccagctccacccaaatcactcttcgcagtgaacaaaacccagacttcagtgactttgctgtgggtggaagagggagtagctgatttctttgaagttttctgtcaacaagttggctccagtcagaaaaccaaacttcaggaaccagttgctgtttcttcccatgtcgtgaccatctccagccttcttcctgccactgcctacaattgtagtgtcaccagctttagccatgacagccccagtgtccctacgttcatagccgtctcaacaatggttacagagatgaatcccaatgtggtagtgatctccgtgctggccatccttagcacacttttaattggactgttgcttgttaccctcattattcttaggaaaaagcatctgcagatggctagggagtgtggagctggtacatttgtcaattttgcatccttagagagggatggaaagcttccatacaactggagtaaaaatggtttaaagaagaggaaactgacaaacccggttcaactggatgactttgatgcctatattaaggatatggccaaagactctgactataaattttctcttcagtttgaggagttgaaattgattggactggatatcccacactttgctgcagatcttccactgaatcgatgtaaaaaccgttacacaaacatcctaccatatgacttcagccgtgtgagattagtctccatgaatgaagaggaaggtgcagactacatcaatgccaactatattcctggatacaactcaccccaggagtatattgccacccaggggccactgcctgaaaccagaaatgacttctggaagatggtcctgcaacaaaagtctcagattattgtcatgctcactcagtgtaatgagaaaaggagggtgaaatgtgaccattactggccattcacggaagaacctatagcctatggagacatcactgtggagatgatttcagaggaagagcaggacgactgggcctgtagacacttccggatcaactatgctgacgagatgcaggatgtgatgcattttaactacactgcatggcctgatcatggtgtgcccacagcaaatgctgcagaaagtatcctgcagtttgtacacatggtccgacagcaagctaccaagagcaaaggtcccatgatcattcactgcagtgctggcgtgggacggacaggaacattcattgccctggacaggctcttgcagcacattcgggatcatgagtttgttgacatcttagggctggtgtcagaaatgaggtcataccggatgtctatggtacagacagaggagcagtacatttttatccatcagtgtgtgcaactgatgtggatgaagaagaagcagcagttctgcatcagtgatgtcatatacgagaatgttagcaagtcctagttcagaatccggagcagtaagtggagaagagctctccacgagtgttcagtcttagaactattagagggggatgtgatggatgggacaaaagacagcagtagccatttgtattgactctgacttcacatgagtatttcttcccagctcctggcctcacatgggtggtcacagggagaaacaagtactgtagcagatctttgagtttcaatgcaccttggttggtgttggcaacaaacaggagcttctgcacatcatgatgactttacctccattccctctacccagaaccctaaattattctgttattggatctgtgcctgtaatatcaggatactaccatccaaatctatctagatatcttgtgcaaatattttattgattacaagggctgtatacggggttacaaaaagacatgagctggattggacactcctaaaaccaaaaacaacagtgacaatagagtctcaggatagcagagtctgaaaataccttggtctcccccattatgtgagcccttatttgagagcttcatgaagacacttgtaacatattcaacgtcctgtactccagttttgactacgagatcagattttggaggtgtaagtaatcttggctgaggtaacagtaatctgcccatttagttcagtaaacagactgtagagtgtctgactatactgggggaagaggagccaatgacagggtagggagatgacagtggtgcatgatgggagaatcatgaaagtctgggaagcatatggaccagtgggaaggataggattagcactgcacctctacatccatcaagagagacagagcgcacaatggagcaggaaggataaaaaataaagaaagacagagacaaacaaatttgctgggagagggaaagacattcagacccacagaaaggaggcagcacacagagaaagatgcacagatcaacccacatctgcatgggttgtgagactgagcatagtgagagcagtggtggagcaatagaagattgctgtgacaccaggctgcttactgtctttctttgtctcattcacaggagaggacatgatgtgcgcccatcctcccttgcttccagattgttttagtgggccctgatggtcatttttctaaacagaggccctgctttgtaatatgtggccaaggagataatttatctcacagaagcaccgggaagacttagccttaaagagcctacagtgtccttttggactctttcacttcgggacatttaataatggaccaaattcaacagaacaccaggaaggtcaagacgctctccaaagggcaggaagtacagcacttccgaagagtttagttggccctttgctggttgggctgagttttttatttttaagtgtttgtttttcagtgcaataatttttgtgtgtgtgtgattcttatcagaaagttgaattgttttctgcctacaccgttcatcagccccataacccaggaaggaacaggcattgttagcatcagattatacctcattattaaaaggaggcatggccacacatgaagaaatggtcattctacttcaaagaaattgagccagcactatctgtactccaacattaccggatctggattggggaggttggtcagggaagagaggggttctacccacagatcaactgtgtaatcttttactattcaagctataattcagcttcaaagtagagtagaaaaaaaattgtcttaactgttctagttcttgatggttttcttccttattaacagttggtgtttcttccttggcccttttggactaatgttactgtccaagttctttctcaagaaaccacatctggttcagaagagtgtcaagttggactctttgaactctgttgctgtctgagcaatcgtggtgcctagactttgcattccttgttctgttgacctgcatacatgtgagagctatttctttaagaactatataggctgtgaaaacgcactttctttcccccaaagagctgggaatttatgaagttatggcaatgaactgcagcatgctgggacaattatttgactacttttttttgtaatattgtcaaatgtctctatggattctgacagagatttctttttgttttgttattcttttggttgtcagtttcattttaacgagtgtaactagtaacattttattctttggattttgtataattacagtacatgattgtgtattgtgacatgaatgctgtcaaaatgacattgatggcattgtgaagcctgttactttgtgtcacttcctgataaataagaggtgatgacatggatatacaacagaaaacactttgagttgaaagtaaacacaagctggctgcttccctgtggcaaaaaaaaaaaaaatagcattcctgcacatctgtacccacgccttcttcaaagccatactatttatgtgctccggatccatcatccacaaccttaacaatgaacaagatattcgaaaaataggaggactactcaaaaccatacctctcacttcaacctccctcaccattggcagcctagcattagcaggaatacctttcctcacaggtttctactccaaagaccacatcatcgaaaccgcaaacatatcatacacaaacgcctgagccctatctattactctcatcgctacctccctgacaagcgcctatagcactcgaataattcttctcaccctaacaggtcaacctcgcttcccc

SEQ ID NO: 212503 - DNA, 3296 bp, Homo sapiens
aagtaaaaaaatggaagggggaaaaggcaaagtattctgccttccaagttagatagctatctttatgaaaggacatatttcaaaggcaatataaagtctttatggtgctcttacctacctatatttgaattgggggatgcttcacctgcttattagtgaaagaagaaagaatacacttagtaaattaaattttttttaaaactttgtctttgctcagaaccagctccacccaaatcactcttcgcagtgaacaaaacccagacttcagtgactttgctgtgggtggaagagggagtagctgatttctttgaagttttctgtcaacaagttggctccagtcagaaaaccaaacttcaggaaccagttgctgtttcttcccatgtcgtgaccatctccagccttcttcctgccactgcctacaattgtagtgtcaccagctttagccatgacagccccagtgtccctacgttcatagccgtctcaacaatggttacagagatgaatcccaatgtggtagtgatctccgtgctggccatccttagcacacttttaattggactgttgcttgttaccctcattattcttaggaaaaagcatctgcagatggctagggagtgtggagctggtacatttgtcaattttgcatccttagagagggatggaaagcttccatacaactggagtaaaaatggtttaaagaagaggaaactgacaaacccggttcaactggatgactttgatgcctatattaaggatatggccaaagactctgactataaattttctcttcagtttgaggagttgaaattgattggactggatatcccacactttgctgcagatcttccactgaatcgatgtaaaaaccgttacacaaacatcctaccatatgacttcagccgtgtgagattagtctccatgaatgaagaggaaggtgcagactacatcaatgccaactatattcctggatacaactcaccccaggagtatattgccacccaggggccactgcctgaaaccagaaatgacttctggaagatggtcctgcaacaaaagtctcagattattgtcatgctcactcagtgtaatgagaaaaggagggtgaaatgtgaccattactggccattcacggaagaacctatagcctatggagacatcactgtggagatgatttcagaggaagagcaggacgactgggcctgtagacacttccggatcaactatgctgacgagatgcaggatgtgatgcattttaactacactgcatggcctgatcatggtgtgcccacagcaaatgctgcagaaagtatcctgcagtttgtacacatggtccgacagcaagctaccaagagcaaaggtcccatgatcattcactgcagtgctggcgtgggacggacaggaacattcattgccctggacaggctcttgcagcacattcgggatcatgagtttgttgacatcttagggctggtgtcagaaatgaggtcataccggatgtctatggtacagacagaggagcagtacatttttatccatcagtgtgtgcaactgatgtggatgaagaagaagcagcagttctgcatcagtgatgtcatatacgagaatgttagcaagtcctagttcagaatccggagcagagaggacatgatgtgcgcccatcctcccttgcttccagattgttttagtgggccctgatggtcatttttctaaacagaggccctgctttgtaatatgtggccaaggagataatttatctcacagaagcaccgggaagacttagccttaaagagcctacagtgtccttttggactctttcacttcgggacatttaataatggaccaaattcaacagaacaccaggaaggtcaagacgctctccaaagggcaggaagtacagcacttccgaagagtttagttggccctttgctggttgggctgagttttttatttttaagtgtttgtttttcagtgcaataatttttgtgtgtgtgtgattcttatcagaaagttgaattgttttctgcctacaccgttcatcagccccataacccaggaaggaacaggcattgttagcatcagattatacctcattattaaaaggaggcatggccacacatgaagaaatggtcattctacttcaaagaaattgagccagcactatctgtactccaacattaccggatctggattggggaggttggtcagggaagagaggggttctacccacagatcaactgtgtaatcttttactattcaagctataattcagcttcaaagtagagtagaaaaaaaattgtcttaactgttctagttcttgatggttttcttccttattaacagttggtgtttcttccttggcccttttggactaatgttactgtccaagttctttctcaagaaaccacatctggttcagaagagtgtcaagttggactctttgaactctgttgctgtctgagcaatcgtggtgcctagactttgcattccttgttctgttgacctgcatacatgtgagagctatttctttaagaactatataggctgtgaaaacgcactttctttcccccaaagagctgggaatttatgaagttatggcaatgaactgcagcatgctgggacaattatttgactacttttttttgtaatattgtcaaatgtctctatggattctgacagagatttctttttgttttgttattcttttggttgtcagtttcattttaacgagtgtaactagtaacattttattctttggattttgtataattacagtacatgattgtgtattgtgacatgaatgctgtcaaaatgacattgatggcattgtgaagcctgttactttgtgtcacttcctgataaataagaggtgatgacatggatatacaacagaaaacactttgagttgaaagtaaacacaagctggctgcttccctgtggcaaaaaaaaaaaaaatagcattcctgcacatctgtacccacgccttcttcaaagccatactatttatgtgctccggatccatcatccacaaccttaacaatgaacaagatattcgaaaaataggaggactactcaaaaccatacctctcacttcaacctccctcaccattggcagcctagcattagcaggaatacctttcctcacaggtttctactccaaagaccacatcatcgaaaccgcaaacatatcatacacaaacgcctgagccctatctattactctcatcgctacctccctgacaagcgcctatagcactcgaataattcttctcaccctaacaggtcaacctcgcttcccc

SEQ ID NO: 212504 - DNA, 4770 bp, Homo sapiens
tgtccctgctgccagaggactacggcgggctgggcgcggggtccccgcctctcgctcaccacacagaccccgcgcctcctctggcagccgcggtggtggcggcggcagagcctcgcccactccaatccccaccctctccatccttagtcattaaagaacagcagcgcctggcacgttcttggaggaccccgggcgcagaggaggaaagggagcaggcgcagggggactggaaaggcagcatgcgctcgccaggagcaacctcggcgcccagggtctgaggctgcagccccagttcgccattgtgagccgccgccgggggagtccgctagcgcagccgtgcccccgagtccccgtccgcgcagcgatggggcacctgcccacggggatacacggcgcccgccgcctcctgcctctgctctggctctttgtgctgttcaagaatgctacagctttccatgtaactgtccaagatgataataacatcgttgtctcattagaagcttcagacgtcatcagtccagcatctgtgtatgttgtgaagataactggtgaatccaaaaattatttcttcgaatttgaggaattcaacagcactttgcctcctcctgttattttcaaggccagttatcatggcctttattatataatcactctggtagtggtaaatggaaatgtggtgaccaagccatccagatcaatcactgtgttaacaaaacctctacctgtaaccagtgtttccatatatgactataaaccttctcctgaaacaggagtcctgtttgaaatacattatccagaaaaatataacgttttcacaagagtgaacattagctactgggaaggtaaagacttccggacaatgctatataaagatttctttaagggaaaaacagtatttaatcactggctgccaggaatgtgttatagtaatatcacctttcagctggtatctgaggcaacttttaataaaagtacccttgttgagtacagtggtgtcagtcacgaacccaaacagcacagaactgccccttatccacctcaaaatatttccgttcgtatcgtaaacttgaacaaaaacaactgggaagaacagagtggcaatttcccagaagaatccttcatgagatcacaagatacaataggaaaagaaaaactcttccattttacagaagaaacccctgaaattccctcgggcaacatttcttccggttggcctgattttaatagcagtgactatgaaactacgtctcagccatattggtgggacagtgcatctgcagctcctgaaagtgaagatgaatttgtcagcgtacttcccatggaatacgaaaataacagtacactcagtgagacagagaagtcaacatcaggctctttctcctttttccctgtgcaaatgatattgacctggttaccacccaaaccacccactgcttttgatgggttccatatccatattgaacgagaagagaactttactgaatatttgatggtggatgaagaagcacatgaatttgttgcagaactgaaggaacctgggaaatataagttatctgtgacaacctttagttcctcaggatcttgtgaaactcgaaaaagtcagtcagcaaaatcactcagcttttatatcagtccttcaggagagtggattgaagaactgaccgagaagccgcagcacgtgagtgtccacgttttaagctcaaccactgccttgatgtcctggacatcttcccaagagaactacaacagcaccattgtgtctgtggtgtcgctgacctgccagaaacaaaaggagagccagaggcttgaaaagcagtactgcactcaggtgaactcaagcaaacctattattgaaaatctggttcctggtgcccagtaccaggttgtaatatacctaaggaaaggccctttgattggaccaccttcagatcctgtgacatttgctattgttcccacaggaataaaggatttaatgctctatcctttgggtcctacggccgtggttctgagctggaccagaccttatttaggcgtgttcagaaaatacgtggttgaaatgttttatttcaaccctgctacaatgacatcagagtggaccacctactatgaaatagcagcaactgtttccttaactgcatccgtgagaatagctaatctgctgccagcatggtactacaacttccgggttaccatggtgacgtggggagatccagaattgagctgctgtgacagctctaccatcagcttcataacagccccagtggctccggaaatcacttctgtggaatatttcaacagtctgttatatatcagttggacatatggggatgatacaacggacttgtcccattctagaatgcttcactggatggtggttgcagaaggaaaaaagaaaattaaaaagagtgtaacacgcaatgtcatgactgcaattctcagcttgcctccaggcgacatctataacctctcagtaactgcttgtactgaaagaggaagtaatacctccatgctccgccttgtcaagctagaaccagctccacccaaatcactcttcgcagtgaacaaaacccagacttcagtgactttgctgtgggtggaagagggagtagctgatttctttgaagttttctgtcaacaagttggctccagtcagaaaaccaaacttcaggaaccagttgctgtttcttcccatgtcgtgaccatctccagccttcttcctgccactgcctacaattgtagtgtcaccagctttagccatgacagccccagtgtccctacgttcatagccgtctcaacaatggttacagagatgaatcccaatgtggtagtgatctccgtgctggccatccttagcacacttttaattggactgttgcttgttaccctcattattcttaggaaaaagcatctgcagatggctagggagtgtggagctggtacatttgtcaattttgcatccttagagagggatggaaagcttccatacaactggcgtaggagtatatttgctttcttaaccctgctaccctcatgtctttggactgattatcttttggcattttatattaatccttggagtaaaaatggtttaaagaagaggaaactgacaaacccggttcaactggatgactttgatgcctatattaaggatatggccaaagactctgactataaattttctcttcagtttgaggagttgaaattgattggactggatatcccacactttgctgcagatcttccactgaatcgatgtaaaaaccgttacacaaacatcctaccatatgacttcagccgtgtgagattagtctccatgaatgaagaggaaggtgcagactacatcaatgccaactatattcctggatacaactcaccccaggagtatattgccacccaggggccactgcctgaaaccagaaatgacttctggaagatggtcctgcaacaaaagtctcagattattgtcatgctcactcagtgtaatgagaaaaggagggtgaaatgtgaccattactggccattcacggaagaacctatagcctatggagacatcactgtggagatgatttcagaggaagagcaggacgactgggcctgtagacacttccggatcaactatgctgacgagatgcaggatgtgatgcattttaactacactgcatggcctgatcatggtgtgcccacagcaaatgctgcagaaagtatcctgcagtttgtacacatggtccgacagcaagctaccaagagcaaaggtcccatgatcattcactgcagtgctggcgtgggacggacaggaacattcattgccctggacaggctcttgcagcacattcgggatcatgagtttgttgacatcttagggctggtgtcagaaatgaggtcataccggatgtctatggtacagacagaggagcagtacatttttatccatcagtgtgtgcaactgatgtggatgaagaagaagcagcagttctgcatcagtgatgtcatatacgagaatgttagcaagtcctagttcagaatccggagcagagaggacatgatgtgcgcccatcctcccttgcttccagattgttttagtgggccctgatggtcatttttctaaacagaggccctgctttgtaatatgtggccaaggagataatttatctcacagaagcaccgggaagacttagccttaaagagcctacagtgtccttttggactctttcacttcgggacatttaataatggaccaaattcaacagaacaccaggaaggtcaagacgctctccaaagggcaggaagtacagcacttccgaagagtttagttggccctttgctggttgggctgagttttttatttttaagtgtttgtttttcagtgcaataatttttgtgtgtgtgtgattcttatcagaaagttgaattgttttctgcctacaccgttcatcagccccataacccaggaaggaacaggcattgttagcatcagattatacctcattattaaaaggaggcatggccacacatgaagaaatggtcattctacttcaaagaaattgagccagcactatctgtactccaacattaccggatctggattggggaggttggtcagggaagagaggggttctacccactcttgagctggcccttctatgggcttcctaggccttctttgtcgggaccgtagacttaatccttatcttgttccgcgtgtctatcttaggaccgtctccccatgaaaaagcgggacaaatttctaccgggcccactaccggactaatg

SEQ ID NO: 212505 - DNA, 3897 bp, Homo sapiens
tgtccctgctgccagaggactacggcgggctgggcgcggggtccccgcctctcgctcaccacacagaccccgcgcctcctctggcagccgcggtggtggcggcggcagagcctcgcccactccaatccccaccctctccatccttagtcattaaagaacagcagcgcctggcacgttcttggaggaccccgggcgcagaggaggaaagggagcaggcgcagggggactggaaaggcagcatgcgctcgccaggagcaacctcggcgcccagggtctgaggctgcagccccagttcgccattgtgagccgccgccgggggagtccgctagcgcagccgtgcccccgagtccccgtccgcgcagcgatggggcacctgcccacggggatacacggcgcccgccgcctcctgcctctgctctggctctttgtgctgttcaagaatgctacagctttccatgtaactgtccaagatgataataacatcgttgtctcattagaagcttcagacgtcatcagtccagcatctgtgtatgttgtgaagataactggtgaatccaaaaattatttcttcgaatttgaggaattcaacagcactttgcctcctcctgttattttcaaggccagttatcatggcctttattatataatcactctggtagtggtaaatggaaatgtggtgaccaagccatccagatcaatcactgtgttaacaaaacctctacctgtaaccagtgtttccatatatgactataaaccttctcctgaaacaggagtcctgtttgaaatacattatccagaaaaatataacgttttcacaagagtgaacattagctactgggaaggtaaagacttccggacaatgctatataaagatttctttaagggaaaaacagtatttaatcactggctgccaggaatgtgttatagtaatatcacctttcagctggtatctgaggcaacttttaataaaagtacccttgttgagtacagtggtgtcagtcacgaacccaaacagcacagaactgccccttatccacctcaaaatatttccgttcgtatcgtaaacttgaacaaaaacaactgggaagaacagagtggcaatttcccagaagaatccttcatgagatcacaagatacaataggaaaagaaaaactcttccattttacagaagaaacccctgaaattccctcgggcaacatttcttccggttggcctgattttaatagcagtgactatgaaactacgtctcagccatattggtgggacagtgcatctgcagctcctgaaagtgaagatgaatttgtcagcgtacttcccatggaatacgaaaataacagtacactcagtgagacagagaagtcaacatcaggctctttctcctttttccctgtgcaaatgatattgacctggttaccacccaaaccacccactgcttttgatgggttccatatccatattgaacgagaagagaactttactgaatatttgatggtggatgaagaagcacatgaatttgttgcagaactgaaggaacctgggaaatataagttatctgtgacaacctttagttcctcaggatcttgtgaaactcgaaaaagtcagtcagcaaaatcactcagcttttatatcagtccttcaggagagtggattgaagaactgaccgagaagccgcagcacgtgagtgtccacgttttaagctcaaccactgccttgatgtcctggacatcttcccaagagaactacaacagcaccattgtgtctgtggtgtcgctgacctgccagaaacaaaaggagagccagaggcttgaaaagcagtactgcactcaggtgaactcaagcaaacctattattgaaaatctggttcctggtgcccagtaccaggttgtaatatacctaaggaaaggccctttgattggaccaccttcagatcctgtgacatttgctattgttcccacaggaataaaggatttaatgctctatcctttgggtcctacggccgtggttctgagctggaccagaccttatttaggcgtgttcagaaaatacgtggttgaaatgttttatttcaaccctgctacaatgacatcagagtggaccacctactatgaaatagcagcaactgtttccttaactgcatccgtgagaatagctaatctgctgccagcatggtactacaacttccgggttaccatggtgacgtggggagatccagaattgagctgctgtgacagctctaccatcagcttcataacagccccagtggctccggaaatcacttctgtggaatatttcaacagtctgttatatatcagttggacatatggggatgatacaacggacttgtcccattctagaatgcttcactggatggtggttgcagaaggaaaaaagaaaattaaaaagagtgtaacacgcaatgtcatgactgcaattctcagcttgcctccaggcgacatctataacctctcagtaactgcttgtactgaaagaggaagtaatacctccatgctccgccttgtcaagctagaaccagctccacccaaatcactcttcgcagtgaacaaaacccagacttcagtgactttgctgtgggtggaagagggagtagctgatttctttgaagttttctgtcaacaagttggctccagtcagaaaaccaaacttcaggaaccagttgctgtttcttcccatgtcgtgaccatctccagccttcttcctgccactgcctacaattgtagtgtcaccagctttagccatgacagccccagtgtccctacgttcatagccgtctcaacaatggttacagagatgaatcccaatgtggtagtgatctccgtgctggccatccttagcacacttttaattggactgttgcttgttaccctcattattcttaggaaaaagcatctgcagatggctagggagtgtggagctggtacatttgtcaattttgcatccttagagagggatggaaagcttccatacaactggcgtaggagtatatttgctttcttaaccctgctaccctcatgtctttggactgattatcttttggcattttatattaatccttggagtaaaaatggtttaaagaagaggaaactgacaaacccggttcaactggatgactttgatgcctatattaaggatatggccaaagactctgactataaattttctcttcagtttgaggagttgaaattgattggactggatatcccacactttgctgcagatcttccactgaatcgatgtaaaaaccgttacacaaacatcctaccatatgacttcagccgtgtgagattagtctccatgaatgaagaggaaggtgcagactacatcaatgccaactatattcctggatacaactcaccccaggagtatattgccacccaggggccactgcctgaaaccagaaatgacttctggaagatggtcctgcaacaaaagtctcagattattgtcatgctcactcagtgtaatgagaaaaggagggtgaaatgtgaccattactggccattcacggaagaacctatagcctatggagacatcactgtggagatgatttcagaggaagagcaggacgactgggcctgtagacacttccggatcaactatgctgacgagatgcaggatgtgatgcattttaactacactgcatggcctgatcatggtgtgcccacagcaaatgctgcagaaagtatcctgcagtttgtacacatggtccgacagcaagctaccaagagcaaaggtcccatgatcattcactgcaggtaacctcatcaactgcattttctattaaatattaggagttggttttgtaaggggaacagctcaccattccataagcccttatcaggtttagttgaaaattaaataaactctgatgtttttta

SEQ ID NO: 212506 - DNA, 839 bp, Homo sapiens
ggatggagataatggaagcagtggggaaggagagaaaatacccttcctatcacacacactcacacactcacactacacactatttctacagtcacaactacccaactgttattgatcctttataactgcaattgagtacagatgtaggaagattgagagggaactgggatctggcgcctggattgctcaagagaggtcagggaaacccctcagaactcctgagacccagagattgagggaggggttgaggcggagtctgcaatgggggctgtccagcagtagcaagcagcgggccgatcctggtggagggttgggaggctgctgtcattttatgggtcggcagccagagtgagagtgtccctgctgccagaggactacggcgggctgggcgcggggtccccgcctctcgctcaccacacagaccccgcgcctcctctggcagccgcggtggtggcggcggcagagcctcgcccactccaatccccaccctctccatccttagtcattaaagaacagcagcgcctggcacgttcttggaggaccccgggcgcagaggaggaaagggagcaggcgcagggggactggaaaggcagcatgcgctcgccaggagcaacctcggcgcccagggtctgaggctgcagccccagttcgccattgtgagccgccgccgggggagtccgctagcgcagccgtgcccccgagtccccgtccgcgcagcgatggggcacctgcccacggggatacacggcgcccgccgcctcctgcctctgctctggctctttgtgctgttcaaggtaggggagctcctccacccctttttcccagcggtccgggcggca

SEQ ID NO: 212507 - DNA, 790 bp, Homo sapiens
ggatggatggactgtgaagcaatgtgaaataattctttctttaagaagatctgaaagcaaatggataaaggaaaaatattaccatgattattatttttttaattttactttaagttcaggggtacatcagaaaatataccttaaaaattagatgtattttaaataaatgttaaagcacttctggatggttaatactaccacaaagaacttacaagatatttgatcctggttattttttagcccttacctcgtgatgagaaagccaacaattgttaacttttcctgattatctacttctattttgtacacataattttgttgggtaggagtacataaagatacacagtgtagacccatccctagttttattgatttgaatgccgtatttgagttttgttatttggaagactgtaaaaatactgaactcttatttattattctttaatggtacctttagtttagaggtgtaattgaacttgacaaaaggagggaacatttaaaacacctaattttttttcattaatcgacttgtctatacccagggcctttccaggtgtctattcatgtatcttctcttttttatatatgatttagagaactttactgaatatttgatggtggatgaagaagcacatgaatttgttgcagaactgaaggaacctgggaaatataagttatctgtgacaacctttagttcctcaggatcttgtgaaactcgaaaaagtcagtcagcaaaatcactcagcttttatatcagtaagtaacaaagagatcattttacacttactgg

SEQ ID NO: 212508 - DNA, 5607 bp, Homo sapiens
tgtccctgctgccagaggactacggcgggctgggcgcggggtccccgcctctcgctcaccacacagaccccgcgcctcctctggcagccgcggtggtggcggcggcagagcctcgcccactccaatccccaccctctccatccttagtcattaaagaacagcagcgcctggcacgttcttggaggaccccgggcgcagaggaggaaagggagcaggcgcagggggactggaaaggcagcatgcgctcgccaggagcaacctcggcgcccagggtctgaggctgcagccccagttcgccattgtgagccgccgccgggggagtccgctagcgcagccgtgcccccgagtccccgtccgcgcagcgatggggcacctgcccacggggatacacggcgcccgccgcctcctgcctctgctctggctctttgtgctgttcaagaatgctacagctttccatgtaactgtccaagatgataataacatcgttgtctcattagaagcttcagacgtcatcagtccagcatctgtgtatgttgtgaagataactggtgaatccaaaaattatttcttcgaatttgaggaattcaacagcactttgcctcctcctgttattttcaaggccagttatcatggcctttattatataatcactctggtagtggtaaatggaaatgtggtgaccaagccatccagatcaatcactgtgttaacaaaacctctacctgtaaccagtgtttccatatatgactataaaccttctcctgaaacaggagtcctgtttgaaatacattatccagaaaaatataacgttttcacaagagtgaacattagctactgggaaggtaaagacttccggacaatgctatataaagatttctttaagggaaaaacagtatttaatcactggctgccaggaatgtgttatagtaatatcacctttcagctggtatctgaggcaacttttaataaaagtacccttgttgagtacagtggtgtcagtcacgaacccaaacagcacagaactgccccttatccacctcaaaatatttccgttcgtatcgtaaacttgaacaaaaacaactgggaagaacagagtggcaatttcccagaagaatccttcatgagatcacaagatacaataggaaaagaaaaactcttccattttacagaagaaacccctgaaattccctcgggcaacatttcttccggttggcctgattttaatagcagtgactatgaaactacgtctcagccatattggtgggacagtgcatctgcagctcctgaaagtgaagatgaatttgtcagcgtacttcccatggaatacgaaaataacagtacactcagtgagacagagaagtcaacatcaggctctttctcctttttccctgtgcaaatgatattgacctggttaccacccaaaccacccactgcttttgatgggttccatatccatattgaacgagaagagaactttactgaatatttgatggtggatgaagaagcacatgaatttgttgcagaactgaaggaacctgggaaatataagttatctgtgacaacctttagttcctcaggatcttgtgaaactcgaaaaagtcagtcagcaaaatcactcagcttttatatcagtccttcaggagagtggattgaagaactgaccgagaagccgcagcacgtgagtgtccacgttttaagctcaaccactgccttgatgtcctggacatcttcccaagagaactacaacagcaccattgtgtctgtggtgtcgctgacctgccagaaacaaaaggagagccagaggcttgaaaagcagtactgcactcaggtgaactcaagcaaacctattattgaaaatctggttcctggtgcccagtaccaggttgtaatatacctaaggaaaggccctttgattggaccaccttcagatcctgtgacatttgctattgttcccacaggaataaaggatttaatgctctatcctttgggtcctacggccgtggttctgagctggaccagaccttatttaggcgtgttcagaaaatacgtggttgaaatgttttatttcaaccctgctacaatgacatcagagtggaccacctactatgaaatagcagcaactgtttccttaactgcatccgtgagaatagctaatctgctgccagcatggtactacaacttccgggttaccatggtgacgtggggagatccagaattgagctgctgtgacagctctaccatcagcttcataacagccccagtggctccggaaatcacttctgtggaatatttcaacagtctgttatatatcagttggacatatggggatgatacaacggacttgtcccattctagaatgcttcactggatggtggttgcagaaggaaaaaagaaaattaaaaagagtgtaacacgcaatgtcatgactgcaattctcagcttgcctccaggcgacatctataacctctcagtaactgcttgtactgaaagaggaagtaatacctccatgctccgccttgtcaagctagaaccagctccacccaaatcactcttcgcagtgaacaaaacccagacttcagtgactttgctgtgggtggaagagggagtagctgatttctttgaagttttctgtcaacaagttggctccagtcagaaaaccaaacttcaggaaccagttgctgtttcttcccatgtcgtgaccatctccagccttcttcctgccactgcctacaattgtagtgtcaccagctttagccatgacagccccagtgtccctacgttcatagccgtctcaacaatggttacagagatgaatcccaatgtggtagtgatctccgtgctggccatccttagcacacttttaattggactgttgcttgttaccctcattattcttaggaaaaagcatctgcagatggctagggagtgtggagctggtacatttgtcaattttgcatccttagagagggatggaaagcttccatacaactggagtaaaaatggtttaaagaagaggaaactgacaaacccggttcaactggatgactttgatgcctatattaaggatatggccaaagactctgactataaattttctcttcagtttgaggagttgaaattgattggactggatatcccacactttgctgcagatcttccactgaatcgatgtaaaaaccgttacacaaacatcctaccatatgacttcagccgtgtgagattagtctccatgaatgaagaggaaggtgcagactacatcaatgccaactatattcctggatacaactcaccccaggagtatattgccacccaggggccactgcctgaaaccagaaatgacttctggaagatggtcctgcaacaaaagtctcagattattgtcatgctcactcagtgtaatgagaaaaggagggtgaaatgtgaccattactggccattcacggaagaacctatagcctatggagacatcactgtggagatgatttcagaggaagagcaggacgactgggcctgtagacacttccggatcaactatgctgacgagatgcaggatgtgatgcattttaactacactgcatggcctgatcatggtgtgcccacagcaaatgctgcagaaagtatcctgcagtttgtacacatggtccgacagcaagctaccaagagcaaaggtcccatgatcattcactgcagtgctggcgtgggacggacaggaacattcattgccctggacaggctcttgcagcacattcgggatcatgagtttgttgacatcttagggctggtgtcagaaatgaggtcataccggatgtctatggtacagacagaggagcagtacatttttatccatcagtgtgtgcaactgatgtggatgaagaagaagcagcagttctgcatcagtgatgtcatatacgagaatgttagcaagtcctagttcagaatccggagcagagaggacatgatgtgcgcccatcctcccttgcttccagattgttttagtgggccctgatggtcatttttctaaacagaggccctgctttgtaatatgtggccaaggagataatttatctcacagaagcaccgggaagacttagccttaaagagcctacagtgtccttttggactctttcacttcgggacatttaataatggaccaaattcaacagaacaccaggaaggtcaagacgctctccaaagggcaggaagtacagcacttccgaagagtttagttggccctttgctggttgggctgagttttttatttttaagtgtttgtttttcagtgcaataatttttgtgtgtgtgtgattcttatcagaaagttgaattgttttctgcctacaccgttcatcagccccataacccaggaaggaacaggcattgttagcatcagattatacctcattattaaaaggaggcatggccacacatgaagaaatggtcattctacttcaaagaaattgagccagcactatctgtactccaacattaccggatctggattggggaggttggtcagggaagagaggggttctacccacagatcaactgtgtaatcttttactattcaagctataattcagcttcaaagtagagtagaaaaaaaattgtcttaactgttctagttcttgatggttttcttccttattaacagttggtgtttcttccttggcccttttggactaatgttactgtccaagttctttctcaagaaaccacatctggttcagaagagtgtcaagttggactctttgaactctgttgctgtctgagcaatcgtggtgcctagactttgcattccttgttctgttgacctgcatacatgtgagagctatttctttaagaactatataggctgtgaaaacgcactttctttcccccaaagagctgggaatttatgaagttatggcaatgaactgcagcatgctgggacaattatttgactacttttttttgtaatattgtcaaatgtctctatggattctgacagagatttctttttgttttgttattcttttggttgtcagtttcattttaacgagtgtaactagtaacattttattctttggattttgtataattacagtacatgattgtgtattgtgacatgaatgctgtcaaaatgacattgatggcattgtgaagcctgttactttgtgtcacttcctgataaataagaggtgatgacatggatatacaacagaaaacactttgagttgaaagtaaacacaagctggctgcttccctgtggcaaaaaaaaaaaaaatagcattcctgcacatctgtacccacgccttcttcaaagccatactatttatgtgctccggatccatcatccacaaccttaacaatgaacaagatattcgaaaaataggaggactactcaaaaccatacctctcacttcaacctccctcaccattggcagcctagcattagcaggaatacctttcctcacaggtttctactccaaagaccacatcatcgaaaccgcaaacatatcatacacaaacgcctgagccctatctattactctcatcgctacctccctgacaagcgcctatagcactcgaataattcttctcaccctaacaggtcaacctcgcttcccc

SEQ ID NO: 212509 - DNA, 4412 bp, Homo sapiens
aagtaaaaaaatggaagggggaaaaggcaaagtattctgccttccaagttagatagctatctttatgaaaggacatatttcaaaggcaatataaagtctttatggtgctcttacctacctatatttgaattgggggatgcttcacctgcttattagtgaaagaagaaagaatacacttagtaaattaaattttttttaaaactttgtctttgctcagaaccagctccacccaaatcactcttcgcagtgaacaaaacccagacttcagtgactttgctgtgggtggaagagggagtagctgatttctttgaagttttctgtcaacaagttggctccagtcagaaaaccaaacttcaggaaccagttgctgtttcttcccatgtcgtgaccatctccagccttcttcctgccactgcctacaattgtagtgtcaccagctttagccatgacagccccagtgtccctacgttcatagccgtctcaacaatggttacagagatgaatcccaatgtggtagtgatctccgtgctggccatccttagcacacttttaattggactgttgcttgttaccctcattattcttaggaaaaagcatctgcagatggctagggagtgtggagctggtacatttgtcaattttgcatccttagagagggatggaaagcttccatacaactggcgtaggagtatatttgctttcttaaccctgctaccctcatgtctttggactgattatcttttggcattttatattaatccttggagtaaaaatggtttaaagaagaggaaactgacaaacccggttcaactggatgactttgatgcctatattaaggatatggccaaagactctgactataaattttctcttcagtttgaggagttgaaattgattggactggatatcccacactttgctgcagatcttccactgaatcgatgtaaaaaccgttacacaaacatcctaccatatgacttcagccgtgtgagattagtctccatgaatgaagaggaaggtgcagactacatcaatgccaactatattcctggatacaactcaccccaggagtatattgccacccaggggccactgcctgaaaccagaaatgacttctggaagatggtcctgcaacaaaagtctcagattattgtcatgctcactcagtgtaatgagaaaaggagggtgaaatgtgaccattactggccattcacggaagaacctatagcctatggagacatcactgtggagatgatttcagaggaagagcaggacgactgggcctgtagacacttccggatcaactatgctgacgagatgcaggatgtgatgcattttaactacactgcatggcctgatcatggtgtgcccacagcaaatgctgcagaaagtatcctgcagtttgtacacatggtccgacagcaagctaccaagagcaaaggtcccatgatcattcactgcagtgctggcgtgggacggacaggaacattcattgccctggacaggctcttgcagcacattcgggatcatgagtttgttgacatcttagggctggtgtcagaaatgaggtcataccggatgtctatggtacagacagaggagcagtacatttttatccatcagtgtgtgcaactgatgtggatgaagaagaagcagcagttctgcatcagtgatgtcatatacgagaatgttagcaagtcctagttcagaatccggagcagtaagtggagaagagctctccacgagtgttcagtcttagaactattagagggggatgtgatggatgggacaaaagacagcagtagccatttgtattgactctgacttcacatgagtatttcttcccagctcctggcctcacatgggtggtcacagggagaaacaagtactgtagcagatctttgagtttcaatgcaccttggttggtgttggcaacaaacaggagcttctgcacatcatgatgactttacctccattccctctacccagaaccctaaattattctgttattggatctgtgcctgtaatatcaggatactaccatccaaatctatctagatatcttgtgcaaatattttattgattacaagggctgtatacggggttacaaaaagacatgagctggattggacactcctaaaaccaaaaacaacagtgacaatagagtctcaggatagcagagtctgaaaataccttggtctcccccattatgtgagcccttatttgagagcttcatgaagacacttgtaacatattcaacgtcctgtactccagttttgactacgagatcagattttggaggtgtaagtaatcttggctgaggtaacagtaatctgcccatttagttcagtaaacagactgtagagtgtctgactatactgggggaagaggagccaatgacagggtagggagatgacagtggtgcatgatgggagaatcatgaaagtctgggaagcatatggaccagtgggaaggataggattagcactgcacctctacatccatcaagagagacagagcgcacaatggagcaggaaggataaaaaataaagaaagacagagacaaacaaatttgctgggagagggaaagacattcagacccacagaaaggaggcagcacacagagaaagatgcacagatcaacccacatctgcatgggttgtgagactgagcatagtgagagcagtggtggagcaatagaagattgctgtgacaccaggctgcttactgtctttctttgtctcattcacaggagaggacatgatgtgcgcccatcctcccttgcttccagattgttttagtgggccctgatggtcatttttctaaacagaggccctgctttgtaatatgtggccaaggagataatttatctcacagaagcaccgggaagacttagccttaaagagcctacagtgtccttttggactctttcacttcgggacatttaataatggaccaaattcaacagaacaccaggaaggtcaagacgctctccaaagggcaggaagtacagcacttccgaagagtttagttggccctttgctggttgggctgagttttttatttttaagtgtttgtttttcagtgcaataatttttgtgtgtgtgtgattcttatcagaaagttgaattgttttctgcctacaccgttcatcagccccataacccaggaaggaacaggcattgttagcatcagattatacctcattattaaaaggaggcatggccacacatgaagaaatggtcattctacttcaaagaaattgagccagcactatctgtactccaacattaccggatctggattggggaggttggtcagggaagagaggggttctacccacagatcaactgtgtaatcttttactattcaagctataattcagcttcaaagtagagtagaaaaaaaattgtcttaactgttctagttcttgatggttttcttccttattaacagttggtgtttcttccttggcccttttggactaatgttactgtccaagttctttctcaagaaaccacatctggttcagaagagtgtcaagttggactctttgaactctgttgctgtctgagcaatcgtggtgcctagactttgcattccttgttctgttgacctgcatacatgtgagagctatttctttaagaactatataggctgtgaaaacgcactttctttcccccaaagagctgggaatttatgaagttatggcaatgaactgcagcatgctgggacaattatttgactacttttttttgtaatattgtcaaatgtctctatggattctgacagagatttctttttgttttgttattcttttggttgtcagtttcattttaacgagtgtaactagtaacattttattctttggattttgtataattacagtacatgattgtgtattgtgacatgaatgctgtcaaaatgacattgatggcattgtgaagcctgttactttgtgtcacttcctgataaataagaggtgatgacatggatatacaacagaaaacactttgagttgaaagtaaacacaagctggctgcttccctgtggcaaaaaaaaaaaaaatagcattcctgcacatctgtacccacgccttcttcaaagccatactatttatgtgctccggatccatcatccacaaccttaacaatgaacaagatattcgaaaaataggaggactactcaaaaccatacctctcacttcaacctccctcaccattggcagcctagcattagcaggaatacctttcctcacaggtttctactccaaagaccacatcatcgaaaccgcaaacatatcatacacaaacgcctgagccctatctattactctcatcgctacctccctgacaagcgcctatagcactcgaataattcttctcaccctaacaggtcaacctcgcttcccc

SEQ ID NO: 212510 - DNA, 3380 bp, Homo sapiens
aagtaaaaaaatggaagggggaaaaggcaaagtattctgccttccaagttagatagctatctttatgaaaggacatatttcaaaggcaatataaagtctttatggtgctcttacctacctatatttgaattgggggatgcttcacctgcttattagtgaaagaagaaagaatacacttagtaaattaaattttttttaaaactttgtctttgctcagaaccagctccacccaaatcactcttcgcagtgaacaaaacccagacttcagtgactttgctgtgggtggaagagggagtagctgatttctttgaagttttctgtcaacaagttggctccagtcagaaaaccaaacttcaggaaccagttgctgtttcttcccatgtcgtgaccatctccagccttcttcctgccactgcctacaattgtagtgtcaccagctttagccatgacagccccagtgtccctacgttcatagccgtctcaacaatggttacagagatgaatcccaatgtggtagtgatctccgtgctggccatccttagcacacttttaattggactgttgcttgttaccctcattattcttaggaaaaagcatctgcagatggctagggagtgtggagctggtacatttgtcaattttgcatccttagagagggatggaaagcttccatacaactggcgtaggagtatatttgctttcttaaccctgctaccctcatgtctttggactgattatcttttggcattttatattaatccttggagtaaaaatggtttaaagaagaggaaactgacaaacccggttcaactggatgactttgatgcctatattaaggatatggccaaagactctgactataaattttctcttcagtttgaggagttgaaattgattggactggatatcccacactttgctgcagatcttccactgaatcgatgtaaaaaccgttacacaaacatcctaccatatgacttcagccgtgtgagattagtctccatgaatgaagaggaaggtgcagactacatcaatgccaactatattcctggatacaactcaccccaggagtatattgccacccaggggccactgcctgaaaccagaaatgacttctggaagatggtcctgcaacaaaagtctcagattattgtcatgctcactcagtgtaatgagaaaaggagggtgaaatgtgaccattactggccattcacggaagaacctatagcctatggagacatcactgtggagatgatttcagaggaagagcaggacgactgggcctgtagacacttccggatcaactatgctgacgagatgcaggatgtgatgcattttaactacactgcatggcctgatcatggtgtgcccacagcaaatgctgcagaaagtatcctgcagtttgtacacatggtccgacagcaagctaccaagagcaaaggtcccatgatcattcactgcagtgctggcgtgggacggacaggaacattcattgccctggacaggctcttgcagcacattcgggatcatgagtttgttgacatcttagggctggtgtcagaaatgaggtcataccggatgtctatggtacagacagaggagcagtacatttttatccatcagtgtgtgcaactgatgtggatgaagaagaagcagcagttctgcatcagtgatgtcatatacgagaatgttagcaagtcctagttcagaatccggagcagagaggacatgatgtgcgcccatcctcccttgcttccagattgttttagtgggccctgatggtcatttttctaaacagaggccctgctttgtaatatgtggccaaggagataatttatctcacagaagcaccgggaagacttagccttaaagagcctacagtgtccttttggactctttcacttcgggacatttaataatggaccaaattcaacagaacaccaggaaggtcaagacgctctccaaagggcaggaagtacagcacttccgaagagtttagttggccctttgctggttgggctgagttttttatttttaagtgtttgtttttcagtgcaataatttttgtgtgtgtgtgattcttatcagaaagttgaattgttttctgcctacaccgttcatcagccccataacccaggaaggaacaggcattgttagcatcagattatacctcattattaaaaggaggcatggccacacatgaagaaatggtcattctacttcaaagaaattgagccagcactatctgtactccaacattaccggatctggattggggaggttggtcagggaagagaggggttctacccacagatcaactgtgtaatcttttactattcaagctataattcagcttcaaagtagagtagaaaaaaaattgtcttaactgttctagttcttgatggttttcttccttattaacagttggtgtttcttccttggcccttttggactaatgttactgtccaagttctttctcaagaaaccacatctggttcagaagagtgtcaagttggactctttgaactctgttgctgtctgagcaatcgtggtgcctagactttgcattccttgttctgttgacctgcatacatgtgagagctatttctttaagaactatataggctgtgaaaacgcactttctttcccccaaagagctgggaatttatgaagttatggcaatgaactgcagcatgctgggacaattatttgactacttttttttgtaatattgtcaaatgtctctatggattctgacagagatttctttttgttttgttattcttttggttgtcagtttcattttaacgagtgtaactagtaacattttattctttggattttgtataattacagtacatgattgtgtattgtgacatgaatgctgtcaaaatgacattgatggcattgtgaagcctgttactttgtgtcacttcctgataaataagaggtgatgacatggatatacaacagaaaacactttgagttgaaagtaaacacaagctggctgcttccctgtggcaaaaaaaaaaaaaatagcattcctgcacatctgtacccacgccttcttcaaagccatactatttatgtgctccggatccatcatccacaaccttaacaatgaacaagatattcgaaaaataggaggactactcaaaaccatacctctcacttcaacctccctcaccattggcagcctagcattagcaggaatacctttcctcacaggtttctactccaaagaccacatcatcgaaaccgcaaacatatcatacacaaacgcctgagccctatctattactctcatcgctacctccctgacaagcgcctatagcactcgaataattcttctcaccctaacaggtcaacctcgcttcccc

SEQ ID NO: 212511 - DNA, 6274 bp, Homo sapiens
tgtccctgctgccagaggactacggcgggctgggcgcggggtccccgcctctcgctcaccacacagaccccgcgcctcctctggcagccgcggtggtggcggcggcagagcctcgcccactccaatccccaccctctccatccttagtcattaaagaacagcagcgcctggcacgttcttggaggaccccgggcgcagaggaggaaagggagcaggcgcagggggactggaaaggcagcatgcgctcgccaggagcaacctcggcgcccagggtctgaggctgcagccccagttcgccattgtgagccgccgccgggggagtccgctagcgcagccgtgcccccgagtccccgtccgcgcagcgatggggcacctgcccacggggatacacggcgcccgccgcctcctgcctctgctctggctctttgtgctgttcaagaatgctacagctttccatgtaactgtccaagatgataataacatcgttgtctcattagaagcttcagacgtcatcagtccagcatctgtgtatgttgtgaagataactggtgaatccaaaaattatttcttcgaatttgaggaattcaacagcactttgcctcctcctgttattttcaaggccagttatcatggcctttattatataatcactctggtagtggtaaatggaaatgtggtgaccaagccatccagatcaatcactgtgttaacaaaacctctacctgtaaccagtgtttccatatatgactataaaccttctcctgaaacaggagtcctgtttgaaatacattatccagaaaaatataacgttttcacaagagtgaacattagctactgggaaggtaaagacttccggacaatgctatataaagatttctttaagggaaaaacagtatttaatcactggctgccaggaatgtgttatagtaatatcacctttcagctggtatctgaggcaacttttaataaaagtacccttgttgagtacagtggtgtcagtcacgaacccaaacagcacagaactgccccttatccacctcaaaatatttccgttcgtatcgtaaacttgaacaaaaacaactgggaagaacagagtggcaatttcccagaagaatccttcatgagatcacaagatacaataggaaaagaaaaactcttccattttacagaagaaacccctgaaattccctcgggcaacatttcttccggttggcctgattttaatagcagtgactatgaaactacgtctcagccatattggtgggacagtgcatctgcagctcctgaaagtgaagatgaatttgtcagcgtacttcccatggaatacgaaaataacagtacactcagtgagacagagaagtcaacatcaggctctttctcctttttccctgtgcaaatgatattgacctggttaccacccaaaccacccactgcttttgatgggttccatatccatattgaacgagaagagaactttactgaatatttgatggtggatgaagaagcacatgaatttgttgcagaactgaaggaacctgggaaatataagttatctgtgacaacctttagttcctcaggatcttgtgaaactcgaaaaagtcagtcagcaaaatcactcagcttttatatcagtccttcaggagagtggattgaagaactgaccgagaagccgcagcacgtgagtgtccacgttttaagctcaaccactgccttgatgtcctggacatcttcccaagagaactacaacagcaccattgtgtctgtggtgtcgctgacctgccagaaacaaaaggagagccagaggcttgaaaagcagtactgcactcaggtgaactcaagcaaacctattattgaaaatctggttcctggtgcccagtaccaggttgtaatatacctaaggaaaggccctttgattggaccaccttcagatcctgtgacatttgctattgttcccacaggaataaaggatttaatgctctatcctttgggtcctacggccgtggttctgagctggaccagaccttatttaggcgtgttcagaaaatacgtggttgaaatgttttatttcaaccctgctacaatgacatcagagtggaccacctactatgaaatagcagcaactgtttccttaactgcatccgtgagaatagctaatctgctgccagcatggtactacaacttccgggttaccatggtgacgtggggagatccagaattgagctgctgtgacagctctaccatcagcttcataacagccccagtggctccggaaatcacttctgtggaatatttcaacagtctgttatatatcagttggacatatggggatgatacaacggacttgtcccattctagaatgcttcactggatggtggttgcagaaggaaaaaagaaaattaaaaagagtgtaacacgcaatgtcatgactgcaattctcagcttgcctccaggcgacatctataacctctcagtaactgcttgtactgaaagaggaagtaatacctccatgctccgccttgtcaagctagaaccagctccacccaaatcactcttcgcagtgaacaaaacccagacttcagtgactttgctgtgggtggaagagggagtagctgatttctttgaagttttctgtcaacaagttggctccagtcagaaaaccaaacttcaggaaccagttgctgtttcttcccatgtcgtgaccatctccagccttcttcctgccactgcctacaattgtagtgtcaccagctttagccatgacagccccagtgtccctacgttcatagccgtctcaacaatggttacagagatgaatcccaatgtggtagtgatctccgtgctggccatccttagcacacttttaattggactgttgcttgttaccctcattattcttaggaaaaagcatctgcagatggctagggagtgtggagctggtacatttgtcaattttgcatccttagagagggatggaaagcttccatacaactggcgtaggagtatatttgctttcttaaccctgctaccctcatgtctttggactgattatcttttggcattttatattaatccttggagtaaaaatggtttaaagaagaggaaactgacaaacccggttcaactggatgactttgatgcctatattaaggatatggccaaagactctgactataaattttctcttcagtttgaggagttgaaattgattggactggatatcccacactttgctgcagatcttccactgaatcgatgtaaaaaccgttacacaaacatcctaccatatgacttcagccgtgtgagattagtctccatgaatgaagaggaaggtgcagactacatcaatgccaactatattcctggatacaactcaccccaggagtatattgccacccaggggccactgcctgaaaccagaaatgacttctggaagatggtcctgcaacaaaagtctcagattattgtcatgctcactcagtgtaatgagaaaaggagggtgaaatgtgaccattactggccattcacggaagaacctatagcctatggagacatcactgtggagatgatttcagaggaagagcaggacgactgggcctgtagacacttccggatcaactatgctgacgagatgcaggatgtgatgcattttaactacactgcatggcctgatcatggtgtgcccacagcaaatgctgcagaaagtatcctgcagtttgtacacatggtccgacagcaagctaccaagagcaaaggtcccatgatcattcactgcagtgctggcgtgggacggacaggaacattcattgccctggacaggctcttgcagcacattcgggatcatgagtttgttgacatcttagggctggtgtcagaaatgaggtcataccggatgtctatggtacagacagaggagcagtacatttttatccatcagtgtgtgcaactgatgtggatgaagaagaagcagcagttctgcatcagtgatgtcatatacgagaatgttagcaagtcctagttcagaatccggagcagtaagtggagaagagctctccacgagtgttcagtcttagaactattagagggggatgtgatggatgggacaaaagacagcagtagccatttgtattgactctgacttcacatgagtatttcttcccagctcctggcctcacatgggtggtcacagggagaaacaagtactgtagcagatctttgagtttcaatgcaccttggttggtgttggcaacaaacaggagcttctgcacatcatgatgactttacctccattccctctacccagaaccctaaattattctgttattggatctgtgcctgtaatatcaggatactaccatccaaatctatctagatatcttgtgcaaatattttattgattacaagggctgtatacggggttacaaaaagacatgagctggattggacactcctaaaaccaaaaacaacagtgacaatagagtctcaggatagcagagtctgaaaataccttggtctcccccattatgtgagcccttatttgagagcttcatgaagacacttgtaacatattcaacgtcctgtactccagttttgactacgagatcagattttggaggtgagaggacatgatgtgcgcccatcctcccttgcttccagattgttttagtgggccctgatggtcatttttctaaacagaggccctgctttgtaatatgtggccaaggagataatttatctcacagaagcaccgggaagacttagccttaaagagcctacagtgtccttttggactctttcacttcgggacatttaataatggaccaaattcaacagaacaccaggaaggtcaagacgctctccaaagggcaggaagtacagcacttccgaagagtttagttggccctttgctggttgggctgagttttttatttttaagtgtttgtttttcagtgcaataatttttgtgtgtgtgtgattcttatcagaaagttgaattgttttctgcctacaccgttcatcagccccataacccaggaaggaacaggcattgttagcatcagattatacctcattattaaaaggaggcatggccacacatgaagaaatggtcattctacttcaaagaaattgagccagcactatctgtactccaacattaccggatctggattggggaggttggtcagggaagagaggggttctacccacagatcaactgtgtaatcttttactattcaagctataattcagcttcaaagtagagtagaaaaaaaattgtcttaactgttctagttcttgatggttttcttccttattaacagttggtgtttcttccttggcccttttggactaatgttactgtccaagttctttctcaagaaaccacatctggttcagaagagtgtcaagttggactctttgaactctgttgctgtctgagcaatcgtggtgcctagactttgcattccttgttctgttgacctgcatacatgtgagagctatttctttaagaactatataggctgtgaaaacgcactttctttcccccaaagagctgggaatttatgaagttatggcaatgaactgcagcatgctgggacaattatttgactacttttttttgtaatattgtcaaatgtctctatggattctgacagagatttctttttgttttgttattcttttggttgtcagtttcattttaacgagtgtaactagtaacattttattctttggattttgtataattacagtacatgattgtgtattgtgacatgaatgctgtcaaaatgacattgatggcattgtgaagcctgttactttgtgtcacttcctgataaataagaggtgatgacatggatatacaacagaaaacactttgagttgaaagtaaacacaagctggctgcttccctgtggcaaaaaaaaaaaaaatagcattcctgcacatctgtacccacgccttcttcaaagccatactatttatgtgctccggatccatcatccacaaccttaacaatgaacaagatattcgaaaaataggaggactactcaaaaccatacctctcacttcaacctccctcaccattggcagcctagcattagcaggaatacctttcctcacaggtttctactccaaagaccacatcatcgaaaccgcaaacatatcatacacaaacgcctgagccctatctattactctcatcgctacctccctgacaagcgcctatagcactcgaataattcttctcaccctaacaggtcaacctcgcttcccc

SEQ ID NO: 212512 - DNA, 5349 bp, Homo sapiens
tgtccctgctgccagaggactacggcgggctgggcgcggggtccccgcctctcgctcaccacacagaccccgcgcctcctctggcagccgcggtggtggcggcggcagagcctcgcccactccaatccccaccctctccatccttagtcattaaagaacagcagcgcctggcacgttcttggaggaccccgggcgcagaggaggaaagggagcaggcgcagggggactggaaaggcagcatgcgctcgccaggagcaacctcggcgcccagggtctgaggctgcagccccagttcgccattgtgagccgccgccgggggagtccgctagcgcagccgtgcccccgagtccccgtccgcgcagcgatggggcacctgcccacggggatacacggcgcccgccgcctcctgcctctgctctggctctttgtgctgttcaagaatgctacagctttccatgtaactgtccaagatgataataacatcgttgtctcattagaagcttcagacgtcatcagtccagcatctgtgtatgttgtgaagataactggtgaatccaaaaattatttcttcgaatttgaggaattcaacagcactttgcctcctcctgttattttcaaggccagttatcatggcctttattatataatcactctggtagtggtaaatggaaatgtggtgaccaagccatccagatcaatcactgtgttaacaaaacctctacctgtaaccagtgtttccatatatgactataaaccttctcctgaaacaggagtcctgtttgaaatacattatccagaaaaatataacgttttcacaagagtgaacattagctactgggaaggtaaagacttccggacaatgctatataaagatttctttaagggaaaaacagtatttaatcactggctgccaggaatgtgttatagtaatatcacctttcagctggtatctgaggcaacttttaataaaagtacccttgttgagtacagtggtgtcagtcacgaacccaaacagcacagaactgccccttatccacctcaaaatatttccgttcgtatcgtaaacttgaacaaaaacaactgggaagaacagagtggcaatttcccagaagaatccttcatgagatcacaagatacaataggaaaagaaaaactcttccattttacagaagaaacccctgaaattccctcgggcaacatttcttccggttggcctgattttaatagcagtgactatgaaactacgtctcagccatattggtgggacagtgcatctgcagctcctgaaagtgaagatgaatttgtcagcgtacttcccatggaatacgaaaataacagtacactcagtgagacagagaagtcaacatcaggctctttctcctttttccctgtgcaaatgatattgacctggttaccacccaaaccacccactgcttttgatgggttccatatccatattgaacgagaagagaactttactgaatatttgatggtggatgaagaagcacatgaatttgttgcagaactgaaggaacctgggaaatataagttatctgtgacaacctttagttcctcaggatcttgtgaaactcgaaaaagtcagtcagcaaaatcactcagcttttatatcagtccttcaggagagtggattgaagaactgaccgagaagccgcagcacgtgagtgtccacgttttaagctcaaccactgccttgatgtcctggacatcttcccaagagaactacaacagcaccattgtgtctgtggtgtcgctgacctgccagaaacaaaaggagagccagaggcttgaaaagcagtactgcactcaggtgaactcaagcaaacctattattgaaaatctggttcctggtgcccagtaccaggttgtaatatacctaaggaaaggccctttgattggaccaccttcagatcctgtgacatttgctattgttcccacaggaataaaggatttaatgctctatcctttgggtcctacggccgtggttctgagctggaccagaccttatttaggcgtgttcagaaaatacgtggttgaaatgttttatttcaaccctgctacaatgacatcagagtggaccacctactatgaaatagcagcaactgtttccttaactgcatccgtgagaatagctaatctgctgccagcatggtactacaacttccgggttaccatggtgacgtggggagatccagaattgagctgctgtgacagctctaccatcagcttcataacagccccagtggctccggaaatcacttctgtggaatatttcaacagtctgttatatatcagttggacatatggggatgatacaacggacttgtcccattctagaatgcttcactggatggtggttgcagaaggaaaaaagaaaattaaaaagagtgtaacacgcaatgtcatgactgcaattctcagcttgcctccaggcgacatctataacctctcagtaactgcttgtactgaaagaggaagtaatacctccatgctccgccttgtcaagctagaaccagctccacccaaatcactcttcgcagtgaacaaaacccagacttcagtgactttgctgtgggtggaagagggagtagctgatttctttgaagttttctgtcaacaagttggctccagtcagaaaaccaaacttcaggaaccagttgctgtttcttcccatgtcgtgaccatctccagccttcttcctgccactgcctacaattgtagtgtcaccagctttagccatgacagccccagtgtccctacgttcatagccgtctcaacaatggttacagagatgaatcccaatgtggtagtgatctccgtgctggccatccttagcacacttttaattggactgttgcttgttaccctcattattcttaggaaaaagcatctgcagatggctagggagtgtggagctggtacatttgtcaattttgcatccttagagagggatggaaagcttccatacaactggcgtaggagtatatttgctttcttaaccctgctaccctcatgtctttggactgattatcttttggcattttatattaatccttggagtaaaaatggtttaaagaagaggaaactgacaaacccggttcaactggatgactttgatgcctatattaaggatatggccaaagactctgactataaattttctcttcagtttgaggagttgaaattgattggactggatatcccacactttgctgcagatcttccactgaatcgatgtaaaaaccgttacacaaacatcctaccatatgacttcagccgtgtgagattagtctccatgaatgaagaggaaggtgcagactacatcaatgccaactatattcctggatacaactcaccccaggagtatattgccacccaggggccactgcctgaaaccagaaatgacttctggaagatggtcctgcaacaaaagtctcagattattgtcatgctcactcagtgtaatgagaaaaggagggtgaaatgtgaccattactggccattcacggaagaacctatagcctatggagacatcactgtggagatgatttcagaggaagagcaggacgactgggcctgtagacacttccggatcaactatgctgacgagatgcaggatgtgatgcattttaactacactgcatggcctgatcatggtgtgcccacagcaaatgctgcagaaagtatcctgcagtttgtacacatggtccgacagcaagctaccaagagcaaaggtcccatgatcattcactgcagtgctggcgtgggacggacaggaacattcattgccctggacaggctcttgcagcacattcgggatcatgagtttgttgacatcttagggctggtgtcagaaatgaggtcataccggatgtctatggtacagacagaggagcagtacatttttatccatcagtgtgtgcaactgatgtggatgaagaagaagcagcagttctgcatcagtgatgtcatatacgagaatgttagcaagtcctagttcagaatccggagcagtaagtggagaagagctctccacgagtgttcagtcttagaactattagagggggatgtgatggatgggacaaaagacagcagtagccatttgtattgactctgacttcacatgagtatttcttcccagctcctggcctcacatgggtggtcacagggagaaacaagtactgtagcagatctttgagtttcaatgcaccttggttggtgttggcaacaaacaggagcttctgcacatcatgatgactttacctccattccctctacccagaaccctaaattattctgttattggatctgtgcctgtaatatcaggatactaccatccaaatctatctagatatcttgtgcaaatattttattgattacaagggctgtatacggggttacaaaaagacatgagctggattggacactcctaaaaccaaaaacaacagtgacaatagagtctcaggatagcagagtctgaaaataccttggtctcccccattatgtgagcccttatttgagagcttcatgaagacacttgtaacatattcaacgtcctgtactccagttttgactacgagatcagattttggaggtgtaagtaatcttggctgaggtaacagtaatctgcccatttagttcagtaaacagactgtagagtgtctgactatactgggggaagaggagccaatgacagggtagggagatgacagtggtgcatgatgggagaatcatgaaagtctgggaagcatatggaccagtgggaaggataggattagcactgcacctctacatccatcaagagagacagagcgcacaatggagcaggaaggataaaaaataaagaaagacagagacaaacaaatttgctgtgtgtgtgtgagtgtgaatgtgtgtatgtctctttctctctctccctctcctctaccccaacacagatggtggtgccacagataggaggactctgggtccctgaatcaccacttggggcagggatatctggtagcattggcccattatgtgatcaagaaatagatttctattgcattgtcactgaaacttggtcattgtcagttacagcaatcaacctgcccttaactaatatggcagcacaaggataacctttacaacaatgttccgtctaagttacaataggaagttttcagagcaatggtgtgtgactgcccagtaaaattcccagaagacagttaaagatgaagcagtgcagagcaaagtaaacccacaatgcaaaacaagggttcaggaaaggccacaaaagcaataatggttcctttaataaataaactttttaacagaaataaaaaaaatctt

SEQ ID NO: 212513 - DNA, 2256 bp, Homo sapiens
tgtccctgctgccagaggactacggcgggctgggcgcggggtccccgcctctcgctcaccacacagaccccgcgcctcctctggcagccgcggtggtggcggcggcagagcctcgcccactccaatccccaccctctccatccttagtcattaaagaacagcagcgcctggcacgttcttggaggaccccgggcgcagaggaggaaagggagcaggcgcagggggactggaaaggcagcatgcgctcgccaggagcaacctcggcgcccagggtctgaggctgcagccccagttcgccattgtgagccgccgccgggggagtccgctagcgcagccgtgcccccgagtccccgtccgcgcagcgatggggcacctgcccacggggatacacggcgcccgccgcctcctgcctctgctctggctctttgtgctgttcaagaatgctacagctttccatgtaactgtccaagatgataataacatcgttgtctcattagaagcttcagacgtcatcagtccagcatctgtgtatgttgtgaagataactggtgaatccaaaaattatttcttcgaatttgaggaattcaacagcactttgcctcctcctgttattttcaaggccagttatcatggcctttattatataatcactctggtagtggtaaatggaaatgtggtgaccaagccatccagatcaatcactgtgttaacaaaacctctacctgtaaccagtgtttccatatatgactataaaccttctcctgaaacaggagtcctgtttgaaatacattatccagaaaaatataacgttttcacaagagtgaacattagctactgggaaggtaaagacttccggacaatgctatataaagatttctttaagggaaaaacagtatttaatcactggctgccaggaatgtgttatagtaatatcacctttcagctggtatctgaggcaacttttaataaaagtacccttgttgagtacagtggtgtcagtcacgaacccaaacagcacagaactgccccttatccacctcaaaatatttccgttcgtatcgtaaacttgaacaaaaacaactgggaagaacagagtggcaatttcccagaagaatccttcatgagatcacaagatacaataggaaaagaaaaactcttccattttacagaagaaacccctgaaattccctcgggcaacatttcttccggttggcctgattttaatagcagtgactatgaaactacgtctcagccatattggtgggacagtgcatctgcagctcctgaaagtgaagatgaatttgtcagcgtacttcccatggaatacgaaaataacagtacactcagtgagacagagaagtcaacatcaggctctttctcctttttccctgtgcaaatgatattgacctggttaccacccaaaccacccactgcttttgatgggttccatatccatattgaacgagaagagaactttactgaatatttgatggtggatgaagaagcacatgaatttgttgcagaactgaaggaacctgggaaatataagttatctgtgacaacctttagttcctcaggatcttgtgaaactcgaaaaagtcagtcagcaaaatcactcagcttttatatcagtccttcaggagagtggattgaagaactgaccgagaagccgcagcacgtgagtgtccacgttttaagctcaaccactgccttgatgtcctggacatcttcccaagagaactacaacagcaccattgtgtctgtggtgtcgctgacctgccagaaacaaaaggagagccagaggcttgaaaagcagtactgcactcaggtgaactcaagcaaacctattattgaaaatctggttcctggtgcccagtaccaggttgtaatatacctaaggaaaggccctttgattggaccaccttcagatcctgtgacatttgctattgttcccacaggaataaaggatttaatgctctatcctttgggtcctacggccgtggttctgagctggaccagaccttatttaggcgtgttcagaaaatacgtggttgaaatgttttatttcaaccctgctacaatgacatcagagtggaccacctactatgaaatagcagcaactgtttccttaactgcatccgtggtaatcttcccttaaccaactgtcagtctttcctatgggaacaggcaaacctttatgtaccaaatgtgtctttaagaaattatctataaatttgattattttgtaaatacaca

SEQ ID NO: 212514 - DNA, 787 bp, Homo sapiens
gatctgaagagcccatcccagaaaatgctctatgccaacagtaaagacatatgcacaaaaaagactttgttcccaagaactaatttctttccaagataccttttcaattcctctaaattacagaaagtgacatacttctacttagtgctaagctcgacttatcaccgtggagttgctgacagtctccaaccagccagcgttcctaccttcccttctacaagaggggtgtgccctattccttgagctagggtacgggcactcagcagcagaaaggtggcccatgacagacttgaaagcgcacaccaggaattgtctgaaactcagagaatgctggaattaactttcttcctgtgacctttaacctagctgaattttcttccatttccagtactaatcgtactttcttctcacttgcagaattccctgttctgtcctgcctgacacgttctcttcttggttcttttcacctgaaccttattctgatctgttacttcctcctgtccaagacctaagcactgaacatacctcacatatttaaatgttacctccttcaactgagtgaaacggtattcattgctcctatacaactgctctttagccggccgggcgcagtggctcacgcctgtaatcccagcactgtgggaggccaaggcgggcggatcacgaggtcaggagatcaagactatcctggctaacacggtgaaaccccgtctctactaaaaatacaaaaaattagccaggcgtggtggtgggcgcctgtagtcccagctactcgggaggctgagcc

SEQ ID NO: 212515 - DNA, 524 bp, Homo sapiens
gacacagttcagagaaaccagaacccagcggctgcaaaggcagagcaagccaaactcctcagagacatcagggcttagcagcagaacatgaaacgaccggcaatcctaccatgtgctaaatatttgaatcttcccaaagcaatgccactttgtgctcagacatctacagtgactctgtgtggctgatagccaacagtcctacccccttgtcctggttcaggggctccatatcaagccctaggtcagcattccaatattactctctacttcattctgctgaaatgctccattgaggtctgacccatctactactcatttgcaccagagttgaataactcctacctccagggtccaggcaggtagtgaaatagatgacacattcatgggtagcaatagggaacagtagggactgtggcaaactagagtgtccacaccctataaaaggggcagtttccacctgaggtcagcagttcgaagccagcctggccaacaaggcaaaaccccgcctctactaaaaaaaaaaa

SEQ ID NO: 212516 - DNA, 329 bp, Homo sapiens
tctcacacctgggtgtcagatacccttaaagagtcttattcaggtgcagcgcagctgttgacactcggaaggctgaggtgggaggatcacttgaggccaggagttcaagactgcagtgagctatggtcgtatcactgcattccagtctgggtgatagagcgaggccccctctctaaaaaagagtcctctcattttgatgagagaatgcttttatatccatgggagctttggactgtgtgacttgttccctgaatttcaatctcatcattgttatcttcttggcttctctccatgatatcctggatattaaatattaaaatccaatttaa

SEQ ID NO: 212517 - DNA, 704 bp, Homo sapiens
agatagtttttgtaaaattcttactgtcattttgggtacaaaacagacacataaaaatgacggtttttattatgctaggcagaggaaacatcattttcctattctggaatgcacacctgacaaacttctactcattatgtaagtcttaattcaaatgttatatttatttattctattaacatttcttaagaaactaatataatgctctttgctattataaggtacttggagaaaaaagttataaacttaagatctctgatctcaagggatgcacattttttttttttttagagggcgttttgctcttgtcatccagactggagtgcagtggcacgattttggcacaccacaacctcccactccaaggttcaagcaattctcctgcttcaacctcctgagtagctgggattacaggtgcccaccaccacacctgctaatttttttttttttccgttttagtagagacgggtcttcgccatgttggccaggctggtcttgaactcctgacctcagatgatctgcccatgtcggcctcccagagtgctgggattataggtgtgagccactgtgcccggctgggatgtcctctttaatggacaggttaacagaccattatgtgaagtgtggtaagtgtccaaagaaagcgatgtccagtgggctttgcaggccagaggacaggctacaaggagagtcagataaggcca

SEQ ID NO: 212518 - DNA, 154 bp, Homo sapiens
gttttgaccaatgtcatttgaatagaaggaatttttacaaggccttcccatggtcccttatgagctgtattagcatgagtggtgacagagtttttatcagctgtcttcctaaatgactgtctccttgtaaacttattatagagactgaattggt

SEQ ID NO: 212519 - DNA, 314 bp, Homo sapiens
ttgaatctctgagtatgattaaaacccttcagtcatttgttggtatgattgaactacgggttctcccacggctagtttcaaagaattatatttctgtctagtgtcagaatgaccctattttttttaatgtgttatgaatcttcagttgtgcatacagaatttcatattaatttagaatgccatgctaataagcgtacactcagagatggccataatttaaagctagcagtagtatctcatggagaaatgaactctactcctcccataatgtgctacaaacaaatgagaaccatgctctttgtctttgtctctga

SEQ ID NO: 212520 - DNA, 172 bp, Homo sapiens
ctgtgttcatatcattggtcaggcactattttaagataactgggtggtctgattatatgctaaagcatacaaaaatgacagtagcatgccaccaaattatttgcttttatctgaaattcaaattttaatgggcagtcaggcatttacattaaacattacttggtaatcttct

SEQ ID NO: 212521 - DNA, 176 bp, Homo sapiens
cttcaaaatataatatgttttatagatagaactgggtttttaagtagctggtggtagatgcttttatgatttatgttttgtaagtttcaattctttgaccaatctctgtttgtccatctctaatttctggttggctgtgtctgttctatgatgatactgagaaaagttacaaagag

SEQ ID NO: 212522 - DNA, 525 bp, Homo sapiens
tcactgcaaccttgacctcctgggctcaagtgattctcccacctcagccttccaagtagctgggaccacagatgtgtgccaacatgctcagataattattttactttttacagagacagggtcttcctgtgttgcccaggctggtctcgaacttctgggctcaagtcaccctcctgccttggactcccaacatgctgggattacaggcatgagccactgagcctgacctcctctttctttaacactggctttgaggagggcacaatggtagtgaattgagtatccctgagaaagcttcaagctggaggtacacatcagagaatcctggttactgctctaacctgtcctcactgcccccactccctgtgagctgggaccatactctgcctttccctgggccttgaaagtctcacagcggagccaggtggaaatggaatcacatgatttgggagtaagaaggactcacccactctaagacacccttccacggcatcaggcacccactacatcattcctgatcagcag

SEQ ID NO: 212523 - DNA, 1281 bp, Homo sapiens
agagagtagctgtacggctggagagaagtaagtgaattcagagttactaaggaggtggaattaacaggactggatcattaattagatatgaaaaaaagagtccaggataatctaattctcagttatctggtttaagcaccaggatgcttgataatgccatttattgatttattgagcataggaatacagggagagaaagagcaagtttggagagaagagagtagaagacagtgttgtgcttttgggtcaggtgtctggggtgtcgtagacgtctgagtagacctgttaaacaggcttctggtcttggctagagatacagatttgggagagttgctagagagggccttaaaagtgacctagtctaacttcttagattttacatgtgaggaagttaaagatttaattgagagaatacattgttcatttttgcaggagacagaataagaattaggatgtgaatctagggctcctaatgagctagaatgtgttttctatgcatcagaggcctacttctcccaccaaacaatgagacgccaggcatggtggctcacacctgtaatcccagcactttgggaggccgaggcaggaggactgcttgagtcaaggggtttcaagaccagcctgggcaacacagtaggacctggtcttttcaaaaaataaaaaaaatagcaggcgtggtggcatacatctgtagtcccagctactcaggagactgaggcaggaggatcacttgagcctgggaggtcaaggctgcagtgagccaggtcccccatgccctcatactggccagatgggcctttgttcattcagacctatctatccaccctggggctttgtgtcgggtcacttatctggcccaccacttcccgtatctcatagcgaatttggcctttttcacactcccgtccgcccacttgggtatctctcgacccgcttacacctccaacgggctcctcaacaagttcgcacctgttccacttatcctcctctacctctctcgtacacctctcacctgactatcccctcctttacctctcctcttctctcctcttctttccgcgggtcacctgcacgccctcgaccaccccctgtactttcatctcctccttcactgcttcattcccgacttcgtctccttcttctcttctatcgcactaccaccctcctcgctctgtcacgctctttacactccgtcacacctgccgtctatctcatctctcgcggcgctctactgccatctttccctctcctcagcctatgcttcgctctctgctctccccc

SEQ ID NO: 212524 - DNA, 410 bp, Homo sapiens
cagaatctgtgaatagaaattgaccatagcagaaaatgacccgaccgcttctggaatgcagaaatctcttccaaaacagctctgacattgttatttctattatttatcaaacattgtatttggccattcttgcatggctgtaaacacctgactcacgccggtaatcccagcattctgggaagctgtggcaggcagatcgcttgaacccaggggtttgagaccagcctgggcaacatggtgaaatcccatctctacaaaaaatacagaaattagctggccttggtggtgcatgcctgtagtcctagctaccgggaggctaaggtgggaggagcctaggaggttggggctgcagtgagctgagattgcgtcactgcactacagcctgggagactgaatgagatcctgtcttt

SEQ ID NO: 212525 - DNA, 578 bp, Homo sapiens
ctgtcgcctcacctccttatgctcatccctcctcatgctcatccctccttatgctaatcccttgaggcagcaaaccaggggagacctcagctttgaggtgggctggggtttgaccctaggttagaagatggaggaacgtcaccctggttaggaatgcattgtggccagaagcatgttagttgacagatttgccgtaaattagactaaatgtggccacagagatgctttcctccaccacaaggcattttgtttagcaaaaatggcctgtgggtgtttaagctaggtttccatccagatggatgaggctggattagaaatagctgacacctgggatagactattgttgagttgttggtgcatagcccaaaactaattaagggattagtctgtgatggtggaatatcaccatcttggggcgtgtcatcagggtccgcgctgccagggtgctaaggttgagggtggacaccttcctgtgatgggagagtgtgtcatagaacagctctgtactccgtccttgaaagaggaacaactttcataggttgccggtgacagaatgcgttgtcagactttaagaaggg

SEQ ID NO: 212526 - DNA, 293 bp, Homo sapiens
agcttgtattagcattctttgttagttttggagagaaggatttggatctataaaatctaagttgattgcaaaaaattgtcaggccactttatacccatttttaagattgacaagtgaaaatttgttttagtgacttaccagatgaaataagaatagaccagaaagatctctaagatcttttgtagtttttacgatctacaagtttctacacccagtgtaatattaattacttaataagaaaagtttttgagatgactagtgtaactgttactctgatcccttcataactagaa

SEQ ID NO: 212527 - DNA, 477 bp, Homo sapiens
ccaaaatagcatttggttgaaaaaactcaaatgcctatcaaaggatgaataaataaaatgtgctacatgcatgtacacatgaatacataaatggtcagttatacaaatgaatgaagtactgatgacatgttgcatgaatgagccccaaaaaacatactgagtgaaagaagccaaatgcaaattccacattttatactttcatttatatcaaatactctgaataggtaaatctatagagaaataaagcaaattagtggttattgggcactagaggggaagggagaatgcaatctatctgcgtagtatgtatggggttttcttttagaatgatgaaaatgtttttgaactagatagagatggtggttgcataatattgtgaatgtgctaaacttcactgaattgtacactctaaaattgttaatatttgaatttttacatgaagaaaaatatatttaaaaagaaaaatattgcatgaac

SEQ ID NO: 212528 - DNA, 384 bp, Homo sapiens
ctcactacagcaaatatgagcttctctctataattactcttttacctgaattctgaaaagtgaacagtaattccacaagcattttgtttttaaggagctttgaaaaaatatagaaagaacacaaatactgacaatgatgttcttgagtccctaaggttatgaagtatcttcttaattgccaatgaaatattagttatgttctttaaagttgtattttttaatatcttaatttttgacacttgataattgttgatatacttggtaatgtttttaaccagaatcttttcccctattaaaaaaatgttatgcttatggcatttggatttacaaacttaaagtatatgttttgtttgaaaattagaaattaagagggaagtcaaaaca

SEQ ID NO: 212529 - DNA, 644 bp, Homo sapiens
gaaattggattcaggtctaaagaaacaattattttacaaacttacaataaaagaaacattcaattttaaaaatggccaataatccaaatagacacttcttcaaagaagacaaacaaatgtccggtaagcacatgaaagatgctcaacatcatgagtcactagagaaatgcatatcaaagacacaagatatcacttcccacccaccaggatagcaaggatgtagagaaatcaaagttcttcaaatgattaaatacagttatcatatgactcagcaacttctctcctagatatatatccacgaggaatgaaaacatatatctacattaaaatttgtacatgaatgttcatagcaatattacttataatagccaaaaggcagaaacaacccactgttaacaacagattttcactctatgtaatttttttttaagaagaagaagaactaatcttgaacaatattccacctaagttctcctccatccctaggcacatataatgatacgattgtatgatcctttttagaacatgccctggtaatcactaattaggatcatgatttctacatatatgggaaaaataagccctcagataaatcctctcaataaacattagaaaatgaaggtgaagaatgaaggaaatgaatc

SEQ ID NO: 212530 - DNA, 482 bp, Homo sapiens
aaatactcagattgttcatggtagtgaggactccagacactgaaattagagtgaaaaaggaaatctacaaacccttgagtcaaaatcacagttctctgaatttgtcacatctgcccaggtccaatgtcatgagaataggatcagggcgccacaggtatggcctgagactaggaagagagtcttgctcactgacccatttcatgtctaggcttccagctgagactacagtttcattacaacctatatgcgcccataggtcctgcctgcggcaatgacatctctcgggtcagtaagggccacttggaataggaatatcacccctatctggaagaccaggtggaggcttatcaccttcatagtaaggtactcactgtccacgtcaagagccaagccaaggtactgttcctccaatgagtaaacagcactgctgtagggctggcctaagtcaggcagttcaagataacctgaaggagtcgaataac

SEQ ID NO: 212531 - DNA, 341 bp, Homo sapiens
cagcctgggcaacatgatgaaacgctgtatctacaaaaaatacaaaaattatctgggcatggtgatgtgcacccatagtcccagctatgtggcagactgagatgggacgatcacctgagcctgggaggttgaggctgcagtgagctgtggtcacaccattgtactccagactgggtgatagagaccctgtctcagaaccaaccaaacaaacaaaatgcccaaacatatagttgggtcttatttctttatccattcagccactctgtgccttgtaactggagtattcagtccatttacattcagtgtcattgttgataagtaaggacttactactgccattt

SEQ ID NO: 212532 - DNA, 432 bp, Homo sapiens
ggaccgaaggccgacgccgggaggatctgcctccgggaggagccgcctccgggtctgaaccgccggggccccgtccgaaatgttcacctaagtgggggctcctgtggctgcgagggtcataagcaggagcgaggtcggagcctccggggaggcttcccccacgcgggtggagcgctccggaggcggggccctcaaggcccgggtgtcttaaccccgccgcgcccgggccgagttcgagagccgctggtgcttcccaggccgtcgcgctcctggccgcgcacccagccagggacccagaggccctcagccccgggctctgcgcgtacactgagggcgcggcgcagcaggacagcaagataaggaagcagagactgaagggaggaatccccgctttccggggatgatggcgttcgagttgggtctgtgagggat

SEQ ID NO: 212533 - DNA, 141 bp, Homo sapiens
atatcaggacagaatgcttagtcatgtttaataaagaatttaacgcaaactttttacattacagattatactactattacttgatttaagggtaatatatgactgtactctacatgggaaaagtggaaaacatagagtaaa

SEQ ID NO: 212534 - DNA, 127 bp, Homo sapiens
cttttgttccttcctcttgcccttttcctctctccctcaattaattaatgtttataacacatgtattgcatgaattcattctcttggagggaggaatccccaaaccctcttgagtggatagagtgca

SEQ ID NO: 212535 - DNA, 246 bp, Homo sapiens
tggggcttccccgggctggacccttggggcttaagtaattttattagattctctctctctctctctctctttctctctctctctctctctctgtctgtctccttgtctctgtcctcctctctctttactagattctttctctctttctctttttattagattccctctctctgtctctgtctctgcctctctttctttattagattctctctctccctctctttccccctttctcccccactccct

SEQ ID NO: 212536 - DNA, 849 bp, Homo sapiens
tgtagcctccaactcctcagctcaagcaatcttccctcatcagactcctaagtagctataggcatgcgccatcacacccagctaatctttaaatttttgtagagatgggggtcttggtatgttgcccaagcttgtctcaaattcctggcctcaagcaatcctcctgcctgggcttctcaaagtattgggattacaggtatgagccactgcacctggcctgacacttggttctcaaaaccccctttctggtttttgaggtcaggccaaggttcctcccaagcaacagtgccaaggagcatgcagtagaagaagcaagagctcccctccccctgcatacattcccccacctgtgggaacgcacacaccctatgagcagatgagcctgtacacttgggcacaaacaggttgagtgtggcctgactgaggcagaaggcagaaatgtctgctaggtatgtaggcgggctcacctggcatgcaaaggagtgaacagactgcttgtggatgtatgtaccagcttgggccactctggggccaggacctggctcctgtgttctgctcaagaagagcttgttgtgcgtatgtacaccctgcatgtgcagaatggcctgtgtgtttgtgcctcgtgggggctacttggaccctgtgggtatctcactcctaggagagcttatctgggtgttgcacaggtgcctgtgtcctgctcccagggagagcagcagcccctgtggctgcccattcaggccacagagacctggccagccattcctttccctctaggatttctttccagcatggagctatccttacacccataaacagggccagaactgccaagcacctgcaaatacc

SEQ ID NO: 212537 - DNA, 284 bp, Homo sapiens
ccttaaccaaagcaatggaataatatgttgatcttggattttacgtgtttaaacatctgtgataatccaacatttaaaataactggagcaaataccttagagcttagcactgtacctaataccacaatgcagttgctcagtacacatttgcttaattaaatgcctagaactatgttagatactttgggcggcacgctaatttcaattagggaaaaaaaatgctctaagggcttgcttttattttttaatttttaaaaaataatcttgtattgctataaagggct

SEQ ID NO: 212538 - DNA, 886 bp, Homo sapiens
atataaggtcagagttgtgtgcatgctcaggaaagacctgagaaggtcctaagctcacctctggctaaacttggggctctgcacaagcaaaaggcaaaggctaaggtagaattgtaaactgcctggctgagtaccacattatgcaggtagaggtccagtaaagaccaggagactttttagttcagtcatttaaggacatctctgtccagtcagtagctgagggaagagaaaattcagtggccatgtgggacaaagattacagactttatagaattagcttggaaaagtcactaaataaacaaccacaacaataaacagcaacaacaacaacaacaaactgggaaagaggaggatttgatttttagagaagctacattatttaaaatgtccagttttcaacaaaaaaaaagaaagacatgcagataaacaataaagggtgacctatgtacctaggaaaaaaagcagtcaatagagactatccctgaggaagccaaaacattggacttactagacaaagactttaactagctattttaaatatattaaaggaaaccatatataaagaactaaaggaaagtatgagaacaatgtttctccaggtagagaatattaataaatagaaattataaaaaagacaaccaggcacggtgggtcttgaactcctgaccttgtgatctgcctgcctcggcctcccaaagtgctgggattacaggcgtgagctgtcacacccggcctggtcacttgttttaaatgaataaatgttggacatggtggctcatgcccataatcccagcactttgtgaggccaaggcaggaggatagcttgaagccaggagtttgagaccagcctgggcaacaaagcgagaccctagtttctaccaaaaaa

SEQ ID NO: 212539 - DNA, 409 bp, Homo sapiens
tgagcattttctcatttacaactaagtgaataaccctgactgggaaatagaagtcggagcccagtgactctaagccaaggccaatcttgagcctgcaaaacaaggtcattgaagacccggttagttcttactggggagcctcccctgcaggtgtcccagcctgcacaccccaacatgaaaggagcactttatactgagaggagctatagagccctagagagctgggatccacaggcagatgctgttggggtcggagtctggaggctctttctgaggatggaattgttattgttctggggctgtttctagactttgtcaaataaaacaaattcacatttagataagaagttacttacttcaaaggagtattacaacagagggaaagcaccaactatatcttccaggatct

SEQ ID NO: 212540 - DNA, 564 bp, Homo sapiens
  misc_feature (543)..(545): n is a, c, g, or t
  misc_feature (559)..(559): n is a, c, g, or t
attttgaagatttatttttctgtaacaatcactatagataatatatcatcagtggaagataattgaagtattgtgtggctttttataatgcacatgtgtgtgtacatgtcatataaaaataaatactttttaaaataattttgataatacctattaaatagtccaaattataagagaagtaggaatacaaacatgaactgaataatgatttcaagcccagggccctttctgctataacatactgttcccatatcgtattactagttttgaaattactgagatgttttctattaacacatataagacaaataaggtatacaaaccatagaactgttttacagttgtattcttccaatcactattaattatgatcaccataattaaattaaacttggttaaaaatggcttatccaattaaataaatgaaatataacagaggagaaattttaacattctgtgttattttaatgatatagccaggtgtatatgtggctatttagctttttcactgatttgagagcaccaccaatacagggtccgagnnngaattcgtaacggnttcaa

SEQ ID NO: 212541 - DNA, 725 bp, Homo sapiens
attttgaagatttatttttctgtaacaatcactatagataatatatcatcagtggaagataattgaagtattgtgtggctttttataatgcacatgtgtgtgtacatgtcatataaaaataaatactttttaaaataattttgataatacctattaaatagtccaaattataagagaagtaggaatacaaacatgaactgaataatgatttcaagcccagggccctttctgctataacatactgttcccatatcgtattactagttttgaaattactgagatgttttctattaacacatataagacaaataaggtatacaaaccatagaactgttttacagttgtattcttccaatcactattaattatgatcaccataattaaattaaacttggttaaaaatggcttatccaattaaataaatgaaatataacagaggagaaattttaacattctgtgttattttaatgatatagccaggtgtatatgtggctatttagctttttcactgatttgaaatcactcacaagtaaataagagagtagaagtacaaggactttgcctacagtaaagcactgtaaaaatactctacataggctgggcggggtggctcgtgcctgtaatcccagcactttgggaggccgagtcgggcggatcacgaggtcaggagttcgagaccagtctggccaacatagtgaaaccccgtctctacgaaaaatacaaaa

SEQ ID NO: 212542 - DNA, 536 bp, Homo sapiens
agtctgtctgtgtcaattcttattttgtgtatatttcataaagtagaattacagcttaaagagctcgagggcatatcaaggtggttacattgttttcactttttaaaatgaaagcttactgttaacgctgtatctcttcattcgtggcttcaagatctaagttaagtagatgagtaaagtgttggaaacaggaggatttcaaggggtagggtacagtttactttattggcttagcactaatttgaatgcctgctatgtgtcactcaactcactgggatattcaagggtgtagaatggaattgttcgcagggatgaggacttgggtcatatgaaactaggaagtttgggaagtgggaaataaattggtaactgccctttggacagaagcaaagtttagaggaaaattctaggagcataactcctgggtcttagaagaaagaaggctagtaattttgaattgctacctatttggggttcagataatagtttacctctttgcaaataaacttcagcaagtcttaagggactactctgtg

SEQ ID NO: 212543 - DNA, 337 bp, Homo sapiens
tctctacttaaaataattaattaatttatttatttaattaaaataagaagtcccatctctctcagaaaaccacccaccagtaaatgataatacccatacaaggcagatgaacaggagctttcagctgttcagctgtgttattccacacaaatcctccttcattcagttcattcagtaggagacttttgcagttgcaaggataaggaaatggtcagcttgtgcaagaatcccctgtatgagaaagaaaagacacaatactagaatttgaattttccatctgagtcagatctctttcttacctctctgacacatttaactgagtaacggtcccgaagca

SEQ ID NO: 212544 - DNA, 399 bp, Homo sapiens
tgcatccactgtccgacaagccccagtgagatgaacccggtacctcagctggaaatgcagaagtcacccgtcttctgcttctctcatgctagtagctgtagactggagctgttcctattcggctatgttggaaccctcccagtcccagtaaaatttttcatttggaaaatagaagatgggaaaaaaacacagaagtcactgatccattgcaatagtggaattctgtaggtcagatattataaagattttgttgtgtccatgtacaaagttcttcgttctgaccctggttccactctctgaggaactgccttgttttttgttttgttttgttttttgagacggagtctcgctttgttgccaggctggagtgcagtggcacaatttcggctcactgcaacc

SEQ ID NO: 212545 - DNA, 182 bp, Homo sapiens
taatcaaaacagtgtggtaactggcataaagacacacatgtaggccaatggaatagaatagagaatccagaaataaaccctcccatatatggtcagatgtttttcaacagggtgccaatacctggggaaaagacagtctcttcaacaaatagtattggaagaattggatattgtcatgccaa

SEQ ID NO: 212546 - DNA, 398 bp, Homo sapiens
ccgcgcccggccgatccagaatgtttgacccatcacacagcatgggtgtgatgtctaagcttggtttgactgatgtaggcccctccctctctgctccacatgcagctttccttaagctgggcttttcatcagagaggaaagagtgccaaaggtgcattgttgcttgtgctttcttgccaaagctcccagataaactcacaaggttcagttgcctgaagagagtcaagctgcatctgttttgcccatcatcctcaaacaagtcttgcaagtacacacctctgggaaagaggcaaatggtgacaaaattgctactttctgggatagaaataatttctgataggcattggaataattttttaaattattattatctctcctccacccttcttcatagcccc

SEQ ID NO: 212547 - DNA, 300 bp, Homo sapiens
tgacattgcaccacgcactccagcctgggcagcagagtgagactccttctcaaaaaaaaaaaaaaaaaaaaaacagagatggggtctcccagcctgagaacatggtcaacctccatctctatgaaacaaacaaacaaaaaaacagaaattagctgagtgcagtggtgtgtgcctgtagtcccagctacttggaggctgaggtggaaggatcccttgtgctcaggaggcagagattgtggtgaacggggatcgtgccactgcactccatcctaggtgacagagtgagactcagtctaaagg

SEQ ID NO: 212548 - DNA, 630 bp, Homo sapiens
ctcagctgcttggatccttgccaacacttggtattgtcagttttatttcttcattaaagccatacctacaggggtgccatggtgtctcactgtggttttatcgtgcatttccctgtgactagtgatgctgagagtcttttcatgtgcttatttgtcatccctatgtcttatttggtgaaatatcttttcaaatccttcacctttttattgagttgttttctgattattcagttttaagagttctttatatattctgcttataatttctttgtcagatagttactttttctctcaacttctactactaattggccaaagtttaagacatatttaaaccgagacctggaaagtaactctgcacttcccattgttatttagattatactcaagtatttttcattttccaggtggtaaaatgtgtttatttttcacctactaatattcatgatttctggccggacgtgatggctcacgcctgtaatcccagcactttgggaggccgaggcgggcggatcatgaggtcaggagattgagaccatcctggctaacatggtgaaaccctgtctctactaaaaatacaaaaaattagccaggcgatgtggcgggcgcctgtagtcccagctactcagg

SEQ ID NO: 212549 - DNA, 525 bp, Homo sapiens
ttcccagagaaggggctcagctgtgaggggcagatcgagtggcctggatgtggctcggcctgtgggccagtgcccttcttgggctggcccagttccacctgcccccatccctgctgagacgcgccaccccccgccgcccctgcccccgccctgccgagctcctgctcccaggcctactcctggcggaacctgccctctccagctcacgctggacgtgctctactctctcgctgcccctgctgctgtccctcttacggcccaagtcatggcactactgtcttcccaatggctcaagttcaccctctcctttccctgcctgacacacgcacgccacatcaaggcttgctggcattgacgatcccctcaaggcccatgcgggcatggcgggcagaaggatggcagtgtccccatcatgggcgtcagcactgccacagtaacactgatgaggtacatgtgacctctccccactcgtttcctcccagacaccccccacctggtgggcctggagccccatttcccagatga

SEQ ID NO: 212550 - DNA, 768 bp, Homo sapiens
ttttattaagagggacagagatgagctggaagagttaagtcacttccccaaaatgagcatttcgttttcagaggttggattggtcttttgtgaatattacatgccgacttatgtgatgagatgaagagacttgacagatcattgctagaagtttaagtcagccatccccaaactttttggcaccaggggctggtttcatagaaggcgatttttccacaaactggggtagggggagtggttttgggatgaaacttcagatcatcaagtattagttagagtctcagatcatcaggtattagttagattctcataagaagcatgcaacctagatccttcatatgcgcagttcacaaaagggttcacgctcctatgaggatctaatgctgctgctgatctgacaggaggtggagctcaggcctgccccttacctcctgctgtgcagctgggttcctaacagggcacagaccagtatggggctggggacccctgatttaagtgactttatgtgttacaaatcaagtcaataggagagcgggcccattgtcaataaggcctctgaacacttgcccagtgctttcttcctgagttgtgtggtttctcgtgttctgtgtattcaggttcaaacccttgggaactgtagccaagttcttattttttgctgtctgttatgactttgcctaagcaaggggatgcagcacgatgctgctgcacagccagcatgctttcttccttcacctctctgctaaatgaatgtgatcaaaatgtgcc

SEQ ID NO: 212551 - DNA, 849 bp, Homo sapiens
aggtcctggcatctagtgagagccttcttgctccgtcctcacatggcagaaggcaaaaggggtaagaaagcaaaacagagcttcctttaacctcaactcattttctttttttttctttttttgagacagagtcttgctcttgttgcccaggttggagtgcaatggcacgatcttggctcactgcaacttccacttcctgggttcaagcaattctcctgcctcagcctcctgagtagctgggattacaggtgcccaccaccacgccaggctaatttttgtgttttcagtagagatggggttttgccatgttggccaggctggtcccgaactcctgacctcgtgatctgcctgcctcagcctcccaaagtgctgggattccaggcgtgagccaccgtgcccagccaacctcaagtacttttataagggtcctaatcccatacatggcctcacctcttaatattgtcacattagggattaggttttaacctaggaattttggagggaacacaaacattcaaaccatatccctgagataattttaaaattttcccatgatttcctcctgttatgtttttgctttcatttttttcctttaattttttttgtgtgtacaaatccaactttacccctctacagttacctagtttccaatgatcatttacaaataattcaacatttgccacatatttgaaatgtcacctttaacatatacctaattactacatgtatttgggtacattcatgtatttcctattctgttgcaataatttgttcaagtctactgtctgcttgtttcttgagagaagagttttgaaatctctgctataattatgaatttgtccatttctc

SEQ ID NO: 212552 - DNA, 1228 bp, Homo sapiens
tcatgaaattgacaacaatcttcttaactattcctccgtgttagttgacaaaggatcttcattatctgattttgggtagtagaatgactctgttcagggcacagagaatcagtgatccacggaaacagagtttgaagatccttattttaatctgcaaaagattgtcttaattttgaaagaaaatttatgcagaatagagtccagtttttctggctctatttcatcacccccaagctcctatcttgcaatgctcccatgtcttaagaaacttgttagtgatcttcaaagattgccaaaatttgtggaagttcttttagtttaggaaaataatctcactggtttcttaaccttatgtaggtacttataatgtatcatctgggctgggcatggtggctaatgcctgttatcccagcactttgggaggccagggtgggagggttgcttgagcacaggagtttgagaccagcctgggcaagatgacgaatcctgtctcttcaaaaaatgggaaaattagctggacgtggtggtgtgcacctgtagtcccaactacttgggaggctgaggtgggaggatcacctgagctccgaggtcgatgctgcagggatctgtgatcacgccattgcactccagcctgggtgacagagtgagaccctgtctcaaagaaaaaaaaaaaatctgattccttaagtcaattacataactaactgtaactttaaaattaacctatttccagttttctcttgaggcttggcagggaacccacttgtgtttgaattgagtgagtacagattttcatttggtggtactttgtttttatcagttcttcaatcttcctaacctctactcccagctccctgggctggtgttgattacatggggttacatgttgattacttgggctgctcttggtgccctgtggaagtggtatgacccagcttcataatccattatttgaagaacgtgagcccctttaaattttcaggcccaagagaggcattggaatgaaacaggagtcatatcactccccttgagctaaataattacctcttgaagccacttgctatttgagtgctatgctgactgctgccgagaagccataaaatgccgtatacctatagttcaacaatgtatagccaataatcaatgttatttttgtaagacaatgagaattcctggtgaacaatgattgtaattgtcccctctcctgattcttgcttttttaaaaaaa

SEQ ID NO: 212553 - DNA, 967 bp, Homo sapiens
tcatgaaattgacaacaatcttcttaactattcctccgtgttagttgacaaaggatcttcattatctgattttgggtagtagaatgactctgttcagggcacagagaatcagtgatccacggaaacagagtttgaagatccttattttaatctgcaaaagattgtcttaattttgaaagaaaatttatgcagaatagagtccagtttttctggctctatttcatcacccccaagctcctatcttgcaatgctcccatgtcttaagaaacttgttagtgatcttcaaagattgccaaaatttgtggaagttcttttagtttaggaaaataatctcactggtttcttaaccttatgtaggtacttataatgtatcatctgggctgggcatggtggctaatgcctgttatcccagcactttgggaggccagggtgggagggttgcttgagcacaggagtttgagaccagcctgggcaagatgacgaatcctgtctcttcaaaaaatgggaaaattagctggacgtggtggtgtgcacctgtagtcccaactacttgggaggctgaggtgggaggatcacctgagctccgaggtcgatgctgcagggatctgtgatcacgccattgcactccagcctgggtgacagagtgagaccctgtctcaaagaaaaaaaaaaaaaaaaacttcaggggggtgccggtaccccatttggcctattgtgaggcgattacaattcaattggccgcggtttacaccggtctgactgggaaaaccttgcgttcccaacttaatcgccttgcaagaccatccccttttcgcagttgccttaataccaaaaggccccgaccggtcgcccttccaaaaattgggcaaccttgatggcaaatggcaaaatgaagctttaaaatttgttaaaattccgttaaaattttgtaaaacaactaatttttaacccacttggcgcaaatggg

SEQ ID NO: 212554 - DNA, 412 bp, Homo sapiens
aatacgtctggaagcctgagagagcttatgttagagaaacatactaaggtacagctggggtaaggcatatacagggtagagaatgggcaggtgtaaagcctgagtcctgtccttgcagttgggatgtcaggtgaaagttaggactggttaaacaggtctcttcttgccacctgtgtataatgaaatattaaggctcagtggttaagggcccagattttgggttcacactgttgctcagtaactttgtgacaatgttaagaatcaggttttttttttttttttttccgtatggaaaaaatcttatgttataacagtatctattggtatgtggttgctttgcatatcaagtggaatttatttaaatactgcatagcacagtggctgcatgcagcaaacacccaaaaaatgataa

SEQ ID NO: 212555 - DNA, 198 bp, Homo sapiens
gaaaagccaccattccctgagcacttcttatacactaagcaccatgctattgttgctcgtgaatggatcccttattaatccttatgaatcctatgagataagtatccttatcctcattgtgtagctgaggaaatgggtttggagtggattgtgacttgtccctggttgccatgattataattcaagtcagctttacca

SEQ ID NO: 212556 - DNA, 622 bp, Homo sapiens
acatgggccttaggttagttctccttaaggacctaggatggctgccttctgtaaataatgcatccgtcatccttgtttgtatctatcaggaaaaaagagagaaggacgtctctttcccagaagccaaaaccaagcaagttaacttcttgtgtctcattgggccacattggcttggacctgccaatcctagggtatggagtcaccataaatgggctgggtgctgtggttcacttctgtaatcccagcacttcaggaggctgagatgggaggattgcttgagcccagaaattcaagaccagtcagggcaatacagcaagacaccatctctccaaaaaaaatttttttaattagctgggcatggtggtatgcacctgtgggctcagctacttgggaggctgaggtggaaggatcacttgagcccaggagatcgaggctgcagtgagccatgattgtgccactgcacttctgcctgagcaacagagcaagatcttgtctcatatctactccataggaagtgtggatgtatatgtttttacaagatacataagtgtacacagtgtacaactaagtttgaggacggctacacttcccagtttaagacttaaaaataggggaaggccag

SEQ ID NO: 212557 - DNA, 678 bp, Homo sapiens
cgcagtagctcatgcctgtaatcccagcgctttgggaggccaaggtgggcaaaccacctgaggtcaggagttcaagaccagtctggccaacatggtgaaaccccgtctctactaaaaatacaaaaattatccaggcatggtggtgggcacctataatcccagctactcaggtggctgaggcaggagattcgcttaaacctgggagacggaagctacagtgagcagcgatcgcaccactacactccagcctgggcaacagaatgagactctgtctcaaaaaataaaaataaaataaaaaataaaaaaactattggttatcaggctgagtggaaacataagctcaatgtgactatttagtaacttcccaacagttctaaactaccacccgtagctctaaatgaaaacttcattttttaaccactttgggcatggctgggatgtaggaatcaatgtgttgatgcaaaaatgctgcaaggcagttcttttctctgtctttcctgagcatcattagacctccagggagtgaggcactgtgtaactgaaggtccaaacaacatatccaaggcactaagaggatcacaatgcataaaacacgatgtgcataaatgctgatggataacggggaaaaagtaaaaaagaaaagaaaaaaaaggaaagaaaaccacagagtctcctaag

SEQ ID NO: 212558 - DNA, 320 bp, Homo sapiens
cttcataaaagttattctaataaattataatcatatgattttagaaaacttggttttttagatccaaaattttcaaatgttgacatcgtatttatgtttaataatgtagttgattaaccagtttcatcttactttctaaactgttaagttgagtttggactaatgataattccatttctggactgaaatttgccatcaccaaagtattgttttaagatgtattttcagacaatgtgggcagttcagcccaataatcgctacttctaaaaaattgttcaaggaacaagccgatggcctttcagcagtgagctaatgcatac

SEQ ID NO: 212559 - DNA, 225 bp, Homo sapiens
gcactgaggctgggacagtcccagacccactgggatggtgagtcccctccctgtacagaagcccatgtggtgtagacccctcaccaattctactcagctacataaaggctgtgccatgatgtcccaggccgggggaatcactcactgagtagatttggtgcacccataggagctgtttcttttttctttagcagaaaagcgcttttcagtttagtttctttggct

SEQ ID NO: 212560 - DNA, 412 bp, Homo sapiens
tctatatacaattagcataagctagtcaatacaacaaaaatatatacagcaaattagattgggtttgcatcattctatagattaggagaatattgaacattataaaaatagtgaatattccaattcatgaactcaatatatttattcatttactaagacattcttgatttcttattcagcattcgtaggtaacatgcaaatcctgtatctatttttgttaactttgtacctacatattttgtttttcctgatgctattgtaactattactttaaaatttaatttccatgtgcctatagtcccaacttcttgggagactgaggcaaaagactcagttgggcccaggagggagtttgagtctagtctgggcaacacagaaccccacctctaaaaattaaattaagttaaaatta

SEQ ID NO: 212561 - DNA, 298 bp, Homo sapiens
acaattcaatatgagatttggtggggagacagatctaaactgtattacagggtctcactttgtgcacaggctggtcttcaactcctgcctcagtgagccactgtgccccaccccaacatgttttgtgtgttttttgagactgtcttgctctgtcatccaggctggagtgcagtggtacactcttggcttactgcagcctctgcctcccaggttcaagcaattctgcctcagcctcccaagtagctgggattacaggcatgcgccaccagtcccggctaatttttgtatttttagtaga

SEQ ID NO: 212562 - DNA, 345 bp, Homo sapiens
ccatttaccctcttccttatcagcactgctcacctcttgctcctctttcctctgaatctcttgtccccttcttgaacctacatctctagtctccccccaggtacccttttccccagcttgagagccccccagtctatgtgtgagggtcctacacaacctcccagtgatgggcctctgttctgtatctctgggcctctcctgggactgctttctggtggggaggctattttagcagctcacctgctgctacctattcatgaccctgatgcagaaaatgcttgtgaggtgccactagccaagaagcagaccaaggctggaagtggagtcctcatttgttttgcagac

SEQ ID NO: 212563 - DNA, 459 bp, Homo sapiens
gtgcccaagtatttcatgttcattgtaaagaggaaaaatacagatttctctataatgtcaccacttatttctaatgccacttttcatcttgtggaaatgccatgttttgattcagtcttctgaatttgaacattattcaggttatttccaattgctgggaatatccttactgctaaaataaattcttagcattggaattgctaggtcaaagattatgcatgctttttaagggcttttgaaatgtattgccagtctgtggcctgccaccctccctgaacatgcctggtcttgcttaaaatgtattgccaaatagtccttgggaagtttatgttgtctttaacaatgtgaaatagtactactattcacgttccttttgtctgacaatttgataagtgaataattgtatcccaccattttgtagtattggtttttaacatggaaattttagtcaatacctgg

SEQ ID NO: 212564 - DNA, 1797 bp, Homo sapiens
agcggggggtgcagggggcggggctcggcctggccgcagccattttggtgcgagagaaacaataggacggaaacgccgaggaacccggctgaggcggcagcagagcatcctggccagaacaagccaaggagccaagacgagagggacacacggacaaacaacagacagaagacgtactggccgctggactccgctgcctcccccatctccccgccatctgcgcccggaggatgagcccagccttcagggccatggatgtggagccccgcgccaaaggcgtccttctggagccctttgtccaccaggtcggggggcactcatgcgtgctccgcttcaatgagacaaccctgtgcaagcccctggtcccaagggaacatcagttctacgagaccctccctgctgagatgcgcaaattcactccccagtacaaaggtgtggtatctgtgcgctttgaagaagatgaagacaggaacttgtgtctaatagcatatccattgaaaggggaccatggaattgtggacattgtagataattcagactgtgaaccaaaaagtaagctcctaaggtggacaacaaacaaaaaacatcatgtcttagaaacagaaaagacccctaaggactgggtgcgtcagcaccgtaaagaggagaaaatgaagagccataagttagaagaagaatttgagtggctaaagaaatctgaagtcttgtactacactgtagagaagaaggggaatataagttcccagcttaaacactataacccttggagcatgaaatgtcaccagcaacagttacagagaatgaaggagaatgcaaagcatcggaaccagtacaaatttatcttactggaaaacctgacttcccgctatgaggtgccttgtgtccttgacctcaagatgggcacacgacaacatggtgatgatgcttcagaggagaaggcagccaaccagatccgaaaatgtcagcagagcacatctgcagtcattggtgtgcgtgtgtgtggcatgcaggtgtaccaagcaggcagtgggcagctcatgttcatgaacaagtaccatggacggaagctatcggtgcagggcttcaaggaggcacttttccagttcttccacaatgggcggtacctgcgccgtgaactcctgggccctgtgctcaagaagctgactgagctcaaggcagtgttggagcgacaggagtcctaccgcttctactcaagctccctgctggtcatttatgatggcaaggagcggcccgaagtggtcctggactcagatgctgaggatttggaggacctgtcagaggaatcagctgatgagtctgctggtgcctatgcctacaaacccatcggcgccagctctgtagatgtgcgcatgatcgactttgcacacaccacctgcaggctgtatggcgaggacaccgtggtgcatgagggccaggatgctggctatatcttcgggctccagagcctgatagacattgtcacagagataagtgaggagagtggggagtgagcttgctagctgctccagtacttgagagcgactctgtgtcccaggcacagctgtgctgcgtcagggaggaagccagtatggccaggtggtggctcctgcagcctggagctgatgtgcagtggcctctgtgagccccagcctgagccagtcccagctgtgcttggagtctttatttattttaactatttcttcaacattccacatttgatgatgatacctctttcttccctgagtgtatatgttctaatacaaatctttttgtttattgtaaaaaaaaaaagctcct

SEQ ID NO: 212565 - DNA, 902 bp, Homo sapiens
agcggggggtgcagggggcggggctcggcctggccgcagccattttggtgcgagagaaacaataggacggaaacgccgaggaacccggctgaggcggcagcagagcatcctggccagaacaagccaaggagccaagacgagagggacacacggacaaacaacagacagaagacgtactggccgctggactccgctgcctcccccatctccccgccatctgcgcccggaggatgagcccagccttcagggccatggatgtggagccccgcgccaaaggcgtccttctggagccctttgtccaccaggtcggggggcactcatgcgtgctccgcttcaatgagacaaccctgtgcaagcccctggtcccaagggaacatcagttctacgagaccctccctgctgagatgcgcaaattcactccccagtacaaaggacaaagccaaaggccccttgttagctggccatccctgccccattttttcccctggtcctttcccctgtggccacagggaagtgtggcctgaataccccaccccggctcctctgcacccagagctgggggccacctcagaagtgtcatctctctctgagcacgcattcccctgcagcagtcgaggactgagcagattgagtgatgctggggcagagaggcctgggaggaaaggtgttcagccagtcgtttgtaaggcgctcgtcggcacctgctgaaacgcccccacctgacagccccatcctcaaagactgtcttaattactcatggcaggttctagagacttaaggggaaaagctgctttcaaggccaccacatgtctgtgctccccaaccagctctatctgccttgtgttcattttgttattttgtgacgtgagactgcaaagaccaataaaaacatattttataag

SEQ ID NO: 212566 - DNA, 564 bp, Homo sapiens
  misc_feature (11)..(11): n is a, c, g, or t
  misc_feature (15)..(15): n is a, c, g, or t
gcctcggcggngaancggaaacgccgaggaacccggctgaggcggcagagcatcctggccagaacaagccaaggagccaagacgagagggacacacggacaaacaacagacagaagacgtactggccgctggactccgctgcctcccccatctccccgccatctgcgcccggaggatgagcccagccttcagggccatggatgtggagccccgcgccaaaggcgtccttctggagccctttgtccaccaggtcggggggcactcatgcgtgctccgcttcaatgagacaaccctgtgcaagcccctggtcccaagggaacatcagttctacgagaccctccctgctgagatgcgcaaattcactccccagtacaaaggggacatcagcagccaccagcatggtggggtctttgttggggagtgggggagtcttttgtaaatcaaacaaagccaaaggccaactgtccggtggccatccctgccctatttagtacattagtaacatcccgcgtggcatcagggtagtgtcggctgtattttgacccactggggactcaggaagga

SEQ ID NO: 212567 - DNA, 430 bp, Homo sapiens
gcggcgcctactactactactactgctcgaattcaagcttctaacgatgtacggggacatgagggccaggatgctggctatatcttcgggctccagagcctgatagacattgtcacagagataagtgaggagagtggggagtgagcttgctagctgctccagtacttgagagcgactctgtgtcccaggcacagctgtgctgcgtcagggaggaagccagtatggccaggtggtggctcctgcagcctggagctgatgtgcagtggcctctgtgagccccagcctgagccagtcccagctgtgcttggagtctttatttattttaactatttcttcaacattccacatttgatgatgatacctctttcttccctgagtgtatatgttctaatacaaatctttttgtttattgtaaaaaaaaaaagctcct

SEQ ID NO: 212568 - DNA, 982 bp, Homo sapiens
agcggggggtgcagggggcggggctcggcctggccgcagccattttggtgcgagagaaacaataggacggaaacgccgaggaacccggctgaggcggcaggtaaagctcgcgtcctatggccctagtgcccgaggagctttgagggagattttttcaggctactgggaaacgggatctctgatcattggagtctcccaggttatttgggaaagacttcttccgtggtcattgtgggggaaatctcccggggtccctgtggattcgatttccctgggtcatttgggaggagggtttttcttctgatcattgggggagggatttccgtggttttgggggtccagcatcctccccggtcattggagggggtctcccgggtttgggggagggcaggatctttcctggtcattgagatctccccgggtcttgggaagcgcaagatctacggtgtcattgaggggtctccccaggtcattggcggccacgatctccccagatatttggcgggtggaggggtcttcccggatctttggatagggagtcagctcagcgcctcaggtactgttacctggggtcggcagatgtgcagccattttgagtgttgaatgccatttgggcccgtcagatggtgttcgatgagggaatctacacacttaaccttattatagaaaaaatgcctttaaatggataagaggacacctttatagtgatatttccactctttacgtttgattacagaccgcttttgtcttttgcatcctaatggcttatttcattttaggattgtattcgttctcatatatcaactaagctacactagcagaaaagtgagtgaaaataaaatgtagaaaccagtaaaatccagtgctcttaaataccagggaaaacagaactagtcactgcttggaattaaacatttccgtagcagaatgtacacagaacaaaaaatcatcttgaatagttttaagaaaaagtactggcact

SEQ ID NO: 212569 - DNA, 477 bp, Homo sapiens
acatcagctcggtaccgatttcgcttcctaggtgacagacaggtacactgtatgctagccctgtatctgtctgagcagtggaatgtgccaggaaagaaggagcaaccactgactgatgaacctttgccagtctcccttccaagagggatgccagagccttctgtaagctcctgagatgtcactggtatctaggcaacagggatgagcctgaacctccctgaggccagcttactgaggtgaaaattttccattgtttggctcataaagaggatgcactggggaagaattttccctttaagtgaagttatttcacctagtgggataatcttgggtaacaaattgaacacactcttatacattagaaagtaagcagatgattattctcatgttattacattttaaagcatgtttttgtttttttaaattatgtttttgcctatttgtgtaccatataataaaagtaataagaagtagttg

SEQ ID NO: 212570 - DNA, 3491 bp, Homo sapiens
agcggggggtgcagggggcggggctcggcctggccgcagccattttggtgcgagagaaacaataggacggaaacgccgaggaacccggctgaggcggcagcagagcatcctggccagaacaagccaaggagccaagacgagagggacacacggacaaacaacagacagaagacgtactggccgctggactccgctgcctcccccatctccccgccatctgcgcccggaggatgagcccagccttcagggccatggatgtggagccccgcgccaaaggcgtccttctggagccctttgtccaccaggtcggggggcactcatgcgtgctccgcttcaatgagacaaccctgtgcaagcccctggtcccaagggaacatcagttctacgagaccctccctgctgagatgcgcaaattcactccccagtacaaaggtaagtcccagctgctggaggggttgccacactggcgaggagatgtgagagatcgtggccatggaaggccctggcagccatccctggagccctcactccctcccactctgtgctttccctccctctcctccttctcctcctcctggccctcagcccagcatctcacaccctcagttttcaatccctggtaagattgctcaattctgttttgttgtgtggatttgagtttgattttggtagaagtgtagttgtgttttatgttcaggtgtctcttgatcacagtaacccatagtcccccactggggggacggtgggggaagactttgggaggattttacccagaatacttgccgcctgctttttgtcctccaggaaaccagaagcccgggtaattagaggtaggccggggagcagcgttgagtcagatggaatgcaggagtgggaggcctgtgctgattagcccaagccctttgctgttacagaatgtccccaaaattgctatatgaaagcaacccttcgattcacatatgataattttttatttctttttataatgtattttataggggacatcagcagccaccagcatggtggggtctttgttggggagtgggggagtcttttgtaaatcaagacaaagccaaaggccccttgttagctggccatccctgccccattttttcccctggtcctttcccctgtggccacagggaagtgtggcctgaataccccaccccggctcctctgcacccagagctgggggccacctcagaagtgtcatctctctctgagcacgcattcccctgcagcagtcgaggactgagcagattgagtgatgctggggcagagaggcctgggaggaaaggtgttcagccagtcgtttgtaaggcgctcgtcggcacctgctgaaacgcccccacctgacagccccatcctcaaagactgtcttaattactcatggcaggttctagagacttaaggggaaaagctgctttcaaggccaccacatgtctgtgctccccaaccagctctatctgccttgtgttcattttgttattttgtgacgtgagactgcaaagaccaataaaaacatattttataagaacaaaaggcctgggtgcctacccgtgtgggggcactgtgggaagcctttgctagggtgtcttgtgctgtgtggtttgttttgtttgcccctttattttgctttgcttacccagtcttcccttactcttggatgcttcttaaccctcaggcaaacctgtgttccccctgtattcaggctctgctttaaagcaagccatgaggctgttggagtttctgtttagggcattaaaaattcccgcaaactataaagagcaatgttttcagtcttttaggattagaagaattacataaaaattaataaacattttcaatgatggaaaaatgtgtcttgtaattctttggctcttgcctcgttgagtacatcagagaggaagactctcagccatgtttgctccctaattgcttgtcttgtatggtgtcatcttttctagctgttttgatatttgttaagtttgcagatgagtttggggcctctggcaacatagagactaaggaactgggtaagaaaaaaacaaatgttacaatcatgttacttacaacgcttcttcctgctaaattaaaagttctttctgctcctcacccccttccaggtgtggtatctgtgcgctttgaagaagatgaagacaggaacttgtgtctaatagcatatccattgaaaggggaccatggaattgtggacattgtagataattcagactgtgaaccaaaaagtaagctcctaaggtggacaacaaacaaaaaacatcatgtcttagaaacagaaaagacccctaaggactgggtgcgtcagcaccgtaaagaggagaaaatgaagagccataagttagaagaagaatttgagtggctaaagaaatctgaagtcttgtactacactgtagagaagaaggggaatataagttcccagcttaaacactataacccttggagcatgaaatgtcaccagcaacagttacagagaatgaaggagaatgcaaagcatcggaaccagtacaaatttatcttactggaaaacctgacttcccgctatgaggtgccttgtgtccttgacctcaagatgggcacacgacaacatggtgatgatgcttcagaggagaaggcagccaaccagatccgaaaatgtcagcagagcacatctgcagtcattggtgtgcgtgtgtgtggcatgcaggtgtaccaagcaggcagtgggcagctcatgttcatgaacaagtaccatggacggaagctatcggtgcagggcttcaaggaggcacttttccagttcttccacaatgggcggtacctgcgccgtgaactcctgggccctgtgctcaagaagctgactgagctcaaggcagtgttggagcgacaggagtcctaccgcttctactcaagctccctgctggtcatttatgatggcaaggagcggcccgaagtggtcctggactcagatgctgaggatttggaggacctgtcagaggaatcagctgatgagtctgctggtgcctatgcctacaaacccatcggcgccagctctgtagatgtgcgcatgatcgactttgcacacaccacctgcaggctgtatggcgaggacaccgtggtgcatgagggccaggatgctggctatatcttcgggctccagagcctgatagacattgtcacagagataagtgaggagagtggggagtgagcttgctagctgctccagtacttgagagcgactctgtgtcccaggcacagctgtgctgcgtcagggaggaagccagtatggccaggtggtggctcctgcagcctggagctgatgtgcagtggcctctgtgagccccagcctgagccagtcccagctgtgcttggagtctttatttattttaactatttcttcaacattccacatttgatgatgatacctctttcttccctgagtgtatatgttctaatacaaatctttttgtttattgtaaaaaaaaaaagctcct

SEQ ID NO: 212571 - DNA, 3654 bp, Homo sapiens
  misc_feature (11)..(11): n is a, c, g, or t
  misc_feature (15)..(15): n is a, c, g, or t
gcctcggcggngaancggaaacgccgaggaacccggctgaggcggcagagcatcctggccagaacaagccaaggagccaagacgagagggacacacggacaaacaacagacagaagacgtactggccgctggactccgctgcctcccccatctccccgccatctgcgcccggaggatgagcccagccttcagggccatggatgtggagccccgcgccaaaggcgtccttctggagccctttgtccaccaggtcggggggcactcatgcgtgctccgcttcaatgagacaaccctgtgcaagcccctggtcccaagggaacatcagttctacgagaccctccctgctgagatgcgcaaattcactccccagtacaaaggtaagtcccagctgctggaggggttgccacactggcgaggagatgtgagagatcgtggccatggaaggccctggcagccatccctggagccctcactccctcccactctgtgctttccctccctctcctccttctcctcctcctggccctcagcccagcatctcacaccctcagttttcaatccctggtaagattgctcaattctgttttgttgtgtggatttgagtttgattttggtagaagtgtagttgtgttttatgttcaggtgtctcttgatcacagtaacccatagtcccccactggggggacggtgggggaagactttgggaggattttacccagaatacttgccgcctgctttttgtcctccaggaaaccagaagcccgggtaattagaggtaggccggggagcagcgttgagtcagatggaatgcaggagtgggaggcctgtgctgattagcccaagccctttgctgttacagaatgtccccaaaattgctatatgaaagcaacccttcgattcacatatgataattttttatttctttttataatgtattttataggggacatcagcagccaccagcatggtggggtctttgttggggagtgggggagtcttttgtaaatcaagtaagaatccattaaagaaattaattttaaatgtgcattacctggttacataaaggactctagaacaacttaggttcttttgggactgttgaaacattgtctttaaggacagaatgtactgggtgcctttctctgtactctgaatatgcatgtgtattgcggtggggatgggggagttgggggccctcacttggtccttctctgttgtttttttccaggacaaagccaaaggccccttgttagctggccatccctgccccattttttcccctggtcctttcccctgtggccacagggaagtgtggcctgaataccccaccccggctcctctgcacccagagctgggggccacctcagaagtgtcatctctctctgagcacgcattcccctgcagcagtcgaggactgagcagattgagtgatgctggggcagagaggcctgggaggaaaggtgttcagccagtcgtttgtaaggcgctcgtcggcacctgctgaaacgcccccacctgacagccccatcctcaaagactgtcttaattactcatggcaggttctagagacttaaggggaaaagctgctttcaaggccaccacatgtctgtgctccccaaccagctctatctgccttgtgttcattttgttattttgtgacgtgagactgcaaagaccaataaaaacatattttataagaacaaaaggcctgggtgcctacccgtgtgggggcactgtgggaagcctttgctagggtgtcttgtgctgtgtggtttgttttgtttgcccctttattttgctttgcttacccagtcttcccttactcttggatgcttcttaaccctcaggcaaacctgtgttccccctgtattcaggctctgctttaaagcaagccatgaggctgttggagtttctgtttagggcattaaaaattcccgcaaactataaagagcaatgttttcagtcttttaggattagaagaattacataaaaattaataaacattttcaatgatggaaaaatgtgtcttgtaattctttggctcttgcctcgttgagtacatcagagaggaagactctcagccatgtttgctccctaattgcttgtcttgtatggtgtcatcttttctagctgttttgatatttgttaagtttgcagatgagtttggggcctctggcaacatagagactaaggaactgggtaagaaaaaaacaaatgttacaatcatgttacttacaacgcttcttcctgctaaattaaaagttctttctgctcctcacccccttccaggtgtggtatctgtgcgctttgaagaagatgaagacaggaacttgtgtctaatagcatatccattgaaaggggaccatggaattgtggacattgtagataattcagactgtgaaccaaaaagtaagctcctaaggtggacaacaaacaaaaaacatcatgtcttagaaacagaaaagacccctaaggactgggtgcgtcagcaccgtaaagaggagaaaatgaagagccataagttagaagaagaatttgagtggctaaagaaatctgaagtcttgtactacactgtagagaagaaggggaatataagttcccagcttaaacactataacccttggagcatgaaatgtcaccagcaacagttacagagaatgaaggagaatgcaaagcatcggaaccagtacaaatttatcttactggaaaacctgacttcccgctatgaggtgccttgtgtccttgacctcaagatgggcacacgacaacatggtgatgatgcttcagaggagaaggcagccaaccagatccgaaaatgtcagcagagcacatctgcagtcattggtgtgcgtgtgtgtggcatgcaggtgtaccaagcaggcagtgggcagctcatgttcatgaacaagtaccatggacggaagctatcggtgcagggcttcaaggaggcacttttccagttcttccacaatgggcggtacctgcgccgtgaactcctgggccctgtgctcaagaagctgactgagctcaaggcagtgttggagcgacaggagtcctaccgcttctactcaagctccctgctggtcatttatgatggcaaggagcggcccgaagtggtcctggactcagatgctgaggatttggaggacctgtcagaggaatcagctgatgagtctgctggtgcctatgcctacaaacccatcggcgccagctctgtagatgtgcgcatgatcgactttgcacacaccacctgcaggctgtatggcgaggacaccgtggtgcatgagggccaggatgctggctatatcttcgggctccagagcctgatagacattgtcacagagataagtgaggagagtggggagtgagcttgctagctgctccagtacttgagagcgactctgtgtcccaggcacagctgtgctgcgtcagggaggaagccagtatggccaggtggtggctcctgcagcctggagctgatgtgcagtggcctctgtgagccccagcctgagccagtcccagctgtgcttggagtctttatttattttaactatttcttcaacattccacatttgatgatgatacctctttcttccctgagtgtatatgttctaatacaaatctttttgtttattgtaaaaaaaaaaagctcct

SEQ ID NO: 212572 - DNA, 2858 bp, Homo sapiens
agcggggggtgcagggggcggggctcggcctggccgcagccattttggtgcgagagaaacaataggacggaaacgccgaggaacccggctgaggcggcagcagagcatcctggccagaacaagccaaggagccaagacgagagggacacacggacaaacaacagacagaagacgtactggccgctggactccgctgcctcccccatctccccgccatctgcgcccggaggatgagcccagccttcagggccatggatgtggagccccgcgccaaaggcgtccttctggagccctttgtccaccaggtcggggggcactcatgcgtgctccgcttcaatgagacaaccctgtgcaagcccctggtcccaagggaacatcagttctacgagaccctccctgctgagatgcgcaaattcactccccagtacaaaggacaaagccaaaggccccttgttagctggccatccctgccccattttttcccctggtcctttcccctgtggccacagggaagtgtggcctgaataccccaccccggctcctctgcacccagagctgggggccacctcagaagtgtcatctctctctgagcacgcattcccctgcagcagtcgaggactgagcagattgagtgatgctggggcagagaggcctgggaggaaaggtgttcagccagtcgtttgtaaggcgctcgtcggcacctgctgaaacgcccccacctgacagccccatcctcaaagactgtcttaattactcatggcaggttctagagacttaaggggaaaagctgctttcaaggccaccacatgtctgtgctccccaaccagctctatctgccttgtgttcattttgttattttgtgacgtgagactgcaaagaccaataaaaacatattttataagaacaaaaggcctgggtgcctacccgtgtgggggcactgtgggaagcctttgctagggtgtcttgtgctgtgtggtttgttttgtttgcccctttattttgctttgcttacccagtcttcccttactcttggatgcttcttaaccctcaggcaaacctgtgttccccctgtattcaggctctgctttaaagcaagccatgaggctgttggagtttctgtttagggcattaaaaattcccgcaaactataaagagcaatgttttcagtcttttaggattagaagaattacataaaaattaataaacattttcaatgatggaaaaatgtgtcttgtaattctttggctcttgcctcgttgagtacatcagagaggaagactctcagccatgtttgctccctaattgcttgtcttgtatggtgtcatcttttctagctgttttgatatttgttaagtttgcagatgagtttggggcctctggcaacatagagactaaggaactgggtaagaaaaaaacaaatgttacaatcatgttacttacaacgcttcttcctgctaaattaaaagttctttctgctcctcacccccttccaggtgtggtatctgtgcgctttgaagaagatgaagacaggaacttgtgtctaatagcatatccattgaaaggggaccatggaattgtggacattgtagataattcagactgtgaaccaaaaagtaagctcctaaggtggacaacaaacaaaaaacatcatgtcttagaaacagaaaagacccctaaggactgggtgcgtcagcaccgtaaagaggagaaaatgaagagccataagttagaagaagaatttgagtggctaaagaaatctgaagtcttgtactacactgtagagaagaaggggaatataagttcccagcttaaacactataacccttggagcatgaaatgtcaccagcaacagttacagagaatgaaggagaatgcaaagcatcggaaccagtacaaatttatcttactggaaaacctgacttcccgctatgaggtgccttgtgtccttgacctcaagatgggcacacgacaacatggtgatgatgcttcagaggagaaggcagccaaccagatccgaaaatgtcagcagagcacatctgcagtcattggtgtgcgtgtgtgtggcatgcaggtgtaccaagcaggcagtgggcagctcatgttcatgaacaagtaccatggacggaagctatcggtgcagggcttcaaggaggcacttttccagttcttccacaatgggcggtacctgcgccgtgaactcctgggccctgtgctcaagaagctgactgagctcaaggcagtgttggagcgacaggagtcctaccgcttctactcaagctccctgctggtcatttatgatggcaaggagcggcccgaagtggtcctggactcagatgctgaggatttggaggacctgtcagaggaatcagctgatgagtctgctggtgcctatgcctacaaacccatcggcgccagctctgtagatgtgcgcatgatcgactttgcacacaccacctgcaggctgtatggcgaggacaccgtggtgcatgagggccaggatgctggctatatcttcgggctccagagcctgatagacattgtcacagagataagtgaggagagtggggagtgagcttgctagctgctccagtacttgagagcgactctgtgtcccaggcacagctgtgctgcgtcagggaggaagccagtatggccaggtggtggctcctgcagcctggagctgatgtgcagtggcctctgtgagccccagcctgagccagtcccagctgtgcttggagtctttatttattttaactatttcttcaacattccacatttgatgatgatacctctttcttccctgagtgtatatgttctaatacaaatctttttgtttattgtaaaaaaaaaaagctcct

SEQ ID NO: 212573 - DNA, 3654 bp, Homo sapiens
agcggggggtgcagggggcggggctcggcctggccgcagccattttggtgcgagagaaacaataggacggaaacgccgaggaacccggctgaggcggcagcttcctaggtgacagacaggtacactgtatgctagccctgtatctgtctgagcagtggaatgtgccaggaaagaaggagcaaccactgactgatgaacctttgccagtctcccttccaagagggatgccagagccttctgtaagctcctgagatgtcactggtatctaggcaacagggatgagcctgaacctccctgaggccagcttactgagcagagcatcctggccagaacaagccaaggagccaagacgagagggacacacggacaaacaacagacagaagacgtactggccgctggactccgctgcctcccccatctccccgccatctgcgcccggaggatgagcccagccttcagggccatggatgtggagccccgcgccaaaggcgtccttctggagccctttgtccaccaggtcggggggcactcatgcgtgctccgcttcaatgagacaaccctgtgcaagcccctggtcccaagggaacatcagttctacgagaccctccctgctgagatgcgcaaattcactccccagtacaaagtctcttgatcacagtaacccatagtcccccactggggggacggtgggggaagactttgggaggattttacccagaatacttgccgcctgctttttgtcctccaggaaaccagaagcccgggtaattagaggtaggccggggagcagcgttgagtcagatggaatgcaggagtgggaggcctgtgctgattagcccaagccctttgctgttacagaatgtccccaaaattgctatatgaaagcaacccttcgattcacatatgataattttttatttctttttataatgtattttataggggacatcagcagccaccagcatggtggggtctttgttggggagtgggggagtcttttgtaaatcaagtaagaatccattaaagaaattaattttaaatgtgcattacctggttacataaaggactctagaacaacttaggttcttttgggactgttgaaacattgtctttaaggacagaatgtactgggtgcctttctctgtactctgaatatgcatgtgtattgcggtggggatgggggagttgggggccctcacttggtccttctctgttgtttttttccaggacaaagccaaaggccccttgttagctggccatccctgccccattttttcccctggtcctttcccctgtggccacagggaagtgtggcctgaataccccaccccggctcctctgcacccagagctgggggccacctcagaagtgtcatctctctctgagcacgcattcccctgcagcagtcgaggactgagcagattgagtgatgctggggcagagaggcctgggaggaaaggtgttcagccagtcgtttgtaaggcgctcgtcggcacctgctgaaacgcccccacctgacagccccatcctcaaagactgtcttaattactcatggcaggttctagagacttaaggggaaaagctgctttcaaggccaccacatgtctgtgctccccaaccagctctatctgccttgtgttcattttgttattttgtgacgtgagactgcaaagaccaataaaaacatattttataagaacaaaaggcctgggtgcctacccgtgtgggggcactgtgggaagcctttgctagggtgtcttgtgctgtgtggtttgttttgtttgcccctttattttgctttgcttacccagtcttcccttactcttggatgcttcttaaccctcaggcaaacctgtgttccccctgtattcaggctctgctttaaagcaagccatgaggctgttggagtttctgtttagggcattaaaaattcccgcaaactataaagagcaatgttttcagtcttttaggattagaagaattacataaaaattaataaacattttcaatgatggaaaaatgtgtcttgtaattctttggctcttgcctcgttgagtacatcagagaggaagactctcagccatgtttgctccctaattgcttgtcttgtatggtgtcatcttttctagctgttttgatatttgttaagtttgcagatgagtttggggcctctggcaacatagagactaaggaactgggtaagaaaaaaacaaatgttacaatcatgttacttacaacgcttcttcctgctaaattaaaagttctttctgctcctcacccccttccaggtgtggtatctgtgcgctttgaagaagatgaagacaggaacttgtgtctaatagcatatccattgaaaggggaccatggaattgtggacattgtagataattcagactgtgaaccaaaaagtaagctcctaaggtggacaacaaacaaaaaacatcatgtcttagaaacagaaaagacccctaaggactgggtgcgtcagcaccgtaaagaggagaaaatgaagagccataagttagaagaagaatttgagtggctaaagaaatctgaagtcttgtactacactgtagagaagaaggggaatataagttcccagcttaaacactataacccttggagcatgaaatgtcaccagcaacagttacagagaatgaaggagaatgcaaagcatcggaaccagtacaaatttatcttactggaaaacctgacttcccgctatgaggtgccttgtgtccttgacctcaagatgggcacacgacaacatggtgatgatgcttcagaggagaaggcagccaaccagatccgaaaatgtcagcagagcacatctgcagtcattggtgtgcgtgtgtgtggcatgcaggtgtaccaagcaggcagtgggcagctcatgttcatgaacaagtaccatggacggaagctatcggtgcagggcttcaaggaggcacttttccagttcttccacaatgggcggtacctgcgccgtgaactcctgggccctgtgctcaagaagctgactgagctcaaggcagtgttggagcgacaggagtcctaccgcttctactcaagctccctgctggtcatttatgatggcaaggagcggcccgaagtggtcctggactcagatgctgaggatttggaggacctgtcagaggaatcagctgatgagtctgctggtgcctatgcctacaaacccatcggcgccagctctgtagatgtgcgcatgatcgactttgcacacaccacctgcaggctgtatggcgaggacaccgtggtgcatgagggccaggatgctggctatatcttcgggctccagagcctgatagacattgtcacagagataagtgaggagagtggggagtgagcttgctagctgctccagtacttgagagcgactctgtgtcccaggcacagctgtgctgcgtcagggaggaagccagtatggccaggtggtggctcctgcagcctggagctgatgtgcagtggcctctgtgagccccagcctgagccagtcccagctgtgcttggagtctttatttattttaactatttcttcaacattccacatttgatgatgatacctctttcttccctgagtgtatatgttctaatacaaatctttttgtttattgtaaaaaaaaaaagctcct

SEQ ID NO: 212574 - DNA, 3709 bp, Homo sapiens
agcggggggtgcagggggcggggctcggcctggccgcagccattttggtgcgagagaaacaataggacggaaacgccgaggaacccggctgaggcggcagcagagcatcctggccagaacaagccaaggagccaagacgagagggacacacggacaaacaacagacagaagacgtactggccgctggactccgctgcctcccccatctccccgccatctgcgcccggaggatgagcccagccttcagggccatggatgtggagccccgcgccaaaggcgtccttctggagccctttgtccaccaggtcggggggcactcatgcgtgctccgcttcaatgagacaaccctgtgcaagcccctggtcccaagggaacatcagttctacgagaccctccctgctgagatgcgcaaattcactccccagtacaaaggtaagtcccagctgctggaggggttgccacactggcgaggagatgtgagagatcgtggccatggaaggccctggcagccatccctggagccctcactccctcccactctgtgctttccctccctctcctccttctcctcctcctggccctcagcccagcatctcacaccctcagttttcaatccctggtaagattgctcaattctgttttgttgtgtggatttgagtttgattttggtagaagtgtagttgtgttttatgttcaggtgtctcttgatcacagtaacccatagtcccccactggggggacggtgggggaagactttgggaggattttacccagaatacttgccgcctgctttttgtcctccaggaaaccagaagcccgggtaattagaggtaggccggggagcagcgttgagtcagatggaatgcaggagtgggaggcctgtgctgattagcccaagccctttgctgttacagaatgtccccaaaattgctatatgaaagcaacccttcgattcacatatgataattttttatttctttttataatgtattttataggggacatcagcagccaccagcatggtggggtctttgttggggagtgggggagtcttttgtaaatcaagtaagaatccattaaagaaattaattttaaatgtgcattacctggttacataaaggactctagaacaacttaggttcttttgggactgttgaaacattgtctttaaggacagaatgtactgggtgcctttctctgtactctgaatatgcatgtgtattgcggtggggatgggggagttgggggccctcacttggtccttctctgttgtttttttccaggacaaagccaaaggccccttgttagctggccatccctgccccattttttcccctggtcctttcccctgtggccacagggaagtgtggcctgaataccccaccccggctcctctgcacccagagctgggggccacctcagaagtgtcatctctctctgagcacgcattcccctgcagcagtcgaggactgagcagattgagtgatgctggggcagagaggcctgggaggaaaggtgttcagccagtcgtttgtaaggcgctcgtcggcacctgctgaaacgcccccacctgacagccccatcctcaaagactgtcttaattactcatggcaggttctagagacttaaggggaaaagctgctttcaaggccaccacatgtctgtgctccccaaccagctctatctgccttgtgttcattttgttattttgtgacgtgagactgcaaagaccaataaaaacatattttataagaacaaaaggcctgggtgcctacccgtgtgggggcactgtgggaagcctttgctagggtgtcttgtgctgtgtggtttgttttgtttgcccctttattttgctttgcttacccagtcttcccttactcttggatgcttcttaaccctcaggcaaacctgtgttccccctgtattcaggctctgctttaaagcaagccatgaggctgttggagtttctgtttagggcattaaaaattcccgcaaactataaagagcaatgttttcagtcttttaggattagaagaattacataaaaattaataaacattttcaatgatggaaaaatgtgtcttgtaattctttggctcttgcctcgttgagtacatcagagaggaagactctcagccatgtttgctccctaattgcttgtcttgtatggtgtcatcttttctagctgttttgatatttgttaagtttgcagatgagtttggggcctctggcaacatagagactaaggaactgggtaagaaaaaaacaaatgttacaatcatgttacttacaacgcttcttcctgctaaattaaaagttctttctgctcctcacccccttccaggtgtggtatctgtgcgctttgaagaagatgaagacaggaacttgtgtctaatagcatatccattgaaaggggaccatggaattgtggacattgtagataattcagactgtgaaccaaaaagtaagctcctaaggtggacaacaaacaaaaaacatcatgtcttagaaacagaaaagacccctaaggactgggtgcgtcagcaccgtaaagaggagaaaatgaagagccataagttagaagaagaatttgagtggctaaagaaatctgaagtcttgtactacactgtagagaagaaggggaatataagttcccagcttaaacactataacccttggagcatgaaatgtcaccagcaacagttacagagaatgaaggagaatgcaaagcatcggaaccagtacaaatttatcttactggaaaacctgacttcccgctatgaggtgccttgtgtccttgacctcaagatgggcacacgacaacatggtgatgatgcttcagaggagaaggcagccaaccagatccgaaaatgtcagcagagcacatctgcagtcattggtgtgcgtgtgtgtggcatgcaggtgtaccaagcaggcagtgggcagctcatgttcatgaacaagtaccatggacggaagctatcggtgcagggcttcaaggaggcacttttccagttcttccacaatgggcggtacctgcgccgtgaactcctgggccctgtgctcaagaagctgactgagctcaaggcagtgttggagcgacaggagtcctaccgcttctactcaagctccctgctggtcatttatgatggcaaggagcggcccgaagtggtcctggactcagatgctgaggatttggaggacctgtcagaggaatcagctgatgagtctgctggtgcctatgcctacaaacccatcggcgccagctctgtagatgtgcgcatgatcgactttgcacacaccacctgcaggctgtatggcgaggacaccgtggtgcatgagggccaggatgctggctatatcttcgggctccagagcctgatagacattgtcacagagataagtgaggagagtggggagtgagcttgctagctgctccagtacttgagagcgactctgtgtcccaggcacagctgtgctgcgtcagggaggaagccagtatggccaggtggtggctcctgcagcctggagctgatgtgcagtggcctctgtgagccccagcctgagccagtcccagctgtgcttggagtctttatttattttaactatttcttcaacattccacatttgatgatgatacctctttcttccctgagtgtatatgttctaatacaatctgtgtggtgtgtgtgtgcggggtgtgggtggg

SEQ ID NO: 212575 - DNA, 3143 bp, Homo sapiens
agcggggggtgcagggggcggggctcggcctggccgcagccattttggtgcgagagaaacaataggacggaaacgccgaggaacccggctgaggcggcagcagagcatcctggccagaacaagccaaggagccaagacgagagggacacacggacaaacaacagacagaagacgtactggccgctggactccgctgcctcccccatctccccgccatctgcgcccggaggatgagcccagccttcagggccatggatgtggagccccgcgccaaaggcgtccttctggagccctttgtccaccaggtcggggggcactcatgcgtgctccgcttcaatgagacaaccctgtgcaagcccctggtcccaagggaacatcagttctacgagaccctccctgctgagatgcgcaaattcactccccagtacaaaggggacatcagcagccaccagcatggtggggtctttgttggggagtgggggagtcttttgtaaatcaagtaagaatccattaaagaaattaattttaaatgtgcattacctggttacataaaggactctagaacaacttaggttcttttgggactgttgaaacattgtctttaaggacagaatgtactgggtgcctttctctgtactctgaatatgcatgtgtattgcggtggggatgggggagttgggggccctcacttggtccttctctgttgtttttttccaggacaaagccaaaggccccttgttagctggccatccctgccccattttttcccctggtcctttcccctgtggccacagggaagtgtggcctgaataccccaccccggctcctctgcacccagagctgggggccacctcagaagtgtcatctctctctgagcacgcattcccctgcagcagtcgaggactgagcagattgagtgatgctggggcagagaggcctgggaggaaaggtgttcagccagtcgtttgtaaggcgctcgtcggcacctgctgaaacgcccccacctgacagccccatcctcaaagactgtcttaattactcatggcaggttctagagacttaaggggaaaagctgctttcaaggccaccacatgtctgtgctccccaaccagctctatctgccttgtgttcattttgttattttgtgacgtgagactgcaaagaccaataaaaacatattttataagaacaaaaggcctgggtgcctacccgtgtgggggcactgtgggaagcctttgctagggtgtcttgtgctgtgtggtttgttttgtttgcccctttattttgctttgcttacccagtcttcccttactcttggatgcttcttaaccctcaggcaaacctgtgttccccctgtattcaggctctgctttaaagcaagccatgaggctgttggagtttctgtttagggcattaaaaattcccgcaaactataaagagcaatgttttcagtcttttaggattagaagaattacataaaaattaataaacattttcaatgatggaaaaatgtgtcttgtaattctttggctcttgcctcgttgagtacatcagagaggaagactctcagccatgtttgctccctaattgcttgtcttgtatggtgtcatcttttctagctgttttgatatttgttaagtttgcagatgagtttggggcctctggcaacatagagactaaggaactgggtaagaaaaaaacaaatgttacaatcatgttacttacaacgcttcttcctgctaaattaaaagttctttctgctcctcacccccttccaggtgtggtatctgtgcgctttgaagaagatgaagacaggaacttgtgtctaatagcatatccattgaaaggggaccatggaattgtggacattgtagataattcagactgtgaaccaaaaagtaagctcctaaggtggacaacaaacaaaaaacatcatgtcttagaaacagaaaagacccctaaggactgggtgcgtcagcaccgtaaagaggagaaaatgaagagccataagttagaagaagaatttgagtggctaaagaaatctgaagtcttgtactacactgtagagaagaaggggaatataagttcccagcttaaacactataacccttggagcatgaaatgtcaccagcaacagttacagagaatgaaggagaatgcaaagcatcggaaccagtacaaatttatcttactggaaaacctgacttcccgctatgaggtgccttgtgtccttgacctcaagatgggcacacgacaacatggtgatgatgcttcagaggagaaggcagccaaccagatccgaaaatgtcagcagagcacatctgcagtcattggtgtgcgtgtgtgtggcatgcaggtgtaccaagcaggcagtgggcagctcatgttcatgaacaagtaccatggacggaagctatcggtgcagggcttcaaggaggcacttttccagttcttccacaatgggcggtacctgcgccgtgaactcctgggccctgtgctcaagaagctgactgagctcaaggcagtgttggagcgacaggagtcctaccgcttctactcaagctccctgctggtcatttatgatggcaaggagcggcccgaagtggtcctggactcagatgctgaggatttggaggacctgtcagaggaatcagctgatgagtctgctggtgcctatgcctacaaacccatcggcgccagctctgtagatgtgcgcatgatcgactttgcacacaccacctgcaggctgtatggcgaggacaccgtggtgcatgagggccaggatgctggctatatcttcgggctccagagcctgatagacattgtcacagagataagtgaggagagtggggagtgagcttgctagctgctccagtacttgagagcgactctgtgtcccaggcacagctgtgctgcgtcagggaggaagccagtatggccaggtggtggctcctgcagcctggagctgatgtgcagtggcctctgtgagccccagcctgagccagtcccagctgtgcttggagtctttatttattttaactatttcttcaacattccacatttgatgatgatacctctttcttccctgagtgtatatgttctaatacaaatctttttgtttattgtaaaaaaaaaaagctcct

SEQ ID NO: 212576 - DNA, 3271 bp, Homo sapiens
agcggggggtgcagggggcggggctcggcctggccgcagccattttggtgcgagagaaacaataggacggaaacgccgaggaacccggctgaggcggcagcagagcatcctggccagaacaagccaaggagccaagacgagagggacacacggacaaacaacagacagaagacgtactggccgctggactccgctgcctcccccatctccccgccatctgcgcccggaggatgagcccagccttcagggccatggatgtggagccccgcgccaaaggcgtccttctggagccctttgtccaccaggtcggggggcactcatgcgtgctccgcttcaatgagacaaccctgtgcaagcccctggtcccaagggaacatcagttctacgagaccctccctgctgagatgcgcaaattcactccccagtacaaagtctcttgatcacagtaacccatagtcccccactggggggacggtgggggaagactttgggaggattttacccagaatacttgccgcctgctttttgtcctccaggaaaccagaagcccgggtaattaggggacatcagcagccaccagcatggtggggtctttgttggggagtgggggagtcttttgtaaatcaagtaagaatccattaaagaaattaattttaaatgtgcattacctggttacataaaggactctagaacaacttaggttcttttgggactgttgaaacattgtctttaaggacagaatgtactgggtgcctttctctgtactctgaatatgcatgtgtattgcggtggggatgggggagttgggggccctcacttggtccttctctgttgtttttttccaggacaaagccaaaggccccttgttagctggccatccctgccccattttttcccctggtcctttcccctgtggccacagggaagtgtggcctgaataccccaccccggctcctctgcacccagagctgggggccacctcagaagtgtcatctctctctgagcacgcattcccctgcagcagtcgaggactgagcagattgagtgatgctggggcagagaggcctgggaggaaaggtgttcagccagtcgtttgtaaggcgctcgtcggcacctgctgaaacgcccccacctgacagccccatcctcaaagactgtcttaattactcatggcaggttctagagacttaaggggaaaagctgctttcaaggccaccacatgtctgtgctccccaaccagctctatctgccttgtgttcattttgttattttgtgacgtgagactgcaaagaccaataaaaacatattttataagaacaaaaggcctgggtgcctacccgtgtgggggcactgtgggaagcctttgctagggtgtcttgtgctgtgtggtttgttttgtttgcccctttattttgctttgcttacccagtcttcccttactcttggatgcttcttaaccctcaggcaaacctgtgttccccctgtattcaggctctgctttaaagcaagccatgaggctgttggagtttctgtttagggcattaaaaattcccgcaaactataaagagcaatgttttcagtcttttaggattagaagaattacataaaaattaataaacattttcaatgatggaaaaatgtgtcttgtaattctttggctcttgcctcgttgagtacatcagagaggaagactctcagccatgtttgctccctaattgcttgtcttgtatggtgtcatcttttctagctgttttgatatttgttaagtttgcagatgagtttggggcctctggcaacatagagactaaggaactgggtaagaaaaaaacaaatgttacaatcatgttacttacaacgcttcttcctgctaaattaaaagttctttctgctcctcacccccttccaggtgtggtatctgtgcgctttgaagaagatgaagacaggaacttgtgtctaatagcatatccattgaaaggggaccatggaattgtggacattgtagataattcagactgtgaaccaaaaagtaagctcctaaggtggacaacaaacaaaaaacatcatgtcttagaaacagaaaagacccctaaggactgggtgcgtcagcaccgtaaagaggagaaaatgaagagccataagttagaagaagaatttgagtggctaaagaaatctgaagtcttgtactacactgtagagaagaaggggaatataagttcccagcttaaacactataacccttggagcatgaaatgtcaccagcaacagttacagagaatgaaggagaatgcaaagcatcggaaccagtacaaatttatcttactggaaaacctgacttcccgctatgaggtgccttgtgtccttgacctcaagatgggcacacgacaacatggtgatgatgcttcagaggagaaggcagccaaccagatccgaaaatgtcagcagagcacatctgcagtcattggtgtgcgtgtgtgtggcatgcaggtgtaccaagcaggcagtgggcagctcatgttcatgaacaagtaccatggacggaagctatcggtgcagggcttcaaggaggcacttttccagttcttccacaatgggcggtacctgcgccgtgaactcctgggccctgtgctcaagaagctgactgagctcaaggcagtgttggagcgacaggagtcctaccgcttctactcaagctccctgctggtcatttatgatggcaaggagcggcccgaagtggtcctggactcagatgctgaggatttggaggacctgtcagaggaatcagctgatgagtctgctggtgcctatgcctacaaacccatcggcgccagctctgtagatgtgcgcatgatcgactttgcacacaccacctgcaggctgtatggcgaggacaccgtggtgcatgagggccaggatgctggctatatcttcgggctccagagcctgatagacattgtcacagagataagtgaggagagtggggagtgagcttgctagctgctccagtacttgagagcgactctgtgtcccaggcacagctgtgctgcgtcagggaggaagccagtatggccaggtggtggctcctgcagcctggagctgatgtgcagtggcctctgtgagccccagcctgagccagtcccagctgtgcttggagtctttatttattttaactatttcttcaacattccacatttgatgatgatacctctttcttccctgagtgtatatgttctaatacaaatctttttgtttattgtaaaaaaaaaaagctcct

SEQ ID NO: 212577 - DNA, 3125 bp, Homo sapiens
agcggggggtgcagggggcggggctcggcctggccgcagccattttggtgcgagagaaacaataggacggaaacgccgaggaacccggctgaggcggcagcttcctaggtgacagacaggtacactgtatgctagccctgtatctgtctgagcagtggaatgtgccaggaaagaaggagcaaccactgactgatgaacctttgccagtctcccttccaagagggatgccagagccttctcagagcatcctggccagaacaagccaaggagccaagacgagagggacacacggacaaacaacagacagaagacgtactggccgctggactccgctgcctcccccatctccccgccatctgcgcccggaggatgagcccagccttcagggccatggatgtggagccccgcgccaaaggcgtccttctggagccctttgtccaccaggtcggggggcactcatgcgtgctccgcttcaatgagacaaccctgtgcaagcccctggtcccaagggaacatcagttctacgagaccctccctgctgagatgcgcaaattcactccccagtacaaagtctcttgatcacagtaacccatagtcccccactggggggacggtgggggaagactttgggaggattttacccagaatacttgccgcctgctttttgtcctccaggaaaccagaagcccgggtaattaggacaaagccaaaggccccttgttagctggccatccctgccccattttttcccctggtcctttcccctgtggccacagggaagtgtggcctgaataccccaccccggctcctctgcacccagagctgggggccacctcagaagtgtcatctctctctgagcacgcattcccctgcagcagtcgaggactgagcagattgagtgatgctggggcagagaggcctgggaggaaaggtgttcagccagtcgtttgtaaggcgctcgtcggcacctgctgaaacgcccccacctgacagccccatcctcaaagactgtcttaattactcatggcaggttctagagacttaaggggaaaagctgctttcaaggccaccacatgtctgtgctccccaaccagctctatctgccttgtgttcattttgttattttgtgacgtgagactgcaaagaccaataaaaacatattttataagaacaaaaggcctgggtgcctacccgtgtgggggcactgtgggaagcctttgctagggtgtcttgtgctgtgtggtttgttttgtttgcccctttattttgctttgcttacccagtcttcccttactcttggatgcttcttaaccctcaggcaaacctgtgttccccctgtattcaggctctgctttaaagcaagccatgaggctgttggagtttctgtttagggcattaaaaattcccgcaaactataaagagcaatgttttcagtcttttaggattagaagaattacataaaaattaataaacattttcaatgatggaaaaatgtgtcttgtaattctttggctcttgcctcgttgagtacatcagagaggaagactctcagccatgtttgctccctaattgcttgtcttgtatggtgtcatcttttctagctgttttgatatttgttaagtttgcagatgagtttggggcctctggcaacatagagactaaggaactgggtaagaaaaaaacaaatgttacaatcatgttacttacaacgcttcttcctgctaaattaaaagttctttctgctcctcacccccttccaggtgtggtatctgtgcgctttgaagaagatgaagacaggaacttgtgtctaatagcatatccattgaaaggggaccatggaattgtggacattgtagataattcagactgtgaaccaaaaagtaagctcctaaggtggacaacaaacaaaaaacatcatgtcttagaaacagaaaagacccctaaggactgggtgcgtcagcaccgtaaagaggagaaaatgaagagccataagttagaagaagaatttgagtggctaaagaaatctgaagtcttgtactacactgtagagaagaaggggaatataagttcccagcttaaacactataacccttggagcatgaaatgtcaccagcaacagttacagagaatgaaggagaatgcaaagcatcggaaccagtacaaatttatcttactggaaaacctgacttcccgctatgaggtgccttgtgtccttgacctcaagatgggcacacgacaacatggtgatgatgcttcagaggagaaggcagccaaccagatccgaaaatgtcagcagagcacatctgcagtcattggtgtgcgtgtgtgtggcatgcaggtgtaccaagcaggcagtgggcagctcatgttcatgaacaagtaccatggacggaagctatcggtgcagggcttcaaggaggcacttttccagttcttccacaatgggcggtacctgcgccgtgaactcctgggccctgtgctcaagaagctgactgagctcaaggcagtgttggagcgacaggagtcctaccgcttctactcaagctccctgctggtcatttatgatggcaaggagcggcccgaagtggtcctggactcagatgctgaggatttggaggacctgtcagaggaatcagctgatgagtctgctggtgcctatgcctacaaacccatcggcgccagctctgtagatgtgcgcatgatcgactttgcacacaccacctgcaggctgtatggcgaggacaccgtggtgcatgagggccaggatgctggctatatcttcgggctccagagcctgatagacattgtcacagagataagtgaggagagtggggagtgagcttgctagctgctccagtacttgagagcgactctgtgtcccaggcacagctgtgctgcgtcagggaggaagccagtatggccaggtggtggctcctgcagcctggagctgatgtgcagtggcctctgtgagccccagcctgagccagtcccagctgtgcttggagtctttatttattttaactatttcttcaacattccacatttgatgatgatacctctttcttccctgagtgtatatgttctaatacaaatctttttgtttattgtaaaaaaaaaaagctcct

SEQ ID NO: 212578 - DNA, 2997 bp, Homo sapiens
agcggggggtgcagggggcggggctcggcctggccgcagccattttggtgcgagagaaacaataggacggaaacgccgaggaacccggctgaggcggcagcttcctaggtgacagacaggtacactgtatgctagccctgtatctgtctgagcagtggaatgtgccaggaaagaaggagcaaccactgactgatgaacctttgccagtctcccttccaagagggatgccagagccttctcagagcatcctggccagaacaagccaaggagccaagacgagagggacacacggacaaacaacagacagaagacgtactggccgctggactccgctgcctcccccatctccccgccatctgcgcccggaggatgagcccagccttcagggccatggatgtggagccccgcgccaaaggcgtccttctggagccctttgtccaccaggtcggggggcactcatgcgtgctccgcttcaatgagacaaccctgtgcaagcccctggtcccaagggaacatcagttctacgagaccctccctgctgagatgcgcaaattcactccccagtacaaaggacaaagccaaaggccccttgttagctggccatccctgccccattttttcccctggtcctttcccctgtggccacagggaagtgtggcctgaataccccaccccggctcctctgcacccagagctgggggccacctcagaagtgtcatctctctctgagcacgcattcccctgcagcagtcgaggactgagcagattgagtgatgctggggcagagaggcctgggaggaaaggtgttcagccagtcgtttgtaaggcgctcgtcggcacctgctgaaacgcccccacctgacagccccatcctcaaagactgtcttaattactcatggcaggttctagagacttaaggggaaaagctgctttcaaggccaccacatgtctgtgctccccaaccagctctatctgccttgtgttcattttgttattttgtgacgtgagactgcaaagaccaataaaaacatattttataagaacaaaaggcctgggtgcctacccgtgtgggggcactgtgggaagcctttgctagggtgtcttgtgctgtgtggtttgttttgtttgcccctttattttgctttgcttacccagtcttcccttactcttggatgcttcttaaccctcaggcaaacctgtgttccccctgtattcaggctctgctttaaagcaagccatgaggctgttggagtttctgtttagggcattaaaaattcccgcaaactataaagagcaatgttttcagtcttttaggattagaagaattacataaaaattaataaacattttcaatgatggaaaaatgtgtcttgtaattctttggctcttgcctcgttgagtacatcagagaggaagactctcagccatgtttgctccctaattgcttgtcttgtatggtgtcatcttttctagctgttttgatatttgttaagtttgcagatgagtttggggcctctggcaacatagagactaaggaactgggtaagaaaaaaacaaatgttacaatcatgttacttacaacgcttcttcctgctaaattaaaagttctttctgctcctcacccccttccaggtgtggtatctgtgcgctttgaagaagatgaagacaggaacttgtgtctaatagcatatccattgaaaggggaccatggaattgtggacattgtagataattcagactgtgaaccaaaaagtaagctcctaaggtggacaacaaacaaaaaacatcatgtcttagaaacagaaaagacccctaaggactgggtgcgtcagcaccgtaaagaggagaaaatgaagagccataagttagaagaagaatttgagtggctaaagaaatctgaagtcttgtactacactgtagagaagaaggggaatataagttcccagcttaaacactataacccttggagcatgaaatgtcaccagcaacagttacagagaatgaaggagaatgcaaagcatcggaaccagtacaaatttatcttactggaaaacctgacttcccgctatgaggtgccttgtgtccttgacctcaagatgggcacacgacaacatggtgatgatgcttcagaggagaaggcagccaaccagatccgaaaatgtcagcagagcacatctgcagtcattggtgtgcgtgtgtgtggcatgcaggtgtaccaagcaggcagtgggcagctcatgttcatgaacaagtaccatggacggaagctatcggtgcagggcttcaaggaggcacttttccagttcttccacaatgggcggtacctgcgccgtgaactcctgggccctgtgctcaagaagctgactgagctcaaggcagtgttggagcgacaggagtcctaccgcttctactcaagctccctgctggtcatttatgatggcaaggagcggcccgaagtggtcctggactcagatgctgaggatttggaggacctgtcagaggaatcagctgatgagtctgctggtgcctatgcctacaaacccatcggcgccagctctgtagatgtgcgcatgatcgactttgcacacaccacctgcaggctgtatggcgaggacaccgtggtgcatgagggccaggatgctggctatatcttcgggctccagagcctgatagacattgtcacagagataagtgaggagagtggggagtgagcttgctagctgctccagtacttgagagcgactctgtgtcccaggcacagctgtgctgcgtcagggaggaagccagtatggccaggtggtggctcctgcagcctggagctgatgtgcagtggcctctgtgagccccagcctgagccagtcccagctgtgcttggagtctttatttattttaactatttcttcaacattccacatttgatgatgatacctctttcttccctgagtgtatatgttctaatacaaatctttttgtttattgtaaaaaaaaaaagctcct

SEQ ID NO: 212579 - DNA, 3088 bp, Homo sapiens
  misc_feature (11)..(11): n is a, c, g, or t
  misc_feature (15)..(15): n is a, c, g, or t
gcctcggcggngaancggaaacgccgaggaacccggctgaggcggcagagcatcctggccagaacaagccaaggagccaagacgagagggacacacggacaaacaacagacagaagacgtactggccgctggactccgctgcctcccccatctccccgccatctgcgcccggaggatgagcccagccttcagggccatggatgtggagccccgcgccaaaggcgtccttctggagccctttgtccaccaggtcggggggcactcatgcgtgctccgcttcaatgagacaaccctgtgcaagcccctggtcccaagggaacatcagttctacgagaccctccctgctgagatgcgcaaattcactccccagtacaaaggggacatcagcagccaccagcatggtggggtctttgttggggagtgggggagtcttttgtaaatcaagtaagaatccattaaagaaattaattttaaatgtgcattacctggttacataaaggactctagaacaacttaggttcttttgggactgttgaaacattgtctttaaggacagaatgtactgggtgcctttctctgtactctgaatatgcatgtgtattgcggtggggatgggggagttgggggccctcacttggtccttctctgttgtttttttccaggacaaagccaaaggccccttgttagctggccatccctgccccattttttcccctggtcctttcccctgtggccacagggaagtgtggcctgaataccccaccccggctcctctgcacccagagctgggggccacctcagaagtgtcatctctctctgagcacgcattcccctgcagcagtcgaggactgagcagattgagtgatgctggggcagagaggcctgggaggaaaggtgttcagccagtcgtttgtaaggcgctcgtcggcacctgctgaaacgcccccacctgacagccccatcctcaaagactgtcttaattactcatggcaggttctagagacttaaggggaaaagctgctttcaaggccaccacatgtctgtgctccccaaccagctctatctgccttgtgttcattttgttattttgtgacgtgagactgcaaagaccaataaaaacatattttataagaacaaaaggcctgggtgcctacccgtgtgggggcactgtgggaagcctttgctagggtgtcttgtgctgtgtggtttgttttgtttgcccctttattttgctttgcttacccagtcttcccttactcttggatgcttcttaaccctcaggcaaacctgtgttccccctgtattcaggctctgctttaaagcaagccatgaggctgttggagtttctgtttagggcattaaaaattcccgcaaactataaagagcaatgttttcagtcttttaggattagaagaattacataaaaattaataaacattttcaatgatggaaaaatgtgtcttgtaattctttggctcttgcctcgttgagtacatcagagaggaagactctcagccatgtttgctccctaattgcttgtcttgtatggtgtcatcttttctagctgttttgatatttgttaagtttgcagatgagtttggggcctctggcaacatagagactaaggaactgggtaagaaaaaaacaaatgttacaatcatgttacttacaacgcttcttcctgctaaattaaaagttctttctgctcctcacccccttccaggtgtggtatctgtgcgctttgaagaagatgaagacaggaacttgtgtctaatagcatatccattgaaaggggaccatggaattgtggacattgtagataattcagactgtgaaccaaaaagtaagctcctaaggtggacaacaaacaaaaaacatcatgtcttagaaacagaaaagacccctaaggactgggtgcgtcagcaccgtaaagaggagaaaatgaagagccataagttagaagaagaatttgagtggctaaagaaatctgaagtcttgtactacactgtagagaagaaggggaatataagttcccagcttaaacactataacccttggagcatgaaatgtcaccagcaacagttacagagaatgaaggagaatgcaaagcatcggaaccagtacaaatttatcttactggaaaacctgacttcccgctatgaggtgccttgtgtccttgacctcaagatgggcacacgacaacatggtgatgatgcttcagaggagaaggcagccaaccagatccgaaaatgtcagcagagcacatctgcagtcattggtgtgcgtgtgtgtggcatgcaggtgtaccaagcaggcagtgggcagctcatgttcatgaacaagtaccatggacggaagctatcggtgcagggcttcaaggaggcacttttccagttcttccacaatgggcggtacctgcgccgtgaactcctgggccctgtgctcaagaagctgactgagctcaaggcagtgttggagcgacaggagtcctaccgcttctactcaagctccctgctggtcatttatgatggcaaggagcggcccgaagtggtcctggactcagatgctgaggatttggaggacctgtcagaggaatcagctgatgagtctgctggtgcctatgcctacaaacccatcggcgccagctctgtagatgtgcgcatgatcgactttgcacacaccacctgcaggctgtatggcgaggacaccgtggtgcatgagggccaggatgctggctatatcttcgggctccagagcctgatagacattgtcacagagataagtgaggagagtggggagtgagcttgctagctgctccagtacttgagagcgactctgtgtcccaggcacagctgtgctgcgtcagggaggaagccagtatggccaggtggtggctcctgcagcctggagctgatgtgcagtggcctctgtgagccccagcctgagccagtcccagctgtgcttggagtctttatttattttaactatttcttcaacattccacatttgatgatgatacctctttcttccctgagtgtatatgttctaatacaaatctttttgtttattgtaaaaaaaaaaagctcct

SEQ ID NO: 212580 - DNA, 3053 bp, Homo sapiens
agcggggggtgcagggggcggggctcggcctggccgcagccattttggtgcgagagaaacaataggacggaaacgccgaggaacccggctgaggcggcagcagagcatcctggccagaacaagccaaggagccaagacgagagggacacacggacaaacaacagacagaagacgtactggccgctggactccgctgcctcccccatctccccgccatctgcgcccggaggatgagcccagccttcagggccatggatgtggagccccgcgccaaaggcgtccttctggagccctttgtccaccaggtcggggggcactcatgcgtgctccgcttcaatgagacaaccctgtgcaagcccctggtcccaagggaacatcagttctacgagaccctccctgctgagatgcgcaaattcactccccagtacaaagtctcttgatcacagtaacccatagtcccccactggggggacggtgggggaagactttgggaggattttacccagaatacttgccgcctgctttttgtcctccaggaaaccagaagcccgggtaattaggggacatcagcagccaccagcatggtggggtctttgttggggagtgggggagtcttttgtaaatcaagacaaagccaaaggccccttgttagctggccatccctgccccattttttcccctggtcctttcccctgtggccacagggaagtgtggcctgaataccccaccccggctcctctgcacccagagctgggggccacctcagaagtgtcatctctctctgagcacgcattcccctgcagcagtcgaggactgagcagattgagtgatgctggggcagagaggcctgggaggaaaggtgttcagccagtcgtttgtaaggcgctcgtcggcacctgctgaaacgcccccacctgacagccccatcctcaaagactgtcttaattactcatggcaggttctagagacttaaggggaaaagctgctttcaaggccaccacatgtctgtgctccccaaccagctctatctgccttgtgttcattttgttattttgtgacgtgagactgcaaagaccaataaaaacatattttataagaacaaaaggcctgggtgcctacccgtgtgggggcactgtgggaagcctttgctagggtgtcttgtgctgtgtggtttgttttgtttgcccctttattttgctttgcttacccagtcttcccttactcttggatgcttcttaaccctcaggcaaacctgtgttccccctgtattcaggctctgctttaaagcaagccatgaggctgttggagtttctgtttagggcattaaaaattcccgcaaactataaagagcaatgttttcagtcttttaggattagaagaattacataaaaattaataaacattttcaatgatggaaaaatgtgtcttgtaattctttggctcttgcctcgttgagtacatcagagaggaagactctcagccatgtttgctccctaattgcttgtcttgtatggtgtcatcttttctagctgttttgatatttgttaagtttgcagatgagtttggggcctctggcaacatagagactaaggaactgggtaagaaaaaaacaaatgttacaatcatgttacttacaacgcttcttcctgctaaattaaaagttctttctgctcctcacccccttccaggtgtggtatctgtgcgctttgaagaagatgaagacaggaacttgtgtctaatagcatatccattgaaaggggaccatggaattgtggacattgtagataattcagactgtgaaccaaaaagtaagctcctaaggtggacaacaaacaaaaaacatcatgtcttagaaacagaaaagacccctaaggactgggtgcgtcagcaccgtaaagaggagaaaatgaagagccataagttagaagaagaatttgagtggctaaagaaatctgaagtcttgtactacactgtagagaagaaggggaatataagttcccagcttaaacactataacccttggagcatgaaatgtcaccagcaacagttacagagaatgaaggagaatgcaaagcatcggaaccagtacaaatttatcttactggaaaacctgacttcccgctatgaggtgccttgtgtccttgacctcaagatgggcacacgacaacatggtgatgatgcttcagaggagaaggcagccaaccagatccgaaaatgtcagcagagcacatctgcagtcattggtgtgcgtgtgtgtggcatgcaggtgtaccaagcaggcagtgggcagctcatgttcatgaacaagtaccatggacggaagctatcggtgcagggcttcaaggaggcacttttccagttcttccacaatgggcggtacctgcgccgtgaactcctgggccctgtgctcaagaagctgactgagctcaaggcagtgttggagcgacaggagtcctaccgcttctactcaagctccctgctggtcatttatgatggcaaggagcggcccgaagtggtcctggactcagatgctgaggatttggaggacctgtcagaggaatcagctgatgagtctgctggtgcctatgcctacaaacccatcggcgccagctctgtagatgtgcgcatgatcgactttgcacacaccacctgcaggctgtatggcgaggacaccgtggtgcatgagggccaggatgctggctatatcttcgggctccagagcctgatagacattgtcacagagataagtgaggagagtggggagtgagcttgctagctgctccagtacttgagagcgactctgtgtcccaggcacagctgtgctgcgtcagggaggaagccagtatggccaggtggtggctcctgcagcctggagctgatgtgcagtggcctctgtgagccccagcctgagccagtcccagctgtgcttggagtctttatttattttaactatttcttcaacattccacatttgatgatgatacctctttcttccctgagtgtatatgttctaatacaaatctttttgtttattgtaaaaaaaaaaagctcct

SEQ ID NO: 212581 - DNA, 2824 bp, Homo sapiens
atccttaattaaattaattttccccccccccccgggaaacgccgaggaacccggctgaggcggcagcagagcatcctggccagaacaagccaaggagccaagacgagagggacacacggacaaacaacagacagaagacgtactggccgctggactccgctgcctcccccatctccccgccatctgcgcccggaggatgagcccagccttcagggccatggatgtggagccccgcgccaaaggcgtccttctggagccctttgtccaccaggtcggggggcactcatgcgtgctccgcttcaatgagacaaccctgtgcaagcccctggtcccaagggaacatcagttctacgagaccctccctgctgagatgcgcaaattcactccccagtacaaaggacaaagccaaaggccccttgttagctggccatccctgccccattttttcccctggtcctttcccctgtggccacagggaagtgtggcctgaataccccaccccggctcctctgcacccagagctgggggccacctcagaagtgtcatctctctctgagcacgcattcccctgcagcagtcgaggactgagcagattgagtgatgctggggcagagaggcctgggaggaaaggtgttcagccagtcgtttgtaaggcgctcgtcggcacctgctgaaacgcccccacctgacagccccatcctcaaagactgtcttaattactcatggcaggttctagagacttaaggggaaaagctgctttcaaggccaccacatgtctgtgctccccaaccagctctatctgccttgtgttcattttgttattttgtgacgtgagactgcaaagaccaataaaaacatattttataagaacaaaaggcctgggtgcctacccgtgtgggggcactgtgggaagcctttgctagggtgtcttgtgctgtgtggtttgttttgtttgcccctttattttgctttgcttacccagtcttcccttactcttggatgcttcttaaccctcaggcaaacctgtgttccccctgtattcaggctctgctttaaagcaagccatgaggctgttggagtttctgtttagggcattaaaaattcccgcaaactataaagagcaatgttttcagtcttttaggattagaagaattacataaaaattaataaacattttcaatgatggaaaaatgtgtcttgtaattctttggctcttgcctcgttgagtacatcagagaggaagactctcagccatgtttgctccctaattgcttgtcttgtatggtgtcatcttttctagctgttttgatatttgttaagtttgcagatgagtttggggcctctggcaacatagagactaaggaactgggtaagaaaaaaacaaatgttacaatcatgttacttacaacgcttcttcctgctaaattaaaagttctttctgctcctcacccccttccaggtgtggtatctgtgcgctttgaagaagatgaagacaggaacttgtgtctaatagcatatccattgaaaggggaccatggaattgtggacattgtagataattcagactgtgaaccaaaaagtaagctcctaaggtggacaacaaacaaaaaacatcatgtcttagaaacagaaaagacccctaaggactgggtgcgtcagcaccgtaaagaggagaaaatgaagagccataagttagaagaagaatttgagtggctaaagaaatctgaagtcttgtactacactgtagagaagaaggggaatataagttcccagcttaaacactataacccttggagcatgaaatgtcaccagcaacagttacagagaatgaaggagaatgcaaagcatcggaaccagtacaaatttatcttactggaaaacctgacttcccgctatgaggtgccttgtgtccttgacctcaagatgggcacacgacaacatggtgatgatgcttcagaggagaaggcagccaaccagatccgaaaatgtcagcagagcacatctgcagtcattggtgtgcgtgtgtgtggcatgcaggtgtaccaagcaggcagtgggcagctcatgttcatgaacaagtaccatggacggaagctatcggtgcagggcttcaaggaggcacttttccagttcttccacaatgggcggtacctgcgccgtgaactcctgggccctgtgctcaagaagctgactgagctcaaggcagtgttggagcgacaggagtcctaccgcttctactcaagctccctgctggtcatttatgatggcaaggagcggcccgaagtggtcctggactcagatgctgaggatttggaggacctgtcagaggaatcagctgatgagtctgctggtgcctatgcctacaaacccatcggcgccagctctgtagatgtgcgcatgatcgactttgcacacaccacctgcaggctgtatggcgaggacaccgtggtgcatgagggccaggatgctggctatatcttcgggctccagagcctgatagacattgtcacagagataagtgaggagagtggggagtgagcttgctagctgctccagtacttgagagcgactctgtgtcccaggcacagctgtgctgcgtcagggaggaagccagtatggccaggtggtggctcctgcagcctggagctgatgtgcagtggcctctgtgagccccagcctgagccagtcccagctgtgcttggagtctttatttattttaactatttcttcaacattccacatttgatgatgatacctctttcttccctgagtgtatatgttctaatacaaatctttttgtttattgtaaaaaaaaaaagctcct

SEQ ID NO: 212582 - DNA, 3073 bp, Homo sapiens
atggacgtgaaacgccgagtgaacctcggcttgatggcggcagcagacggcagagcatcctggccagaacaagccaaggagccaagacgagagggacacacggacaaacaacagacagaagacgtactggccgctggactccgctgcctcccccatctccccgccatctgcgcccggaggatgagcccagccttcagggccatggatgtggagccccgcgccaaaggcgtccttctggagccctttgtccaccaggtcggggggcactcatgcgtgctccgcttcaatgagacaaccctgtgcaagcccctggtcccaatggggaaacatttcaggttctaactgatgaaccacttacccattgccttgaggaattgccgcaagatttcagcttccccccaagataacaaaggggtgttctccttagattccacaaggtaagccacaagtaagttcccccccacgtgtggcgtgtgcacgtgtgtgtgtggcacacgaaccttttgggcgaagggattttacccagaatacttgccgcctgctttttgtcctccaggaaaccagaagcccgggtaattaggggacatcagcagccaccagcatggtggggtctttgttggggagtgggggagtcttttgtaaatcaagacaaagccaaaggccccttgttagctggccatccctgccccattttttcccctggtcctttcccctgtggccacagggaagtgtggcctgaataccccaccccggctcctctgcacccagagctgggggccacctcagaagtgtcatctctctctgagcacgcattcccctgcagcagtcgaggactgagcagattgagtgatgctggggcagagaggcctgggaggaaaggtgttcagccagtcgtttgtaaggcgctcgtcggcacctgctgaaacgcccccacctgacagccccatcctcaaagactgtcttaattactcatggcaggttctagagacttaaggggaaaagctgctttcaaggccaccacatgtctgtgctccccaaccagctctatctgccttgtgttcattttgttattttgtgacgtgagactgcaaagaccaataaaaacatattttataagaacaaaaggcctgggtgcctacccgtgtgggggcactgtgggaagcctttgctagggtgtcttgtgctgtgtggtttgttttgtttgcccctttattttgctttgcttacccagtcttcccttactcttggatgcttcttaaccctcaggcaaacctgtgttccccctgtattcaggctctgctttaaagcaagccatgaggctgttggagtttctgtttagggcattaaaaattcccgcaaactataaagagcaatgttttcagtcttttaggattagaagaattacataaaaattaataaacattttcaatgatggaaaaatgtgtcttgtaattctttggctcttgcctcgttgagtacatcagagaggaagactctcagccatgtttgctccctaattgcttgtcttgtatggtgtcatcttttctagctgttttgatatttgttaagtttgcagatgagtttggggcctctggcaacatagagactaaggaactgggtaagaaaaaaacaaatgttacaatcatgttacttacaacgcttcttcctgctaaattaaaagttctttctgctcctcacccccttccaggtgtggtatctgtgcgctttgaagaagatgaagacaggaacttgtgtctaatagcatatccattgaaaggggaccatggaattgtggacattgtagataattcagactgtgaaccaaaaagtaagctcctaaggtggacaacaaacaaaaaacatcatgtcttagaaacagaaaagacccctaaggactgggtgcgtcagcaccgtaaagaggagaaaatgaagagccataagttagaagaagaatttgagtggctaaagaaatctgaagtcttgtactacactgtagagaagaaggggaatataagttcccagcttaaacactataacccttggagcatgaaatgtcaccagcaacagttacagagaatgaaggagaatgcaaagcatcggaaccagtacaaatttatcttactggaaaacctgacttcccgctatgaggtgccttgtgtccttgacctcaagatgggcacacgacaacatggtgatgatgcttcagaggagaaggcagccaaccagatccgaaaatgtcagcagagcacatctgcagtcattggtgtgcgtgtgtgtggcatgcaggtgtaccaagcaggcagtgggcagctcatgttcatgaacaagtaccatggacggaagctatcggtgcagggcttcaaggaggcacttttccagttcttccacaatgggcggtacctgcgccgtgaactcctgggccctgtgctcaagaagctgactgagctcaaggcagtgttggagcgacaggagtcctaccgcttctactcaagctccctgctggtcatttatgatggcaaggagcggcccgaagtggtcctggactcagatgctgaggatttggaggacctgtcagaggaatcagctgatgagtctgctggtgcctatgcctacaaacccatcggcgccagctctgtagatgtgcgcatgatcgactttgcacacaccacctgcaggctgtatggcgaggacaccgtggtgcatgagggccaggatgctggctatatcttcgggctccagagcctgatagacattgtcacagagataagtgaggagagtggggagtgagcttgctagctgctccagtacttgagagcgactctgtgtcccaggcacagctgtgctgcgtcagggaggaagccagtatggccaggtggtggctcctgcagcctggagctgatgtgcagtggcctctgtgagccccagcctgagccagtcccagctgtgcttggagtctttatttattttaactatttcttcaacattccacatttgatgatgatacctctttcttccctgagtgtatatgttctaatacaaatctttttgtttattgtaaaaaaaaaaagctcct

SEQ ID NO: 212583 - DNA, 3583 bp, Homo sapiens
agcggggggtgcagggggcggggctcggcctggccgcagccattttggtgcgagagaaacaataggacggaaacgccgaggaacccggctgaggcggcagcagagcatcctggccagaacaagccaaggagccaagacgagagggacacacggacaaacaacagacagaagacgtactggccgctggactccgctgcctcccccatctccccgccatctgcgcccggaggatgagcccagccttcagggccatggatgtggagccccgcgccaaaggcgtccttctggagccctttgtccaccaggtcggggggcactcatgcgtgctccgcttcaatgagacaaccctgtgcaagcccctggtcccaagggaacatcagttctacgagaccctccctgctgagatgcgcaaattcactccccagtacaaaggtaagtcccagctgctggaggggttgccacactggcgaggagatgtgagagatcgtggccatggaaggccctggcagccatccctggagccctcactccctcccactctgtgctttccctccctctcctccttctcctcctcctggccctcagcccagcatctcacaccctcagttttcaatccctggtaagattgctcaattctgttttgttgtgtggatttgagtttgattttggtagaagtgtagttgtgttttatgttcaggtgtctcttgatcacagtaacccatagtcccccactggggggacggtgggggaagactttgggaggattttacccagaatacttgccgcctgctttttgtcctccaggaaaccagaagcccgggtaattagaggtaggccggggagcagcgttgagtcagatggaatgcaggagtgggaggcctgtgctgattagcccaagccctttgctgttacagaatgtccccaaaattgctatatgaaagcaacccttcgattcacatatgataattttttatttctttttataatgtattttataggggacatcagcagccaccagcatggtggggtctttgttggggagtgggggagtcttttgtaaatcaagtaagaatccattaaagaaattaattttaaatgtgcattacctggttacataaaggactctagaacaacttaggttcttttgggactgttgaaacattgtctttaaggacagaatgtactgggtgcctttctctgtactctgaatatgcatgtgtattgcggtggggatgggggagttgggggccctcacttggtccttctctgttgtttttttccaggacaaagccaaaggccccttgttagctggccatccctgccccattttttcccctggtcctttcccctgtggccacagggaagtgtggcctgaataccccaccccggctcctctgcacccagagctgggggccacctcagaagtgtcatctctctctgagcacgcattcccctgcagcagtcgaggactgagcagattgagtgatgctggggcagagaggcctgggaggaaaggtgttcagccagtcgtttgtaaggcgctcgtcggcacctgctgaaacgcccccacctgacagccccatcctcaaagactgtcttaattactcatggcaggttctagagacttaaggggaaaagctgctttcaaggccaccacatgtctgtgctccccaaccagctctatctgccttgtgttcattttgttattttgtgacgtgagactgcaaagaccaataaaaacatattttataagaacaaaaggcctgggtgcctacccgtgtgggggcactgtgggaagcctttgctagggtgtcttgtgctgtgtggtttgttttgtttgcccctttattttgctttgcttacccagtcttcccttactcttggatgcttcttaaccctcaggcaaacctgtgttccccctgtattcaggctctgctttaaagcaagccatgaggctgttggagtttctgtttagggcattaaaaattcccgcaaactataaagagcaatgttttcagtcttttaggattagaagaattacataaaaattaataaacattttcaatgatggaaaaatgtgtcttgtaattctttggctcttgcctcgttgagtacatcagagaggaagactctcagccatgtttgctccctaattgcttgtcttgtatggtgtcatcttttctagctgttttgatatttgttaagtttgcagatgagtttggggcctctggcaacatagagactaaggaactgggtaagaaaaaaacaaatgttacaatcatgttacttacaacgcttcttcctgctaaattaaaagttctttctgctcctcacccccttccaggtgtggtatctgtgcgctttgaagaagatgaagacaggaacttgtgtctaatagcatatccattgaaaggggaccatggaattgtggacattgtagataattcagactgtgaaccaaaaagtaagctcctaaggtggacaacaaacaaaaaacatcatgtcttagaaacagaaaagacccctaaggactgggtgcgtcagcaccgtaaagaggagaaaatgaagagccataagttagaagaagaatttgagtggctaaagaaatctgaagtcttgtactacactgtagagaagaaggggaatataagttcccagcttaaacactataacccttggagcatgaaatgtcaccagcaacagttacagagaatgaaggagaatgcaaagcatcggaaccagtacaaatttatcttactggaaaacctgacttcccgctatgaggtgccttgtgtccttgacctcaagatgggcacacgacaacatggtgatgatgcttcagaggagaaggcagccaaccagatccgaaaatgtcagcagagcacatctgcagtcattggtgtgcgtgtgtgtggcatgcaggtgtaccaagcaggcagtgggcagctcatgttcatgaacaagtaccatggacggaagctatcggtgcagggcttcaaggaggcacttttccagttcttccacaatgggcggtacctgcgccgtgaactcctgggccctgtgctcaagaagctgactgagctcaaggcagtgttggagcgacaggagtcctaccgcttctactcaagctccctgctggtcatttatgatggcaaggagcggcccgaagtggtcctggactcagatgctgaggatttggaggacctgtcagaggaatcagctgatgagtctgctggtgcctatgcctacaaacccatcggcgccagctctgtagatgtgcgcatgatcgactttgcacacaccacctgcaggctgtatggcgaggacaccgtggtgcatgagggccaggatgctggctatatcttcgggctccagagcctgatagacattgtcacagagataagtgaggagagtggggagtgagcttgctagctgctccagtacttgagagcgactctgtgtcccaggcacagctgggactggctcaggctggggctcacagaggccactgcacatcagctccaggctgcaggagccaccacctggccatactggcttcctccctgacgcagcacaggtcgac

SEQ ID NO: 212584 - DNA, 3086 bp, Homo sapiens
agcggggggtgcagggggcggggctcggcctggccgcagccattttggtgcgagagaaacaataggacggaaacgccgaggaacccggctgaggcggcagcagagcatcctggccagaacaagccaaggagccaagacgagagggacacacggacaaacaacagacagaagacgtactggccgctggactccgctgcctcccccatctccccgccatctgcgcccggaggatgagcccagccttcagggccatggatgtggagccccgcgccaaaggcgtccttctggagccctttgtccaccaggtcggggggcactcatgcgtgctccgcttcaatgagacaaccctgtgcaagcccctggtcccaagggaacatcagttctacgagaccctccctgctgagatgcgcaaattcactccccagtacaaaggtaagtcccagctgctggaggggttgccacactggcgaggagatgtgagagatcgtggccatggaaggccctggcagccatccctggagccctcactccctcccactctgtgctttccctccctctcctccttctcctcctcctggccctcagcccagcatctcacaccctcagttttcaatccctggtaagattgctcaattctgttttgttgtgtggatttgagtttgattttggtagaagtgtagttgtgttttatgttcaggtgtctcttgatcacagtaacccatagtcccccactggggggacggtgggggaagactttgggaggattttacccagaatacttgccgcctgctttttgtcctccaggaaaccagaagcccgggtaattagaggtaggccggggagcagcgttgagtcagatggaatgcaggagtgggaggcctgtgctgattagcccaagccctttgctgttacagaatgtccccaaaattgctatatgaaagcaacccttcgattcacatatgataattttttatttctttttataatgtattttataggggacatcagcagccaccagcatggtggggtctttgttggggagtgggggagtcttttgtaaatcaagtaagaatccattaaagaaattaattttaaatgtgcattacctggttacataaaggactctagaacaacttaggttcttttgggactgttgaaacattgtctttaaggacagaatgtactgggtgcctttctctgtactctgaatatgcatgtgtattgcggtggggatgggggagttgggggccctcacttggtccttctctgttgtttttttccaggacaaagccaaaggccccttgttagctggccatccctgccccattttttcccctggtcctttcccctgtggccacagggaagtgtggcctgaataccccaccccggctcctctgcacccagagctgggggccacctcagaagtgtcatctctctctgagcacgcattcccctgcagcagtcgaggactgagcagattgagtgatgctggggcagagaggcctgggaggaaaggtgttcagccagtcgtttgtaaggcgctcgtcggcacctgctgaaacgcccccacctgacagccccatcctcaaagactgtcttaattactcatggcaggttctagagacttaaggggaaaagctgctttcaaggccaccacatgtctgtgctccccaaccagctctatctgccttgtgttcattttgttattttgtgacgtgagactgcaaagaccaataaaaacatattttataagaacaaaaggcctgggtgcctacccgtgtgggggcactgtgggaagcctttgctagggtgtcttgtgctgtgtggtttgttttgtttgcccctttattttgctttgcttacccagtcttcccttactcttggatgcttcttaaccctcaggcaaacctgtgttccccctgtattcaggctctgctttaaagcaagccatgaggctgttggagtttctgtttagggcattaaaaattcccgcaaactataaagagcaatgttttcagtcttttaggattagaagaattacataaaaattaataaacattttcaatgatggaaaaatgtgtcttgtaattctttggctcttgcctcgttgagtacatcagagaggaagactctcagccatgtttgctccctaattgcttgtcttgtatggtgtcatcttttctagctgttttgatatttgttaagtttgcagatgagtttggggcctctggcaacatagagactaaggaactgggtaagaaaaaaacaaatgttacaatcatgttacttacaacgcttcttcctgctaaattaaaagttctttctgctcctcacccccttccaggtgtggtatctgtgcgctttgaagaagatgaagacaggaacttgtgtctaatagcatatccattgaaaggggaccatggaattgtggacattgtagataattcagactgtgaaccaaaaagtaagctcctaaggtggacaacaaacaaaaaacatcatgtcttagaaacagaaaagacccctaaggactgggtgcgtcagcaccgtaaagaggagaaaatgaagagccataagttagaagaagaatttgagtggctaaagaaatctgaagtcttgtactacactgtagagaagaaggggaatataagttcccagcttaaacactataacccttggagcatgaaatgtcaccagcaacagttacagagaatgaaggagaatgcaaagcatcggaaccagtacaaatttatcttactggaaaacctgacttcccgctatgaggtgccttgtgtccttgacctcaagatgggcacacgacaacatggtgatgatgcttcagaggagaaggcagccaaccagatccgaaaatgtcagcagagcacatctgcagtcattggtgtgcgtgtgtgtggcatgcaggtgtaccaagcaggcagtgggcagctcatgttcatgaacaagtaccatggacggaagctatcggtgcagggcttcaaggaggcacttttccagttcttccacaatgggcggtacctgcgccgtgaactcctgggccctgggaccctaccccttcccaacaccac

SEQ ID NO: 212585 - DNA, 3125 bp, Homo sapiens
agcggggggtgcagggggcggggctcggcctggccgcagccattttggtgcgagagaaacaataggacggaaacgccgaggaacccggctgaggcggcagcagagcatcctggccagaacaagccaaggagccaagacgagagggacacacggacaaacaacagacagaagacgtactggccgctggactccgctgcctcccccatctccccgccatctgcgcccggaggatgagcccagccttcagggccatggatgtggagccccgcgccaaaggcgtccttctggagccctttgtccaccaggtcggggggcactcatgcgtgctccgcttcaatgagacaaccctgtgcaagcccctggtcccaagggaacatcagttctacgagaccctccctgctgagatgcgcaaattcactccccagtacaaaggtaagtcccagctgctggaggggttgccacactggcgaggagatgtgagagatcgtggccatggaaggccctggcagccatccctggagccctcactccctcccactctgtgctttccctccctctcctccttctcctcctcctggccctcagcccagcatctcacaccctcagttttcaatccctggtaagattgctcaattctgttttgttgtgtggatttgagtttgattttggtagaagtgtagttgtgttttatgttcaggtgtctcttgatcacagtaacccatagtcccccactggggggacggtgggggaagactttgggaggattttacccagaatacttgccgcctgctttttgtcctccaggaaaccagaagcccgggtaattagaggtaggccggggagcagcgttgagtcagatggaatgcaggagtgggaggcctgtgctgattagcccaagccctttgctgttacagaatgtccccaaaattgctatatgaaagcaacccttcgattcacatatgataattttttatttctttttataatgtattttataggggacatcagcagccaccagcatggtggggtctttgttggggagtgggggagtcttttgtaaatcaagtaagaatccattaaagaaattaattttaaatgtgcattacctggttacataaaggactctagaacaacttaggttcttttgggactgttgaaacattgtctttaaggacagaatgtactgggtgcctttctctgtactctgaatatgcatgtgtattgcggtggggatgggggagttgggggccctcacttggtccttctctgttgtttttttccaggacaaagccaaaggccccttgttagctggccatccctgccccattttttcccctggtcctttcccctgtggccacagggaagtgtggcctgaataccccaccccggctcctctgcacccagagctgggggccacctcagaagtgtcatctctctctgagcacgcattcccctgcagcagtcgaggactgagcagattgagtgatgctggggcagagaggcctgggaggaaaggtgttcagccagtcgtttgtaaggcgctcgtcggcacctgctgaaacgcccccacctgacagccccatcctcaaagactgtcttaattactcatggcaggttctagagacttaaggggaaaagctgctttcaaggccaccacatgtctgtgctccccaaccagctctatctgccttgtgttcattttgttattttgtgacgtgagactgcaaagaccaataaaaacatattttataagaacaaaaggcctgggtgcctacccgtgtgggggcactgtgggaagcctttgctagggtgtcttgtgctgtgtggtttgttttgtttgcccctttattttgctttgcttacccagtcttcccttactcttggatgcttcttaaccctcaggcaaacctgtgttccccctgtattcaggctctgctttaaagcaagccatgaggctgttggagtttctgtttagggcattaaaaattcccgcaaactataaagagcaatgttttcagtcttttaggattagaagaattacataaaaattaataaacattttcaatgatggaaaaatgtgtcttgtaattctttggctcttgcctcgttgagtacatcagagaggaagactctcagccatgtttgctccctaattgcttgtcttgtatggtgtcatcttttctagctgttttgatatttgttaagtttgcagatgagtttggggcctctggcaacatagagactaaggaactgggtaagaaaaaaacaaatgttacaatcatgttacttacaacgcttcttcctgctaaattaaaagttctttctgctcctcacccccttccaggtgtggtatctgtgcgctttgaagaagatgaagacaggaacttgtgtctaatagcatatccattgaaaggggaccatggaattgtggacattgtagataattcagactgtgaaccaaaaagtaagctcctaaggtggacaacaaacaaaaaacatcatgtcttagaaacagaaaagacccctaaggactgggtgcgtcagcaccgtaaagaggagaaaatgaagagccataagttagaagaagaatttgagtggctaaagaaatctgaagtcttgtactacactgtagagaagaaggggaatataagttcccagcttaaacactataacccttggagcatgaaatgtcaccagcaacagttacagagaatgaaggagaatgcaaagcatcggaaccagtacaaatttatcttactggaaaacctgacttcccgctatgaggtgccttgtgtccttgacctcaagatgggcacacgacaacatggtgatgatgcttcagaggagaaggcagccaaccagatccgaaaatgtcagcagagcacatctgcagtcattggtgtgcgtgtgtgtggcatgcaggtgtaccaagcaggcagtgggcagctcatgttcatgaacaagtaccatggacggaagctatcggtgcagggcttcaaggaggcacttttccagttcttccacaatgggcggtacctgcgccgtgaactcctgggccctgtgctcaagaagctgactgagctcaaggcagtgttaacgtgtgcgctcttgaggaagagacacta

SEQ ID NO: 212586 - DNA, 1325 bp, Homo sapiens
ggtacccgcccaaaccagcttctccacttcttcgcatggaattgtggacattgtagataattcagactgtgaaccaaaaagtaagctcctaaggtggacaacaaacaaaaaacatcatgtcttagaaacagaaaagacccctaaggactgggtgcgtcagcaccgtaaagaggagaaaatgaagagccataagttagaagaagaatttgagtggctaaagaaatctgaagtcttgtactacactgtagagaagaaggggaatataagttcccagcttaaacactataacccttggagcatgaaatgtcaccagcaacagttacagagaatgaaggagaatgcaaagcatcggaaccagtacaaatttatcttactggaaaacctgacttcccgctatgaggtgccttgtgtccttgacctcaagatgggcacacgacaacatggtgatgatgcttcagaggagaaggcagccaaccagatccgaaaatgtcagcagagcacatctgcagtcattggtgtgcgtgtgtgtggcatgcaggtgtaccaagcaggcagtgggcagctcatgttcatgaacaagtaccatggacggaagctatcggtgcagggcttcaaggaggcacttttccagttcttccacaatgggcggtacctgcgccgtgaactcctgggccctgtgctcaagaagctgactgagctcaaggcagtgttggagcgacaggagtcctaccgcttctactcaagctccctgctggtcatttatgatggcaaggagcggcccgaagtggtcctggactcagatgctgaggatttggaggacctgtcagaggaatcagctgatgagtctgctggtgcctatgcctacaaacccatcggcgccagctctgtagatgtgcgcatgatcgactttgcacacaccacctgcaggctgtatggcgaggacaccgtggtgcatgagggccaggatgctggctatatcttcgggctccagagcctgatagacattgtcacagagataagtgaggagagtggggagtgagcttgctagctgctccagtacttgagagcgactctgtgtcccaggcacagctgtgctgcgtcagggaggaagccagtatggccaggtggtggctcctgcagcctggagctgatgtgcagtggcctctgtgagccccagcctgagccagtcccagctgtgcttggagtctttatttattttaactatttcttcaacattccacatttgatgatgatacctctttcttccctgagtgtatatgttctaatacaaatctttttgtttattgtaaaaaaaaaaagctcct

SEQ ID NO: 212587 - DNA, 1227 bp, Homo sapiens
tactttctgtttctaagacatgatgtttttgtttgttgtcccctaaggactgggtgcgtcagcaccgtaaagaggagaaaatgaagagccataagttagaagaagaatttgagtggctaaagaaatctgaagtcttgtactacactgtagagaagaaggggaatataagttcccagcttaaacactataacccttggagcatgaaatgtcaccagcaacagttacagagaatgaaggagaatgcaaagcatcggaaccagtacaaatttatcttactggaaaacctgacttcccgctatgaggtgccttgtgtccttgacctcaagatgggcacacgacaacatggtgatgatgcttcagaggagaaggcagccaaccagatccgaaaatgtcagcagagcacatctgcagtcattggtgtgcgtgtgtgtggcatgcaggtgtaccaagcaggcagtgggcagctcatgttcatgaacaagtaccatggacggaagctatcggtgcagggcttcaaggaggcacttttccagttcttccacaatgggcggtacctgcgccgtgaactcctgggccctgtgctcaagaagctgactgagctcaaggcagtgttggagcgacaggagtcctaccgcttctactcaagctccctgctggtcatttatgatggcaaggagcggcccgaagtggtcctggactcagatgctgaggatttggaggacctgtcagaggaatcagctgatgagtctgctggtgcctatgcctacaaacccatcggcgccagctctgtagatgtgcgcatgatcgactttgcacacaccacctgcaggctgtatggcgaggacaccgtggtgcatgagggccaggatgctggctatatcttcgggctccagagcctgatagacattgtcacagagataagtgaggagagtggggagtgagcttgctagctgctccagtacttgagagcgactctgtgtcccaggcacagctgtgctgcgtcagggaggaagccagtatggccaggtggtggctcctgcagcctggagctgatgtgcagtggcctctgtgagccccagcctgagccagtcccagctgtgcttggagtctttatttattttaactatttcttcaacattccacatttgatgatgatacctctttcttccctgagtgtatatgttctaatacaaatctttttgtttattgtaaaaaaaaaaagctcct

SEQ ID NO: 212588 - DNA, 1141 bp, Homo sapiens
gcccccttcaggcttggagcaggatacggactgtcgtgagtgtgagagcggctccttcaccgcttcacaaaaccacctcagacactgcctcagctgcctaacaggccttggagcatgaaatgtcaccagcaacagttacagagaatgaaggagaatgcaaagcatcggaaccagtacaaatttatcttactggaaaacctgacttcccgctatgaggtgccttgtgtccttgacctcaagatgggcacacgacaacatggtgatgatgcttcagaggagaaggcagccaaccagatccgaaaatgtcagcagagcacatctgcagtcattggtgtgcgtgtgtgtggcatgcaggtgtaccaagcaggcagtgggcagctcatgttcatgaacaagtaccatggacggaagctatcggtgcagggcttcaaggaggcacttttccagttcttccacaatgggcggtacctgcgccgtgaactcctgggccctgtgctcaagaagctgactgagctcaaggcagtgttggagcgacaggagtcctaccgcttctactcaagctccctgctggtcatttatgatggcaaggagcggcccgaagtggtcctggactcagatgctgaggatttggaggacctgtcagaggaatcagctgatgagtctgctggtgcctatgcctacaaacccatcggcgccagctctgtagatgtgcgcatgatcgactttgcacacaccacctgcaggctgtatggcgaggacaccgtggtgcatgagggccaggatgctggctatatcttcgggctccagagcctgatagacattgtcacagagataagtgaggagagtggggagtgagcttgctagctgctccagtacttgagagcgactctgtgtcccaggcacagctgtgctgcgtcagggaggaagccagtatggccaggtggtggctcctgcagcctggagctgatgtgcagtggcctctgtgagccccagcctgagccagtcccagctgtgcttggagtctttatttattttaactatttcttcaacattccacatttgatgatgatacctctttcttccctgagtgtatatgttctaatacaaatctttttgtttattgtaaaaaaaaaaagctcct

SEQ ID NO: 212589 - DNA, 756 bp, Homo sapiens
  misc_feature (402)..(402): n is a, c, g, or t
  misc_feature (407)..(407): n is a, c, g, or t
  misc_feature (409)..(410): n is a, c, g, or t
  misc_feature (416)..(416): n is a, c, g, or t
  misc_feature (418)..(418): n is a, c, g, or t
  misc_feature (420)..(424): n is a, c, g, or t
  misc_feature (428)..(431): n is a, c, g, or t
  misc_feature (443)..(443): n is a, c, g, or t
  misc_feature (445)..(449): n is a, c, g, or t
  misc_feature (454)..(454): n is a, c, g, or t
  misc_feature (462)..(468): n is a, c, g, or t
  misc_feature (477)..(477): n is a, c, g, or t
  misc_feature (489)..(490): n is a, c, g, or t
  misc_feature (497)..(497): n is a, c, g, or t
  misc_feature (500)..(500): n is a, c, g, or t
  misc_feature (505)..(505): n is a, c, g, or t
  misc_feature (507)..(507): n is a, c, g, or t
  misc_feature (509)..(509): n is a, c, g, or t
  misc_feature (512)..(512): n is a, c, g, or t
  misc_feature (515)..(515): n is a, c, g, or t
  misc_feature (518)..(518): n is a, c, g, or t
  misc_feature (520)..(523): n is a, c, g, or t
  misc_feature (525)..(525): n is a, c, g, or t
  misc_feature (530)..(530): n is a, c, g, or t
  misc_feature (535)..(535): n is a, c, g, or t
  misc_feature (538)..(539): n is a, c, g, or t
  misc_feature (545)..(545): n is a, c, g, or t
  misc_feature (547)..(547): n is a, c, g, or t
  misc_feature (553)..(553): n is a, c, g, or t
  misc_feature (556)..(556): n is a, c, g, or t
  misc_feature (560)..(560): n is a, c, g, or t
  misc_feature (566)..(566): n is a, c, g, or t
  misc_feature (580)..(580): n is a, c, g, or t
  misc_feature (584)..(584): n is a, c, g, or t
  misc_feature (590)..(590): n is a, c, g, or t
  misc_feature (594)..(594): n is a, c, g, or t
  misc_feature (598)..(601): n is a, c, g, or t
  misc_feature (603)..(604): n is a, c, g, or t
  misc_feature (606)..(606): n is a, c, g, or t
  misc_feature (613)..(617): n is a, c, g, or t
  misc_feature (619)..(619): n is a, c, g, or t
  misc_feature (623)..(623): n is a, c, g, or t
  misc_feature (627)..(630): n is a, c, g, or t
  misc_feature (632)..(632): n is a, c, g, or t
  misc_feature (635)..(635): n is a, c, g, or t
  misc_feature (638)..(638): n is a, c, g, or t
  misc_feature (640)..(640): n is a, c, g, or t
  misc_feature (644)..(644): n is a, c, g, or t
  misc_feature (662)..(664): n is a, c, g, or t
  misc_feature (667)..(667): n is a, c, g, or t
  misc_feature (669)..(669): n is a, c, g, or t
  misc_feature (671)..(672): n is a, c, g, or t
  misc_feature (675)..(676): n is a, c, g, or t
  misc_feature (678)..(678): n is a, c, g, or t
  misc_feature (693)..(693): n is a, c, g, or t
  misc_feature (733)..(733): n is a, c, g, or t
agcggggggtgcagggggcggggctcggcctggccgcagccattttggtgcgagagaaacaataggacggaaacgccgaggaacccggctgaggcggcagcagagcatcctggccagaacaagccaaggagccaagacgagagggacacacggacaaacaacagacagaagacgtactggccgctggactccgctgcctcccccatctccccgccatctgcgcccggaggatgagcccagccttcagggccatggatgtggagccccgcgccaaaggcgtccttctggagccctttgtccaccaggtcggggggcactcatgcgtgctccgcttcaatgagacaaccctgtgcaagcccctggtcccaagggaacatcagttctacgagaccctccctgctnctatngnncccttncnannnnnttcnnnntttttatgtttntnnnnntccanggatcttnnnnnnntttttttanttttttttaatnntattttnttntttanangntantcnttngnnnnanagaanttttnatnnctcccnanacctgngtnttcnttcttngcccaagcccatgnggtntttctntatnactnnnntnnancattttnnnnntngaantttnnnntnatntgnancttnccttttattggtacctcnnnaananannatnntnttgcgggctctgttntttggcggtgcaccttttgcagtgtgtgttctgcgtacanagggatgctgctaatcttcgctc

SEQ ID NO: 212590 - DNA, 493 bp, Homo sapiens
tacaggcatgagccaccatgcccggccttctgaattctgataagacatactgatttattggtccttatctctttatagccataagttagaagaagaatttgagtggctaaagaaatctgaagtcttgtactacactgtagagaagaaggggaatataagttcccagcttaaacactataacccttggagcatgaaatgtcaccagcaacagttacagagaatgaaggagaatgcaaagcatcggaaccagtacagtatcctttgttcacgggcatctctgcatttgagggtaagaggagaggaaatgaggaagtcccttggagcttggagagagaagttaggtttttatagtcatggttgagttctcctacctgggttattccaggacctgtatgataattatgggcaaataatcacttccctcagggcagctactggcctaggagtgcagatgatgaggagtggggtataatgggtttctgggaggtgaggg

SEQ ID NO: 212591 - DNA, 1187 bp, Homo sapiens
atccttaattaaattaattttccccccccccccgggaaacgccgaggaacccggctgaggcggcagcagagcatcctggccagaacaagccaaggagccaagacgagagggacacacggacaaacaacagacagaagacgtactggccgctggactccgctgcctcccccatctccccgccatctgcgcccggaggatgagcccagccttcagggccatggatgtggagccccgcgccaaaggcgtccttctggagccctttgtccaccaggtcggggggcactcatgcgtgctccgcttcaatgagacaaccctgtgcaagcccctggtcccaagggaacatcagttctacgagaccctccctgctgagatgcgcaaattcactccccagtacaaaggacaaagccaaaggccccttgttagctggccatccctgccccattttttcccctggtcctttcccctgtggccacagggaagtgtggcctgaataccccaccccggctcctctgcacccagagctgggggccacctcagaagtgtcatctctctctgagcacgcattcccctgcagcagtcgaggactgagcagattgagtgatgctggggcagagaggcctgggaggaaaggtgttcagccagtcgtttgtaaggcgctcgtcggcacctgctgaaacgcccccacctgacagccccatcctcaaagactgtcttaattactcatggcaggttctagagacttaaggggaaaagctgctttcaaggccaccacatgtctgtgctccccaaccagctctatctgccttgtgttcattttgttattttgtgacgtgagactgcaaagaccaataaaaacatattttataagaacaaaaggcctgggtgcctacccgtgtgggggcactgtgggaagcctttgctagggtgtcttgtgctgtgtggtttgttttgtttgcccctttattttgctttgcttacccagtcttcccttactcttggatgcttcttaaccctcaggcaaacctgtgttccccctgtattcaggctctgctttaaagcaagccatgaggctgttggagtttctgtttagggcattaaaaattcccgcaaactataaagagcaatgttttcagtcttttaggattagaagaattacataaaaattaataaacattttcaatgatgga

SEQ ID NO: 212592 - DNA, 1221 bp, Homo sapiens
agcggggggtgcagggggcggggctcggcctggccgcagccattttggtgcgagagaaacaataggacggaaacgccgaggaacccggctgaggcggcagcagagcatcctggccagaacaagccaaggagccaagacgagagggacacacggacaaacaacagacagaagacgtactggccgctggactccgctgcctcccccatctccccgccatctgcgcccggaggatgagcccagccttcagggccatggatgtggagccccgcgccaaaggcgtccttctggagccctttgtccaccaggtcggggggcactcatgcgtgctccgcttcaatgagacaaccctgtgcaagcccctggtcccaagggaacatcagttctacgagaccctccctgctgagatgcgcaaattcactccccagtacaaaggacaaagccaaaggccccttgttagctggccatccctgccccattttttcccctggtcctttcccctgtggccacagggaagtgtggcctgaataccccaccccggctcctctgcacccagagctgggggccacctcagaagtgtcatctctctctgagcacgcattcccctgcagcagtcgaggactgagcagattgagtgatgctggggcagagaggcctgggaggaaaggtgttcagccagtcgtttgtaaggcgctcgtcggcacctgctgaaacgcccccacctgacagccccatcctcaaagactgtcttaattactcatggcaggttctagagacttaaggggaaaagctgctttcaaggccaccacatgtctgtgctccccaaccagctctatctgccttgtgttcattttgttattttgtgacgtgagactgcaaagaccaataaaaacatattttataagaacaaaaggcctgggtgcctacccgtgtgggggcactgtgggaagcctttgctagggtgtcttgtgctgtgtggtttgttttgtttgcccctttattttgctttgcttacccagtcttcccttactcttggatgcttcttaaccctcaggcaaacctgtgttccccctgtattcaggctctgctttaaagcaagccatgaggctgttggagtttctgtttagggcattaaaaattcccgcaaactataaagagcaatgttttcagtcttttaggattagaagaattacataaaaattaataaacattttcaatgatgga

SEQ ID NO: 212593 - DNA, 1030 bp, Homo sapiens
agcggggggtgcagggggcggggctcggcctggccgcagccattttggtgcgagagaaacaataggacggaaacgccgaggaacccggctgaggcggcagcagagcatcctggccagaacaagccaaggagccaagacgagagggacacacggacaaacaacagacagaagacgtactggccgctggactccgctgcctcccccatctccccgccatctgcgcccggaggatgagcccagccttcagggccatggatgtggagccccgcgccaaaggcgtccttctggagccctttgtccaccaggtcggggggcactcatgcgtgctccgcttcaatgagacaaccctgtgcaagcccctggtcccaagggaacatcagttctacgagaccctccctgctgagatgcgcaaattcactccccagtacaaagtctcttgatcacagtaacccatagtcccccactggggggacggtgggggaagactttgggaggattttacccagaatacttgccgcctgctttttgtcctccaggaaaccagaagcccgggtaattaggacaaagccaaaggccccttgttagctggccatccctgccccattttttcccctggtcctttcccctgtggccacagggaagtgtggcctgaataccccaccccggctcctctgcacccagagctgggggccacctcagaagtgtcatctctctctgagcacgcattcccctgcagcagtcgaggactgagcagattgagtgatgctggggcagagaggcctgggaggaaaggtgttcagccagtcgtttgtaaggcgctcgtcggcacctgctgaaacgcccccacctgacagccccatcctcaaagactgtcttaattactcatggcaggttctagagacttaaggggaaaagctgctttcaaggccaccacatgtctgtgctccccaaccagctctatctgccttgtgttcattttgttattttgtgacgtgagactgcaaagaccaataaaaacatattttataag

SEQ ID NO: 212594 - DNA, 3709 bp, Homo sapiens
agcggggggtgcagggggcggggctcggcctggccgcagccattttggtgcgagagaaacaataggacggaaacgccgaggaacccggctgaggcggcagcagagcatcctggccagaacaagccaaggagccaagacgagagggacacacggacaaacaacagacagaagacgtactggccgctggactccgctgcctcccccatctccccgccatctgcgcccggaggatgagcccagccttcagggccatggatgtggagccccgcgccaaaggcgtccttctggagccctttgtccaccaggtcggggggcactcatgcgtgctccgcttcaatgagacaaccctgtgcaagcccctggtcccaagggaacatcagttctacgagaccctccctgctgagatgcgcaaattcactccccagtacaaaggtaagtcccagctgctggaggggttgccacactggcgaggagatgtgagagatcgtggccatggaaggccctggcagccatccctggagccctcactccctcccactctgtgctttccctccctctcctccttctcctcctcctggccctcagcccagcatctcacaccctcagttttcaatccctggtaagattgctcaattctgttttgttgtgtggatttgagtttgattttggtagaagtgtagttgtgttttatgttcaggtgtctcttgatcacagtaacccatagtcccccactggggggacggtgggggaagactttgggaggattttacccagaatacttgccgcctgctttttgtcctccaggaaaccagaagcccgggtaattagaggtaggccggggagcagcgttgagtcagatggaatgcaggagtgggaggcctgtgctgattagcccaagccctttgctgttacagaatgtccccaaaattgctatatgaaagcaacccttcgattcacatatgataattttttatttctttttataatgtattttataggggacatcagcagccaccagcatggtggggtctttgttggggagtgggggagtcttttgtaaatcaagtaagaatccattaaagaaattaattttaaatgtgcattacctggttacataaaggactctagaacaacttaggttcttttgggactgttgaaacattgtctttaaggacagaatgtactgggtgcctttctctgtactctgaatatgcatgtgtattgcggtggggatgggggagttgggggccctcacttggtccttctctgttgtttttttccaggacaaagccaaaggccccttgttagctggccatccctgccccattttttcccctggtcctttcccctgtggccacagggaagtgtggcctgaataccccaccccggctcctctgcacccagagctgggggccacctcagaagtgtcatctctctctgagcacgcattcccctgcagcagtcgaggactgagcagattgagtgatgctggggcagagaggcctgggaggaaaggtgttcagccagtcgtttgtaaggcgctcgtcggcacctgctgaaacgcccccacctgacagccccatcctcaaagactgtcttaattactcatggcaggttctagagacttaaggggaaaagctgctttcaaggccaccacatgtctgtgctccccaaccagctctatctgccttgtgttcattttgttattttgtgacgtgagactgcaaagaccaataaaaacatattttataagaacaaaaggcctgggtgcctacccgtgtgggggcactgtgggaagcctttgctagggtgtcttgtgctgtgtggtttgttttgtttgcccctttattttgctttgcttacccagtcttcccttactcttggatgcttcttaaccctcaggcaaacctgtgttccccctgtattcaggctctgctttaaagcaagccatgaggctgttggagtttctgtttagggcattaaaaattcccgcaaactataaagagcaatgttttcagtcttttaggattagaagaattacataaaaattaataaacattttcaatgatggaaaaatgtgtcttgtaattctttggctcttgcctcgttgagtacatcagagaggaagactctcagccatgtttgctccctaattgcttgtcttgtatggtgtcatcttttctagctgttttgatatttgttaagtttgcagatgagtttggggcctctggcaacatagagactaaggaactgggtaagaaaaaaacaaatgttacaatcatgttacttacaacgcttcttcctgctaaattaaaagttctttctgctcctcacccccttccaggtgtggtatctgtgcgctttgaagaagatgaagacaggaacttgtgtctaatagcatatccattgaaaggggaccatggaattgtggacattgtagataattcagactgtgaaccaaaaagtaagctcctaaggtggacaacaaacaaaaaacatcatgtcttagaaacagaaaagacccctaaggactgggtgcgtcagcaccgtaaagaggagaaaatgaagagccataagttagaagaagaatttgagtggctaaagaaatctgaagtcttgtactacactgtagagaagaaggggaatataagttcccagcttaaacactataacccttggagcatgaaatgtcaccagcaacagttacagagaatgaaggagaatgcaaagcatcggaaccagtacaaatttatcttactggaaaacctgacttcccgctatgaggtgccttgtgtccttgacctcaagatgggcacacgacaacatggtgatgatgcttcagaggagaaggcagccaaccagatccgaaaatgtcagcagagcacatctgcagtcattggtgtgcgtgtgtgtggcatgcaggtgtaccaagcaggcagtgggcagctcatgttcatgaacaagtaccatggacggaagctatcggtgcagggcttcaaggaggcacttttccagttcttccacaatgggcggtacctgcgccgtgaactcctgggccctgtgctcaagaagctgactgagctcaaggcagtgttggagcgacaggagtcctaccgcttctactcaagctccctgctggtcatttatgatggcaaggagcggcccgaagtggtcctggactcagatgctgaggatttggaggacctgtcagaggaatcagctgatgagtctgctggtgcctatgcctacaaacccatcggcgccagctctgtagatgtgcgcatgatcgactttgcacacaccacctgcaggctgtatggcgaggacaccgtggtgcatgagggccaggatgctggctatatcttcgggctccagagcctgatagacattgtcacagagataagtgaggagagtggggagtgagcttgctagctgctccagtacttgagagcgactctgtgtcccaggcacagctgtgctgcgtcagggaggaagccagtatggccaggtggtggctcctgcagcctggagctgatgtgcagtggcctctgtgagccccagcctgagccagtcccagctgtgcttggagtctttatttattttaactatttcttcaacattccacatttgatgatgatacctctttcttccctgagtgtatatgttctaatacaaatctttttgtttattgtaaaaaaaaaaagctcct

SEQ ID NO: 212595 - DNA, 3848 bp, Homo sapiens
agcggggggtgcagggggcggggctcggcctggccgcagccattttggtgcgagagaaacaataggacggaaacgccgaggaacccggctgaggcggcagcttcctaggtgacagacaggtacactgtatgctagccctgtatctgtctgagcagtggaatgtgccaggaaagaaggagcaaccactgactgatgaacctttgccagtctcccttccaagagggatgccagagccttctcagagcatcctggccagaacaagccaaggagccaagacgagagggacacacggacaaacaacagacagaagacgtactggccgctggactccgctgcctcccccatctccccgccatctgcgcccggaggatgagcccagccttcagggccatggatgtggagccccgcgccaaaggcgtccttctggagccctttgtccaccaggtcggggggcactcatgcgtgctccgcttcaatgagacaaccctgtgcaagcccctggtcccaagggaacatcagttctacgagaccctccctgctgagatgcgcaaattcactccccagtacaaaggtaagtcccagctgctggaggggttgccacactggcgaggagatgtgagagatcgtggccatggaaggccctggcagccatccctggagccctcactccctcccactctgtgctttccctccctctcctccttctcctcctcctggccctcagcccagcatctcacaccctcagttttcaatccctggtaagattgctcaattctgttttgttgtgtggatttgagtttgattttggtagaagtgtagttgtgttttatgttcaggtgtctcttgatcacagtaacccatagtcccccactggggggacggtgggggaagactttgggaggattttacccagaatacttgccgcctgctttttgtcctccaggaaaccagaagcccgggtaattagaggtaggccggggagcagcgttgagtcagatggaatgcaggagtgggaggcctgtgctgattagcccaagccctttgctgttacagaatgtccccaaaattgctatatgaaagcaacccttcgattcacatatgataattttttatttctttttataatgtattttataggggacatcagcagccaccagcatggtggggtctttgttggggagtgggggagtcttttgtaaatcaagtaagaatccattaaagaaattaattttaaatgtgcattacctggttacataaaggactctagaacaacttaggttcttttgggactgttgaaacattgtctttaaggacagaatgtactgggtgcctttctctgtactctgaatatgcatgtgtattgcggtggggatgggggagttgggggccctcacttggtccttctctgttgtttttttccaggacaaagccaaaggccccttgttagctggccatccctgccccattttttcccctggtcctttcccctgtggccacagggaagtgtggcctgaataccccaccccggctcctctgcacccagagctgggggccacctcagaagtgtcatctctctctgagcacgcattcccctgcagcagtcgaggactgagcagattgagtgatgctggggcagagaggcctgggaggaaaggtgttcagccagtcgtttgtaaggcgctcgtcggcacctgctgaaacgcccccacctgacagccccatcctcaaagactgtcttaattactcatggcaggttctagagacttaaggggaaaagctgctttcaaggccaccacatgtctgtgctccccaaccagctctatctgccttgtgttcattttgttattttgtgacgtgagactgcaaagaccaataaaaacatattttataagaacaaaaggcctgggtgcctacccgtgtgggggcactgtgggaagcctttgctagggtgtcttgtgctgtgtggtttgttttgtttgcccctttattttgctttgcttacccagtcttcccttactcttggatgcttcttaaccctcaggcaaacctgtgttccccctgtattcaggctctgctttaaagcaagccatgaggctgttggagtttctgtttagggcattaaaaattcccgcaaactataaagagcaatgttttcagtcttttaggattagaagaattacataaaaattaataaacattttcaatgatggaaaaatgtgtcttgtaattctttggctcttgcctcgttgagtacatcagagaggaagactctcagccatgtttgctccctaattgcttgtcttgtatggtgtcatcttttctagctgttttgatatttgttaagtttgcagatgagtttggggcctctggcaacatagagactaaggaactgggtaagaaaaaaacaaatgttacaatcatgttacttacaacgcttcttcctgctaaattaaaagttctttctgctcctcacccccttccaggtgtggtatctgtgcgctttgaagaagatgaagacaggaacttgtgtctaatagcatatccattgaaaggggaccatggaattgtggacattgtagataattcagactgtgaaccaaaaagtaagctcctaaggtggacaacaaacaaaaaacatcatgtcttagaaacagaaaagacccctaaggactgggtgcgtcagcaccgtaaagaggagaaaatgaagagccataagttagaagaagaatttgagtggctaaagaaatctgaagtcttgtactacactgtagagaagaaggggaatataagttcccagcttaaacactataacccttggagcatgaaatgtcaccagcaacagttacagagaatgaaggagaatgcaaagcatcggaaccagtacaaatttatcttactggaaaacctgacttcccgctatgaggtgccttgtgtccttgacctcaagatgggcacacgacaacatggtgatgatgcttcagaggagaaggcagccaaccagatccgaaaatgtcagcagagcacatctgcagtcattggtgtgcgtgtgtgtggcatgcaggtgtaccaagcaggcagtgggcagctcatgttcatgaacaagtaccatggacggaagctatcggtgcagggcttcaaggaggcacttttccagttcttccacaatgggcggtacctgcgccgtgaactcctgggccctgtgctcaagaagctgactgagctcaaggcagtgttggagcgacaggagtcctaccgcttctactcaagctccctgctggtcatttatgatggcaaggagcggcccgaagtggtcctggactcagatgctgaggatttggaggacctgtcagaggaatcagctgatgagtctgctggtgcctatgcctacaaacccatcggcgccagctctgtagatgtgcgcatgatcgactttgcacacaccacctgcaggctgtatggcgaggacaccgtggtgcatgagggccaggatgctggctatatcttcgggctccagagcctgatagacattgtcacagagataagtgaggagagtggggagtgagcttgctagctgctccagtacttgagagcgactctgtgtcccaggcacagctgtgctgcgtcagggaggaagccagtatggccaggtggtggctcctgcagcctggagctgatgtgcagtggcctctgtgagccccagcctgagccagtcccagctgtgcttggagtctttatttattttaactatttcttcaacattccacatttgatgatgatacctctttcttccctgagtgtatatgttctaatacaaatctttttgtttattgtaaaaaaaaaaagctcct

SEQ ID NO: 212596 - DNA, 2986 bp, Homo sapiens
agcggggggtgcagggggcggggctcggcctggccgcagccattttggtgcgagagaaacaataggacggaaacgccgaggaacccggctgaggcggcagcagagcatcctggccagaacaagccaaggagccaagacgagagggacacacggacaaacaacagacagaagacgtactggccgctggactccgctgcctcccccatctccccgccatctgcgcccggaggatgagcccagccttcagggccatggatgtggagccccgcgccaaaggcgtccttctggagccctttgtccaccaggtcggggggcactcatgcgtgctccgcttcaatgagacaaccctgtgcaagcccctggtcccaagggaacatcagttctacgagaccctccctgctgagatgcgcaaattcactccccagtacaaagtctcttgatcacagtaacccatagtcccccactggggggacggtgggggaagactttgggaggattttacccagaatacttgccgcctgctttttgtcctccaggaaaccagaagcccgggtaattaggacaaagccaaaggccccttgttagctggccatccctgccccattttttcccctggtcctttcccctgtggccacagggaagtgtggcctgaataccccaccccggctcctctgcacccagagctgggggccacctcagaagtgtcatctctctctgagcacgcattcccctgcagcagtcgaggactgagcagattgagtgatgctggggcagagaggcctgggaggaaaggtgttcagccagtcgtttgtaaggcgctcgtcggcacctgctgaaacgcccccacctgacagccccatcctcaaagactgtcttaattactcatggcaggttctagagacttaaggggaaaagctgctttcaaggccaccacatgtctgtgctccccaaccagctctatctgccttgtgttcattttgttattttgtgacgtgagactgcaaagaccaataaaaacatattttataagaacaaaaggcctgggtgcctacccgtgtgggggcactgtgggaagcctttgctagggtgtcttgtgctgtgtggtttgttttgtttgcccctttattttgctttgcttacccagtcttcccttactcttggatgcttcttaaccctcaggcaaacctgtgttccccctgtattcaggctctgctttaaagcaagccatgaggctgttggagtttctgtttagggcattaaaaattcccgcaaactataaagagcaatgttttcagtcttttaggattagaagaattacataaaaattaataaacattttcaatgatggaaaaatgtgtcttgtaattctttggctcttgcctcgttgagtacatcagagaggaagactctcagccatgtttgctccctaattgcttgtcttgtatggtgtcatcttttctagctgttttgatatttgttaagtttgcagatgagtttggggcctctggcaacatagagactaaggaactgggtaagaaaaaaacaaatgttacaatcatgttacttacaacgcttcttcctgctaaattaaaagttctttctgctcctcacccccttccaggtgtggtatctgtgcgctttgaagaagatgaagacaggaacttgtgtctaatagcatatccattgaaaggggaccatggaattgtggacattgtagataattcagactgtgaaccaaaaagtaagctcctaaggtggacaacaaacaaaaaacatcatgtcttagaaacagaaaagacccctaaggactgggtgcgtcagcaccgtaaagaggagaaaatgaagagccataagttagaagaagaatttgagtggctaaagaaatctgaagtcttgtactacactgtagagaagaaggggaatataagttcccagcttaaacactataacccttggagcatgaaatgtcaccagcaacagttacagagaatgaaggagaatgcaaagcatcggaaccagtacaaatttatcttactggaaaacctgacttcccgctatgaggtgccttgtgtccttgacctcaagatgggcacacgacaacatggtgatgatgcttcagaggagaaggcagccaaccagatccgaaaatgtcagcagagcacatctgcagtcattggtgtgcgtgtgtgtggcatgcaggtgtaccaagcaggcagtgggcagctcatgttcatgaacaagtaccatggacggaagctatcggtgcagggcttcaaggaggcacttttccagttcttccacaatgggcggtacctgcgccgtgaactcctgggccctgtgctcaagaagctgactgagctcaaggcagtgttggagcgacaggagtcctaccgcttctactcaagctccctgctggtcatttatgatggcaaggagcggcccgaagtggtcctggactcagatgctgaggatttggaggacctgtcagaggaatcagctgatgagtctgctggtgcctatgcctacaaacccatcggcgccagctctgtagatgtgcgcatgatcgactttgcacacaccacctgcaggctgtatggcgaggacaccgtggtgcatgagggccaggatgctggctatatcttcgggctccagagcctgatagacattgtcacagagataagtgaggagagtggggagtgagcttgctagctgctccagtacttgagagcgactctgtgtcccaggcacagctgtgctgcgtcagggaggaagccagtatggccaggtggtggctcctgcagcctggagctgatgtgcagtggcctctgtgagccccagcctgagccagtcccagctgtgcttggagtctttatttattttaactatttcttcaacattccacatttgatgatgatacctctttcttccctgagtgtatatgttctaatacaaatctttttgtttattgtaaaaaaaaaaagctcct

SEQ ID NO: 212597 - DNA, 2925 bp, Homo sapiens
agcggggggtgcagggggcggggctcggcctggccgcagccattttggtgcgagagaaacaataggacggaaacgccgaggaacccggctgaggcggcagcagagcatcctggccagaacaagccaaggagccaagacgagagggacacacggacaaacaacagacagaagacgtactggccgctggactccgctgcctcccccatctccccgccatctgcgcccggaggatgagcccagccttcagggccatggatgtggagccccgcgccaaaggcgtccttctggagccctttgtccaccaggtcggggggcactcatgcgtgctccgcttcaatgagacaaccctgtgcaagcccctggtcccaagggaacatcagttctacgagaccctccctgctgagatgcgcaaattcactccccagtacaaaggggacatcagcagccaccagcatggtggggtctttgttggggagtgggggagtcttttgtaaatcaagacaaagccaaaggccccttgttagctggccatccctgccccattttttcccctggtcctttcccctgtggccacagggaagtgtggcctgaataccccaccccggctcctctgcacccagagctgggggccacctcagaagtgtcatctctctctgagcacgcattcccctgcagcagtcgaggactgagcagattgagtgatgctggggcagagaggcctgggaggaaaggtgttcagccagtcgtttgtaaggcgctcgtcggcacctgctgaaacgcccccacctgacagccccatcctcaaagactgtcttaattactcatggcaggttctagagacttaaggggaaaagctgctttcaaggccaccacatgtctgtgctccccaaccagctctatctgccttgtgttcattttgttattttgtgacgtgagactgcaaagaccaataaaaacatattttataagaacaaaaggcctgggtgcctacccgtgtgggggcactgtgggaagcctttgctagggtgtcttgtgctgtgtggtttgttttgtttgcccctttattttgctttgcttacccagtcttcccttactcttggatgcttcttaaccctcaggcaaacctgtgttccccctgtattcaggctctgctttaaagcaagccatgaggctgttggagtttctgtttagggcattaaaaattcccgcaaactataaagagcaatgttttcagtcttttaggattagaagaattacataaaaattaataaacattttcaatgatggaaaaatgtgtcttgtaattctttggctcttgcctcgttgagtacatcagagaggaagactctcagccatgtttgctccctaattgcttgtcttgtatggtgtcatcttttctagctgttttgatatttgttaagtttgcagatgagtttggggcctctggcaacatagagactaaggaactgggtaagaaaaaaacaaatgttacaatcatgttacttacaacgcttcttcctgctaaattaaaagttctttctgctcctcacccccttccaggtgtggtatctgtgcgctttgaagaagatgaagacaggaacttgtgtctaatagcatatccattgaaaggggaccatggaattgtggacattgtagataattcagactgtgaaccaaaaagtaagctcctaaggtggacaacaaacaaaaaacatcatgtcttagaaacagaaaagacccctaaggactgggtgcgtcagcaccgtaaagaggagaaaatgaagagccataagttagaagaagaatttgagtggctaaagaaatctgaagtcttgtactacactgtagagaagaaggggaatataagttcccagcttaaacactataacccttggagcatgaaatgtcaccagcaacagttacagagaatgaaggagaatgcaaagcatcggaaccagtacaaatttatcttactggaaaacctgacttcccgctatgaggtgccttgtgtccttgacctcaagatgggcacacgacaacatggtgatgatgcttcagaggagaaggcagccaaccagatccgaaaatgtcagcagagcacatctgcagtcattggtgtgcgtgtgtgtggcatgcaggtgtaccaagcaggcagtgggcagctcatgttcatgaacaagtaccatggacggaagctatcggtgcagggcttcaaggaggcacttttccagttcttccacaatgggcggtacctgcgccgtgaactcctgggccctgtgctcaagaagctgactgagctcaaggcagtgttggagcgacaggagtcctaccgcttctactcaagctccctgctggtcatttatgatggcaaggagcggcccgaagtggtcctggactcagatgctgaggatttggaggacctgtcagaggaatcagctgatgagtctgctggtgcctatgcctacaaacccatcggcgccagctctgtagatgtgcgcatgatcgactttgcacacaccacctgcaggctgtatggcgaggacaccgtggtgcatgagggccaggatgctggctatatcttcgggctccagagcctgatagacattgtcacagagataagtgaggagagtggggagtgagcttgctagctgctccagtacttgagagcgactctgtgtcccaggcacagctgtgctgcgtcagggaggaagccagtatggccaggtggtggctcctgcagcctggagctgatgtgcagtggcctctgtgagccccagcctgagccagtcccagctgtgcttggagtctttatttattttaactatttcttcaacattccacatttgatgatgatacctctttcttccctgagtgtatatgttctaatacaaatctttttgtttattgtaaaaaaaaaaagctcct

SEQ ID NO: 212598 - DNA, 3655 bp, Homo sapiens
agcggggggtgcagggggcggggctcggcctggccgcagccattttggtgcgagagaaacaataggacggaaacgccgaggaacccggctgaggcggcagcagagcatcctggccagaacaagccaaggagccaagacgagagggacacacggacaaacaacagacagaagacgtactggccgctggactccgctgcctcccccatctccccgccatctgcgcccggaggatgagcccagccttcagggccatggatgtggagccccgcgccaaaggcgtccttctggagccctttgtccaccaggtcggggggcactcatgcgtgctccgcttcaatgagacaaccctgtgcaagcccctggtcccaagggaacatcagttctacgagaccctccctgctgagatgcgcaaattcactccccagtacaaaggtaagtcccagctgctggaggggttgccacactggcgaggagatgtgagagatcgtggccatggaaggccctggcagccatccctggagccctcactccctcccactctgtgctttccctccctctcctccttctcctcctcctggccctcagcccagcatctcacaccctcagttttcaatccctggtaagattgctcaattctgttttgttgtgtggatttgagtttgattttggtagaagtgtagttgtgttttatgttcaggtgtctcttgatcacagtaacccatagtcccccactggggggacggtgggggaagactttgggaggattttacccagaatacttgccgcctgctttttgtcctccaggaaaccagaagcccgggtaattagaggtaggccggggagcagcgttgagtcagatggaatgcaggagtgggaggcctgtgctgattagcccaagccctttgctgttacagaatgtccccaaaattgctatatgaaagcaacccttcgattcacatatgataattttttatttctttttataatgtattttataggggacatcagcagccaccagcatggtggggtctttgttggggagtgggggagtcttttgtaaatcaagtaagaatccattaaagaaattaattttaaatgtgcattacctggttacataaaggactctagaacaacttaggttcttttgggactgttgaaacattgtctttaaggacagaatgtactgggtgcctttctctgtactctgaatatgcatgtgtattgcggtggggatgggggagttgggggccctcacttggtccttctctgttgtttttttccaggacaaagccaaaggccccttgttagctggccatccctgccccattttttcccctggtcctttcccctgtggccacagggaagtgtggcctgaataccccaccccggctcctctgcacccagagctgggggccacctcagaagtgtcatctctctctgagcacgcattcccctgcagcagtcgaggactgagcagattgagtgatgctggggcagagaggcctgggaggaaaggtgttcagccagtcgtttgtaaggcgctcgtcggcacctgctgaaacgcccccacctgacagccccatcctcaaagactgtcttaattactcatggcaggttctagagacttaaggggaaaagctgctttcaaggccaccacatgtctgtgctccccaaccagctctatctgccttgtgttcattttgttattttgtgacgtgagactgcaaagaccaataaaaacatattttataagaacaaaaggcctgggtgcctacccgtgtgggggcactgtgggaagcctttgctagggtgtcttgtgctgtgtggtttgttttgtttgcccctttattttgctttgcttacccagtcttcccttactcttggatgcttcttaaccctcaggcaaacctgtgttccccctgtattcaggctctgctttaaagcaagccatgaggctgttggagtttctgtttagggcattaaaaattcccgcaaactataaagagcaatgttttcagtcttttaggattagaagaattacataaaaattaataaacattttcaatgatggaaaaatgtgtcttgtaattctttggctcttgcctcgttgagtacatcagagaggaagactctcagccatgtttgctccctaattgcttgtcttgtatggtgtcatcttttctagctgttttgatatttgttaagtttgcagatgagtttggggcctctggcaacatagagactaaggaactgggtaagaaaaaaacaaatgttacaatcatgttacttacaacgcttcttcctgctaaattaaaagttctttctgctcctcacccccttccaggtgtggtatctgtgcgctttgaagaagatgaagacaggaacttgtgtctaatagcatatccattgaaaggggaccatggaattgtggacattgtagataattcagactgtgaaccaaaaagtaagctcctaaggtggacaacaaacaaaaaacatcatgtcttagaaacagaaaagacccctaaggactgggtgcgtcagcaccgtaaagaggagaaaatgaagagccataagttagaagaagaatttgagtggctaaagaaatctgaagtcttgtactacactgtagagaagaaggggaatataagttcccagcttaaacactataacccttggagcatgaaatgtcaccagcaacagttacagagaatgaaggagaatgcaaagcatcggaaccagtacaaatttatcttactggaaaacctgacttcccgctatgaggtgccttgtgtccttgacctcaagatgggcacacgacaacatggtgatgatgcttcagaggagaaggcagccaaccagatccgagtgtaccaagcaggcagtgggcagctcatgttcatgaacaagtaccatggacggaagctatcggtgcagggcttcaaggaggcacttttccagttcttccacaatgggcggtacctgcgccgtgaactcctgggccctgtgctcaagaagctgactgagctcaaggcagtgttggagcgacaggagtcctaccgcttctactcaagctccctgctggtcatttatgatggcaaggagcggcccgaagtggtcctggactcagatgctgaggatttggaggacctgtcagaggaatcagctgatgagtctgctggtgcctatgcctacaaacccatcggcgccagctctgtagatgtgcgcatgatcgactttgcacacaccacctgcaggctgtatggcgaggacaccgtggtgcatgagggccaggatgctggctatatcttcgggctccagagcctgatagacattgtcacagagataagtgaggagagtggggagtgagcttgctagctgctccagtacttgagagcgactctgtgtcccaggcacagctgtgctgcgtcagggaggaagccagtatggccaggtggtggctcctgcagcctggagctgatgtgcagtggcctctgtgagccccagcctgagccagtcccagctgtgcttggagtctttatttattttaactatttcttcaacattccacatttgatgatgatacctctttcttccctgagtgtatatgttctaatacaaatctttttgtttattgtaaaaaaaaaaagctcct

SEQ ID NO: 212599 - DNA, 2072 bp, Homo sapiens
agcggggggtgcagggggcggggctcggcctggccgcagccattttggtgcgagagaaacaataggacggaaacgccgaggaacccggctgaggcggcagcagagcatcctggccagaacaagccaaggagccaagacgagagggacacacggacaaacaacagacagaagacgtactggccgctggactccgctgcctcccccatctccccgccatctgcgcccggaggatgagcccagccttcagggccatggatgtggagccccgcgccaaaggcgtccttctggagccctttgtccaccaggtcggggggcactcatgcgtgctccgcttcaatgagacaaccctgtgcaagcccctggtcccaagggaacatcagttctacgagaccctccctgctgagatgcgcaaattcactccccagtacaaaggtaagtcccagctgctggaggggttgccacactggcgaggagatgtgagagatcgtggccatggaaggccctggcagccatccctggagccctcactccctcccactctgtgctttccctccctctcctccttctcctcctcctggccctcagcccagcatctcacaccctcagttttcaatccctggtaagattgctcaattctgttttgttgtgtggatttgagtttgattttggtagaagtgtagttgtgttttatgttcaggtgtctcttgatcacagtaacccatagtcccccactggggggacggtgggggaagactttgggaggattttacccagaatacttgccgcctgctttttgtcctccaggaaaccagaagcccgggtaattagaggtaggccggggagcagcgttgagtcagatggaatgcaggagtgggaggcctgtgctgattagcccaagccctttgctgttacagaatgtccccaaaattgctatatgaaagcaacccttcgattcacatatgataattttttatttctttttataatgtattttataggggacatcagcagccaccagcatggtggggtctttgttggggagtgggggagtcttttgtaaatcaagtaagaatccattaaagaaattaattttaaatgtgcattacctggttacataaaggactctagaacaacttaggttcttttgggactgttgaaacattgtctttaaggacagaatgtactgggtgcctttctctgtactctgaatatgcatgtgtattgcggtggggatgggggagttgggggccctcacttggtccttctctgttgtttttttccaggacaaagccaaaggccccttgttagctggccatccctgccccattttttcccctggtcctttcccctgtggccacagggaagtgtggcctgaataccccaccccggctcctctgcacccagagctgggggccacctcagaagtgtcatctctctctgagcacgcattcccctgcagcagtcgaggactgagcagattgagtgatgctggggcagagaggcctgggaggaaaggtgttcagccagtcgtttgtaaggcgctcgtcggcacctgctgaaacgcccccacctgacagccccatcctcaaagactgtcttaattactcatggcaggttctagagacttaaggggaaaagctgctttcaaggccaccacatgtctgtgctccccaaccagctctatctgccttgtgttcattttgttattttgtgacgtgagactgcaaagaccaataaaaacatattttataagaacaaaaggcctgggtgcctacccgtgtgggggcactgtgggaagcctttgctagggtgtcttgtgctgtgtggtttgttttgtttgcccctttattttgctttgcttacccagtcttcccttactcttggatgcttcttaaccctcaggcaaacctgtgttccccctgtattcaggctctgctttaaagcaagccatgaggctgttggagtttctgtttagggcattaaaaattcccgcaaactataaagagcaatgttttcagtcttttaggattagaagaattacataaaaattaataaacattttcaatgatgga

SEQ ID NO: 212600 - DNA, 1753 bp, Homo sapiens
agcggggggtgcagggggcggggctcggcctggccgcagccattttggtgcgagagaaacaataggacggaaacgccgaggaacccggctgaggcggcagcagagcatcctggccagaacaagccaaggagccaagacgagagggacacacggacaaacaacagacagaagacgtactggccgctggactccgctgcctcccccatctccccgccatctgcgcccggaggatgagcccagccttcagggccatggatgtggagccccgcgccaaaggcgtccttctggagccctttgtccaccaggtcggggggcactcatgcgtgctccgcttcaatgagacaaccctgtgcaagcccctggtcccaagggaacatcagttctacgagaccctccctgctgagatgcgcaaattcactccccagtacaaaggtaagtcccagctgctggaggggttgccacactggcgaggagatgtgagagatcgtggccatggaaggccctggcagccatccctggagccctcactccctcccactctgtgctttccctccctctcctccttctcctcctcctggccctcagcccagcatctcacaccctcagttttcaatccctggtaagattgctcaattctgttttgttgtgtggatttgagtttgattttggtagaagtgtagttgtgttttatgttcaggtgtctcttgatcacagtaacccatagtcccccactggggggacggtgggggaagactttgggaggattttacccagaatacttgccgcctgctttttgtcctccaggaaaccagaagcccgggtaattagaggtaggccggggagcagcgttgagtcagatggaatgcaggagtgggaggcctgtgctgattagcccaagccctttgctgttacagaatgtccccaaaattgctatatgaaagcaacccttcgattcacatatgataattttttatttctttttataatgtattttataggggacatcagcagccaccagcatggtggggtctttgttggggagtgggggagtcttttgtaaatcaagtaagaatccattaaagaaattaattttaaatgtgcattacctggttacataaaggactctagaacaacttaggttcttttgggactgttgaaacattgtctttaaggacagaatgtactgggtgcctttctctgtactctgaatatgcatgtgtattgcggtggggatgggggagttgggggccctcacttggtccttctctgttgtttttttccaggacaaagccaaaggccccttgttagctggccatccctgccccattttttcccctggtcctttcccctgtggccacagggaagtgtggcctgaataccccaccccggctcctctgcacccagagctgggggccacctcagaagtgtcatctctctctgagcacgcattcccctgcagcagtcgaggactgagcagattgagtgatgctggggcagagaggcctgggaggaaaggtgttcagccagtcgtttgtaaggcgctcgtcggcacctgctgaaacgcccccacctgacagccccatcctcaaagactgtcttaattactcatggcaggttctagagacttaaggggaaaagctgctttcaaggccaccacatgtctgtgctccccaaccagctctatctgccttgtgttcattttgttattttgtgacgtgagactgcaaagaccaataaaaacatattttataag

SEQ ID NO: 212601 - DNA, 1743 bp, Homo sapiens
  misc_feature (1721)..(1721): n is a, c, g, or t
agcggggggtgcagggggcggggctcggcctggccgcagccattttggtgcgagagaaacaataggacggaaacgccgaggaacccggctgaggcggcagcagagcatcctggccagaacaagccaaggagccaagacgagagggacacacggacaaacaacagacagaagacgtactggccgctggactccgctgcctcccccatctccccgccatctgcgcccggaggatgagcccagccttcagggccatggatgtggagccccgcgccaaaggcgtccttctggagccctttgtccaccaggtcggggggcactcatgcgtgctccgcttcaatgagacaaccctgtgcaagcccctggtcccaagggaacatcagttctacgagaccctccctgctgagatgcgcaaattcactccccagtacaaaggtaagtcccagctgctggaggggttgccacactggcgaggagatgtgagagatcgtggccatggaaggccctggcagccatccctggagccctcactccctcccactctgtgctttccctccctctcctccttctcctcctcctggccctcagcccagcatctcacaccctcagttttcaatccctggtaagattgctcaattctgttttgttgtgtggatttgagtttgattttggtagaagtgtagttgtgttttatgttcaggtgtctcttgatcacagtaacccatagtcccccactggggggacggtgggggaagactttgggaggattttacccagaatacttgccgcctgctttttgtcctccaggaaaccagaagcccgggtaattagaggtaggccggggagcagcgttgagtcagatggaatgcaggagtgggaggcctgtgctgattagcccaagccctttgctgttacagaatgtccccaaaattgctatatgaaagcaacccttcgattcacatatgataattttttatttctttttataatgtattttataggggacatcagcagccaccagcatggtggggtctttgttggggagtgggggagtcttttgtaaatcaagtaagaatccattaaagaaattaattttaaatgtgcattacctggttacataaaggactctagaacaacttaggttcttttgggactgttgaaacattgtctttaaggacagaatgtactgggtgcctttctctgtactctgaatatgcatgtgtattgcggtggggatgggggagttgggggccctcacttggtccttctctgttgtttttttccaggacaaagccaaaggccccttgttagctggccatccctgccccattttttcccctggtcctttcccctgtggccacagggaagtgtggcctgaataccccaccccggctcctctgcacccagagctgggggccacctcagaagtgtcatctctctctgagcacgcattcccctgcagcagtcgaggactgagcagattgagtgatgctggggcagagaggcctgggaggaaaggtgttcagccagtcgtttgtaaggcgctcgtcggcacctgctgaaacgcccccacctgacagccccatcctcaaagactgtcttaattactcatggcaggttctagagacttaaggggaaaagctgctttcaaggccaccacatgtctgtgctccccaaccagctctatctgccttgtgttcattttgttattttgtgacgtgganccgggggatactctagagcgag

SEQ ID NO: 212602 - DNA, 1037 bp, Homo sapiens
gatcgagtcggtacccggtcccatgcaacagttacagagaatgaaggagaatgcaaagcatcggaaccagtacaaatttatcttactggaaaacctgacttcccgctatgaggtgccttgtgtccttgacctcaagatgggcacacgacaacatggtgatgatgcttcagaggagaaggcagccaaccagatccgaaaatgtcagcagagcacatctgcagtcattggtgtgcgtgtgtgtggcatgcaggtgtaccaagcaggcagtgggcagctcatgttcatgaacaagtaccatggacggaagctatcggtgcagggcttcaaggaggcacttttccagttcttccacaatgggcggtacctgcgccgtgaactcctgggccctgtgctcaagaagctgactgagctcaaggcagtgttggagcgacaggagtcctaccgcttctactcaagctccctgctggtcatttatgatggcaaggagcggcccgaagtggtcctggactcagatgctgaggatttggaggacctgtcagaggaatcagctgatgagtctgctggtgcctatgcctacaaacccatcggcgccagctctgtagatgtgcgcatgatcgactttgcacacaccacctgcaggctgtatggcgaggacaccgtggtgcatgagggccaggatgctggctatatcttcgggctccagagcctgatagacattgtcacagagataagtgaggagagtggggagtgagcttgctagctgctccagtacttgagagcgactctgtgtcccaggcacagctgtgctgcgtcagggaggaagccagtatggccaggtggtggctcctgcagcctggagctgatgtgcagtggcctctgtgagccccagcctgagccagtcccagctgtgcttggagtctttatttattttaactatttcttcaacattccacatttgatgatgatacctctttcttccctgagtgtatatgttctaatacaaatctttttgtttattgtaaaaaaaaaaagctcct

SEQ ID NO: 212603 - DNA, 282 bp, Homo sapiens
ttagtgaggaagcaaatcaatagaaacgcatctaggccaatgggaatgtaaatcagtgcaaccacttgggaaaaagctttgcattatctagtggagttgaacacccgcaaagttctatgatcacaggcgtgagtcaccacgcactggccaggtctagctttttaagagtctgaccaataactgctttctaattggaatgtttagcacgtttaaatgtaatgcaataaatgaatatggtgggattataaacctattatacgaattggcctaaatagaggggat

SEQ ID NO: 212604 - DNA, 352 bp, Homo sapiens
ttagtgaggaagcaaatcaatagaaacgcatctaggccaatgggaatgtaaatcagtgcaaccacttgggaaaaagctttgcattatctagtggagttgaacacccgcaaagttctatgactctgcaattctttactttgttatgtatcctagagaaacacacatgagcactggaaaatatgtacaagaatgttcatagggcattatttgaatttgcaacactctgaaaacgacccacgaggttaatcaacagtaaaataagttattatatattcataaaataatacactatttaccaatgaaaacaagtgaactacaactgtgtagtacatataaatatggatgaatctca

SEQ ID NO: 212605 - DNA, 851 bp, Homo sapiens
gcagtggatttaattggacaattcaagacatccattttattgtcccaaaatattacataaaagtgtacagtttttagcctaaatgcaaacaaagttgcttgaaaatggcatgggtaaaattcttacggaaacctggtggcaatcttggaaaagtttatcagcctggaagtatgctatcactagcccctaccaaaggcttgttaaatgaaccaggacaaaacagctgctttcttaatagcgctgtacaggtgagaccataattacttattacattaaaaaaaatacttttcagaaaatcctttgtttaatgcttctttagctcataaattaaaaataaagttactatagactagaatgactttttaatataactttaaatgggagcaaaagtgttttggctggtcattttggtttttataataaatgaaaatggtttttttcaacagactgatgtatcactatgatataaataatcttatttaaaaggtttatttagtaaattaaggacatttttctaacatacacaaatgttttggttttaatcagctaacacccctccctttgaaaaaacatccagtatatggatccctgtagatagaataaaaagacataagctgcttgtattgagataagaatgcagagtttttgatttcagtactcaaactcccttcacctcccactgtggtgtttaaattacctctgcggaatcatcatttgggctccactgttttggttaaattgaaggataatccattttgcctcaatccttgttgaaaatcttaattaacctgcttttctgccttagataactatactttcttatgcttaataaagtttttattcagcagtta

SEQ ID NO: 212606 - DNA, 492 bp, Homo sapiens
gcagtggatttaattggacaattcaagacatccattttattgtcccaaaatattacataaaagtgtacagtttttagcctaaatgcaaacaaagttgcttgaaaatggcatgggtaaaattcttacggaaacctggtggcaatcttggaaaagtttatcagcctggaagtatgctatcactagcccctaccaaaggcttgttaaatgaaccaggacaaaacagctgctttcttaatagcgctgtacaggttttatggcaattggatatattccgacgaagcttgcgggttttgactggacatgtttgtcagggagatgcctgtatattttgtgcattgaagacgatatttgcacagttccaacacagtcgagaaaaagcacttccctcagataacataaggcatgctcttgcagaaagtttcaaagatgagcagcgatttcaacttggccttatggatgatgctgcggagtgctttgtaagtgtttctgata

SEQ ID NO: 212607 - DNA, 1116 bp, Homo sapiens
atatctctgccaaggatagactgaagtgttgaaggtgtttatgtgccatacgtggcagttaggaactggtatcagggactcatatctctgaagcaagcactttagctacctgttcataggtaacagctcattgatagggaaagaaggtagaattaagcttatcaaaggctagaactgtgtctgattcatcttggggtcctccctacctagcttaggatgctacattgtttaggttttagtgaatgtttgttgagtgaagagatgagttggtgttctctatcagcaaggtctagcggggccaagtggcccaggacagatgggtctgctgctaaagtggtttttatttgaagtgtgtgttgatcgtgggttatcttacaggattttttaatattccatatggctctaaccaggacctgccttagtacctctgaaagaagtcactattcttattttggtccagacagtaccattttctctcccagttacccaggcaggacatttcaacatcatcttgacttctctgtctccttggcgctgatctctaattggtcatcatcctctctgctcacatccagcgtccctcccctctgcctcattctggatactaggccctcatggcctagttcttctctaatctgcccttattgcagttcattcctatgcacgagttctcaagaatctttctcaaatcttgttttctttgtgacacttcagtgactcttcatcaaacctcagtgaatattcatttctaataggtagaaatctaaaatcttcagcctggtgtttaagatctttcatcagggggtcatttcctctcaccagttttgtttcctgcttttttctctccccactcgacaccacctcatttttttttaatcttatagaaatccttaaatcctggattttgttaattgcattattatggtacggcttaacttgttccactattccccttgttgcctatatactgataattagatctaagcttgattcactttttttttttgtcaaggatacttcatagttggggttgtgtaccacctgtaagtcagcattttgcaacttctgttgaaaatcattattttgcaaaccctaaggaagtgatagatccaggca

SEQ ID NO: 212608 - DNA, 217 bp, Homo sapiens
atatctctgccaaggatagactgaagtgttgaaggtgtttatgtgccatacgtggcagttaggaactggtatcagggactcatatctctgaagcaagcactttagctacctgttcataggtaacagctcattgatagggaaagaaggtagaattaagcttatcaaaggctagaactgtgtctgattcatcttggagagcataatcttggcagcagat

SEQ ID NO: 212609 - DNA, 386 bp, Homo sapiens
caagaacaaacaaaacatccatctatcagagagaattttaaattagattacaatggagtaccttttcccttaacgattatgagggggacaccttctgacatcgtaagacactaagaacgtgttgctgagggtaaaaaggactcagaacagcaggtcatggggcaatgctgagccctgatgaagagcacagactccagataaaccgcctggattcaaacatggatccaccatttatgagcaaagtaaactaagttattaatttttatgcctgttgccttctcggttaaacgagggtaagaattgtcaacagcctcatgaaggagaattcaatgattattaatcacagttaattaatcactgatgatctatcaatcatcaacgtatag

SEQ ID NO: 212610 - DNA, 478 bp, Homo sapiens
acatggtctgtaatgttgaaggaataccaataactaatacggggcctggggtggaaccacaggtttacaactaaataccgggcccttgcctaaagcaggtgaagcctggtttgtcttagctataaagctgtctgtacacagtattttgcatttagatgctaatggtatgtttgaaatgatagcgtatgactgactttgttttttagtttttatttgagataattatagagtcacgagttgtaagaaacaatacagagagagtctctatgcctttcatccagttcccccgacaatagcacaatagctaacctaactatagtacaatatcttaaacaaatgacattgataaactcatcagccatattcatattttgccagttttacatgcacacctatttgtgagtggttttatgttttcaaactaatttgtggacctaaagcagtctatggattcaatacaacctctttcaaaatccca

SEQ ID NO: 212611 - DNA, 189 bp, Homo sapiens
aacttacgggatgcattagaagaagtgctcacagggaaattgatcgctgtgcatgcatacattaaagaaaaatgaaaacctcaatgtaataacctagtcatacaccttaaggaactaggaaaagaggagcaaattaaacctcaaaccagcacagggaagaaaataaagattagagtgtagagaagtaaa

SEQ ID NO: 212612 - DNA, 1160 bp, Homo sapiens
agagctctacagcaggtaaagcctgcgatgcaatctccctgtccctgagccacatgaatcagcaactttgatggtgtcacctctatccataatggttgaagctgttatgtggagtctctggcaagatacaaaagcaaaattacagcccgtaaggttctgaaatgccatgattctactgtcaccatgtgcagttgttcatgttgggcactgcacaagaacactacacctaaggaggtgctattcatatcacagacatctttactattttgaaaacaactttttgaaaattattatgtattgtgcatgctattgacggttgcaaaagtgatttacaatttattgcaactatgttccagcagatggcagtaaagtgtcttgttccaagagggttggtagctaccattctacttccatatactaaggagacattggttttgaaatggaaagacgtgttgattttatgtcatttaaaatagtctgtgcttctaaacaatgagctgctcttccacctgatatgcagaacattttgttaaagtccctaatggtgccagcacattgtctgtattcagtatttcatattgcagttcatattttcatctaattatttactctaccagactggaattgttgaattctatgtttaaatctacaagtcctggccaggcacagtggctcacgcctgtaatcccagcactttgggaggccaaggcgggtggatcacctgaggtcaggagttgaaaaccagagtgaccaacatggtgaaaccctgtctctactaaaaataccaaaaattagcccagtgaatgagccgggcgtggtggcagtcgcctgtaatcccagttacagaggctgaggcaggagaatcgcttgaacccgggaggcgaaggttgcagtgagccaagatttcgccattgcactccagcctgggtgacaagaacgaagctctgtcttaaataaataaataaatctacaagtcctttcacttggcacaaatcactgtataataatatccggtcaggtgcagtggctcacacatgtaatcccagcactttgggaggctgaggtgggcagatcacgaggtcaggagttcgagaccagcctgccaacgtggtgaaaccaagtctctactaaaaatgcaaaaattagccgggtgtagtggc

SEQ ID NO: 212613 - DNA, 469 bp, Homo sapiens
tttccagtgtacctaatattaggtaaagaaaatagttgatatatgactggatgtgaggtggccattttaacttgtaggtgacaggatttatctcttgatttcttcgttaattttaaaataaataaacaaaaaacaacataaggaagtttagatccttctttttaatttgtaacacttcaacttctagtattgctttctgtaggggagaatttttcagttgataacatgagttgatttcataagttatagtatttaaaactagagatgttttgtcacaaaaaagttgtccctttaatatatgatttagcacggcaactctttttaaagtaatatgtttaagagaaaaccatgaccttatgataaaaataatactaaaccaattattaataactacagtttgccgtcaaacgtcttagctaaataattaccttattagaacaaaggtattgaaagcacagcaccagaaaca

SEQ ID NO: 212614 - DNA, 570 bp, Homo sapiens
gaaaacattctggtaactgttagatcccttgttgtagctattcatatgttctgtgtggttaaacaaggttcacagtgggccacctggcctttggaacttggctgaagaggctgccttcagttcatcctccccacccccgttttcaaaacatgggtttccatgtgttcgttgtaaattaggaaacataaccatgttttgaggcttcatagaaaacaaacgtctggggtcacacaggttaaaggaggaaccaaattcagcactatcactgttctattcggcaggcaattctggggccttcctgtgtctcaggttctgtactagttgtttcaggactttgggataaacacaaactatccctgccctcagggggattaaggtcaggtgtacaaatgactctaatgcgaggcaaggctggattcagtgctggaagaggagggcatacctaacactacgggaattcaaagaggaaatgatcagaatgaggagggagagatgggtcattccgggagaagcttcagggaaaggcaacatttgaaatgagactttggagagtgagggaggtttgggcag

SEQ ID NO: 212615 - DNA, 398 bp, Homo sapiens
gcgtgattgatgacgcagaagtggccatctgtgcgtgagtagggatgataactgtgtgagtacttggagtcaccaaggaggtggagaaagatgtaacgtgagtgggatgtgtggtctggggccttcctgtgtctcaggttctgtactagttgtttcaggactttgggataaacacaaactatccctgccctcagggggattaaggtcaggtgtacaaatgactctaatgcgaggcaaggctggattcagtgctggaagaggagggcatacctaacactacgggaattcaaagaggaaatgatcagaatgaggagggagagatgggtcattccgggagaagcttcagggaaaggcaacatttgaaatgagactttggagagtgagggaggtttgggcag

SEQ ID NO: 212616 - DNA, 439 bp, Homo sapiens
tagattatccctgacggcttgaatgtttgcaagctaactgcagaattctctctcctgggcctgacagtttcagaatgctaaggcaagcaggggttgaatccagtgtcaagaggattacagagttctcatacattgctggtgggaatgtaaaatggtgccgctgttttggaaagcagtccagcagtttctcaaaatgctaaacatagaattacacagtaactctgagtaacatcccacttcaaggattgaaagagaattgaaagcatatgtctacacaaaaacgtgtacataaatgcccataggagcattattcataatagccaaaaagtggaaacaacctaaatgcccatcgatggacaaatggataaacaaaatgtggtatatgcatatgatggaatattattcagccaaacattcaagccgtcagggtaccgagctc

SEQ ID NO: 212617 - DNA, 443 bp, Homo sapiens
tagctgggcgtgatggtgggcgcctgtaatcccagctactagggaggctgaggcaggagaatcgtttaaactcaggaggcggaggggcggaggttgcagtgagctgagaccgcccccattgcactccagcctgggcaacaagagcaaaactccgtctcaaaaaaggaaaaaaggataacatggctgagtgcagtggctcacgccgaggcgtgaagagtgcttgagttcaggagtttgagaccaggctgagcaacatagcaagacctcgtctctactaaaaatcaaataaatgagctgggcgtggtggcgcgtgcctgtggtcacagctattccggaggctgaggtgggaagatcgcttgagcctgagaggtccaggctgcagtgggctgtggtcttgctactgcaatcctgcctgggcaacagggagacacccagtttccaca

SEQ ID NO: 212618 - DNA, 373 bp, Homo sapiens
attggttggacgaggaatccttggtagctgtcatgaggtgaatggtgacagcggtgcacgggaggcacaagaagggcagccaaagctatacttggggagggtgtgggaagcaagagaagaacattctgttaggggcagagaagaatcccacactcacaagagatgaccaggagtaaacctgcctgcctgccaaaagtaggcaagatttcatgagtcaaagcacaagaccatttctgctcaaagcacagcaaacaatattagcatcagcataatagtgctggttccccagcccatgcccatgggagatgtgctgtgatgggtctagatggtgcctgtgtgcacagccttgtagccgacgatcacagggcccagg

SEQ ID NO: 212619 - DNA, 799 bp, Homo sapiens
cacaccaagaactaaaacaggatcagccaaagataaaaccgaatcagtttgaaccctacagaggagcccagaatgatttctctttgtctcagaggcctgcctttctctctctgtctcagaggtttgcctccacctcccctgaaccttggcccagaagtttgccttctctctcttccttcccccttcttagtggcctctgaacccaagaatctgtcctggaagccaaatggaaattctacacagaagcccgtctaagtcttagcagcaatgttgtactcgttttcttctttaaaattaatgaatacacagccagaggtttattatgccacacacattgtgttcaccactcttcatgattaaaagtctcacttctggggtccaggacaacttcctaaattcatcaccgggaactgcattgcaacattgctgattctggccctatgattaattctacagcttttgaagaaacccaaactggacagacagttactgaatttttgtaatgtccgaggcttccaggaggagtgacacatatctctgctggatgagctcacagttccaatgagaagatacaagctgaaagattgcagcagaactgggaagtgaaagcacggagaggctgtgggacatggaggaggggcggtaagattgagaaagaggtaacagttggggtgactttggacctgagacctgggcaggcataagaagtctcactctctattccattcttggcaggggatgtttctttgtaccaggtagctttgcgcttgttttgttccataaaagtaaatctctgttc

SEQ ID NO: 212620 - DNA, 394 bp, Homo sapiens
acatgtgcaggatgtacaggttacataggtaaatggttgctgtggtggtttgctgcacctatcaactcatcaactaggtatgaagcccagcatgcattagctattttttctgatgctctccctctccctgcccccgacccaacaggcccctgtgtgtgttgttcccttcgtggtgtccatgtgttctcattaacaccaagtttcaataagcagaaaaacaagacctcaaattcctggtggggccaggcgtggtagcccatgcctgtaattccagcactctgggaggctgaggcgggaagatcaccggaggtcaggagttcgagaccagcctggccaatatggtgaaacccccatctctactaaaaatatgaaaattagctaggcatggtggcgg

SEQ ID NO: 212621 - DNA, 663 bp, Homo sapiens
gtcggtcccggcgcgtctccctctccactccctctctgccggagcccctcggcccttcgaagccccccgcggaggctgcagcgcccggagaagccactgagtcaatggggcgagggactggggcgggcgcgcagagcccccaggattgagacgcgcgcaagtgcggccactgcagcgccgcttggctgtttgttctcccgactgttcgcgaattacttacaaggcgcctaggcttctccgaagggtggacggctcgttccctctcgccttgtccgccctcagtctctccaccaccgcccggcacgctttgctgatctaaaatcagaacaattagagagtaatgattttttttggaatagcaactcctacagacactcagatctgccctcgcttcagcgcctcccagccctccttcccagcagccaggcgagagcgcgcagacccctaaaaagcaacttcagtgttaaccgggtctggatcctggaactttataaactaatccgtgtgtgtgtgtgtgtgtgtgtgtgtaaaccgaagagtaagtgcctattatttctgagtacttcggtgtcctaacgaagctttgctcctaaaggacaggatatattttaggagtctttctttccactgagttttttaaatgtttattttctcgagcgatca

SEQ ID NO: 212622 - DNA, 438 bp, Homo sapiens
ttttaaagaaaaaaatttgcaatcttgcagtttaatgcaaccatagtcttagcatttttgtctgtgttctcttttcaatctttgtttataaacatatatgtttctacatagagctgattgtaagaggtatagaattccacactttataaatgccttgttaatttattgttttccatgttgtcacatagacttcaggggtctcctctcaactgactgcaaattactcactgagttggtgccccattatgtcctcggtcatttcccctatcgttgagcatttacaacttttctaatgattgacttttaaatttcttgaaattattgagttaaagggagcagaattttaacaacttttgttatgtgtcactaaatcccttttcaaaagattgtactgatttacaatgccaattaaatgttttacaagtattattttccaaa

SEQ ID NO: 212623 - DNA, 583 bp, Homo sapiens
  misc_feature (535)..(535): n is a, c, g, or t
tcagtcccttgagagatgggagctgatgggaaggaggtagaaacttggtcctttagccaggaggctctgcaggcattcaggcctgatctaccatgtaaggtgatttctttctttttggaaagctcccatttcatggggtggacaggtccaaggactgctctggaccacttggtgatcacatgggccaaagtaggggtagaggaccccaaattgaatgtgtggaggggactctgaagcaggtgtgaatgccaggagaggtgggaggaaggacaagggcggtgcatcaagaccacagaagccggcccggccagccttcccacaaagttacttgaactgagctctccataagtacacatgcacacacacccaagaataaactggacaaatggcagcagaaagagaaagaacagaaaagagagctgatgaatacatccataatcagcactaacacagccctggaaagaaaagcaaaaagaaaaggcaagcgctgtggtgtgcagctcttattgtctaaggaccctgttttgaagctggncttgcagaaaggactgctattatcagatgaggaggtgggtcgaactaa

SEQ ID NO: 212624 - DNA, 337 bp, Homo sapiens
caaagtcagcatatgatgtctaaaattgataaaataggctgggtgccaccgtgcatgcctgcagtcccagcgctgtgggaggccaaggcaggtggattgcttgaacccaggagtttgagaccaacctgggcaacatggctaaacttcctctctacaaaaagtacaaaaaattagccagatgtggcggtgtgtgcccgtagttccaggtacttggaaggctaggatgggaggactgcttgagtccaggatgtggaggttgcagtgagccaagatcacaccactgtgctccatcctgggcaatggagtgagaccgtctcaaaaataaaataaaactggt

SEQ ID NO: 212625 - DNA, 168 bp, Homo sapiens
agtgtgagccatcgcaatctggcccttgtctatctttttaatctttctcatttgattcttataattctattagccaaagaaaaatattgttactattactatttatttatttatttatttgagacggagtctcgctctgtcgcccaggctggagtgcaatggcacgat

SEQ ID NO: 212626 - DNA, 622 bp, Homo sapiens
cagatgggatttgttagaagacagaaggaaagacagccataaattctggctttggggaaaactcatatccccatgaaaaggaagaacaatcacaaataaagtgagagtaatgtaatggagctcttttcactagggtataagtagctgccaatttgtaattcatctgttaaaaaaaatctagattataacaaactgctagcaaaatctgaggaaacataaattcttctgaagaatcataggaagagtagacattttatttataaccaatgatatttcagtatatattttctctcttttaaaaaatatttatcatactctgtatattatttctttttactgcctttattctctcctgtatattggattttgtgattatatttgagtgaataggagaaaacaatatataacacacagagaattaagaaaatgacatttctggggagtggggatatatatttgttgaataacagaacgagtgtaaaattttaacaacggaaagggttaaattaactctttgacatcttcactcaaccttttctcattgctgagttaatctgttgtaattgtagtattgtttttgtaatttaacaataaataagcctgctacatgtaaaaagaacca

SEQ ID NO: 212627 - DNA, 596 bp, Homo sapiens
ccctggattcaaagaaaggctgcaaaatgatcttatttctttcttttatccctgagagtacacatatctaactaatgaaaaccagggatggttttattaccatttagtttaggcatatcatacacatatggcaaagtttaattgcatttaacttttttttctggttgaataattatttaagagatttacaggtttcgatataggcctaaatttttaatggatgaattagaatagtatatataaaagtctaaaatagaatccttaatataaagaaaaattacagcaaggataccttttaaaaataacacggggaccaggcgtggtggctcatgcctgtaatcccagaactttgggaggccgaggcaggcagatcacctgaggtcaggagttcgagaccagcctgaccaacatggtgaaaccccgtctctattaaaaatacaaaaattagccgggcatcgtggtgagtgcctgtaatcctagctactcagggggctgaggcaggggaattgcttcaacccaggaagcggagattgcagtaagccgagatcgcaccaccgcactccagcctgggggacagagcaagagtctgtctcaaa

SEQ ID NO: 212628 - DNA, 389 bp, Homo sapiens
ataaaaggttagtcagagagaactagtctctttaaataggtatgtgaagagtgatagaggaagcgtaaggtgcagaagcaacagacccttccttacacagaatagtttaggctagtagaaatattcctctactaataagcctgtactacacctttctaatccaggatcccatgtactcttaaaattgctcaattttactccctcaagtaaaagtaaatcccctaaaaataaagatttgacatcatcagattgaattgtgagtattaaacatagcacacatacctgaaaatatcacataattttattgcatcctgattggaaaacactgttactataaaaactgctgcatgatatttgacattcgcacttagttgttatgataccgcgaa

SEQ ID NO: 212629 - DNA, 179 bp, Homo sapiens
ggtgacccatctacaaccccagctgagagtcagggtcagccttggctggaggcaggagtgcaaaagggttaaaaatcccccaaaatccccttgtgcagaaaaccaaccatgaacatacatggatgaggcgatgtgacagttaatgataggaactaaagaattattcttaggccgggtgc

SEQ ID NO: 212630 - DNA, 387 bp, Homo sapiens
ctctaatatcactctaaacaataaatctacttagtagaattcaagatttctgcaattcaatgtccttaaaaatatccaactaagggtgcgtaaagtatatttaagtcacttacattcttctttactgaatacattctctgtattttaaattaacagatttttctttcctatttgtaagtttatttctcaagatataacagaacctacaaatgtaaagagcttcaaaattttaacaactattttatcaaaatgattaatgtataagctaaaaagtcaagtaatcctaaaaaaaggttataataaaaaccagtgatttctacctgctccttctgactttcctcctcatcaaaagcactcacttttcacttattttggctgtttcttctg

SEQ ID NO: 212631 - DNA, 417 bp, Homo sapiens
tcccacatctcttctcttttatgtgaaatacagattatttggaaacttaaatttttatttatttaacaagcagatatatagcatttactatgtgctgtaactgttctaagcacttttaaatatttgaaagcaatatttagaacagtgcctgcacacagtaagcactatatgtgccaagtaattaaaagtttgaaacctccaaaacctccaaataatttgcatttcgtgccgctcctttcctatggagactctgaagaagactgtattgtcaatcttttaaacatttttggagacaagtgcttatgctgtggcccaggctggagtgcagtggtgcagtcatagctcactatcacctcaaactcctgggctcaggtgatcctcctgcctcagcctcttgagtagctgggactacaggtg

SEQ ID NO: 212632 - DNA, 109 bp, Homo sapiens
tcataaagtggtgtggtgctccttttaagctggcctggattgtttttcacaccattaagaacgcacattttttgaaagacgggcagggagggtgcttttctgttctagg

SEQ ID NO: 212633 - DNA, 408 bp, Homo sapiens
tgaaaacctgtctgtactaaaaatagaaaaattagctgggcgtggtggtgggtgtctgtagtcccagctacttgggaggctgaggcaggagaattacttgaacccaggaggctggaggttgcagtgagccaagattgcaccactgtactccagcctgggcgacagaacaagactccatttaaaaagaaaaatccaaactgacaatcattaacttttaacaagatagttatatccacttacatttattgtgcttactgatgcttttggatttgatagtgctgtcttattttatgttttcatttgttatgcttttttggtgttttccccctcttttttcctactgctttttgagtcgatagaggcttttcccctcattccatttttttcctctctactaatttagtagtt

SEQ ID NO: 212634 - DNA, 554 bp, Homo sapiens
aatggtatgctttaaatgaataaagtgtatgagatgtgaattagacttcaataaagttatttttaaaaatcactcagaggtcatgcagaaaaaaaggtatgagaacaacttacagaggggaaaaaaaaggtttcttctagctaatgtgctccaatagcaatgagcagaggtgttagtggtatttaggctctcagaattcacactatatactttcactttcaagagtaccatttttgggacaaggatgttttatgaagctgaaatgctgaaaatatcagtacctatgttcaccacttgtctaggtgaggctaaccaactgagctaacctctctgatctgagtggggcacatgaaaagagaaccatgttcttttctgcaggttagaaagaagtttaaaacagaagagcacaattccctaaatagaagaaaagcaaatcacagagaaagctgctaaaactacaaccagtcacttcgcatttgcaaggaaaggactgcattgttataagggtacaaagggctgtggcattctctaggggttctcacagaaacctatgg

SEQ ID NO: 212635 - DNA, 340 bp, Homo sapiens
ggactccaggctggtattggggagtgtctgcagaaaaagcatttgccctaggctagaagtcttcctgctaagaaagcaagcagggctttcaggccttgcccttccatgcctgcagtggcttctgttctcatatctgtactttccattggccccctattcccgccggccccctattcccacctcctcccccaccccccacccagattctgcccaggaaaatttgcattcagtcaaaattatgacagcgttcagctagaagtctttctcactgtggtacttccctagttccactgactgccttccccaaggaccactgtgagatgaaagtaaaaaaaaaaaa

SEQ ID NO: 212636 - DNA, 438 bp, Homo sapiens
aggataccccggggaggggcctttcctcaggccacgaggatcgcctggggggatgaactgtgtggtgcgtgctgagatgccaagtagcttttaaaatcggcttttacgagagataatttgggtcatatttttccccttgttggattaaggataaatggaaagatgttctgagcttctgcccatggcaaagcatggggaggtgcttttgttggtcaccaggtgtctttcctacagtgttggggtttttgagttgttgttaggttctgactgaaggtaaaaggttatgtttaataaatgtgagaaaatactatttgaagcctacttttgaaaactcactttttttttttaacctaggcattaatcctttggttgcgagctactagtctgatttttacttaccagattatctttctgtctgtcttactctctgggtatctt

SEQ ID NO: 212637 - DNA, 524 bp, Homo sapiens
cccatgaccttaacatttgtcttttagacacaatctttaatggttcttttccacaacatacatgcaccctttgtttgtttattattgttaattttttctatttgtttacagtattcatttgttcaagaagtttcaagaaagggcaattctaagttagtagagtagggactctcatattcctaaatgagactagaagctacaaaatgaaaagatctgcatgaacctaactggagaatgatgggaaggcgtctgggctgggaggaggctgggaggcctttaagactgtcgtcattggaagccagcgtgggagagaagggattacaactggcagtgctttcaggtccgacataagagagaacaccaaaaagtgttcttacctctgagctactagtagccttcagtgtctttttttgttgttttgttttgagacagagtctcactcttgttgcccaggcggaggttacagtgagctgagattgtgccactatactccagcctgggcgacagaactagacaccttctca

SEQ ID NO: 212638 - DNA, 477 bp, Homo sapiens
aaaggtcccgtctccaaataccattacactgggggtcagaacttcattgtatgaattttggggggacacattctttccatgagatggaatgaacttcaatagtatattttactggcctggcacagtggctcatgccggtaatcccagcactttgggaggctgaggtgggaggatcacgaggtcaagagatcgagaccatcctggccaacgtggtgaaatgcgtctctactgaaaatacaaaaattagctgggtgtggtggcacacgcctgtagtcccagctgcgccagaggctgaggcaggggaatcgcatgaacccgggaggtagaggttgcagtgagccgagatcatgtcactgcactgcagcctggtgacagagtgaggctccgtctcaaaaaaaaaagtatatttcactgaatttgatatatacaaagtaatttcagcctgagatcagtattaaaacgagacattttgcattc

SEQ ID NO: 212639 - DNA, 525 bp, Homo sapiens
taggtatgaggtgaaccacatgcttagggtgtatcctgagtttcattataaaacagaggaaacaagattgatggaaacactgatgccataagctacattagtaagaactgattatctccttaaaaagctgggtttctagagggaattctggatgttaagttcagccagtggatagctgcagccacaacgggcttggatttaccatcccactgcccagcagctttccaacagattacagatcatgttgtgagtaaagattgttttacttactcatttagtcttgtctctaaattcataggtaatttaaggttaactagtttttcatgattttcaggacaatgaaatatattaactacattatagcaagttacaaaaattagctgggggtggtagctcatgtctgtagtcccagctactcaggaggctgaggtgggaggactgctttgaccctaggaggtggagattgcagtgagccaatatcatggcactgcactccagcctgggcaacaaagcaaaactgtgtct

SEQ ID NO: 212640 - DNA, 516 bp, Homo sapiens
acttatatatattgtaaaacccaaagtctctcccctgattgctccctttacccaccccaatctgtggagtatctggtgacattaagaaaaaaaattaagaaaaaaagaaatagaggtcaggtcttaactatgttgcccaggctggtcttgaactcctcagctctagtgatcttcccactttggcctcccaaagtgcaaggattacaggtgagccactgtgctctttaatacatgtgttaaagggcaaaactacaacaaatttaaatctcacttggctttattgtgattttagagttgggcagtgtgcttcattccacaaaacagagttgagcagaagaggttggcttaatagaagagctgaggaaaggggaagcaaagaacaaagggcctattagttgtttcagagctacctttcttgtaaggcagggacagggagaagacagaacaatagaaaaataactgattagttaatatcaggttacttcaggctgcttttttttgtgtaagggttaaagc

SEQ ID NO: 212641 - DNA, 305 bp, Homo sapiens
catcccttcaagttccttcttctgtgtcatcattaactttctatgtgtggttttaatgtacttcaagtaatgtcttatacttattttctcatggctattgttccctttcagacttgataagtcctcaaggagagaatctatgtcttttaaaaaaatcttgatatttccttacagaggtcctggcacaaaatagatacccaatatatgtgcaactgaatagaaatttatgagggagtgataattatccgtgtcttcctttcagctatgactgtgtcccatgataaaagttttttggatgatgatca

SEQ ID NO: 212642 - DNA, 513 bp, Homo sapiens
tagggatactttgggcaatgtcaccctcatgtcactttgaacactggctgcatattagaatcacctggatagcttccaaaaataaaccaaaacaaaacaaaacaaaagcctattcctggatttcctctccaaaacccaattcagtcagaatcccttggagtagggcccagggcatcagcatttttgcaaagctctcccaggtcattgtagagtgcagccaggattgagaaccactgccctagagaaattctttggcccatgcaccaggagacaagtattcaaagcagcagtacttctaagagacaatccaaatgtccattaacaagagcgtaaatgaatgagctgtgcgtccaagcagtggaacactgcacagcagtgatgagctatagctgtgcacttcaacatggaagaatcacgaagcaacagaagccacaaaagcaagtcacagaagtgtgtgtgtgtgtgtgtgtgtgtgagaaatatttcatttacataaagttcaaaaacatgcca

SEQ ID NO: 212643 - DNA, 437 bp, Homo sapiens
caaccccacatggtaatataggtcaaaagtttcagggaggtaatgctgacagaattgaccccaccaatgaaagatggaaaatggtacatagatatttcaatttcttcatctcattggaaggacaattctggagtatattttacaataatttttcagggatccacagtgtgataaagtttcaactgcccatggtggtgatatgttcattaattcatcctttattagctttttcccttccttattgcctttcttcacttctgccacaggctcccaaacatctcccaaagaaagtatttacacccaaatccttgtctctgggttagcttttatgaaaacaaaccaaaggtaatactcaagggaacatttcatccaatatcccccaatctgcttcaccaacccacctctactccagcagcaactactcttgctcctacatc

SEQ ID NO: 212644 - DNA, 439 bp, Homo sapiens
tttgatcttctttcatttcttttatcaacattttgtatttttccgcatacaacacatgtacttgttttgttagatttgcacctaaatatttcatttttggatgatttaaaatactattatatttttaaattttgttatccaagtgttcattgctagaatatagaaatatacagtcatgagttgcacagtgatgttttggtcaatggtggaccgcatatacaatggtggtcctgtaagattataatgaagctgaaaaattcctggtgtccagtgacgctgtagccatcatcatgtcagtgcattattcatgtgtttgtggtgacactgatgtaaacaaatctactgtactgccagtcttgtaaaagtatagcacatagaattacgtataatacataatacctggtaatgataataaaggactatgttactggcttatgta

SEQ ID NO: 212645 - DNA, 429 bp, Homo sapiens
aggggctcgatcccttgacttcctcgcggcaccatgaacagccgccattgtaaactgcttcctctgtgatatggtttggatatttgtccccaccaaacctcatgttgaaatgtgatccccagcattggaggtgaggcctggtgggaggtattaggatcatcagggcagacccctcatgaatggcttggtgccatcctcttggtgatgaatgatttgtcactctgttagttcacacgagagctgactgttgaaaagagtgttgcacccctcctctctctctttgtctccctttctcacctctgctccccctttgccttccaccatgattaaaagcttcctgagggcttccccagaagtagatgctattgccactcctctcgtacagcccgcagaaccatgagccaaataaatctctttgctttataaatt

SEQ ID NO: 212646 - DNA, 561 bp, Homo sapiens
ccatcagcatagtgctgggatggccagtctctgactgaaaaagcccctctcagagcaagcaacagtgtaatccatgccctttgctggaggttctcacaacaaggcctgcttagcaacaacgctcatatgattttgatttgaatggcaaactcacaagaggctactcctgctaaggctgggccatcttatagccttcatttcctgtcttgaattaatctttcaccccaagacacatcataaaacagaataacggcaactcaacagtgttaagtcactaaatacaaatcaaaacagcctgcacataagaagcctcaacctctccatgctgttgcacccaggttttattaggccttgataaacaatgaggtaggagctgtgggggccctgctaacaccttagacattcaagtgcagggtggaggagaaaagaggaaggcacggtggctgaacccacatgaggaggcaacatggaactgcagagagagccacttgctgggaatcaggagacttagcttctgtctcacttctaccaccagcttgcgctatgggtgtgcttgagtca

SEQ ID NO: 212647 - DNA, 669 bp, Homo sapiens
ttttggaaaatctccagaggatgcagaggtacagagcagtggttctcaagctttgggagctgctagaatcttctgggcaggcaagtgggagaaggaaggactggttcaaaatgcagattcctggccccagccccagagaccctaacttgaaatgtccagggtggggcctgagagtctgtacttttgtgccagcttcttggacaacactgaagcagatgtggtgtggatcattcaagaaccctatctggaagctcagaggatcagacccttccacctgaagacaaacccaacagccactcagtgtatttattttatgggggtatatcacagggcatgtattatggaccgaatgtttctgtctccctaaaattcatgttaaagctgtaacccccaatgtgatgtttttggaaatgggaacatttgggaagtaattaggtttagatgaagtcatgggggccaggttcccatgatgggatccgtgttcttctaagaagatgaagagaccagggcaatgtgcactctctctctctctctctttctctctctctctctctctcttcctatccctctctctctctcagtctctctctctctgccataggacacagtaagaaggtggacacctgcaagacaggaagagagccctcactggggaactgagtctgctgg

SEQ ID NO: 212648 - DNA, 281 bp, Homo sapiens
attttaagaatcaccatttacgtcatcctatttggggagaagaatctgtccattctttttatcaatccgtatttttatctaaaagaaacctccagaggatgaaatacaatcactagactttcttgccttgaatatctctgcatttagtattttgtccttgtctcaaataatctgctttggaaggtgacacttaaccccaactggccacacagctcctcactgttgcattttgaaagtttggtctgaaagaaaatattaataaaagagacatgatctccagt

SEQ ID NO: 212649 - DNA, 169 bp, Homo sapiens
tgtcctggaatgtttttttttctttctttttttgagacagggtgtcactcggtcacccatacttgcatgcagtgacacgatcttggcttaacgcaacctctgcctcccaggcccaaatatccaccccagtcagttcttaaatggctgagaccacagatgcacaccacca

SEQ ID NO: 212650 - DNA, 240 bp, Homo sapiens
ggtgcacggtgtcccggctggacctgcgtgcatcatgatggtgagcttggccagagtcaccaggaaagtggcactcctttgtccccagcaaggcgggctgtgaggatggccagagccggctctgcaccatttggggacaagccggagcagagatcccgagagctgactcccgcgatgcagccgtgctgggagagaggtgcaccctgcattcctcaattccgtggaccttactaccttcct

SEQ ID NO: 212651 - DNA, 400 bp, Homo sapiens
catatttcaagaactagatgtgtttcaaagcacataatgaaacttcagcaaaaatgagattaagagtttaggctccaataatattgctgcgattttatttctgtcaaagttttgttatttttgctgtattgtttgcttttcttcaatgttttgtaagccccggttctttgatgaactcctaataagctgtgcttaaaactatgacattgacctttctccagaaacaggtttcagaattgtctgtttttcatgttctctccctgccttttctcttgtaatcaaatcagctattcgggaggctgaggcaggacaatcacttgagcctgtgaggcagaggttgtcgtgagccaagatgctccactgcactccagtctgcgtgacagagtgagatcctgtttca

SEQ ID NO: 212652 - DNA, 473 bp, Homo sapiens
gagacaggactctacaatactactttattgtcggttatcttcacctagagatgatttaaataggaggaacacaatttcttcctagccaatcttaaatggaaaaatgcaaaaattcttccacataacagtcatatcatgaaatgctaattttcccagtctaaaccccgaagctttttgttgataccatgttggctattctatttattctacccatatatgtaaaagttgccaggtgtactattaaccacatctagcattcaatcagcttacagtgaatactgagagaaccatttttctctgaagaagtgtcttgagaaaaatggatcaggaatcactgaacatcattatccaatcctttctcagaattttactattttgcttctctagttgacatgttattgctagttattctgacactcaactattagatttccatgttcctgatgatctactaggatcaaactctgtggtgc

SEQ ID NO: 212653 - DNA, 210 bp, Homo sapiens
cttgctcattattatatcaactttcagagtactcctagcagagggttgggcatacagcagtgctcaatgaatgcatgttaatcttcctcttaggatagttcctcattgcctatttgaagggaaccactttttcttatcttgtaacctggagtagtgtgcttgggaagccaccagttagttaatgtaggagctgacccttggccttggcta

SEQ ID NO: 212654 - DNA, 557 bp, Homo sapiens
gcctgcggttactctagaggaccccgcgacctcttggttgacaacatcttgattgttctgaaaacaaccctttttgacactaaattctagtttgatactcttgtttggaatcagataagagaaaaaacgggactttgtggtttaaatattgaataaattatatagtatgctacatatggcatgttctcaaagtagataatctgggataacaaatatattaatacccactttaagatttatttaaattgacatttccttagttatattagaataattttagagcagaggtcagcacactgtttatgtaaaggattaagggttagataataaatattttaggcatgtactgaagtctgctgttaggaagcagccatggatagtatgtaaatgaataagcacggctgtgttccagtaatgttttatttatgatacattgaagtttgtatgattttcacagtcgcgttgtgtccccctccggcccccccaaccatttagaaatgtaaaaattattcttagcttatgggccatacgaaagcaggtaggatttggcccacggg

SEQ ID NO: 212655 - DNA, 550 bp, Homo sapiens
gctttcctatcttgcctcagcttttctccctcttaaggaagaaaaggccatgcctccatacctaagaacaatcccatctaccagggtcagtagggagattttccacctttacctccctgtgggctgcatgtcagctttatttttaaaataaaagctctatccagctcatgtgcattgagaacttgcttcaaggatcatatgtccactgtttctcatctctgatttctgcacttgatggtatttcttagggctgtgtcctctgcccaattctctcttcattacacaaactcttcctagatgtcttacctgttccatgacttcaacaagacatgaatatatccccacttctgaacttcaagtccttatgcctgactacttttcctacctgttttctacctacctcaacattataggttgatgctgaaaatggtctactcctatttggtaaatagctactccaatttggtaaacatcatactgtttgcccagatcagaaacctgagagtcatttggaatccacccctcaccatccttagcctttacacccaat

SEQ ID NO: 212656 - DNA, 201 bp, Homo sapiens
aatttcttaatctcaagttcaggtagttttttatttagctatctgagcttctcaagtcttgaggcaaatgctaaaaaggtagttttctaaacagctagaggaatttcagacaaaccccatcaaattcataaaaataggtatttgccagaatgctacataggatggttatcaagccaaatgaaagaggttccaccgttgtca

SEQ ID NO: 212657 - DNA, 349 bp, Homo sapiens
cattaggtggtgcggagcagtgtaggtatccacatgcaggaggcagggagccacagggtccagagcagggtgagaaggtcactcattcacatgcaggaggcagaggcgtggtgcaggctgatgaagtcagaatgtggcgaaaagggcattcattcccaccaagggcagatctggtacaggatgtcagagctgtacgtcctctaggggtgggttgggggtatatgcagaagaggagacagcaagaaaagaccagttacttacagggagttgatctaatcagcagatatattaaggatactgggtgctaggttttttttgttatcttagaagtcaattacaaaagttgaaa

SEQ ID NO: 212658 - DNA, 412 bp, Homo sapiens
ctataaatatgaccccagttttagttatggcttatcttatattcttagctgatttttgatggtagttttatcttgtctaagtgagtagtcatgaagatagtcttattttcaacatgggtttaatgatgaatatatatttccttttgtgagagaaacagttttgtgatttgaaggtaattttcaaaaagattaataattctggatttttttcagtttttttttttaaacattgttttaaaaacacgtaacataacatttaccatcttaaatttattgaagtgtatatttcagggccaggcatggttgtggctctcttctgtaatcccaggattttgggaggccaagacaggaggattcctggagcccagaagtttgagaccagcctggggaacatatggagacccctttctat

SEQ ID NO: 212659 - DNA, 351 bp, Homo sapiens
tacacatacctatctgcatacatgcatgtatacacataggtatatctatatacacacgtacacatatatatgtgtataaatatatatatatatatatacacatataattatgtatgtccgattctgtttctcaggagaaccccaacacagtgactaaggactgatgtttcatatacctaactctgtgctcttgcttgttttatttaaaatattttaaaatattttaatatattttaaaagcatgagagagaaatttttcagaccatatttctcatacttttcaaatataaaatacatttacttatttccagatttgtggatgaaagaactggtcaaatacttgcatccaag

SEQ ID NO: 212660 - DNA, 606 bp, Homo sapiens
atacaggttttgtagctcttttccaaacaaaaatagattgcatggatctgaggtacgatattttgtgcgtaacttaagaattttattgggggagggagaaagggatatgaaaagtcttaacttatactggtatatctgctcaccattgtgaaagtaataaaattttatggaataaggtttaaaaggcagctaaaaagataaacgtttcagatcgcatctcacccctgggttctggggaaagtaaaggaggcagctagatgctgttctgacaataagattcccacccctgcactcactttagacttgcttctcccagctttcttaatctcagcatctttgagagtttccacatctgtggcaatgcatgtctacacacagggaccaaggtccttctcactggtgaaaacatggcagaggtggcagctaggaggggtgagtctgtagcaacctttgcaatgaatttactcgactcaactgaagaagggatctcagcatgaagctgatgctacgctaagaaggtctatatctacggaagctgctgcgtgtaggctgacaaggctggagggtgcgttttctgcaggagagctgctcagtttgaggagtgcc

SEQ ID NO: 212661 - DNA, 409 bp, Homo sapiens
cggtgaggccggactgaaactagtgagtgcctccttcagtggtgcctcctttcttccctctctccctggtcctggggaggggccacagcagagcttctgtaactgtctctaattcaagacctggtcctgagctgctggtggccaccctggcttctggtcaggatcagcgttggcagggctgtcaccagccctgtccatagggcagctctgtctccctcacgtggcagtgaccacttccagcctggcacccaggcctcccacctgcagcaggacacggggcatggaatccacaggcaggggtgctatcagtctctctcccccaatcgccagccccgccgcgcctctcccactgggacatttctcttttctgcttgtttgccactgggaatgtggctgtgggcccctcctc

SEQ ID NO: 212662 - DNA, 457 bp, Homo sapiens
tatctccaaacaagttcctgtcattttcacatacacatcaaagacaggatattttcttaaaggattaccatgtccttacttttaaaacatttatgctgtaccaggaagaaactgctgcaaaaaggccaaactgtttttttggtttaattactaaagatgaacatttttactttagcatcaagattggtaaaccgcctcctaaatacctacatttctgtaagtcttgaaggattgtaagcactaatggcatgcatgtctgatttatatattacaaaataaaaattaattttcaaagaggttgactcttaactagtttgcttagccagttaataccatgccttgagtcagagatcagacagagtcaccttatagacaagctattgtcatagagaaatctggttaacaatccattgaaactgatacacacatttagaagatatatcaaagacagagtaaa

SEQ ID NO: 212663 - DNA, 305 bp, Homo sapiens
tgtttcccaggatggtctcaaactcctgagatcaagtgatcgttccaccgtggcctcccaaactgttgggactacaggcatagccatcacacctggacctttcttctttttaaatgtaggctcttacagctgtaaatttatttctgagcactgatttggctgcatctcatgaatcttggtatgttgtgttttcattttcattaacctcacagtatcttccaatttccctagtgagtttttccttaacccattggttgtttaagagcacgttgtttactttccacgtatttgctacttttccagtt

SEQ ID NO: 212664 - DNA, 224 bp, Homo sapiens
cggtatatataggatttattattatttttggttttaggtatccattttaggttttaggtatccactggggatcttggaatgttttccctgcagataagggggggactactgtacattactttctccatgtaaatattgcccatgtaaatactgctgagaccagtagtatattatgattctatttactttcttatatgctttgttttccttctcaagttaattgc

SEQ ID NO: 212665 - DNA, 1043 bp, Homo sapiens
tgcggtggctcaggcctgtaatcccagcactttgggaggccaaggcggacagatcatctgagatcaggagtttgagaccagcctggccaacatgatgaaaccccgtctctactaaaaatacaaaaaattagctgggcatggtggcaggtgcctgtaatcctagctactcaggaggctgaggcaggaaaattgcttgaatctgggaggcgaaggttgcagtgagttgagatcgcaccattgcactccagcctgggcaactagaacaaaattccatctcaaaaaatatatatataaatacataaaataaaatggtggattttatgatatgtgaattagatttcaatttttaattttattttatttttaaatagagacagggtctcgctattttgcccaggctggttatgaactcctgggctcaagcaatcctcccgcctcagcctcccaaattcctggaattataggcacgagccaccaggcccagcctggatttcaattttaaacagagtcatttgaaacctatcccttaacacaagtatgagcaaattatgtcttaatttaataacctgttttttaaagaaaaagtcaaatggtaagggatcaaaaagaaaatctcaacatttatgttataagagaaggacatttcattaaaatgtccttctcttctcttcctcagataattcacagtagaaagaataggcagatggttgctaagccttaggcagaatcattcctttgcctcaacacttgggcaaaataacatactaatggcccccactaaggctgttaagctgaggcaaagactggccagatgttaaccaaaacagtttcctcttttgcttgggcaaatagctaggctatccaccccagcccctgcaggtagcctctgactgacttatagccactgaagtagtagtaaaagtgatgtgtgctactcctaggcctggtccagtaaaaaccctccacacacgatgctccatgccctttacccttcctccaacttaatgcaggtaagacaaacttagaagctataaagggggaaa

SEQ ID NO: 212666 - DNA, 715 bp, Homo sapiens
tgcggtggctcaggcctgtaatcccagcactttgggaggccaaggcggacagatcatctgagatcaggagtttgagaccagcctggccaacatgatgaaaccccgtctctactaaaaatacaaaaaattagctgggcatggtggcaggtgcctgtaatcctagctactcaggaggctgagtcatttgaaacctatcccttaacacaagtatgagcaaattatgtcttaatttaataacctgttttttaaagaaaaagtcaaatggtaagggatcaaaaagaaaatctcaacatttatgttataagagaaggacatttcattaaaatgtccttctcttctcttcctcagataattcacagtagaaagaataggcagatggttgctaagccttaggcagaatcattcctttgcctcaacacttgggcaaaataacatactaatggcccccactaaggctgttaagctgaggcaaagactggccagatgttaaccaaaacagtttcctcttttgcttgggcaaatagctaggctatccaccccagcccctgcaggtagcctctgactgacttatagccactgaagtagtagtaaaagtgatgtgtgctactcctaggcctggtccagtaaaaaccctccacacacgatgctccatgccctttacccttcctccaacttaatgcaggtaagacaaacttagaagctataaagggggaaa

SEQ ID NO: 212667 - DNA, 562 bp, Homo sapiens
cccaggtataagttgcttaccaagatgaataatgagggttctttacagcttgtaaaatacttttttaaaacatcatcacatttggtcctccttaaaaaaaacccagtgggggtggttatcgtgcttacctttattttttagatgaaaaaaaaaactgaggcttggagaggatcagcgacttgtctaaggtgatagacttggaggcagagatgagaggaaggcttctgactccctcttatgccatgttcccagagggagtgcccaaaaacatgctgtctcagcaggaagcagccactacccaaaagcagaatgggaggaaaggaacaggggccacatttggtccttactagccagtgcagaaatgatggtactggaaggagatatttagagagtggcccttctgtcacctgatccaaaggccaggaattgaaggagctatgtcctagagcagcagagttctgttaatttgttgtctgtgccttctgtataatatcactttgtgcccctggatatgctgttttctccagtgagtctagggaaggaactctgagggatcatttca

SEQ ID NO: 212668 - DNA, 512 bp, Homo sapiens
aggacatattggccttttgctatccttcctgctatgcctgaaaccgtttcctcttctctttccctggccaatggtaaatgagcttggaaattcagcatcttggggagcagcagcaagagggtgtatggatcagagcagagacgtgaaaggaggccacctggggtagaagcaagcaggggcgtcttcaggcatgtagagacacagttacctgcttcccctttagagccaggctttccttaaagaccttcactctggtattcctgctgtctgtgttgtccagagagcgagcacggtagtgcagttcctgtgtgagttctgtcttcacagactcctcatcacagactcctttgatgatgtcattactatctaaaaccactgcagggaagccatctggagactgggcatcctgagagattttcctagactactaggtagatacatgctgaaatctcccccaaagcaacccataactaaataaaaactttaaaactttaaaatctccctcatcctgc

SEQ ID NO: 212669 - DNA, 483 bp, Homo sapiens
ctgccacttgcttgtgacactttgtgatgatcatggggtattttcctattggaatataggcactggtagaggagctacatggccacaggagttttgcacagcctgagtaggccatagtctaaagtaaaaggtggagaccactgacctgatgtgaaaactggaaaagacctaagattgatttgcctccatttagatgcaggggtgggctgggatgcctgtcccattctccattcctatgggattgtggaatattggtagtgcttctgggacaaagctcagaaggcgtacctgctatcactaactttttagaatggctaaatgtgaatttaggtataaagatttttttatatatatcttggtttatggcattttccatgcataattgtaatcaatgtacagaatttcaaaaatacctcttctgatttaagattatagtttattttaaccatcatttcagaaaataataaactaagttgcatcccg

SEQ ID NO: 212670 - DNA, 517 bp, Homo sapiens
tgagccccgagggcatggccctgtgatgtcacaaggtggcgtgacagccgggacgaaccccgacccccagcgcggcatccttcccgcggccagcgaccaccgcctcccgggaaggtggctgaccacagccgcaagccgctgcgcgcccggcaagccgaatggaaggacggcgcgggcaaacgaacgcccagtgaggtccagagaagagagggaccttccgagggtcttctagtcgatctcggacaggcttttgagtgccttttaagcattccaaaattttcaggagacaacagtaatttacaaaatagagtagaattaaaaggggggaaaggggagacttttcagagtgggcagagaggctgagaaatgaacttagtaaaaggcaaaccaaagcaaccgcaggtctcgtgtcgttctctggatctgcgcagtccagcagggtgagccgctacccacagactcgcagggcccatgatcgcttgaaatgtggcttgtccaaattgacatgtgctgtaaa

SEQ ID NO: 212671 - DNA, 258 bp, Homo sapiens
gtctgatcatcaggaacaatcagacatatggagaatggggaacatcctaaaagacttcgaaaaaagtcaacatcatgacaaacgaaacaagaaggtagagtgaccatgtcagattaaaagaggccaggcacggtggctcatgtctgtaatcccagcacttcgggaggtcaagatgggtggatcacctgaggccaggagttcgagaccagcctggcaaacatggtgaaatcctgtctctactaaaaatacaaatgttag

SEQ ID NO: 212672 - DNA, 534 bp, Homo sapiens
tctctcctttatctgctggaattctacagctaaacttcaactcaggtgcttataaatattcatatctatttgctacttttaattggttttcatccaattttattttttattttcctattttatattgtatgtacagagattatgagattacgtatagctattatgtcaattttttaaaggaggcaaactgtaaatgctaaatggattcaagcacagtatatggtacacagtttaatggtatatagtacacagtatatggtacacatatggtacacagcttaatgaatacttttttggataaagaaatgaatagatggtagaatgaatgagacagtaaaaagctaaaattaatgataatgaagtaactatcatgaggaatctgtgtccctaaaaacatgtaaataccatgattttaaaatgtacagaccagtaaacttgctcacaatacccacaaaactttaaaaagtcacttagaaagatggtttatgaacaattagaatacagtagcgatgaatggcaggcagcataggccct

SEQ ID NO: 212673 - DNA, 227 bp, Homo sapiens
gaaaggaagtctggggcatctagtcgtgtgatgagaggatgcctgcctttgaaactgagcacgtctgtgggtctttgaatccttttctctgaacaggtcgtagttgggcagatggcacagccagcatgcctccatgacttgccaaccacatttctcatggacccctttgttggacctgaatgtgttcaaatattcggggcttctgtagtcaccctttcatttaatat

SEQ ID NO: 212674 - DNA, 335 bp, Homo sapiens
ggctgtgtagaagcatcctgccctgagttccacagttgggaggaaatgcattctgctaacaactacatgagcttggaagaggaaactgagcctcagatgaaaccagctctggctgactccttgactgcagctttgtaagatcctgagcacagcacacattgaagctgaggctggacagtgggtgttgttttaagccactaagtttgtgataatttgatacctagcagcagaaaactaatacacctcccttttgcaagatgtatcccatctaccctctctgtcccttttcgccactttgtttttcttcatagcccatatacctttcatatttcaaa

SEQ ID NO: 212675 - DNA, 304 bp, Homo sapiens
tcgagctcttacccatattgcctggacgaactcaaacagagagatattctacaaaacaattagagtatatatttccaagatatcaagatcatgaaaaacaaagtaggttaagcaattgtttcagattaaaggagactaaagagacatgacaactctatttaacatgaattcacagactgaaccatgggtctgattgttttctgtaaaggacattattaagaagaaatataaacaaggtttacagattagataatagtattatactgacattaatttcctaattacgatcactgtactgtggcca

SEQ ID NO: 212676 - DNA, 113 bp, Homo sapiens
ctaagcctcgaacctctctctgccactggctgcttcgtccctgtgctggttctcctcctaacctccaggtgggctctctattctttccccttccttctctctttttttttttt

SEQ ID NO: 212677 - DNA, 494 bp, Homo sapiens
ggaaaaaatgatttaaacacccaaggacaaagagaatgggaatagacaggaaaagagctcacatcttcagaaaatggaaagcaccacagagaacatataaaagtaaataaaagaaaatggagaccgtatgtttcaaaatcagagagaggctgaaagcttagaagcataaggtttgagaacagtgaggctaaaaatatgagattaattaaaagtttgcttagaaggcaaatcacaccttaactctcccctccactaatgtaggaactctaggtaagagagtgaaaaactcttctctggataacttctgggaaaagatctctctatataacgatatttgagagttccccaaccaaatagtaaccttccgccttccacctaagacttttaaataagtctgctaatctgcaagctctgtgcagtcctacagcactctaatcagctttttaatgtttcattcttcactctctgaatggacaactaaggatttccaaaat

SEQ ID NO: 212678 - DNA, 417 bp, Homo sapiens
ttaattgaaagtgagagacatgtaactcacctttcacttgacactcgccttcacttagaggccattgtaaagttattaattggcctaatttcaatattgttgagtctcattgaatagggaggtccaaggagaggagagagatgggggaatagccagtcagtggagcaatcagaacacacacaacatttttgaagttcaccatcttatatgggcaccattcatactgtcccaaaacaattactcaaagatcactcattgctggtcactctaatagatatgatgatgatgaaaatgtttgagatattgcaagaattgccaaaatgtgacacagagacactaagtaagcatatgctcttgaaaaaatggtcccagtagacttgctcagtgcagggttgccataaaccttcaatttgtaaa

SEQ ID NO: 212679 - DNA, 270 bp, Homo sapiens
agagtggtgccttgcagcattacagataggtgcttcagaactgtttccctcttcatacaaattcagctcaaatgtgtgatactgattctggccagtttatgaatgatgtgtgttttgggaatatctcttaatggtttatagaatggacacttaatatgtcatcaattctacacttattttggtcctcatatgtctgctaaatcttgcagttttagtttcttttcttttttttttttttgagacagagtctagatctgttgcccaggctgg

SEQ ID NO: 212680 - DNA, 426 bp, Homo sapiens
aaggcatcctgtgaggctgtggataacagaagctttacaggcaacaaaaatctgtgtccagaatgtgaaccttttcctgttaggacaagtttctgcctccttcatggctcactgaatggcacggaagttgctatgatgtcgtgctggtggaacctgtgggaaatctgccctctagagtcctgggaaaaggcattcatggagaggtatctcaccggagacactgcagcacaactgtgatgtaagagggaggggaatgctgggagaagctcccacagagtgctgctgacccaccaggcaatggagaagctgcaagggctgcccatgcctaccaagtccacatgctggcccaggaagcaacacccttcctcttgccctgtctctcgagctccctcttctgacaaagcctcagtaccagctggctaagga

SEQ ID NO: 212681 - DNA, 509 bp, Homo sapiens
atgcacatcaccgacggggctgctgcagacattcaagggagacgcgtatctgaaaggcacttaataaagtgtacagtgtctgttactctcaaccgcctcacgctagcaccactcttccaaggcagtcaccacaactacatttcagtgtaatcatggttctggtaaaacttaatctcagccattactaataataagggatcttcaggatgagttattttcttcaatttacagaaaatatgaacccttaatttgaacgcactccacttaaccaattactttttattctgttgaacttaattataatgggaaaaatgccttattttgtaatgatggaaataagttaattggattcctgaaaccagtcccaccaaacagagctgcttggacgtatacacccaaaccaggaaaacagcaaaacccaccactagaaaaagaatctaattcaaatttagtttaatttggtcacaaattaattcaaagagcaacattaattactgccactttttcag

SEQ ID NO: 212682 - DNA, 371 bp, Homo sapiens
gcacataacagtcggcctctgtacccacaggttccatatccatggatcaaaaatatttaggaaaaaagccaggtgacatggctcacttctgtaatcccagctccttgggaggccaaggcagggagatcacttgaggtcacgagttcgagaccagcctgaatactaattatatacttcattttaatcaaactcaatttgtgaaatagctggatttaggatttgcttaatgaaagagatatgacgttcctttaaaagccagcttttctactagaatcaacattatttgaattacatgcaattatatgagatcatatcaatgcataggaagctagacatgtattagattgtggttaagggcatacgctttggag

SEQ ID NO: 212683 - DNA, 322 bp, Homo sapiens
agggcatggaaaatccattctgtttttcagattaagccacagtctgaggcaggcactctgaccctggcctcagggagagtgatcccctcagtgttcctgcccttcctgttcgtcctgtatttctggctacagattttgttcctgcctctctcccaaaagtagtctgttttctaattttactcccttgtcccaactgcaatagattttcttcagtgtcctaaggactgcagtgtttgttttccttcccctaacaagatgaagatttttggccaggtgcggtggctcacgcctgtaatcccagcattttggaaggctgaggtga

SEQ ID NO: 212684 - DNA, 699 bp, Homo sapiens
tgcaattaagtgatggaatatacagataatagagaaactgaagttttttatcactctttcttcaagtgagttcaaccataaccgaaagcaattagagttataatagcatttgaggctcttgctcatccacagggcagacggcagctagactgagtgatgaagctgctgtcactcaggcagatgctagagtgacacccctggacaaaagatcccaagtttttgtttttgtttttgcaatggagttgcctcttaaagattttgcagcttgctccttttatcgtggcattacatgataaaaataatttggagtgtccttttattgggatacacaaagagatttctctcaaaatggcttagagtacatcagagttttattctgtttaacctcatcatgttgcttaatgggaggtggaggtgggaattactgtatctattttattgctcagcagtaccagacttcaggtgctaagtgacttgtctccagtcacctgggcccattactcagtgcagatctgtggccaaaaaaaaaaaaaaaaaaaaaaaaaaaaaaaatcccccaaatttgatctttcctgttaaccacaaagtttgtaatgccaaaaagaaagactttttaaaatataagacattatttgttaaaagcccatttgattccttgcctttagtagtactttttgaaatatttatgaatgaaaggat

SEQ ID NO: 212685 - DNA, 477 bp, Homo sapiens
tgagccaccgcacccagccatactttctcttctaaagatattcttacttttatagttaaaaggaacttaccaggggccaggcacggtggctcatgtctgtaatcattttgaatggtacttgatattcacatgacgtcgtgttgatgttagcttagatcaaggcagtgcttgcccggtttcaccactatacagttactcttttcctctttccgtactctctttttttgcaagtgaatagctatgtccagtgcactctcaatgggggagcaaggactaagctctacctcctggaagagatagtgtctacatctgttactgggaattcttccgtaaggaaactttatctcctattctcttatttatttaatcatttatttatatgagtatggcctcatgtatgtttattttatactttgggttataatgcagtactacattacttgttctgttgcttggattgttccagctttggccatt

SEQ ID NO: 212686 - DNA, 322 bp, Homo sapiens
aggtataatacaacagtaaggactcaatatcagagagggcagaaccattctgaagtgatctgaagatcaccagctgcttaaaacttcctagaggcattggccaattctgaatcagggcagagaacaagctcaatgcaagccgaggctatgattaaggaaaaaaaaaatcaacaaagctgttagttgtcatggaaagctgactgacaagttataaacttgagaggattctaacacatggctgagttctgggactactcaagaggtcaaggagccagatcaaaagggaaaacaaaattttctacagatctgtgaatattaagga

SEQ ID NO: 212687 - DNA, 418 bp, Homo sapiens
ttcttagctctgggtttcttagctttggtaccatggacgtttggggctggatccccgtctgtggtggggccgtcctgggcactgcaggatatagagcagcatccctggccgccctacccaggatgccgggactactcccatgccccagctgtgacaaccagaaatgtctctataggttgccaagggtcccctggttctcctaggactgtcttggtcttagcactgaaagccccacttgcagggaagcccctcggtcctgggcaagcagggacagctggtcaccctccctggggagtgacattgccccctgccttgctccattgaaaaccactgctctaggccgagcatggtggctcacacctgtaatccaaacactttgggaggccgaggcgggtggatcatctgaggtcaggagttc

SEQ ID NO: 212688 - DNA, 91 bp, Homo sapiens
tgataaggcaaaagtggcaaagaaagaacaaaaccgagaaatactatgagggaaaaataaatgaaactttgaccacatgtgggaattgcaa

SEQ ID NO: 212689 - DNA, 124 bp, Homo sapiens
cataagtggacctgctgaaaatctaattccaataaataaccagtgcaaatatgtggctataagattattcatcacgatattcttatttttaaaattttcttaaaatagcaacggggccgggcgc

SEQ ID NO: 212690 - DNA, 484 bp, Homo sapiens
ctcccaggctcaaacgattctcccatctcagcttcctgagcatctgggactgcaggcacacactaccatggccggctaatttttttctttttctttttttttttttctggtattttttgtagagatggggttttgctgctgcccaggctggtctcgagctcttgagctcgagagatctgcctgattcagcctcccaaggtgctgggattacagacgtgagccactgcactcggccccaacgcattactttgatttaatatttggatcattaaaaataactaaagatgtatttcctcattttttctctgtctgccttactcgcaatattaaaagtagagaatttcagaatattatagtaggaaatgacctttgacataatgaatcgggcccttcattgaacaaatggttcaagtgtcagcaaactacggcccgtgggccaaaggtagattgtgagctaaaaacttgtttttactttttttaagtt

SEQ ID NO: 212691 - DNA, 556 bp, Homo sapiens
taggatcccctctgaaatgtcagcatttgaaaaacacaacccaaaagtagaggatctacagggaactttattctctcacttctgtcttcatggagggcactgccccttgggaagaccaggttggcttctggcacaggtatcccccatcttcttgggcacctgtggcattgccagcaggccagagggggcagctggcagtgttggctctagcctgacccagggggcccagttaggatgccctctacccatggcaggggtgatggctacttctccatggttcatgcatgaagcttccagccctttccagctcagggaacacatgcagaatgacagtcacccagcagactggaaactgcctcctctccaaaagtctggctcctgaacaccctcctccctgggaagggctttagcccctttgagattgggcaggaaccagaagaacagtttctctgctttgccatgtctgcaacctagggctcacccagccccatcaagtgctgagctccagcactgtccacacagtggaaaccaagtgaaatgactttggcttgtggag

SEQ ID NO: 212692 - DNA, 734 bp, Homo sapiens
ggaggggacctagggaggggctggggagtggatataactacactgcctttaatattgtcttcaagcaagaacaaaaataatgtcttcttggtgctgtgctgtctacccacttatctctttggtattggatctctctggtgagaaaacgttgtcactcctctctttttgtctcttcactttgctgtggtcaaaatcttgtaacatctagtctaggaaggaaaaaaagactaatgcatttacctcttctggccaaaatttgtaatctcttttccatctaatttagaaaactgaggctgaatatttggtttgaagtcaaacaattcaggaatggatttgaagtcctaagtatgaacaacgcattgctttgggccttacccaacacttaacttcacctgtctcatctacaaaatagagataatttctgagtttgtacgattgttgtaagtgctccaacatgggtcatctgagggccactgttaggatttttatcaaatgtgttctgcctgttctgttacctatttaatatccttatttaagtccattcaagttttcacttacctaaatttatttttgaagggaacattatttagacctcacattccaaacaggctctcgtttacttgctgcagtgatcaagtgcaccctgttcgggttaccggcgccttcctgtgcactttatccaccttgcgcgcctagtaagtgagtcccattcctcccgtcgctgttccaccacg

SEQ ID NO: 212693 - DNA, 458 bp, Homo sapiens
ataaccagagaatgagacagttgaagacccttcatgtagaagcaccaacaggaacaacagcagcaaggctgcagagaagagagatggacctaaggaacctccttgtaagtggctttttgtatgagaatctctaccataccaacaaacaaatgaacacacaaacaaaacaagctcaagatctcaattctataagagtttcaggagacaagcacaatattagcaaatgccacattgtaaccaacaccagcatgccatcctgctaacttggtttctggtgagaagtcagctgttgttcttattgaggattgcttctgtgggatgagtcacttctctcctactgctttcaagattctctttgtcttttacttctggtattttaataatgatgtgtccaggtgtggatatttttgaatgtatcttacttggagtctattggctttttttaattttttttggaa

SEQ ID NO: 212694 - DNA, 527 bp, Homo sapiens
catgctaagaccgcacacaattggttacaaaaaccaaactggatgacactgtacaaagccacatcaaatgcacactaaaccttaaagaaaaaaaaaatcttagggaaagtttaacagtcctgtaaaccaaaggcatttaaagatttctcccaggaagccatttagcaaaagacactccccagccccccttctcccacttccttcaagctcaccactgaaaacacctccaattcttgcctaaaggtgggctccgacctcccacgatatttagaaggaggaaaaaagaaaaaggaaaaaaatccacctcttaaggcaaatccactcttcagaggcccacagtttcaacagggctgaatttctctcctgggggttggggggaggcaaaagaggaggaaaaaaaaaaaaacccatctggcaggccccgagtggcgacatcctgtttattattaaacatttttagcatggagcattcagcatttcgaaaataaccctctggttcccgcactcacaccgagactgggcggccg

SEQ ID NO: 212695 - DNA, 442 bp, Homo sapiens
aatcaaatcagaatgtgacctcaagcaaattgcttaacatttattacagatagaccctctccccatcaaccaatccagatactactcagatacgtcttagtcttcccatctactggagggaggctctgctgctgctttcatcactagacgaatgtcctgcaaaataatatgatcctatgtatgcatctaggttaagcttttcttcttcttctttttgtttttttttttttttttttggagatggagtctcactctgtcgcccaggctacagtgaagtggcgcaatctcagctcactgcaacctccgtgggcctcaagttgactcttccacctcagccctcccaagttcctggaaccacaggcacttgccaccattgccgtggctatttttcatattttttggtaaaaacggggtttcgccatttttgcccaggcgtggtctg

SEQ ID NO: 212696 - DNA, 365 bp, Homo sapiens
ggtgtttttttagggttttctcttattatttagaatgctcttgttgatgctttttttctttcctgctccttgaagggagggcagtgtgatattagcggtgcatttctctcatggtgaagggcactcccagcaggagagcgcagtgaggacgacagtctagtgaactcacagctaccgcactgggcacatagcagcgtcccctcacacgtgtggagccctgtgcattttccgggttcttccacacatgctagagtgttcacatccaccccgtcacataaacacacaggaaagacattcctgtggaatagttcgtgcagatgataaaatagatgcctgaaagctaaaacgacacagtaagtaggaaa

SEQ ID NO: 212697 - DNA, 456 bp, Homo sapiens
cagttataatcctcataagaatttttataatattttttaagctgtgcaatccacagctgtgtaactgagaaaaatcacttaacctgtctgaacctaggtttcctcaaatatattcagtctgcactcccaggacctcactttaagagaaacctgaatctcttgagcacgagcatgtggatgggtgttattcccttcctgcacaccttctgtgcttcaaagagagaacttatgtaacctttttcctcatgtatccctgctttgaaacctgtaaatttctatctttctctgcccctttctgacttcttttattattattttcaacctcatcgatttcttcaaattactttccatccactaaatatttctaatgagccctgtacatttttctgtaccactgtggaaaaaaagtaaaataatttctgtcttaacaaaggattgccgcacccatctggcatt

SEQ ID NO: 212698 - DNA, 358 bp, Homo sapiens
gcccaggctggtcttgaactcctggcctcaagcaattcatcccatcttggcttcccaaagcactggaattataggcatgagccacatcacccagccttgtagttatttttaaaatgaagacaagaggaatagagtatacctttaaaaatatatgatactgtgtattggatgattctgaaaggatgtatttgcctatgaagaaaaaccttcttgttttgatgtctggttgttagctttttactttactaaagcccagttaacttttctgtgctttagttccacatctgtaaaattactcattttatatttctctatccactttgaaaattaagtaaatgctctttgaatttcaactttt

SEQ ID NO: 212699 - DNA, 623 bp, Homo sapiens
tttaaagttaggcatgttgatgtgcacctgtggtcccagctactcaggctgaggcaagaggatcgcttaagcccagttggtcaaggatgcagtgagccgtgactgtgtcactgcactcccacctgggtgacagagtggagaccctgtctcaaaaaaataaaaataaagcaaaacaatttgttagttaatacactgccttttgacatcttttcagctgtcattttgaagtgatatttaaatattatcttactaatttatatcccactagttgcccgtatcttttatctcctataacatctaaacctaggtccttgcatataaatgctttcttaaaagtacagaatttattatatcaaaatgtcaaatcttttctttaatcaggataattatgctgaatttgctaccctctttaacctagcaaaagttgttttactaactgtttatgcaattgcttgtaatttctgctaagaaagtagaaagtttcttgacctctcatggtcagtataaattatacttaaatattgttgaatatcatttacctggacctgttccaaataaagtatatttctggagcttaactatctcaatatgaaaagagtagaaggactaaaaaaaaaaatctt

SEQ ID NO: 212700 - DNA, 501 bp, Homo sapiens
accatactttgagaaccactcatacagaggcttgatgaaaaaggcttaaaactaagctttttgaaagcaggggctgttcctgtttagaagtccaagggttcactgatctaaattcaccctgaagatatgtgtccttttttcctaggaattcaggcttaaacagtctttctaggataggggtattagtaggttactgttattggaataatcccaaatattttatgatagttcagtgaataaccatcctttcttttttacatttaaaataatctaagttcctaaccttacacagctaaataattgaaagatcaatattaaggacatgtaagacaacttagttgaagagttttgtcatttcttgggaccattcttttcagtcatttccagcagggccctcaaagcaatttacagagccatttctcacaattgggcagacatactcaggtttagtgggtcatttttgcctcctgctgcttctttctctcctcttctgtatttctt

SEQ ID NO: 212701 - DNA, 256 bp, Homo sapiens
caacaacatcccaacagttaggaattattattcccatttcacagttcagagggcaaaggtgctgaaggaggcccaagttcatgcacctggtcagtgctacaccacagtttaggaatcagactgtttattccactgactcaattctcttcctaggcagatactgccattctctaaagcgtagctacttccgacctccaagtttctctgtctctctggagagggctcagtgtgctcagtgtgatgatgaagcttgcag

SEQ ID NO: 212702 - DNA, 1654 bp, Homo sapiens
  misc_feature (881)..(881): n is a, c, g, or t
  misc_feature (951)..(951): n is a, c, g, or t
  misc_feature (1649)..(1649): n is a, c, g, or t
ggaggcagaggtttcagtgagcagagatcatgccactacactccagccagggcaacagagtgaaaccctgtctcaaaaaaataaatataaaatacataaaaataaaaatcagacaagtgtggtggtgcatgtctgtagttgcagctacttgggaagctgaggtgggagactcactggagccctggcattcaaggtggcagtgagccatgatcacaccagcctgggtgacagagtgagactctctttaaaaaaaaaaaaaaaagttatttttttgttttccttgtgtagggtccctgccagtcttctctgtatcatttccatgttggtatgtatgttgccaaagtgaccactagttcttgatctgtaactataaatgggtcacaggttgagactaaagtctggcaagatcaaagccatggttgaaaaaccaaacaaaatgactgaaacccgcaggagagctctgagagtccagtgcctcaggacagactgcactggtggtgctctgggggctcggccgtatttgaatgcagatcctggcactgcagcagtgagaccacagagaaacaacacaggaaaaaggagaatgtgtaccatcttaaaaaagaattattataaaagtccaaatctagtcaggtagacaagcccaagcccatgatcaggaaacactcttcttctctctaaaaagtttccctgcctcagactttttattgctgacgttggcagaggtagaggccacccaactatggtttgtgacataacactcgctccaagaacattatactcctaaataaagacgttccctttcatctcagagtggaacaaccccaaccgagtcccctagttgccatctaaaattatctctaattctagctgagcatcangagcaccagcaactcccagtccagtgcagctgggggacaattcaaagccgtgtgcactgtcatccacaanggctgaactaatttacattcccaccaacagtataaaagtgttccctttttggccaggcacagtagctcacgcttgttaatcccagcactttttgggaggcctaggcggatggatcacttgaggccaggagtttgagaccagcctggccaacatggtgaaaccccatctctactaaaaatacaaaaaattagccaggcatggtggtgtgcacctatagtaccagctacttgggaggctgaggcaggagaatcacttgaacccaggaggcagaggttgcactgagcctagatggcgcccctgccctctagcctggacatcagagcaagactccatctgatatggtctggctgtgtccccacccaaatctcaacttgaattgtatttcccagaattctcaagtgttgtgggagggacccagggggaggtaactgaatcatgggggccagtctttcccatgctattctcgtgatagtgaataagtctcacaacatctcatgagtttatcaggggtttccacttttgcttctgtcctctttttctcttgccaccaccaccatgtaagaagtgcctttcagccaggcacggcggctcatgcctataatcccagcactttgggaggctgagatgggtggatcacgaggtcaggagttcaagactagcctggccaagatggtgaaatcccatctctactaaaaaanaaaaa

SEQ ID NO: 212703 - DNA, 427 bp, Homo sapiens
ggaaatgccacacaactgctctaacagagactgaaaaaaaggcagaagaacacagggcaaatcaagggatgtttcacgtcagaaacagacagtctctgtggcttgcagtggcagtaataataatagatcactaatatctagcacttaccacgtgccaggctccgttcccagtgctgttcctgcttaactcattaaaccctcctaacaacctgtgaggtggataaggcctttccctcagtttagagaagtggaaactgaggcgcagggaagttcagtaaatccctgaggccacaaagctaaccagcgcagacgtgagattcgaacccaggtagctgggtttcagatccccttttcatcatcatgcaacaaaactgttttctttcctgctcaaaatcacactaattaattttattctgtttctggttaa

SEQ ID NO: 212704 - DNA, 821 bp, Homo sapiens
tcccaataccatcattatctgggtcagcctccgattcagcctcatcctgtgcttcagcagtggggtaaaacaaatgtcacttgttagctgcttcttcatgaccttcatagactatgcattaatttgaagccctgcccccaaaaatagtgcttgggggggaaatgagttagtgattttgtgaagataatgggagttgaggaaaacacttaagtttgcttttctgagctctagcttcattttacttctcagtctcagtatttaattgtctccactgttttttctaacttggaaggaaatcagatggcgaaagtgaaacatacggctatcaatgtgaaaaagctgctccctatagcactggaattctcttgtcattaatagctcttgtagtcgacagattataatatacagagtcataaatgttcttgttgtcatttggaaaattacaaattcccaaaaagtggtgattatttggggctttgggtctgcaagacgtttcacattaaaatgctgataatatcttcaaaaaccacagagccatgggccttgcaggcttggtaactgactgcctttgtggtgtggttttattctttctactgaagcacctggttgaaaggagtgggatgctgaattcataggggcgtgttcacaaaaatctttaacatcaagtatctgtttattcaaaatagtgcatagttcaaagcaaccttgattccttaaactagatgtttttctgttctttaatgaaaacagcctgaacgtggttattaatctgagtctttctccattctgaccaccccactctgtttttctctttgaatatc

SEQ ID NO: 212705 - DNA, 564 bp, Homo sapiens
actaaaagcccaagcctcagtgtcatgcaatttacccatcacaaacctgcacatgtacctcctcagtctagaaaaaaattaatagaaattgtctctgaggaagaccagagagtgaatttactagacaaagacttaaagtcagctaatttaaatatgttcaatgtactaaaaagaaaatatgtctgaaaacatgtctaaaaacctacactataaaatcctttctcaccaaaaaggagttatatcaataaggagatataaatattacagaaatttctatattttacaaatagaaagagatagcaattataaaaaggaccagactacagatcttaagaataactgaaaaggaaaattcactagaggggttcaacagcagataagagaagacaaaaagaaccagtaaatttggagatagggcaaagaaaattttctagtctggagaacagaaaaaaaaatttaacagagcctaaaggacttgtagaaaaccactaagcataccaacatatgcataatggaagttccagaatcaaagaaaagaataaaaggtgcaacaagtacttttga

SEQ ID NO: 212706 - DNA, 607 bp, Homo sapiens
tctgacatctcatggtacctctcagtgaagaaaatataaaaagatttcttatcacccaggatctgttggattgggcttcacaactcagggaaattccaacatgaatatgctatatacatggtcattaaagaccttaatagtggatatagacctctatcataacagcatgaggaactctgggcccacttcccagtaaaactgatgaaatttattaaagaataaacatttaaagcacctggaaatggtcttaatggcatataaatgaataaacatctattcaagaaaatctatgaaaatttggtaacaaaagcaaacgtctgtggtaactgaactaagaccactccctctcagcaccctcccagcaaaggaaggcagaaactgcacttcagactggtacagccaagaatacagggttccccctcccctcagcttccagttgggttttcttctcaggaggaacagaatattaaccagcacttctcatctattactgaggccaatttccaggtaagtgtggttgacagggggtgactctcttcttccaccagcctctgctcacagaatggaggctctaccttgagcatggcaccactgagacaccaatgcc

SEQ ID NO: 212707 - DNA, 385 bp, Homo sapiens
agaaagaataagaaacagaagagataaaagcagagagaaaagagaagaatgcagttgagataaataacatatagtaggagccattgtgttgcttgacaatggtgatgaaggtggtacatgtagataataacactggagtaagacacataggattgaatatttctgaagtcttctactgacatcagccacttgcattttaatactcctacacgttgttctccaaacttaagcctgtatctcatcaataacaatttggaatttcattctttatggatatttatgtgtgtgtgtgtgtgtgcgtttatatgaatacactactttactaatttttatgtacattataaagcacgtacaaaagaaatagaaaattaaacagaaatacaag

SEQ ID NO: 212708 - DNA, 1032 bp, Homo sapiens
cttccagccaagcgtccgctctctctatcaggtccttgcatctgtgaaaaacaagattgaacagtttgcttctgtggagagagacttcccagggctcctcattcaagctcagcagtacctgctcttccgtgtggacatgtctgatatgacccctgcagcactaaccaaagatcccattcaggaggcttccaggacaggaagtggcaagaaccttttggatggacctccaagagtgcttcagcccttcctgacccacagaaccaaggtggctgaggcaccccccaacctgcccctgccggtgaggaaccccatgctggctgctgccctcttcccagagttcctgaaggagctggcggccttggcccaggaacactccattctgtgctacaagatcttgggtgactttgaggactcctgctgttagctttttttttttttttttaatagaggttcttgttttgtaaggttttagtgtcttgactgaatgttaaatgcaaagctgcttacaaagatttctactttaatgtttcctgacaatacttgatttgtggggaggggaattttctgtatctttcctctctctctctagccgggcctttccaccttatgttatatatagaatgtaagtctcataagctggttgctcccttggcagttttctttgctctgtttttcctccttatatttttttggttgtcattctcctatccctttgagttactcttcttgcagctcagatcacgtcaagcagatattggggttcagtgatgtctggtgatgtctggaagtgccccatgtcagaattccagctgttcagcagcacaggaagattgtacacctgcaactgtgcgaatggtcctgttgcctcctgcattttggcctctgttctataaaggaagagtaaagatggagctcctcctgcctccatcacgaaagcacatatcatctgtccctttggattttacttccaggacgtgtgtcgtccccagcgtgtgttgccttatggtgccggcagagcctcagctatctgcc

SEQ ID NO: 212709 - DNA, 905 bp, Homo sapiens
atagaatcgagctgtgtcctggacccggcaagactaaccaaagatcccattcaggaggcttccaggacaggaagtggcaagaaccttttggatggacctccaagagtgcttcagcccttcctgacccacagaaccaaggtggctgaggcaccccccaacctgcccctgccggtgaggaaccccatgctggctgctgccctcttcccagagttcctgaaggagctggcggccttggcccaggaacactccattctgtgctacaagatcttgggtgactttgaggactcctgctgttagctttttttttttttttttaatagaggttcttgttttgtaaggttttagtgtcttgactgaatgttaaatgcaaagctgcttacaaagatttctactttaatgtttcctgacaatacttgatttgtggggaggggaattttctgtatctttcctctctctctctagccgggcctttccaccttatgttatatatagaatgtaagtctcataagctggttgctcccttggcagttttctttgctctgtttttcctccttatatttttttggttgtcattctcctatccctttgagttactcttcttgcagctcagatcacgtcaagcagatattggggttcagtgatgtctggtgatgtctggaagtgccccatgtcagaattccagctgttcagcagcacaggaagattgtacacctgcaactgtgcgaatggtcctgttgcctcctgcattttggcctctgttctataaaggaagagtaaagatggagctcctcctgcctccatcacgaaagcacatatcatctgtccctttggattttacttccaggacgtgtgtcgtccccagcgtgtgttgccttatggtgccggcagagcctcagctatctgcc

SEQ ID NO: 212710 - DNA, 901 bp, Homo sapiens
cgaactcgagctggtaccggctacctacactaaccaaagatcccattcaggaggcttccaggacaggaagtggcaagaaccttttggatggacctccaagagtgcttcagcccttcctgacccacagaaccaaggtggctgaggcaccccccaacctgcccctgccggtgaggaaccccatgctggctgctgccctcttcccagagttcctgaaggagctggcggccttggcccaggaacactccattctgtgctacaagatcttgggtgactttgaggactcctgctgttagctttttttttttttttttaatagaggttcttgttttgtaaggttttagtgtcttgactgaatgttaaatgcaaagctgcttacaaagatttctactttaatgtttcctgacaatacttgatttgtggggaggggaattttctgtatctttcctctctctctctagccgggcctttccaccttatgttatatatagaatgtaagtctcataagctggttgctcccttggcagttttctttgctctgtttttcctccttatatttttttggttgtcattctcctatccctttgagttactcttcttgcagctcagatcacgtcaagcagatattggggttcagtgatgtctggtgatgtctggaagtgccccatgtcagaattccagctgttcagcagcacaggaagattgtacacctgcaactgtgcgaatggtcctgttgcctcctgcattttggcctctgttctataaaggaagagtaaagatggagctcctcctgcctccatcacgaaagcacatatcatctgtccctttggattttacttccaggacgtgtgtcgtccccagcgtgtgttgccttatggtgccggcagagcctcagctatctgcc

SEQ ID NO: 212711 - DNA, 456 bp, Homo sapiens
atctgctgccaaggtcacttgttccctttccctgcctcagtgaaatcatgagttgagatacagcttctaccagcctgggtccccaggtaagcaaaatacacccgcccttacacatggaaggtgaacagcaggcaagcttttgtcatgttaagtcatttggatctgggggttatttgttactgtaacataagccagccactgctgacagatacaatcactgttcatgtcaccagttggcgaccttcactttctgactcagcctcccctctggcttttcagttgccactctctttagttcagctctcagggacacacagtgcactcaagctacccaaacataaagctgccccctagcagttttaaggattaaaactgatatctgatgccctatagcctatagcaacccagcaaaactccagtctcatgctgcagccccattacccttggcagagatat

SEQ ID NO: 212712 - DNA, 411 bp, Homo sapiens
agaagcacgcttgcccagcctcaccctggctggcctcacagcccctggttttcttcctggcctgggccagggtccgtggggcttggcaaaattaagcttggaggaaatggatcccttcattgctgagctcaggctctggaagaaaaacaccccagcccacaggctcagagcaggttttatttatgtgtccacttgttttacgcagctgactttactggacattattcagaccagtggttgcaagtgattgttaccaagtttgtaggaaaagcaaacctccaggaaggtgagtttcaaaatagagagtggcagatgttttcgaaaggctggccaactgcttgggaccagaccagcgataaaacttctcccagcaatcccagatgtcaataggcaaaatccaaagccaaaaaa

SEQ ID NO: 212713 - DNA, 422 bp, Homo sapiens
tgtcaatctagaattctgtatccagctagactgtaatatagatgtaagagaaatacaaagatatattcagaaaagcaaagactgattattcaccacctctagacccttgctgatagaagtattaaatgatgtgcttcaacatgaagcacactgaacccaaagggtaggagtggagtgtaagaaactgtaacgattgcaaacatggtaaaaatacactgccaaacttaaaaaaaaaaaaaaaaaaaaaaaaaaaaaaaaaaaaaaaaaaaaaaaaaaaaaaaaaaaaaaaaccttgtggcccgcttgggccaagtgaattttctggaccaagtttatccttgcggccgaatttggggctaattgggcaatttcgccttatagggagccgtttaacattcaatgggccgtggtttaccgtgggg

SEQ ID NO: 212714 - DNA, 159 bp, Homo sapiens
aatttttatgtgtgctgaaaatgaatgtgttattattaattattgggtgtggaattctatgtatcattcttagaagaaacttgttaattacatttaagaaatgttctatatgatatataagttctacatattatataaatttctatagtggatacttta

SEQ ID NO: 212715 - DNA, 543 bp, Homo sapiens
cgtctaagggaaaaaaaaatcgcttctctttgcaggcactgaaaatgaccagcaggacggggcgtgatggtctgtaatctcagcactttgggaggctgaggtgggaagatcacgaagtcaggagtttgagaccagcatgaccaacatggtgaaatcccgtctctactaaaaatacagaaattagctgggaatcccagctacttgggaggctgaggcaggaggatcacttgaattccggaggtgaaggttgcagtgatctgagatcaagccattgcaccaaaagaaaaaaaaaaaaaaaaagagagagagagaaatgtctcaagaggcacagggcatctttcaaatgtaaatcaaccttgggggtgtggtgtggccagagaggtgaggtcaagagaatactggataatgtcctgtttatggcataaatcagggcccccctcattagagtttccgtaaccatgaggcatgcctcccaatttcataaataatgctacgtaatggttatgcataactgatcattcagaataaactccagatattatt

SEQ ID NO: 212716 - DNA, 411 bp, Homo sapiens
tcatgctggacgacatagacagtacccaggagaggagaatcatacttctaccggataatccgggcatgaacaagagataaggatacaaaaagccatgctaataaaaacagtaacaaaaattattaatgccagggaagacaaaaaagttatacaagatagaatatgttaccacaggcaggatgcaatggcccattcctgtaatcatagtactctgggaggccaaagtgagaagatcacttgaggccgggagtttgagaccagcctgggcaatgtagtgagacccccacctctacaaaatatttagaaattagccaagcctggtggcacacacctgtggtcctagctactcaggaggtagaagtgggaaggttgcttgagcccaaaaagttaaggctgcagtgagctgtgatc

SEQ ID NO: 212717 - DNA, 525 bp, Homo sapiens
gacacaaaaggacgaatatgtgaaatatttcgaatatgcaaattcacagagacactaggcagaaaagcagctaccagtggcgaaaggggaggtgggaatagaggagttaataggtacagagcttctgtttgggtgataaaacatttttgaaatagatatgcaggatgtttacacaacaatgtgcatgtaattaatgctactaagttgcatggctaaaatggcaagttttaagttttacagatagagacaaatcttcataataaaaaaagagagaatatatttaaatatatctgattttagcaacatattagaatacactggctcagaccctattcctgctacaaggacgtaagattctaggtgaaatataagaaggaaattttaaatgaaaaggtaagcttgatggagaaaagaagacagcatgcgctagaaaggagatcaaaaaagacacagaggcagggtacggtggctcatgcctgccatcccagcacttcgggaggccgaggtgggcggattgcctgagct

SEQ ID NO: 212718 - DNA, 199 bp, Homo sapiens
attgaccttgcatccgctgttgcctctcctgttctttgttattgggggtttattccttttacatttggacgtggatccaggtgggcacagaaatcaacctgccatgtcaaaccagagtccacaaaggattttactagcatggggtggggcttacactacaatgttaggagaaaaatgccatgtgaagaatatgctaagt

SEQ ID NO: 212719 - DNA, 311 bp, Homo sapiens
catcatgagtcttcctgctcctgaacagggtgtatctttccatttactcaagtcttctttatgtcttcaagacagtctgactttctgcataaaggtcacaggcatgacgttacctttcattttttgtaattttaagtaatatcttttttaaaacctgttgctggcaaaaaaagaaagaatgccagtgggctgggcacggtccctcacgcctgtaatcccagcactttgggaggcggaggccgagacgggcggatcacgaggtcaggagatcaagaccatcccagccaacatggtgaaaccctgtctctact

SEQ ID NO: 212720 - DNA, 352 bp, Homo sapiens
agtgacccaggaccaacagaatgaggttaaaagccacagacaccaggcaaagagaggtgtattctggaggccacagtgatggtgacaaccccaccccacagtccatcagagaaagcaccgagggatatccaggcaaaaggaagctgctgcgtttgattcacagatactcctcagtcgaagggctagaacctctcatgttctgtctctctccagaagtcaggggtttagagcatcagtggatcctgggaagagctaagactaagacacgtgggaccaggctctggcggtccagggcggaatctgctgcagggctgactctagggatggctcaccacagcatcaatccctgtgc

SEQ ID NO: 212721 - DNA, 332 bp, Homo sapiens
taattatccttgttcacaaagtcaccacaagaagccaaagactcccactcaggtgttcaatatccaaagcatcctacaccctcacacaactttttataccctaatctcttaattcctcaaattcttcttttgtataccttggaactcacggttagcatctgtgaaatcctccatctctttaacttcctctaaaaatttcacaccttctcaatgtttctcaacaagaggcactcatggcatttgagggagaactcgtcattgtgggggacactcactatcacaatcctactcccaccactctaccatgccaatatcttttttttttttttttt

SEQ ID NO: 212722 - DNA, 346 bp, Homo sapiens
cgttttgatggtgtgttttagcaggatttcttgggttgcaaggaacagaaactctcatttaaattggtttaggcaggagagaattaattggctcttggaactgaagtccggcagtaattaggtaatttcaggtatggctggatctaggtgttcaaaccaagaaaccaagtctttcttttcctacacaggcccttccctagtctctcacatcaaaacgcgttttgatgtgagagaatagtcacttttctaattagtgtgctgaaacatacaatattgtatttagtttcagtagtcctattagtatatacagaggtcttgtgccctcctccccctgaaaaaaaaaaag

SEQ ID NO: 212723 - DNA, 512 bp, Homo sapiens
tgagaaacagcaaagaagcttgcatctgccctgctcctagtggaggcagggaaggaggtacctatgagaatcaaaactccaggcttacaccaggtaggggtatagaatccacatccacactccctgtacggttccataacccagcccaagacattaacatctgaactaacccaggacacttgttaaactgaatggtgactggaggaagctgagtgaagtttatataggaggacctctctgtactagttttgcaacttcctatgatttataggaatttaatttataattattttaaaataaaaaagtttaaaaaactgtatagtaggcacatgacagttggttatctaattctctaaatgtatatatatcacatatttttattttaatataatagttaaatgtataaatcaatgcataaataccactaatacaatacagaattattctgtaattttgtttgtttttgttttgttttgttttgtttttttgagacagagtctcgctctgtcgcc

SEQ ID NO: 212724 - DNA, 830 bp, Homo sapiens
caaaatctaccttccatcctttggtcctaatttgtcctagggaatgccacaaaataagcaaaacccatctcctctccaatagatggactttcagatatttggcaatggctatcatgtctccataaatctttcttcctctagattttccattccagtctttttttctttgagatagtttccagaccttgatactatcccattggcttctggacattttccagtttatcaatatgtttaaagtgtggcactcagaaatgaccacaacactccaccctttttctacatttcattctcagtttctataaattgttgtgttagagttctctgactaaaaagtaatttcggaatacttcccagttcagtgtgactgtactctgaatcctatcctatgattatgcagaaggagcaggactgaaataataaaaaagaaagaaaaataataatgaaaaaattaagattatatgagagacactcaattatctatccctccatcttttaatttctaaggttatatagatggataaagctttccagatcaatttctcatccagcctcctgcaattattaaaacattagtagaactttttaccaaacattgaaaaaaaaatgagagagcttctctactgatggggaaggcaaaggattctctgtagcttggacaaggaatttgaagaatctcttgtcctataccattttctactctttgtcccagtcgttggtaccagtttttctggcttttgatcaacattagagctgagttagacaaggtcaagctgcatgcagattgattggcctctcaactgagaggcaccccacaagatgatagtgaa

SEQ ID NO: 212725 - DNA, 360 bp, Homo sapiens
agacagatatattcatcagtgaaagagaatgtagatcccagaaatagacccttgcatgtatggcaaattattttaaataagggagctaggactaccactggggaaaggatagtttatttaacaaatggtggtgggaaaactggatatctacatgcaaaagataaagttgggcccttactttataccatatacaaaaattaactcgagatggattaaagatataagtaagactttaaactctataatgcctacagaaaatgtaatatttaaactataaaactaatagaaaaatgtcaggacacattggatttggcaacaatttcttgaatatgacaccagaagcacaggaaactgaaagca

SEQ ID NO: 212726 - DNA, 132 bp, Homo sapiens
cctcccaaagtgctcagattacaggcgtaagccaccgcgcctggcgagaaaccaatattacatcaaaactcaccacagtgcgcaagctgaacgtgtaatcaaattgtagtactcaaactcattgcaaggact

SEQ ID NO: 212727 - DNA, 434 bp, Homo sapiens
aattagaggaaacttggatggttctggctccagtaaataatagactggtttgagaactgtacttccatgtataattttgtggttagtcacttaatgtctatcatgataaataacatacctgcacaggatttctggcaccccagtaaatctcaaacaagtgcccaaatgctagtttattatggttcctcaaatagcatgtatttatttgccaaatcaatgatccagtagcttcctgcccccacttttattgcctttttagaaatttgaaacaagtagcttgcccacatatacatttctcaaattttggtctactgctggttcatacaacaggttagcttttccaagtgactccaggagtgagttaaaaaccacctcagagatgtcctgagtatttgattctctgtctctaaaacatcacctaacctggtagatgc

SEQ ID NO: 212728 - DNA, 512 bp, Homo sapiens
aggagatgtgatggtatagtatagttccccttctagtctgagtccaaaggcctaaaaaccaagagagagagtgatttaagttccagtccaagttcaaatccaacaacaggagaaagccagtgtctcagcttgaggacgggaagagagagacagaattatctcttactctgcatttttgttttattcaggccacaatggattggatgaggcctgtctcagttcattttgtattgctatagcaaatactacggactggatcatttatggagaaaaagaagcatatttgtcttacgggtctggagggctgggaagtttaagaacttgacaactggcatccgtttagggcctttgtactgggtcgttccatggaagaaggtagaaggcagaagggcaagcaaacaagcttgtgagacagaggaaatcaggttgaattcttttattttattttagttattgagattgcgccactgtactcctgggcaacagcgagactccgtctcaaaaaaaaaaaa

SEQ ID NO: 212729 - DNA, 557 bp, Homo sapiens
gttgtataggatggtgctttgtgaactgtaaagtgatacttacacagtaaggttgaacaggcactacacaggtacaccatgcagagaacggagtgctttggaagtatctgagaaatggtgagtcactggctggagaaacgggtttatgggggaggaattatttcacaagttgtggcgtggtggtggaagactgaaggcttaaatgacaaaaagagacttttttttgtaaggcaaaaggagtctgtgacatttcctgagttggctaaaagacataatgtggcaggagctttaggaagatcaaatgagcaactggacctaatttcaatttcagcagtcacagacttcccatttaccgagggcttacaagctcctcttactgtgttcagaagtttatagatattacctcaattaatccctaacaacccttaaaggttcacattactactctgttacaaatgtgagagtggaggcttacagttaacaaacttattatccaaagccagggaaattaagatgaggaatatccaagactattatacaataaaacgggatacgtg

SEQ ID NO: 212730 - DNA, 294 bp, Homo sapiens
ttacaagtgtgagccaccgcgcccggcctaaagtggctttttattcatgtttgtttaaagttctttattttgaagcctaagtctacaacaacaaagttatgctagtgaaaacattatatttgagaaatacgaagtaattccgccagtgtaaacgaattcatcattgtaactttcctggctaaaaagcatctgaagacagtcttcagagaccctgatgccctaatgggaaattgcccaccagcagctggaggggttcacctgtgagccccctttccccttaggcgctctgtccta

SEQ ID NO: 212731 - DNA, 453 bp, Homo sapiens
caatatagaaaaataatgccgggtaaaaataggattgattctatatcaaataggaatttgtttcctttactgccttcctttttgcaatgtctgtgcaggtcttcccacaccttggctagttcagtagatatattcagtttagatatattttagttcgtcacctctgaagctcagacaaatttccaggccaagttttgaaaaataatttaggagaaacttgcagatattttgaggacgcggcgtgtaacctcccatggcaccgagacaagcgacattctgtttggtgcaagtggcgaaaaacacgacctaaccgtgtttacatgtgtattcagccatgaaattgagtattatcaacgttgaaaaaatgcaaatcaaattaaaacaagagaaaattgtctttggaattacagcggcctggagcccccaagtgtttgcttaaattgaatcatttag

SEQ ID NO: 212732 - DNA, 298 bp, Homo sapiens
agaagatgagtgagtcctacactagtgaaatcagagaactgataagttaatgtctgcgagaatattatcagttcagataggagtgaagttagcacaacagatagaaatcttaggattactgttctgtattactcaaattgttagtttaaaatactggagaaaaactgctcaatttgagctagtcaacagggctagacagacaacaaaatcctattttactaagtaacaaatggccactcactcttgctccatttccactgcactccagcctggtgacctagtgagactccatctcaaa

SEQ ID NO: 212733 - DNA, 111 bp, Homo sapiens
tgttctatatattcaacacaatctcaattaaatttccagcaagttgttttgtggataacaaattatccctaaagtttatatgaaataggaaaagacctagaataaccaaca

SEQ ID NO: 212734 - DNA, 295 bp, Homo sapiens
tctgtaggctgagctttcttcaaatggattgtaggggcaagtgtgattctggaaatcccgtcaaaggcagtgttaattcctccaccttaattgagcttcacacgcttggtaaattataactaccccttttaattatttttgtatatatttttggagattaaaaggagtggcataattaatataaagattgcttctcttctgaaaggtgcggattctgtctggactagtgaaataatgaagctggaatgctgaaaatggctctgggcacaaatgccgactcaaggtacatacacca

SEQ ID NO: 212735 - DNA, 450 bp, Homo sapiens
ttttgtgtttttaaatctattttagtggcagaaaggcgagtgggagagaaggcttcttcaggaggtacatgagaaaattaccatcaataattatttgccttgctgggagaatcaacaaaagatatctaggcaattggggatttaatattgaatcattgaactgcatgttgaatattgaataattcaatattgaattattcaatattgggaggccgaggtgggcgatcacttgaggtcaggagtacttcaagaccagcctggccaaggtggtgaaacctggtctctactaaaaatacaaaaattagccggacgtggtggcacacacctgtaatcccagctactcgggaggctgaggcagaagaatcgcttgaacccaggaggtggatgttgtagtgagccgagatcgcaccactgtactccagcctgagccacggaggaagactccgtctc

SEQ ID NO: 212736 - DNA, 209 bp, Homo sapiens
ccccgcacaatcccgggccctggggaaaggaaacacgcacttccttgcagtttcagtgaaactcctctggcacgcgggatagagtctgactcggtggctggcgcccatggcttatcggtctcaagggagcttggttctcagattctgaagctgagagcgggagggtgaagctggtttggctctttcctagaatttctctatggctctgg

SEQ ID NO: 212737 - DNA, 485 bp, Homo sapiens
actgcctaggttggtatgaggattaaatgaggtaattgatgtgaacgtgcttcctgcagatgtttttttatagccctttacaaataccatataagaagcctaatctagctgtagaattgagcccacaattggtttttgagccataatatcaaacactcagtctttccctaggtgatatttttccattctctgtttttgataaggtctctagtttgtaaggtcacttggaattcgagtcctttgtgcccagagtgttggctgcaccactaactcacctcctataagttagtacagacactcttcattggtcatgtgctacctggcaggcactgagctagacaccactgacaaaatgatggataagaaacttactgggcaggacacagtggctcatgcctgtaatcccagcactttggaaggctgaggcgggtggttcacctgaggtcgggagtttgagaccagcctgatcaacatggagaaacccc

SEQ ID NO: 212738 - DNA, 159 bp, Homo sapiens
tctcttagagagttaatgtttgaacaactattctgatattatatttaccttccatagcactcttgcctattaactatgctgaatatatatccccacattaaaatatgcaaaaagaaactactagattttttagaattacacccctatccggccacgtgt

SEQ ID NO: 212739 - DNA, 277 bp, Homo sapiens
tgacaccctcatgacagtgagcacacctaacacccagatcttgttttctaaaaactattctccacagaaaggcacccggcttctaggaaaagaacttactccacagctgggcctttactgtggggaagcctggcagtcacagtcttaaccaagtgataaagatcacatcacctgaagggaccacaaaacccatcatggacctcctgatacgacataccaagggcacatctcttccatggttcctggcaaaatcatcaggaaacactggacaaacaca

SEQ ID NO: 212740 - DNA, 366 bp, Homo sapiens
gctggactcagtgcctgtgtgtcagagcaccaagcccttgaggccctgtccccagtgctatgtaagacctgtccccagtgcgatgtaagaccctgtcccctctctttgctgtatctcaggttataaccactcataggttcctcccttgcttaatcaggccactaaccaggaatgattgagtgaaacattaagatgccaatggacagctgagcaaatgacataagctaatggaaatatgttaaatctcccttgtaatctaacacaaattaaaataataaaactatcattttcacctgccatataataataacagaaaaattaaataataatagagatttctgggtctacatgatgagataatcacat

SEQ ID NO: 212741 - DNA, 337 bp, Homo sapiens
cagtgtaaggatagaaaaattgcacataggaattgcaaatttaaattagtcatccattatttcttttgactcaaccaacattattgaatatcacttatatgccaggccttgagaaaaaaaaaaattaccaggcacggcctgccagcctatgggagatctaagggagggaagggtttaagcacagctcccctccccctctcctcatagaagaggagaaacattatgattctatggcagttgatggtgggctggagagggcagtttagagcagaaaaggggctaaggtaaaagaagccgagagagatttctaagttaaagcaaaataatgctcacagta

SEQ ID NO: 212742 - DNA, 336 bp, Homo sapiens
tggaaagctcacacatcccaatttcaaaatttactacaaagctacagtaagcaagaaagtgaattactggcataaggatagagattacatcaatggaatagaatgagagtctagaaataaaccttcacatttacggccaaccaattttttttgttttgaggcagggtctctctctatagcccaggctggagtgcagaggtgtgatcatggttcactgaagcctcaacctcccaggctcagcctcctgagtaggtgagactatgggtgcacatcaccatgtatggctaatttttaatctttttgtagagatggagtctcactttgttgcccaggctt

SEQ ID NO: 212743 - DNA, 472 bp, Homo sapiens
aggagtgtaaattgctggtcatattgtctctgttttataatacattttgaggaactgccaaactgctttccaatgtgacttcaccactttaaaatcccacagcaatatatgataattacaatttctccatatcctcaccaacatttgttatcatctgttttttttatctgagccgtcctagtgagtataaagtggtatctcattatagttttgattagcatttcccttctggctaatgatgctgagtatcttttcatgtgtttcttagccatttgcatatttttccttgaaaacagtctattaagatatttttccttatttttgaatgggttatttgttttttcactactgaattgtaagagtagtttctttatgctaaatacaagagctgtatcagttatatgttttgcaattgttttcccttttactggattgttataataaagagtctgactccattattgatgtgtga

SEQ ID NO: 212744 - DNA, 154 bp, Homo sapiens
accagaaccaaaattaaaatacactaacgaaaatgtgaagtaaatgtgagaagtagcattattaattttaatacataaagccatcataataaaaatcaacgttctcttaagtgaacaggcaaaacaggtgtggatatacaaggaaaatgaaaca

SEQ ID NO: 212745 - DNA, 204 bp, Homo sapiens
gaaatggtgacaaggaaatctgggggaaagatatgcagatgaaactctcagaacaggcacagactgtgaagatatttgtgtcccatgtgaataatcatttgcattcactgtagaggaggctcttaataagcaagttgacaaaatgacgtacttcatgaatataaatgttagacactttccatagctacaagagtgcttgctcaa

SEQ ID NO: 212746 - DNA, 239 bp, Homo sapiens
gggagtggggagacacactgggcaaagaattttggcctttcccctttagacagtggggaggcctgatttataaactgtaatacaatcaccattcctcaagcctggggaggggcaccagctgggaatagtttccactctgggcccccagcaggtgcaagtcttctcagtgactctgtgctcaggcagtggagaagggaaaaagtaggggcagccccctacttttcccctgccccaggcat

SEQ ID NO: 212747 - DNA, 418 bp, Homo sapiens
ctagttttcccagcaccatttattaaatagagtttccttttcccaatttatgtttttgtatgctttgttgaagatcaactgtttataagcatttgactttatttctgggttctctattctgttcccttagtctatctgcctccttttgaaagtaccatgttgttttggtaactacagccttgtagtataacttaaagtccagtaatgtgatgtctccagatttgttctttttgtttaggatcgctttagttatttgggggcttttttggttccatatgaattttaggattgtttttgctaattctgtgaaaaatgattttggtattttgatgggaattgcattgaatctgtacattgctttgggcagtatgatcattttcacagtattgattattccaatccattagcatggaatgtg

SEQ ID NO: 212748 - DNA, 397 bp, Homo sapiens
ttaacaaaccagttcccactagatacttattaacttattctccccacttattcatctgggatgcttcaacgagttactttgtttaatcccatcactatatacaagtgacagccaaacttctagatgaagggggcagctgatactgtgggacatctggaatgtacagctctgttcaagccccgaggaaaaatgacaatcctaccacaggagcattctttgtactttagggcaaatattcaggcccaggaacagaaggaaggaaaacaacgctttcttggttcactggctatgctaatctaccagaacctattaaataaagttaaactgaaaaaggagtataaaatagccaacccatgtcacatacatttgtttgatcatcaaaagcatctaggtgtat

SEQ ID NO: 212749 - DNA, 302 bp, Homo sapiens
tcggttcactcttctgcatgttttaaaacagtatcacaaaggtcagagagtcatagaacccgtgatcctggaatgagaggactggaggaggcctttgagaccattgattctcttgtttagtagaaacctaagctctcaagaatccagtgacttgctaacaaccccctccccccgcataagttagagacacagcagggccaaaacctgtatctaatttttcagccagtgttcactacagagtatcctatatctccagtctttgtgaagttatttttcagtcctttacttagcttccggtcgaa

SEQ ID NO: 212750 - DNA, 309 bp, Homo sapiens
gtgcgaaccccgtgaaagcacaccctcttctggggttccaggatgcttctatgaagcaacgtcttaggaaatggctctctccttgtaaatggtcaacccctttctccacacaaactgtcgtgtctcttcacactggttccctggggtgggatgacaaaggattctcttgttcatactaaagtgaagacagttttctacattttaaaattttgtccagtgggcgttataaccttcacagctgactatacgggtagttcactgtgagagagtgtagaaatggtaaataagagaaatctctttttctagaga

SEQ ID NO: 212751 - DNA, 770 bp, Homo sapiens
gtcacaaaagaggttagttccatgcttattttaaagactttgaaggaaatatgcagtagtagaatctgtcattaagatgtgaaagctatataaagagatcccaaagaatttcctgagtttttttctccattttaatgttacctcatttcgattttcactatcacaaccaagcctgcttgctgtctttctcttcctttgcccttcatccttagggacttcttttctctctcagcctttgaaggtggtatcatttcaggaggagagaatattgatgccctgaaaatatcaaaactaaatcaggaaacaattagtaaacagttgtataagctgtgtttgtataatgctatggaaaaagcaattgcatttctttgctggcatctttgtgagacaggagcattaacccaatttgacaaatgaggacagtgaagatcagagagtttaaattacttaaggaaagtcacacagtagaataaccaacagtagaaaatagtgtctactttaagctttgttaagacttcttaaatgatagcactcatctaacggatatttatggagacatagactaatggaatagaataaatagagttgatacagtcactgacttacaggtaacattgaagtgcagtagtgaaagaatgggctttttaataaatggggctttatcaattgtatggccatatgggaaaaaagtgaatttgaatccccatcttataccatacacaaaaaattaatttgagatggataagagacctaaatatacaaggtaaata

SEQ ID NO: 212752 - DNA, 319 bp, Homo sapiens
tgaaagacattaatctacacatacaaaaagctcaatgaattgtaagtagggtcaactcaaagagacactcagtgtgacattgaaacacattataatcatactgtccaaaagcaaagcaaatcctgaaagcagaaagagccactggacacgtacaagaaatcttcgataagattaatagccaatttctcatccaacatcatggaagtgagaaggcaatgagatgacatattcagtgtgctgaaaggaaaatcttgggtggtcttgatacttgtagatgttcatctgtgtctgagcattgaagagttaggtatttatcata

SEQ ID NO: 212753 - DNA, 609 bp, Homo sapiens
ttcttttaatactttatactagacttttagaccactatgattgtgataaactaagtggcccagttcaaacaaggaaatgattactgtaaggtgtcaaaggaattcctttttaataaaacagatcccaaaataaacatcttacaaagtattcagtgtagtgaaaatgttgtttatagaccctagaaatgacattagtatttaacaagcaggctttgataatagtagtatctaatattgcgtgtgtcatttaaggatggggatacactcttaagaaacatgttaataggcaattttgccattgtgcaaacgtcatagagtatacttacacaaacctaggtggtatagcctactacacacctaggctctgtggtgtagcctgttgctcctgggttacaaacctatacagcatgtagtaacatgctgaataatatagtcaatactgtaacacagtggttacctattcgtgtgtctaaacagaaaaggtacagcaaaaataaagtgttataatcttatgagactatcatctatgcattggtcaccatcatcatctattgtggaccagaacactgatatgcagcacatgactgtaaagactgtaaatgctattgt

SEQ ID NO: 212754 - DNA, 343 bp, Homo sapiens
agttgggcagagggctgcaggaggggctggaatggggcctgttcctcttgctgttaacgctctgtgagcaaacagagcccttgaaatgtcccttgctcttgcctccggcataatatgcagtgggccactgggccctggcagctcttgagtgtgtgccctggggagccatggggccattggactgtacttcgtcctggttcatgtgtcagtaagaaagtaaaccaggctgggtgccatggctcacacctgtaatcccagcactttgggaggctgaggcaggtggatcacttgagcccaggagttcaagaccagcctgggcaacatggtgaaaccccatgtctac

SEQ ID NO: 212755 - DNA, 166 bp, Homo sapiens
tcttaagacacttcaacaagacaattagatctctgtccccgtgggatcatgcattctaatggaggagcagacaaaaaataagtaaacctatttcaagttgtagcaaggcgataaagggtataatgagccaagatataaaacacaggagagaggcaactttacatag

SEQ ID NO: 212756 - DNA, 356 bp, Homo sapiens
aagtttgataaatattatacatttaatataatgtattaaattatatctcttcctcaagaaaccacaaatagtgctcccatgtgatccagagttcccactactgggcatctatccacacgaaaggatatcagtacattgaagagacatctgcacccaccatgtttattgcaggactgttcacactagcaaagagatggaatcagtggtgttcagcaacagataagtggataaggaaaaggtgccatatatacacaatggaatactattcagccataaaaaaacatggaatcttgtcattggtggcagcatggatggaactgcaggacattatattaagtgaaataagccaggcacag

SEQ ID NO: 212757 - DNA, 1253 bp, Homo sapiens
agattaatcatgagtttgtaggagttgaatgctttgattcattaatttcatctagccattaattcccagggaaacaaatctacaagaaggatattgctattatgacttgtgtttttttctcatctttggatttttaatggtgaaaaaaattaaaaacaaaatattcatgagctatattagtaatacattagttatcaacccataatatactcctcagctattactaataaccagacatattttattcagtgctttgggtatttaggacatgttctatggttactgggctttaacatggttttctacatgaaggtattggagaaacaggacatactaaaattacttgatttagacacaataatccttttaaaaatataatgccatttttattctccagggtgtaaccacaaaaccgagtgaacgtcaccatttttattcagtaggcgtaaccacaaattcctgcgaatgcattagagtgattccacagactgaaaggttaccctcacagtttctaccacctttgttggatcaagccagtgtggttgctttttaatgaatgtaattctgtaagattttaacctatactgtaccgtaagactgtcccaattaaataattgccatactccagtgtacctggcatgattttggtatggctgctcacctgatcctactctaaagatataacaggacttgaaatttcaagctctagtattcagctcagtgacttcaacaattctttcaagccatcaaactattgaggaaggcaatgtgttcaccctggaggctgtttccagattcctaaatgtacagtgatttcagcattctgtctgggaataagatccatccttccttcagcgcaatcaaccgatttctacctgaatttactctaatatcttttcttattacaagataactatttagattctgctttatgtttagtccgtatttctttaaccctaaaaagattatgaatttgacatgtcattgatctctctaataagcgaataccaacccacaaaccactcatccttttaaaaatatttcatgggcatcggtgccataactaataaatttttaagagtaccaactggtctttaattattttatgcttttaatcctgaaacagtattagttttcattcgagtggcttatttattatagtggcattagagtgattgtattcaaatagcaatttttcttcatgttttctgctaaaaggattatcaacattaaagagatttcctctttccaaa

SEQ ID NO: 212758 - DNA, 180 bp, Homo sapiens
ctgttggggttgacattcactgatccattagtctattactctgtcactaagatcagacagttgtattctgcatctgtgaataataacagctcttgttattctaatttatttggtgtttactacaatccatacctgatgctttaatacatgctctcattttatcttcaaactctccaaggt

SEQ ID NO: 212759 - DNA, 248 bp, Homo sapiens
gaaaatgtgtattctttaatttttggatgcataattctactataagcttttaagtcatcttaattaaaaaaaaatctgttgtgttgaatacatttcatcttttggtttccgaaaggagtatattgcattttgtcagctcctctttgtatgccatgcatttttgctgtacatacttcaagttctgttctttaagttgatacatgtttatttcttaatatattaaaatttatttaatattttattaataa

SEQ ID NO: 212760 - DNA, 386 bp, Homo sapiens
taaaaaacttctgaaagtttttctttttctggaaaatgcagagaaaatgactgtgtgatagtgggcattgatgctatttgacccactagtttataactgtgcattcaaataaacagtgccatttggtttcttctagtaatgtaaaagcagcatcttttgttgtttcccttagcattcttcacatttttgttcttttctcaatataaatgtccatttcctcacattttatttttgagtaatgaccatagccacagtttctatgtactgttctttaaataacagttttaaagctttatgttttattgtccattgttgaaagttgattccggctgtctgcaaacatttttgtgtctgattagctcatctaaaacttcctaccagaaagg

SEQ ID NO: 212761 - DNA, 429 bp, Homo sapiens
aaaaatatcttggaagattacagaatacaagtcgttttaaggaatttggaaatattgaagaatgacattttaagatctacaaacaggcttttaagttagctgctggagtggttgcagaatattcttctttccaccacccactcccaattttaaggtaaagaaatcaggaaagtagtgtctgcaaataaattcatttttatttgacaaataattaagtgcctactatgtggcaggcccttttctagcactggagataaagtggtggattaaactaagtcataactcatggaattatattttggttatattttgggaggcagccactacctaaagaatagttttctttatctgtacttcctaattttcctatgataaattgtattgtttctgcaatttgtattttcatattaaatatagatataaatgcca

SEQ ID NO: 212762 - DNA, 311 bp, Homo sapiens
aaattagtgtggttactctaaattgctaacatgaaaatcttaacctcctacttctgaagttatttggttttagctactcaatttttttttctaggcttccaaggttgctgttttgggcatggttttagaaatataattataagtttgatttcaaacttctggaccatgtaatcaagcacagactggtcatagtggaaaatatacaatttttagctctgcctacattgacaaaaaaaaaaatggctggatccacatcaattcaacttgagtgccatgtgtttacagtgacagtttctccccgaaaacgcaaa

SEQ ID NO: 212763 - DNA, 312 bp, Homo sapiens
  misc_feature (14)..(15): n is a, c, g, or t
  misc_feature (26)..(26): n is a, c, g, or t
ttaagctgcccttnngtcgactctcnaggatccccgtcagcgccctgtagtcggcgccctcctgtgcttggtgcagcgtttcggggaggacatttgccggaactggcgcgcactatactccctgcgtgggaacatgcacctggggagagaagcagccgaccagctctcctggagctgttccccaaaggcagtgtggctggtgggggcacctcaggcaggtcggcagcaccccagttctgagctgctctcgctggctgtctggtggcagtgaagggcacacctctctgggctcaggcaactcaccctggaatg

SEQ ID NO: 212764 - DNA, 740 bp, Homo sapiens
gtgtcgttacccgcgaattcggccattatggccgggcgcagtggctcacgtctgtaatcccaaaactttgggaggctgaggcaggtggatcgcttgaggtcaggagttcgagatcagctggccaacagggcaaaatcctctctctactaaaaatacaaaaaaaattagctgggtgtggtggcatgtgtctataatcccagctactcaggaggctgaggcaggagaattgctggaacccaggaggaggaggttgcagtaggttgagatcacgccactccactccagcctgggcgacagggcaagtgagactctcaaaaccgcagccataaggaaaagtctaacgcccatcctggtttaaggtttatttcgtattcctctgttggagataagattaagcaaaatctaataatttattaacacaatcaaataaatttaaaatggcaattttgtacataatatcctaattttgaaaaggacagcatttccaatgtttcttcagtctccagaacctatattgaaatcaatgactggaataagacaataattgagatgcatttgatttatcaactaaaggttctccttgaaaggcacttttggaggcccatttaaagggcccagacaattattcctcacctttaaaccttggcaggattgcgccctaagtttattatcccaggaaacttccttgtactgcctggggggatccttttacaggttccgggtgattggttccagtctcg

SEQ ID NO: 212765 - DNA, 1280 bp, Homo sapiens
gtgtcgttacccgcgaattcggccattatggccgggcgcagtggctcacgtctgtaatcccaaaactttgggaggctgaggcaggtggatcgcttgaggtcaggagttcgagatcagctggccaacagggcaaaatcctctctctactaaaaatacaaaaaaaattagctgggtgtggtggcatgtgtctataatcccagctactcaggaggctgaggcaggagaattgctggaacccaggaggaggaggttgcagtaggttgagatcacgccactccactccagcctgggcgacagggcaagtgagactctcaaaaccgcagccataaggaaaagtctaacgcccatcctggtttaaggtttatttcgtattcctctgttggagataagattaagcaaaatctaataatttattaacacaatcaaataaatttaaaatggcaattttgtacataatatcctaattttgaaaaggacagcatttccaatgtttcttcagtctccagaacctatattgaaatcaatgactggaataagacaataattgagatgcatttgatttatcaactaaaggttctccttgaaaaggacactactgaagtccattttaattgtctaaacaaaacaattattctggactttaaaacttggcagcaatagtaactaagattatatttccaagaaactacatttactgcctaaatgtggaatcctattacaagttacaggtgaattggatccagcaatcttaggactgaagtaggtctgagaagtcatcccctgcctctttattcctgaagaacccaatctgttttcaaagctcatctattaaagaataatgctattccctcggcatccaatttaaatgtttaacctaattacaagcagtttacaaactgggcatagtggcatgccagctactcggaagcttcatcggaagattcccaaaactcaaaatctccaggcctcagggatggtccgtaatccacgtttctcagagcgttgatccggaaaagactgcaccatgcctcaggtttcaataaccgtgaccacctcgttcacactggtccacacggatcctctcaacaacaaatacacacatctcgccgcttgccccgtacttaactgcgcatttacaacggctcaattccttctgtcaactcctctatagcgtatatctcacggcgcctttcatcgtgcttcgaaaccgggtccccctaagcgcggcagacccttctcagacggttgaccccctcctctctacactggtcctagcgccc

SEQ ID NO: 212766 - DNA, 1339 bp, Homo sapiens
gtgtcgttacccgcgaattcggccattatggccgggcgcagtggctcacgtctgtaatcccaaaactttgggaggctgaggcaggtggatcgcttgaggtcaggagttcgagatcagctggccaacagggcaaaatcctctctctactaaaaatacaaaaaaaattagctgggtgtggtggcatgtgtctataatcccagctactcaggaggctgaggcaggagaattgctggaacccaggaggaggaggttgcagtaggttgagatcacgccactccactccagcctgggcgacagggcaagtgagactctcaaaaaaaaaaaaagttccttttaagcttcaagattctaggttaaggaattaaaaatctatgtgccgcagccataaggaaaagtctaacgcccatcctggtttaaggtttatttcgtattcctctgttggagataagattaagcaaaatctaataatttattaacacaatcaaataaatttaaaatggcaattttgtacataatatcctaattttgaaaaggacagcatttccaatgtttcttcagtctccagaacctatattgaaatcaatgactggaataagacaataattgagatgcatttgatttatcaactaaaggttctccttgaaaaggacactactgaagtccattttaattgtctaaacaaaacaattattctggactttaaaacttggcagcaatagtaactaagattatatttccaagaaactacatttactgcctaaatgtggaatcctattacaagttacaggtgaattggatccagcaatcttaggactgaagtaggtctgagaagtcatcccctgcctctttattcctgaagaacccaatctgttttcaaagctcatctattaaagaataatgctattccctcggcatccaatttaaatgtttaacctaattacaagcagtttacaaactgggcatagtggcatgccagctactcggaagcttcatcggaagattcccaaaactcaaaatctccaggcctcagggatggtccgtaatccacgtttctcagagcgttgatccggaaaagactgcaccatgcctcaggtttcaataaccgtgaccacctcgttcacactggtccacacggatcctctcaacaacaaatacacacatctcgccgcttgccccgtacttaactgcgcatttacaacggctcaattccttctgtcaactcctctatagcgtatatctcacggcgcctttcatcgtgcttcgaaaccgggtccccctaagcgcggcagacccttctcagacggttgaccccctcctctctacactggtcctagcgccc

SEQ ID NO: 212767 - DNA, 479 bp, Homo sapiens
tgtgaatgaatgagccttcagatgattctagcctccagctgccaagctactcctaagcttcaagtcttcctgaaaccagtaaaggacagccactgcatttttgtctaaattcctgacccccagaatctctccttccaacaataagtggagtccatcgtccaccccttaaatctaggccaagaatgagacagaagtgaaggtgtgcctgttctgagcctaggcctgaagaggccttgtgcacttctgctcttgcctcctccttgagcttgggctaggctgatggagaattattgacctacacatgcttatcgctaattagtcatgtgaaagagatctgcctggattatcagaggtacctacttaatctgcagctgaccacaggtgtatgactgagtgagcccatctaagaccccacacacccaaaacactcagatgacttacagattcatgcaaaataataaatgcttattgttttaagc

SEQ ID NO: 212768 - DNA, 125 bp, Homo sapiens
agaatgccccccagcctgcccctcttcccctgcccttctgtttctgcccttgccacctcatgcctcagactgacactagcttcttcactgacctctctgctgcagggctgtcccctctgaccctc

SEQ ID NO: 212769 - DNA, 397 bp, Homo sapiens
aagaaagtatgggttgaaattttaaagctttcctaattgccagcatggttcactccatttgattttagtattaggtctctttaacttaagcaagttaagtccaagtttaagcgacagactaagcctggagtcaagtgtcatagcctgatgtacacactgatgtaggcactccttttatctcaagttttacatgaagtgctcctgagttggcttaaaatcacttgtgtggccggatgtggtggctcacgcctgtaatctcagcactttgggagggcaaggcaggtggatcacttgagtccaggagtttgagaccagcctggccaacatggtgaaaccccatctctactaaaaatacaaaataaaaataaaaatacaaaaattagctgggcatggtggc

SEQ ID NO: 212770 - DNA, 514 bp, Homo sapiens
actttaggatggtgatggtgcgaaagcaatatgcatccggtagacctgagttcgtatgcattcagtagacttcagattttgatttttccccaggctaacgatatgcagtatgatagtctcttgtaacgcagggcagcagcagtgagcccagctcccggtcagccctgtgatcacgaggataaatagcccatattccacagtgtgctgtattgacagatgactttgcccaactgtaggctaatgtcagtgttctgagcacatttaggctaggccaaatgatgatgtttctgtaggttgagggtattacccattttcaacttaggatattttcaacttacgaagggtttattgggatgtaactattgtaagttgaggaacatctgtacttaccttgctggtttgctttgaggattacatgagatgagataatgtatttccaagtgctgggtaaactctcaaatgccatacaaatggttcttactattaacacaattatagtctgcactgaacaatt

SEQ ID NO: 212771 - DNA, 316 bp, Homo sapiens
aaatgctaagacaattttagaatttaaggaattgaatatacagcattttcatgactagtccctcatgttcatttacgtgccaggatctcacatcctttgcagaaggaaaggtacattcctagggataaaataagtgcatgttacttggacaacatttttgctttctgtttgctaaataaaaatcccttttaaaaattcagtattgccacactttgccatattaaaaatgttttagattactatattatcctgaaactacatgtacacacacacccctaaaataagttttatggtatttcatatgcctgtacaggag

SEQ ID NO: 212772 - DNA, 321 bp, Homo sapiens
gtctcagaaaagcttcccttcccttaaagtttggtccattcaagggcaggagatggcagagtggaatttccatgtctctgcaggaacttcagccctgcagataggtcactcaggggctctgttctcaggaccagagggtgctcagaatccctgtcccagctcccacgtggcagatggggatactgaggaccagagcctggcacaaggtcaccaggtgattacaaatggggtctttcgctggaatctcaagaaaggtggcggaaagagggtgggtttggaggcagtcccaagtttgaatctcagttccactgtctctaagct

SEQ ID NO: 212773 - DNA, 532 bp, Homo sapiens
tccccttttgaaaatccctaataaaaacttgctggtttttgtggcttgtgaggcatcacggatcctaccaatgtgtgatgtctcccccggacgcccagctttaaaatttctctcttttgtactctgtccttctatttctcaagccagccaatgcttaggaatatagaaaagaacctacgtgattatcggggcaggccccccgatacgtacagctacttaggaggccgaggcaggaggattacatgaacctgggaggcaaaggatgcactgagttgagatcatgagatcacgccaaggcactctagcctgggcaagaaggtgagaccctgtctcaaaaaaaaaaaaaaaaggaaagaaagaaagcacccaagtaaaattagctgggcatggtggtgcatgcctgtagtcccagctattcaggaggctgaggcgggagaatcacttgagtccagaaggctaaggatgcagtgagccatgactgtgccactgtactccagcctgggcaacagaagatcctgtctccaaaaaaaaa

SEQ ID NO: 212774 - DNA, 191 bp, Homo sapiens
atccagatgatggtaactattgaaatgagagactcaaaagaagctggaaactgcattttttgttgtcccatgtggacacctgtgttcagttcctagttctacctcttgctgtctgtgtgttcttaggtaactgacttaaacctttctgagtctcattttcttcatttatgaaataaaagacataacactta

SEQ ID NO: 212775 - DNA, 488 bp, Homo sapiens
ttccagggcctgtggtctccagaacagggctgaaacctgttctgagttgacagtgctttcctaaggagaccccaagttgagaggaccctcttacccactcatcaataatcaaagcagacttgatgcccatcagagatgcccaatgattctggtgagccgttcctccctctggctgtcagtactggggagtatggtggggactttcagatagctcagtgaagctcagaaagagagggagttccccctgacacccgccccagtcagtaagccccggggcctgaggggcatccccactgctcgacctctccactctctcggggaggacgaggcagccttgacccacgagggctgatgaatgggtaggttatcggcaggctcctaggccaccagcttagaggtcacattgtcccttttagattcagtgtggcgggaatctaaaaggtcgaggatcgagaagcctgcaggatggcaaagtgagggaccccggc

SEQ ID NO: 212776 - DNA, 480 bp, Homo sapiens
ttaccctttaaagcatccatgtgtgacaatatgcatggagtattaacaacctgggaagctctttcaagcttcagtgtccagagttgtattggggcatcattacatagacatgattgatggatttattttccatgtgactgaactcagtctctgctgcccccttcccaggagtcagctgatatgtgacccaagggactgaccatgagtcacctctttagcccaaactataaggtatggtctgaggagtccatcatgaataacaaaaacactcctatcacttgggagagtctaagcgtttagaggttacctccctggagccaaggacaaaggccagacctttcttggccaaggctaaattctttacaacacatgaagaaactcagattataaactgccacggaaaaattacagcccatttaattttgattaattgaaaaggaaagtcaagataatctattagactaggtgctgcttatttag

SEQ ID NO: 212777 - DNA, 530 bp, Homo sapiens
ccgctctgggccaaattttcttaacctgttggcagatacactttctgtgaaatttcagaaattctttttaaaaatcttgtttgagtcaacagtgcttaccctcactgcttctattttgcattatattacatgaccaagacaccacaataaaggcaaagaagtaaaagtgaattatttgagggtaataagctgatgagttatttgtgggtgttattctatttagataaccccaaatctgtatacaagtttagcagaatcctagagtgttaagatcaaaatataatgattccattcttacctgccaagaacagaaaatataatttaataaattataaaaataaagcaactttaaataagtctataaaaattgagtaagaactttgaaaaaatgatcagactttatcaaaagatattgacaaagttaaataaacatagaagatacaatgaatgagaagaccaatattataaagcttttccccttaacccagagtttcacataatgccagtcaacatttcaacaggcgttgtta

SEQ ID NO: 212778 - DNA, 443 bp, Homo sapiens
cagttgcctttggccaagtggaaattctatgagtaaaaacatgtttgacattattaagctatctggcagaaactcttgaatatttaagggctgattttccagtgaagatttaaccacatgtacatatttgcactttaaaatgacatgttttctcggctgggcgcagtggctcacacctgtaatctcagcactttgggaggcctaggtgggtggatcacctgaggtcaggagtttgggaccagcctggctaacatagtgaaatcccgtctctactaaaaataaaaaactagctgggtggggtgtggtcacacctgtagtcccagctacttgggaggcttaggcaggagaatctcttgaacccaggaggcagaggttgcagtgaaccgagatcacaccactgcactcccgtctgggcgacagagtgagactccgtctcaaaaaaa

SEQ ID NO: 212779 - DNA, 410 bp, Homo sapiens
tgaccgagagctgggggtgagggagtcctgtgatcttggaggaaccagtatggagcggagccccgctcactggggtgggaggtcagggaggatgggcatcttatttcacgcaccacaggcccttgttcttcccagatgtcagcaggctttctccaataaatgcttcttcatttgctgttgcccttggaatcatcccagagattttaaacggctgtgtgtatgtttcatggggaagtctgtggcctccttacactgtcctgcagaactggcacctccggctgttttttgatgtgtgggggtgtgggcctgtgaggcaagagcttctgattttcaagagaaaatagagatctctatttttgtgtgaaacaccccctgtttaataagttttttaattcagtttttttgtttgg

SEQ ID NO: 212780 - DNA, 957 bp, Homo sapiens
attaattatgcaggagtttggctcctgagctaattatgtgttttacatttttctaggtagggattcagtatgatatgaggtagatgataaaacagcatggggaaaatttaaatttctacagagaacagaggagaaatacagataatttctcactagcatacctagggtatttgtggccactcttcatacttattctaatttagctggaatctaggattttttagctatactgccagaagcctccatggttttcttttttcctctctatgctttggtttagatagtttctattaactgttttttaaaacaaattagtaaattgtactgcattttagagcagttttaggtttacagaaaaaattgagcagcaagtacagaattccctacccgtagagttttcactattatcttgtatttgttaccactgatgaactcatatggttacactgttaacaactgagtacagtttacattaggtgccatgcttttctatgggttttagcaaatgcatttatatatctgccattttaatgtcagaatagttttactcccctgtgctccacccattcatccctctcttttcctccatccccaatcctctggcagccactgatcttttgactgtctctactgctttgctttttccagagtcttagatacttggaatcacacagtatgtagccttttcagacaagcagctttcacttagcagtatgcatttaagattcatggctttttaaggtttgatagctcatttcctttatcactaaataatactccattgtacagatgtatcacactttgttcattcacatcttggttgcttccagttttggaaggacatcttagttgcttccagttctggcaattataaacaaagctgctataaacatttgtgcatatttttgtggacaaaagttttttttaactcatttgagtaaagactaaggagtatga

SEQ ID NO: 212781 - DNA, 334 bp, Homo sapiens
aacagaaataatgtgaaaaagagatgaacagtcaattcataaaagaaaaaacctgaacaatcaagagacataccaaaagaaactcaatctcattagcaaacacttaagactggaaaaaaaattaagtctgaagtattctttttttttttttgaaaaagggacgggccttgcgaaaaaattgaacggattttaaccaggctattataaaaccccccaaagaaaattattgtgaaaaggaaatgaccggccatcctttaaaaaaaaaacccggaccactcaagagccttcccaagggaacctctttttttttggcacccttaaagagggaaaaaaa

SEQ ID NO: 212782 - DNA, 488 bp, Homo sapiens
tcaattaaaggtatcctttagatagttaagtctaaatgaaaggtcaatgattaaattaatggataaaagtccattgcacctacggaaaggtgcattggtctacagttcagctagtacctattttttgctaaagattaaattgcagctgggcggggtggctcatacctgtaatcccagcactttgaaaacctgatggaggccgggtgccgtggctcatgcctgtaaatcttagcactttgggaggccgaggtgggcggatcacttgaggtccggagttagagaccagcctgaccaacatggagaaaccctgtctctactaaaaatactaaattagccgggcatggtggcgcatgcctgtaatctcagctactggggaagctgaggtaggagaatcgcttgaacccgcgagttggaggttgcaatgagccaagatcatgccattgtactccagcctgggcaacaagagtgaaactcagtctcaaaaaaaa

SEQ ID NO: 212783 - DNA, 312 bp, Homo sapiens
agtcaggcccaactttttcaataatgacactgcaatccggtcatctgtgagatttgatggtttacttttcaggtgggagaaaggaatgttggtcagtttggctgaactggttgttgacttctggagagagccgaagctctgctagctcattggaactcttacccaggctaatttccctcggccagataaagagggaagccttatctgccttttaagtctttcagggttgggctgttttccccttaaagatgcctatgacagaatgggagcaagacatgtctttggcaacgaaataaatgaaaaatgatcaca

SEQ ID NO: 212784 - DNA, 348 bp, Homo sapiens
aataaagatcaaaagctactccaccaactgggcttttctgatgaacaaatccttacagtgaagacttctggcagtgggaccccatctgggagttcagcagattcttcaaccagctccagcagcagcagcagtggggtttttagttcttcatatgccatggagcaggagaaatccctccctggtgtagtgatggctctcgtatgtaacgtatttgacatgctttatcagctcgccaatctggaagagccaaggataactctacgagtacggaagcttctgctcttgatacccactgatccagccattcaggaagcccttgatcaacttgattctttaggaagaaaggta

SEQ ID NO: 212785 - DNA, 289 bp, Homo sapiens
agatactgttggctactgtcaattgagaagttaccttggtaaagagagaagccaaaactgtgggtatctgaccaagtgcattgacctggctcttgaatttgaagcacatacagtctttgctgcttggtttgcttggcaggttctgtgtttcatgaaggataggtaaacaaatgggttctctggctcaatttggatcattgttcatgctgatgattctcaaactgatgggcttcagaatcacatggggaacttgtttgacataatgtatttataaaaattcatcaccaga

SEQ ID NO: 212786 - DNA, 426 bp, Homo sapiens
cttaaaggccatcggtatttatatgccacaagtaaactaacattttttaatggtggggacaaatcatgtattcgtcatgctacttgtccacaaaacactgcactttaaaaactgatgatcgaatatcctacacaaacttttccaagaaaacagcaatgatttgttattgtggtcagatgcagtggctcacgcctgtaatcccagcaatttgggaggctgaggtgggtggatatctgaggtcaagagtttgagacaagcctggctaacacggtgaaaccccatctctactaaaaatacaaaaaattagccgggcctggtggtgggtgtctgtgatcccagttactcgggaggctgaggcaggagaatcgcttgaacccgggaggcggaggttgcagtgagccgagatcacaccactgcattctaacg

SEQ ID NO: 212787 - DNA, 459 bp, Homo sapiens
cctccagaaaaggggtccacctgggatcagggtgctcttggacactgttgacattaaaggtgctcattctttgctgcttggaaaaccaagaagttctgagagataaacagatggcttcggggcaagtcccagcaaaaagtgcaagaacctgggagcccacaacctattctgtgggaagaggagcattgttgcctctaagaacacatgcacatctgctgctaggctggccgagcccaggccgggctgccctgctctttgctcagtgcttcctgccaaaactaatctcagtggttcctttcagtgatgggtggactttggtggcttcatacagtctctgcagaatctagctggggagagggctgagtcagtttggaataaatgcatttgacagggctgagcctaaatgtaaaactttaaacgtgtataacatgcataaacctggaacttgtttctctaaca

SEQ ID NO: 212788 - DNA, 430 bp, Homo sapiens
ggtgtgaggcgcaggacagggcgccctggcccggcaggaagatgctgaacacagctcctgggagctggggagtccccggggagaggaaaagggaatcactctgttaaaggccctccgcgtgatggccatgtggttgccggtggcttgcgccattgtcactgagcagtgtggcaaactctccagcatggcgaccttgtgagggcaaggagtggcctccctgcacctcacacgctcatctctgtgcacatgtgtgttttcacgcacgggcacagcccctggtgtattcctgtactagtatctggcatctgaggctggtgcaccctgacctgggcctactgctgcccaggccacaagccttctccactatgatgagagaacaaggcttggtggcacccagcacctggctctcctggctccccgtcaccccccc

SEQ ID NO: 212789 - DNA, 368 bp, Homo sapiens
aagggttaaatattgctagaagggcatctcattatcaggctgcatgcatcatgcatgttgctagcttcccctacagcactcatctgctttcttaataaaggtactctcaagttaagggccttattcagtaacaggactccctgaccactccagagcaaatatccttcttctcctaccaacagtgagggagctagttttctgtacaggatgtatttctttttgtgtgtattcacacttgcaattattttcattccatgcactctgggattgaaatacaacttgggtaattgggaattggttgtgcattttctccaaacaaaaatcagtttagtctgtggtttgggttttctcctgcccaaaatcacaga

SEQ ID NO: 212790 - DNA, 358 bp, Homo sapiens
tagtctcagtatctgacgaggtcgtgtgagtctatgcatgtgggccgtcgttccactacggtcactgcactcgtgattactccagtagaggtactctcaagttaagggccttattcagtaacaggactccctgaccactccagagcaaatatccttcttctcctaccaacagtgagggagctagttttctgtacaggatgtatttctttttgtgtgtattcacacttgcaattattttcattccatgcactctgggattgaaatacaacttgggtaattgggaattggttgtgcattttctccaaacaaaaatcagtttagtctgtggtttgggttttctcctgcccaaaatcacaga

SEQ ID NO: 212791 - DNA, 265 bp, Homo sapiens
tatctgacattaggcttggggtcctatcagaatatcagttttacttttctagatttagcatgttcactagcttttgccattattggttatttctgtaggaaaaaaataattcagttcatccttttattaaaaaatgactcagcaactgcaatctgataggacattttctctaattttcatggagaatttttttaaactcttttatctccttttagaagttttttcttttcagaatttaatttttagttcttggttgcacatgtgg

SEQ ID NO: 212792 - DNA, 404 bp, Homo sapiens
tgcaactataactttgtcctcaatgtaataactggaaaaaataatttacgtttcaaaggctttaatctttatatttttttgaaaaggagccttcaccgagattctttaaaaattcttgctctgtcctacagtagagactgatagactcatggatatggtcctctaatggatctgtaccacctcagttctctgattgtcgccctgctgtggtgaaaattaaagcttattttcatctcatgtctaggatgtagtatgttcttgttgggaaaaaatgatgtttcttgagaaataagtgccttcagtatcactgtgtgtcacttcataaatatgactaatatctacttttaccaattgctgcaatttgatccttaaacagccatctttaaattatactttttctttgg

SEQ ID NO: 212793 - DNA, 391 bp, Homo sapiens
agcccaggttatggagaaccttggggccactctgtatggctattcaggttgttgattatataaatgtgtcatatctaagaaactgcattcacacagcggatagatactaacctggagcagttgaggctagtcatgcatcagctcagagaaacatgcatgcatacactggcacacatatgtgcataatgctgggttttttccctgacatgcactaaggtttctttttcccactgccactcttggagggcctgttatctctaccccaaacttgacatggttatctcatctgcagagcaaggtatagtggtgggtatggaatgttagggttgctgagggatatgcttcttggcttccggagtatggcaggagcgtgtatggatacctttggtgt

SEQ ID NO: 212794 - DNA, 543 bp, Homo sapiens
tcagatgttgggacttatgagaaaagacatttcagagtttgcagtgagttacagagagttggtacatgtagggtcgtggcttggaacatgatgtcaatgtcagggacagtctgagaaaaaaggaaaaagtgaaaggggcgattttggatgggcagtagttgaaagaatattagcaactacaggttgctatcagttattaaacttcttcaattttcaggtcttaggattaatgacagagtacaatctttttataaatggtcacctttttcttcggagtacttgtaaggttactgttactccaaaatgtttgtacctactatgtgcaagcaaggcttcttggatattaaaaatgaatgaaacattgaccaaccccttactctacttgcactggagtagaaagtaataaattccttaaacaataacttggtagctagaggagggagatgaggtttctgtgcagagggagtaagaaaaagtcttcagaaaggaggtattttgaatttgctaataataataacaacataattgcagctaacatttgag

SEQ ID NO: 212795 - DNA, 416 bp, Homo sapiens
tcttccccttttgctaaaacatatggtagtactccctgtatccaaattatgacagctttggaggagctctttggcaaatgctagactataaaaaatctacaaggcctcgaagattaaaaaatatccttttttcatagccgcactattgataaaattcagaggcctcataccacgggaggccatgataggagaattgcttcagcccagcagtttgagaccagcttgggtatcatagtgagacttcgtctctacaaaaaatgaaaaattagcggtcatagtggcacctgcctgtagtcctagctatttgggaagctgaggtagcaggatcatttgagcttgggaggtcaaggctgcagtgatgagctgtgattgcaccactgcaccccagcctggcaacacagcaaggacctgtctca

SEQ ID NO: 212796 - DNA, 299 bp, Homo sapiens
ttgtgaaaagtgctcatattgctgattccattgcttacatatgatcatataagtcttttctctcctttctgtagtgtggtttaaacttaatccttaaaggacatgtatttgaatttttcagctggttagaaacctgaatataccaatcaaagaaaactgctccttacatgctacagatttggttttcttcctgtactaagatgtcttttagatatagtaaatttgttaaagccaagacttcctatggaacgaagtttgatgggaggggggacattgagtagtaagatcactcttgtaac

SEQ ID NO: 212797 - DNA, 626 bp, Homo sapiens
agtgttctacctaacctcaggagtgctgtatcaccacttcttcagtatgctgttggtcacacagaccagccctggtactgtgtgggaagggactacatacgagtgaatactagaagggacgatcatcttggagcctggctacagacatagagcatgctttcaaggagctttcaattgacaagaagatgttgaaatgtacagtttgcaactttcttgccattatctcctaacatcatctgtacccagtatgtagccctgaccacaatgaaaaaatcttgccaagtgggaaaatgacaaccacttttattaattatctttttattagtgatagctagatttgatgattgatgtaagctgttactaactataagttatctagaagtcagttacaaaggttttacaactttaggaattaagtgatggtccataattccttacctgaaacccttgaggccagaatgtttttatgttttagaaagggatctaccatatattatgttatattcccagcaagatccatgacaaacaaacacattaagttcccacgaacacattaatacttacacagcaaaagttatgactgtttacactgtaaatataggaataaatgtagtctttataaataa

SEQ ID NO: 212798 - DNA, 364 bp, Homo sapiens
ggctgaccccaggatcattatcgtgttgccaagaaaaagaaccatgttcagatagtaatgtgtgatgttctgaattctgttggatatttgtagtatgtttaagatgtttatatcatatgaatgataatattataaggagctatataatttactgtttaaaaaaatgaaacctgaaagttgccggttagtagcacatctttttaacttttttataaatacattttagagacaggtctccccgtgttgtccaggcaggagtacaatggcacctacttagctcactgcaaccttgaactcctgtactcaagtgatcttccgcctcagcttcccaagtagttaggattgcagggtgcaacacgaataa

SEQ ID NO: 212799 - DNA, 240 bp, Homo sapiens
ctttttagtgtgaagagacctggcctgtggggctgaccctggtgtggctgtgaggcagacacaaagggacatttacatccagtcctgaagattacagtccagccctgaagcaacaactaggaaactattccaaaaggaggggatggggctgagtgtggggttctattctcttcataactttaactagaactcaaattgtgtaccttggtagcatccaatcataaatttattttgtcgtat

SEQ ID NO: 212800 - DNA, 321 bp, Homo sapiens
ggtcaccattttgagaggcagcaagggtcttcctaaccctcagctccctctgatttttggaattcagatttggattttggatgtacatcaagaggctggctccatgcattttaattaagttgtcttttttcatttattactaatacactcctcttaactatgatttattggttaaacaaagcaccataagccgtcacttattcatcttaatttcaacaaaattaaagtagtcgctgttagattgcacctaattgcacttgcaatgaaaagaacggagatgttaatcaaaataaattgaagataaacaataaaatcattaca

SEQ ID NO: 212801 - DNA, 2708 bp, Homo sapiens
  misc_feature (847)..(847): n is a, c, g, or t
aatacaaactcactggtttgtgaaagataattagattttaattataaagtagtaatacaaactcactggtttatgaaagataattagatccaaattacatttctgacaaaattgggcccctatatgtaattaaggctgtggaacaaaatttggggtaaagtagcctgtagaatgcagatcacgtaaaatattaaatttgacacacagaaaaccaaaagtaaattccctagaaaagacatgtctaacgaacagaatgtaaattccgtagaaactcgggtcctcaaaccacaaagacatttgtctttaaaccaggaaagacttgccagaaaagacaaaaggtcttctgtcatcccaggagagatgtaaggtcctttatttaccagatccagaataaagtcaagaggttctaccttgattttagagggagagagagtcttggcctgacaaaaggtgtgccgtggaagcagagagctccaggggctcatatgagtactgcacaccagttctaagcatcacaaactgtgtccaaaagtaatcctattcaaggtcctacctctggacactcttcatgtcaacctaaataacaaacagagaggggctctctaaaagaaaataatgtttatttgggaatagggtattggaacaggagtccacaggtcatagtaaattgtttgcatattcaggaaggtaaaggaagacaatgggtgttaaagaaaaaatgaggaggattacataattgttttgaaataattatccttgcctataaggatccataacaagggtggtggcagcccgaggttggacaagtagttgctgggcagatgtcctcagagaagtatttttgtgngtgtgtaaggttgcagtggcctttgtgcagagttgtggtttttgcagagtcttctgtgacagttttgctattatgtatacaagcatgagaaccctcccttcacagccttccctggctctatttgtcagggtttttttatttttttgttttttttaaaaaaaacaaaaaaacagtgactccattttgattctgacaactttcattgtcagaactgaattgtttctttatctgtaaggtctgttctccatctctttttctccccttataatttatcaaataaaacttttttatacttttgcattttctatgtttggagtttactgattccatccccttgctggagttgaacatgtttttctattttctataaattgataattagagctataggtgtgatcagattcaggttatttcccaccaatccccatccctgttctttttttgctgctgctgctgcaagaatcgttcataatatgtatacttctaataagagacactcactccctaatttccttccttgtcatcctagtttgtttccttttctttcttcccttccttcccctcccatctctttttttcatcttcctctttccctcccttcctcccttccttccatttttccttccttccttctgaccgtccatctgttgttccttcctccttccctccttccttccaagagccaatgcttccttgctgccttgtcatcctacatgtggctaaacaagacagatgatttcttaaatttatcgtccctctctcccaaatttgcaagagtttgggatcctcttaagttttaagacatccccaagaaaattcctcacttgttttctccattttataccctggcacttgaagttttcttcctatagtctgaagacttcttaaaatgtagagcctgatcttgttctccattctattcctagtgcctaagatagtgccaagcacacagtaggcatttactgtaatatttgagctgcatcaactgtgtcagttagatcctggcatactgaatggaataattgagattataatggactatttcaaaggtatatgtgcagggttaagagaaaccaacaagaaatgataagatgctaaactagtaacagagccagctggtactccaaggtaccaggacaagagaaggaacaaacctagagggctctaggagtggataacattcctggagctgtagccttgggtgcaggaacactacaaccactgccaccctgtggctcagcaggaaaaagatgaggaaatacatacactaaccttattttctcctaccctcctatctgctgatacctcttaattcctgaacttacctagaagccagtctataaaagtcagcctcccagaattcaggaaaaagtgaggggtggagaatggatctggagaagcagatgtagaaactgtagtacaatggacaaaaccttccctggagtatagcagttattagtttcccaggaggctaaaactttgtttcgttgggcttggacagtgattaagggatgcaggagcagggaaaaaagaatttggcctgaatatattaaagcagcagtccataaatcccctccactcaaatctttctacagctacttagtgcccttcagttacttttatacaatttcaagtctgcctttagtgttaattttaacctgatttaacctatattccaggaagtggtaagcaatattcagttgatctgtgccagacccagccttttaattaagagattattctggctgggtgtggtggctcacacctgtaatcccaacactttgggagactgaggcgggtggatcacgaggtcgggagatccagaccatcctagctaacacggtgaaaccccgtctctact

SEQ ID NO: 212802 - DNA, 578 bp, Homo sapiens
cagattatttctgtacaaattccagctactatataatttcatccaaaaaatactgcatattctccccaagagattaggattttttaaaaaaagaactgtaataccaatatcatacctaaaacaacccaataagaactccagtaagccttcatattccatcaattgtttagtaaatttttttttacagttgctttgtttgaatctggagccaaagtccatacttagtcttctgtatttcatacattctatttttttttttttttttttgagatggagtttccaattttagataacgtctaagtgactccttattatgaaagatacaagttaatatccttcccatattttattaccttacttcccaattttaaaattataacttttattctgtgtagactcataatatgtatattctattctataactataattcaccagatctgctctactttatctgaatgtatgcagagagagctgatgctggttacatgagagtttattatattgttttttacacatttttgtatgcctgaattatttgtaattttgaaaaaaaggaatgttttaaactaaaaaat

SEQ ID NO: 212803 - DNA, 550 bp, Homo sapiens
tagtaatactgtaagaagaaggcttttggaatagactctggtattttgacatgatctagatttagtgatttttaaatagagtatattgaataaggtttgtttatattaggggctaaataaacaagatcacaggatgctagggctggcttagctcaattatttcatattacagatgagaaaactgaggtgtagtaaaattaggactagagaatccacagcatgaaaatagtatcgatttttttcctgctactgctctacccacagtggcatagctgtgagcagcatctatgtaatctgatcatcacacaccccaactagagttctttgtatgacaccataatatagccagaaaattatatcttattttacaaggagtgcaggattgattagaggatttcggtttagattcagtgtgttttaaatgttattttaatagtttacttacattaagattcaccaatgtaaatgcacagtttgaagagttttgacaaatgcatataatcatgtgaccaccaccacaatcataaaacgtttttatccatccacaaaa

SEQ ID NO: 212804 - DNA, 535 bp, Homo sapiens
gtaaagaggacacaattgcataatggtatgtacttaaaatcacttggagcatcctgtcccagagaggagggcatttgagttgaaggactttgggtgggggaagcatgggcccccagggacttcactctctttgcatccttcagctttgagcctggaaatccttcagactttgttttgctccaggctgttccagatgtggtttatttttctgttgatactatggtgaatctgtttactttaaaaactacattttaaggccaggcgcggtggctcacgcctgtaatcccagcactttgggaggccaaggcgggcagatcatgaggtcaggagatcgagaccatcctggctaacacggtgaaaccccgtctccactaaaaatacaaaaaattagccggacatggtggcgggagcctgtagtcccagctactcgggaggctgaggcaggagaatggtgtgaacccgggaggtggagcttgcagtgagccgagattgtgcctctgcactccagcctgggtgacagagcgagactccatct

SEQ ID NO: 212805 - DNA, 336 bp, Homo sapiens
tctcactatattgcccaggctggacctgaactccttgaaatcctctcacctcagactcctgagtagctggaactgtaggcatgtgtcactctgctggctcttataatcctttttattggtagtaatgtcccctctttcatttctgatttatttgagacatctggtttccttagtcaatctagctaaaagttgtcaattctgttaatctttttgcaatttttgcttcctatgttttgatgctctattgctggtgtgtaaatatttataattattatatcttctgctgcattaaattttttattaatacataatgtcattctatgttctctgtaatct

SEQ ID NO: 212806 - DNA, 126 bp, Homo sapiens
gagattgcgctacagcactccagcctgggtgacagagcgagactgcatctcaaaaaaaaaaaaaaaagattccatattctgcttctttacagtcatgccccaggttgcccttctgtgatgttaata

SEQ ID NO: 212807 - DNA, 405 bp, Homo sapiens
attattggcccttttccagaagctgaggttcaaagatattaaataactgaatcaaggtcatccaactagtgagtgatggtggggctggtattggaatccaggtcagtctacttctaaagtccatgttcttaggtactccaagtagtggaccaaatgttggtgtaatggactgaatatttatatctccccaaaatttatatgctgaaatcccagcccccagggtgatggtatttgggagatgattagttcatgaagatagaaccttcatgaatgaagctgggtgcagtggctcatacctataatgccaacactttgggaggccgaggtgggtggattgcttgaggccaggagtgcgagaccagcctggcagccttgtcaacatggcaaaaccccatctctacaaaa

SEQ ID NO: 212808 - DNA, 464 bp, Homo sapiens
tcattaacttgagaagccagtttgtggccataacactctccaatgtcacctcctctaccatgatctgtgcttaaaattctgcagtactatctttggaataaagatgatgagtccaaaatacaagcatttcttttcattgcccttgacaattatctttttcctttttgagacagggtcttgctctgtcacccaggctggagtgcagtgctgcaatctcggctcactgcagccttgaacttctgggctcaagagatcctcccgtcgcagcctgttgagtggctaggactacaggtgtgagccacctcaccttgctaatttttaattttttttgtagagacagggtcttgctatgttgcccaggctgacagttacttttgtttccttatttgttaatgtttttcttttttttaaatcgctccttgtggagcagtgctaactcttaggcagtgcagctgagctgtcaa

SEQ ID NO: 212809 - DNA, 516 bp, Homo sapiens
cagtgaaataccaccacaactctaccaaagtaggtaaaattaaaaccactgacaacatcaagagtgggcaacgatgtagaacaactggaattctcctacatttttcttgggaataaattagtaaagacactcaaaaaattggccatatctacaaaagcctaatagtgttgaagcaaacgttgcactaagcaaagttaagcatgtcctataacctgaatgccgtcttccaccaaaatttatatgttgaaacccaacatccaatgtatcagtattaatttggattaggtgattaggtcctgaggaaaaagccctcataaatgggattgatgtcctcataaaaggggccccagagaactaccttgcccctctgccatgtgagtacacagtgagaaggtgccatctataaagcagagaataagcccttaccagacatcaaatataatggtactttgattttggacttcccagcctctaaaattgtacgaaataaatttatgttgtttataagccaccaaa

SEQ ID NO: 212810 - DNA, 491 bp, Homo sapiens
tgtagctggtcctgcctctggttatggtgaaatggaatgtatgacaactcctgagactgggagtctgggaagctgctgcggagagccctctcctcattttcatcaggctcagctacgcaacctctggtggaaagctatggcctgttgaggagggaggatgtcgtttttgagttagtgagttttccagttttgtttgagctccaaagctttcctccaaacaactggaaagatggctgaataattggctgaaagggatttaatcccttgaaaaacctttctggtagggagttgctggcaatactggtgggtttttcatgattttattttacagagggcttgctacgtaaaccagtgagccaggagaaacagaataaagtctgttctggaaggaaaaatgagacctggtgtgccacgagtctagtgttctcataggaaggctctaaaaacaaactcagctttcctgctattgaatgattatctctataaaagga

SEQ ID NO: 212811 - DNA, 548 bp, Homo sapiens
ctcagtctttcctatagctgaaaacaaagcaatcatcttcgacccttaatagcccttcatattcttgcaagcagtttttttgggttcttctttggtctacccatctctggaggaaagggaaggaaatttacctggttttttgttttgaaacctagttgctttctctagactgtggcttgaaacatacaagcctttgtgcaaagcactgggtcagggttgggggtgctggggccgagagaaccacaggagacccactctgtttgtcaccagtggcctcttgagccgcccgtgagtaggacggtgctcaggcgagcccggcaaggtcccctccgccctagctgcttatccattcaacaccctcctgctggctcctctgtttagagtccagaattatgaatagtttaaaaaataagagcaaatgcctgctgagcccttgctatgcaccaagcacattaggtattatctcaagaactttccatatgttatctcaacttatctttgtaacagctataatttcacactagttaattacttaactatgatttaat

SEQ ID NO: 212812 - DNA, 199 bp, Homo sapiens
ccaaccagctctgtccccgtttcttcttattgccagaaatatacctcaagaaggtccttttccaacactccatgcccaaagatatgttccacagctctgtttattattttcccagcttctatttattaaagaaagtagtcagagcaggaaatgggacaagtcaaatgatcacaatcaatctcatcacctttgcaacatg

SEQ ID NO: 212813 - DNA, 318 bp, Homo sapiens
gagactgtcccagttttagcactaaaaagtcccatgcctctagaaactcctcaatcccagatgaacagggacagttggtctctggcacacacatgtatcagtcataaaataagagttccaaagatgttacatcttgaaactcttttttaactagaaaattctcatatccaaaacttcctacagtgatatgcctttcagtcccagaaatgaaatagcatatcatggtctcagagactttatgtacttttcagccttctctccaagacaagtaatatcctctcttcctacagcttcctgattgtacccatccccattccc

SEQ ID NO: 212814 - DNA, 439 bp, Homo sapiens
tattcttgatattcagagtcctgcagatgtggcccctctctgctattctaccctgctttcccacagtgtcctcttgcatcagctggccatctctccatgactgtgttccccctcctctgggcctttgctctagtgttcctttggcttggagtatctgctcacatctgccaagcagagccgtatccatgcttcaagctttcttccatattttcttcctttgctttctttcctttttctttcttcccttgctttccctttccctttctctttctcctcttttcttttttctttcttcagggtcttgctcttgcccaggctggtgcagtggtgcaatcatagttcattgtaacctcgaattcctgggctcaagtgatcttcccacctcagctttctgagtagctggaactacaggtgtgttgccaccacactcagttaattt

SEQ ID NO: 212815 - DNA, 684 bp, Homo sapiens
tggctatttcccagtcctgtttcagctgagcagctgtcaagagaaagtctgtgccaagccagagcttggagattcttggaggatgtgtttagcaccatgcttaggtttcaacatacttgttctaagaaaaaagatacttcctgaagcaagctttaacagtcaagttggctgctcttaatcacatctaattagtactggagattggagaaagccttattagaaattagaatgtgcttcatttccacagttgatttcagctgtgattatagggttgccttccttctttctcttatacatttcatactacacccccatcctcctaatatagttatatcgtacttttaataaaacctatatttggttttttcataattgtggctgtgtaaatactatttgctaagtcagtatctatgactatgttttatttcttacagaactttaattttactggcattcatgaattatctcatttttttcatttgtttaatttttttacctaaagcttaatttcttacatcttccagtgcctttgtaaaatccctcagaaataactatcttggattctctgtcacattcctgtctggatttgttgccttctaggccttctccatatgttactgtgactttgcttcaccattttgagattctcttagtttttctcctatattggatcccttctttgct

SEQ ID NO: 212816 - DNA, 453 bp, Homo sapiens
gcacccggccagatgtagcgtttctaagcttcttttcaatagggtgtttataggtgtgctgtggaatacctgagtggctaaataaattcagaagctatttggataatacaaagttttaaaaagccttttacgaaagggtttttctttttctttttgggggtggggagggaagacagagtcgcgctctgtcaaccaggctggagcgcagtggcatgattatcggctcactgcaacctctgcctcccgggttcaagcgattctcttgcctcagcctcccaagtagctgggatcacaggtgcccaccatcacacctggctaatttttttttaatttttagtagagacggggtttcactatgttggccaggctagtctcgaactcctgacctcaggtgatctgcccttctcgggttcccaaagtgctgggattataggcgcgagccaccacacctgg

SEQ ID NO: 212817 - DNA, 378 bp, Homo sapiens
cgtgcttgtagccaggagttcaggatccacctgggtagcatggcgaaaccccacctctaccaaaaatacaaaaaattaggcttggtggcgtgtgcttgtagtcccgggtactcgggaggctgaggtgggagaatcacctgagcccgtgagttgaggctgcaatgagccatgatcatgcccctgcattctagcctgggccacagagtgagaccctgtctcaaaaaaagaaaaaaaaaaagaattgatacatagctaaatcttaatgaccttggattggcaaagtatttctagaagtgacatcaaaagcatgaagaacaaaagaaaaaataaataattggacttcatcaatatttaaaacaaaacgataccatcaagaca

SEQ ID NO: 212818 - DNA, 329 bp, Homo sapiens
tccctcctgccactagagtccagagtccaaactgtcagataacagcttatcagcaatcagtgatcctcaaggcacaggaaatgtgaggacaaatggctgacagaccacctgagagagtgccaggagagaatggggttgaccaaaacacaggcatcagctttccctgttccacagctgtcattaggctaacagtaacgtgactgatgtgtgtacttggttacacatctgggccatcctggacatgaggaaacagagaagttcactgaattggcaagattgggtcagaaccaaggaactgaagagccaagccaacactcttccctcacttt

SEQ ID NO: 212819 - DNA, 397 bp, Homo sapiens
aagaaactccttcaatttctatagtctacctgggcacaacttcccttgataatattttaaagctgattttcaattactgcatatcacacttcaaacactattctaagtgttagtacatgtatagtatatagtaattcatttaatcctcacaataatcccctgagcccaatactattatcatccccactttacaaatgaaaaaactgagccagaaaaaggttaagtaacctgcacaaagctggtaagtgatacagccaagattcaaacccagcaattatgccccaaagctcatacatttgaccacttccctttactgttgctgaggtcaagtgagtggcaatcaggatcactgggtttcttaagatcagctcagctcaaacttccattcacatcctgg

SEQ ID NO: 212820 - DNA, 407 bp, Homo sapiens
  misc_feature (90)..(90): n is a, c, g, or t
  misc_feature (111)..(111): n is a, c, g, or t
  misc_feature (132)..(132): n is a, c, g, or t
  misc_feature (138)..(138): n is a, c, g, or t
  misc_feature (140)..(140): n is a, c, g, or t
caaagtgttaatcttataagtactaggctgaattttttatgagtcttgtgactttggtctatgtggggacttataggtgttatggtttanttagttccaacccttacttgntgattcaccccagtgaccccntggagntngtggtctcaggagcagctgagaccctcagcccaccacaaaacaagtccgactccaaggctggtgagtgaggagatgcttgccgtgatgacgctgggcacagagggtcaggtcctgtcaagaggagctgggtgtcctgggtggacatttgaagaattatattcattccaacttgaagaattattcaacacctttaacaatgtatatgtgaagtactttattctttcatattttaaaaataaaagataattatccatgagaaagctact

SEQ ID NO: 212821 - DNA, 357 bp, Homo sapiens
ataagaagtgtatttacacaaagacttaaaatatagaaacacatttggttctaaataattacaattaatgaagaccctgaatcttcatattgaggtaccgaggtcaaaggctctgcggttaagttggaagctgttctttataactttctttgcacattagaacgcataatatttggtagatttagagaaaaaagtctggtgggacttagaatcactgagtttatatagtatgactagatgtatacttgcagagcaaattccatcattgttatatccttatgtataaaacaatatcttttatatgtaacaatatattttattttatacttatgaatattaaatattctgtttaataac

SEQ ID NO: 212822 - DNA, 545 bp, Homo sapiens
accttcaaaattcaaacacatgttcttcaagagtcaattacattagagtatttgctgcaggtcatctgtttcagcatcctctggaaagtagatttctgggcctattttagaccttctaaaccatgaggcctggaaactgcaactaaagtttgagtccctgaagcaccccaggttcttggctggtggagaaacaaacaaaaaaatcctcatttggccttggaatgggtagggaagcttgtctgatgctacatttctgtggtcttacttacgatgcagttttaaaactgaaaaatttttaaataaaagtagctgagctgtaaagtacctaaaacatagttgcatatacaaattaaaactcgtgtattgagtatctgctatgctccagcactgtgctgtggtctgaatgtttgcatacccccaaattcatatgttgaaatcctaacccccaaggtgatgatattaggacatggggactttgggtggtaattaagtcataaaggcagagccttcatgagtgagatcagtgcccttttaaatgagaccca

SEQ ID NO: 212823 - DNA, 309 bp, Homo sapiens
cccctggaccttggctcaccacctaagactgaacaagcactaaaggaccgaccagcccgctaacagctcactccaaaaatgagcgggactcccagagaaactatttttattggagcatcctggttttgccacctgctcaccccactgcctgtccttctctccaaggaggcttctgccagccctgcttgtccttccctagaaaaggaaagccttttcctgtctgatcctgagacacctgtagattgagtttggaatattctccctattgcaatagtattgttgaataagttttatttttccctacctctg

SEQ ID NO: 212824 - DNA, 217 bp, Homo sapiens
ctgttcagtctaggggagaactaacggtgagatctccaagctggtccttgtgatgctaaaggactttaatttggttgtgtctatcaggtacgctagcagctccaggcagctggctagcccaccactgggctagagaaacaccctccagcatgcctctagcatggccagagaggtggagggcagacatcatggaatcagacacctccccgggatacag

SEQ ID NO: 212825 - DNA, 504 bp, Homo sapiens
agctaaggactggacatatgcacgggagtaaatcgctccaccctgcctatccaggcgtctgcttgctcaggtgtcaggtggtgattagactcatagtttgcatctgtggtgttaaatcttctggagtacttatgtgtgcttcctcactggtcccacaacagttatctaagtgtgctaagcagacatgatccccattgtgcagatgaaactgaagtaagtggcctgctgagggtcccagtcatgtctccagagatgtgatgcaaagctcttaattcttaatcttttgtgctgtctacgacatgagcagccttgcagtgcaccaagcgtctcgtggggtgtaaggcctgtgaaaatatatttgagtataaaatattattggccgggtgtgttgactcatgcctgtaatcccagcactttgggaggccaaggcgggcagattgcctgaggtcagaagttccagaccagtctgaacaacatggtgaaaccccgtctctactagaaata

SEQ ID NO: 212826 - DNA, 264 bp, Homo sapiens
agtcatcagaaaggagttctgtagaagtggcaggggaggccaggagggaggcagttggagcagtccagaagggagggcctgtgggcctggactggaacagggcacgggcagtggtgttggcggagggctggggaggagtttacggtgactgtcttgggtggccagatggatggtgtctcccagagatggacacccagaagagggtatgggtctggggagagatggtgggggagttcaggtgtgatggtgcatccaccaggtgga

SEQ ID NO: 212827 - DNA, 423 bp, Homo sapiens
atgtacattgtgaaaagtgagtcatggctttttctctgcaatagtgtagacgtttctactcttaaaaataaagatagattaaaatataacacctcaactccaagagctccaagcctcccacagaacatcgtagtcctgctacactcagttgaacatttatgccctggccctggcacccacctcccttagcctgcctgtgaaggcgtctctctgatgccctatctagacccgttcttccttttcctacatttgaactttttctgagatagtttcagtttccataatctctgtgtgatgattttcatcaagaattccgactaaggagattttattcttttaagaagatttgttcaacatatacttacatgagattttgttctttttaaagactgtgtaaataaattatctgattaagaaaaattt

SEQ ID NO: 212828 - DNA, 390 bp, Homo sapiens
caagtagacttagtgtttgaaataccatctttggatacctgaagcctgaggtaattgattcttgtggccttgctttttaaatttatcatttgatattttgaattgcagataaatttagataactgaaaggaataacctcagcagaatgtaggcgtctccattttgttcttattaaattatcaaagaatgaaatgtaaaatgaattatttaaaatgattgtccttgggggcctttggtactgagtcatttaaatggactggtaagaaggtggccaggcgcagtggctcatgcctgtaatcctggcactttgggaggccaaggcaggcagattgtctgagctcaggaggttgagaccagcctgggcaacatggcgaaaccccatctctacta

SEQ ID NO: 212829 - DNA, 596 bp, Homo sapiens
gtatatccatataaacgaatagtgcaattgcctaaaatgttgtcgattaaaaaatacttaatggtgtggaaaataactataatacaatgttaatacagcaatgtatatagcactttatgacacacatatttgctcatatataattaaaaataagatatttgtctaaatgttacttgtcttgattttaggtgaaaagatttgatgtgacatttttctctctttctcgcttgtttgtgtcattatctctaatggtttttgtattttctaaatctccttacttttagctttcaccatttagacaattgtcgggggacagggaagaaggaaagtataaataatgccagcatcaacataattatttttgtcaaagcttccttatattaaactactgtaaaacttgtattttgttcatcatgagtacatacaaatgtccggtttcgtatagaaagatgaacaagtgagggatcggacagacacacacatctttcacctgggcatgcagaatgtttgcctgaatgggaattactaaatttaaaataattgcactgaagaatcaagtaattttccttttcccatcttactttcttttaaaacat

SEQ ID NO: 212830 - DNA, 523 bp, Homo sapiens
tggcacatgtttacctatgtaacaaacctgcacatcctgctcatgtaccccggaacttcaattaaaaaaaaaaagaagaaatgccatctcactaggtgagcatcacattagtcattgctgctcctgtcaccttctggtaatgatcatgcttcatgtatttttatttccctgtcattactctcttgttttttctcctggttttacctaatagataaatgccttctaaatgattttgttgtctcacagtttttttttctgaatatttagccctgtttattcccagaaaggggcacttaaaaatacatatgaccctaatcatgtgagtgactttatctcaaggctaaagaataggccagctggtgcagccactgccaagtgtcacccaggggcctgggtgatggtggctattgccaccgcacatgacatcagggaagtggaggggaagcttaaagatccagtctctatgttgcgggttcccacccaaatgtagagctgtggacagaggattgatcaaaaaaaacaa

SEQ ID NO: 212831 - DNA, 295 bp, Homo sapiens
ttctttgttggagtatggaatctgaaattgtttatgaacctgttggtctttcgtgaacttcaaatggatcttttacccatgcctgatttgtaacatgcattagtgacttgaaatagtattcactgtgttttgcagatctccaaatattgacacatttcattatacagtactcctttcccctcagaaaatcctcacattcattaatatcactgcccatctcatcataaaagtctttaattaatgggaagctgtcaggctcataaatatcaaatgttttccaaaattctaattttta

SEQ ID NO: 212832 - DNA, 447 bp, Homo sapiens
gaaaatagctgaatagcattccatcgtgagtgtgtactatattttgtttatccattcatgtgttgatgggaacttatattgcttgcaaatcttggctgttgtgaataatgctgcaataaatgtgagagtgcttgatatctctttgatatactgatttgctttcttttgggagtacacctagcagtgagattgctgtttcatattgtagttctatttttagttctttgagaaacctctaaactgttctccatagtggttgtactaatttacattgccaccaacagtgtacaagggttccttttcttcacatcttctcacagcatttgttattgcttgtcttttggataaaagccattttaactagggtgagatgatatctcattgtatttttgatttgcatttctctgatgatcagtgatgttgagcaccttcttatatacctgcttg

SEQ ID NO: 212833 - DNA, 413 bp, Homo sapiens
atatccttgtaatttaaaaatggactgttatatatactgacagttttgtttaagatagctaggaccatactagaaattatggtagagcaatgggaaactatctttaaatatacctctgaggccgggcacagtggctcacgtctgtaatcttagctgagattacagctggataggctgaggcgggagggtcgcttgaacccaggagtttgagaccagcctgagcaacatgatgaaaccctgtgtctacaagaaatagaaaaattagccagtcatggtggcacacgcctgtagtctcagctactcaggaggctaaagtgagagaactgcttgagcccaggaggcggaggcttcagtgagcagagatcacaccactgcactccagcctggtgtcagagcgagaccctgtctcaaaa

SEQ ID NO: 212834 - DNA, 435 bp, Homo sapiens
agtgaagtttattgtacgtttgtttccatgcaacaccgtcacgctagaagggtcaagtgagagagatcattagaactgtgttgatttactgggcccagttgtgcactttccctgcagggaaaggaggaaagaggctttaagagaggagctgaggggtgctgggtggggagggaagagcaggctatttgtggagggttgggggaacgatgtattgttgttgttgttttcccctggaacccctaatgggtttagaacagatgctctgcctgtatctcctgaagaggcaccaaagatcttgtttaaaagggaagctaggctgggtgtggtggctcatgcctgtaatcccagcactttgggaggcgaggtgaaaggattgcttgagtccgggagtttgaaaccagtctaggcaacatagcaagaccctgtctctattaa

SEQ ID NO: 212835 - DNA, 399 bp, Homo sapiens
ggtggttctttgagttcctagttgtttagttgaacatgaagcaggtggcaaatgtaagtttagtctacacactgattccttcctgttcgcagaagggttcatgtgttcgtttttaaataatcttcgggtaaggaatagagaaacaccaagcccaagaggcagaaggatctgtctatagctaatgagtgagaaactaactgtgggatggtttatggtctctggctctttgaaaccacagaaatttaaagttatttttaaaaagccaacttgactgggcacagtggctcatgcctgtaatcccgaggcaggcggggggccaaggcagacagatttcttgagcccaagagttcaagaacagcctgggcaatatggtgaaaccccatcttctcaaaaaagtta

SEQ ID NO: 212836 - DNA, 449 bp, Homo sapiens
ataaattgctgtactatttaccatctgttccatttgacccacttttaggtgaataaattgatgcttaaggaatttgtttttgatacaggggcaggatttggtgtagttcatcctaacttaagaaggactctgtttaacaattatctgctttaaaattaaaattaatgttttaatattaaaaagcaacatcttccttaaaattaatgacacaaaaaatgaaaatggtaaattttattttgtgtgtttaatagcctaatttacctgaactggctttcattgagttaaaacttaatatggatggattcttttgtggctcataagcttgggattttcacactaaacatttttaactcatgaggttgggacttcacattaatctctaatctttgagattgcctccctcaaaccttgctacagtattggcacattacccatctcacatgaaaaaa

SEQ ID NO: 212837 - DNA, 206 bp, Homo sapiens
aaaaagaatggccataggacattccattcaaacaaagaataatcagcctaagttattatattatctggaatacccaagttatcaatgacaagctcctgatttttctttttgaaagacttagagcaatagttgatggatggaaaaatgcagagtataacaagaagtgacatctccttaccaggagcaactcccactattcccctatc

SEQ ID NO: 212838 - DNA, 239 bp, Homo sapiens
gtcgcctgctctcattctcaccatgagcccagaaaccgttcctctccaccatcctgataatcagcacccacgtggtcactcaactctcatcttcacagtctggccaaatcccagtccctgggaggggtggataccctgcttcttcaggtgaggaaatgggtctagtgtccaggatcacactgtcaggcatcagaacagcagggtctacaccaggacccttgactctaacgtgctattct

SEQ ID NO: 212839 - DNA, 615 bp, Homo sapiens
gaggtgagaaatttgcctccagttcaacttagagcttggtaactacccactgtagcatcaacaatcatgaatgaatctaaatctttagttaactcacagctttctacagctgctgtaacaaattaccacaaacttcagggcttaaaacaaaacccatttattatattagttctagaggtcagaagtccaaaatgggtctcactggtctaaaatcaaggtattagcagggctgcatgccgtctggatgttctagtacggagcatctagcgaaaaaggtttccttgcctttttcagcttctagagctcacctgcatcccttggcttgtagtctccttcctccatcttcaaagccagcactacagcatcttcaaatctctgactgaacttgtctccctcttccccatttaaggacccttgtgattacactggacccacatggataatccaggataaccgctccaattcaagatcagctgattagcaaacttaattcccctctgccatgtaacacaatatattcacaggtttcagggattagaatgtggaaatatttgggcaccagttttctgactaacacactcatatacgttttcagaacaaataacttcaatttcc

SEQ ID NO: 212840 - DNA, 739 bp, Homo sapiens
gccgagatcgcgccactgcatccaacctgggtgacagcaagactccgtctcaaaaaaaaaaaagaaagaaagaaaagaaaagaaggaaagaagcggggcacagtggctcagtcctgtaatcccagcaccttgggaaggccaaggtgggaagatcacttgaggctaggagtttgagacaagcctggccaacatagcaagaccccatctctacaaaaataaaaattttaaaaagggctggggcatttgagctgggtcccaacagtagacaagtagaaaaggcatggagagggcataccaggtgggaggagctgtgtgcaaaggcctggagatggaaaagcatgctggccaccagcttctgacaagcagtttagtatgaacggtatgcagggaaagagggaaggagggcagaggggtgcgcacgagcacccgttagtgtccttaaatgaccagcatgggaacctggtctctttcctgagggccctagagagccatggaagggtttagagtaggagtgggtcatggttaggtttgggttttaggatgatccccctagttgctctggagaggtggagcagagcgggtactgaggctgggtgcctgtgggaggctggcgattacagacctgagcccaccagccttggcccaatggtctcgcccaattttagaatagggcaagctgaggcctcagagccaggcaagagctgaccccttcaatctttgtttgagaagtactgatcgc

SEQ ID NO: 212841 - DNA, 629 bp, Homo sapiens
gatgaagccctaccccgcattctgcttagcaccttctctgggccatctcctgccagacatgtgtgcactgtgcaggaggggcagcctgtggctgtggggccacacggaaggaagggacgtcttaaggctggatggccagaggcagtaccagcagcttcaagtggggatggaggagaaggcaggtttctgtctggatttccacctccctgtgaacaggacgaagggaacatgggaagacacagactcctggggacttgggctgcagtgccaggcagaacagaactgtgattaatgtccctgtcctcatcatcctcactcctctggtctgtgtgtgtggacgggtgcagggggtgccaacctcacggccctggagccgagccgttccaagaagcacagaagcacagcctcaactgggtcgagatgagcacagtatatggaatcggcagggttaaggccaggctatgaacaactctaggttcagcccaagaaagggcacatgtctgacatgtgactgtttctctgagagaatctggattgtcttatctaagccaggagtgtgcccccttcaccctgacatggccctcagcagagccagggccagcagcgcaggaagctcactggcatgaccc

SEQ ID NO: 212842 - DNA, 445 bp, Homo sapiens
tacagctctgagtgggccttgggggctggggcagctggggacagagacagggtggcgacttggaggccctagactctgtgaccaggcgcctctgggcccaggatgggtgctggcctggcccctggcattgtttcttctcttggtgagtgttggcttagggagaggaggcctgacaagcagctcattgtaagtgcctgctgatgggctggcttgtgtgagcccatgggcatgagagcctaacccccagccccttttactttagggagttggggtgggggtggtgctttccgccaatccctgtacacgcatgcttgctgactcctgcttggttgccatgggaaccatgtcgtggtgatggctgcttgggagagaaaggaaggggtggctggatggagatagttgtgtccatggctggcttctcagtcctgatgccgcttttcttcct

SEQ ID NO: 212843 - DNA, 546 bp, Homo sapiens
cagagagaaataattatctataaaggaataccaattctaattgtagtgaatttcttatctgaaacaattgaagccagaaaaatgtggcacaacattgttcaaatgctgtaaaagacaaacaacacaattgaataaatatttttccaagggtatacaaatgagcaaattgtgcatgctcaagatgaagatgctcaatatcattagtcattaggtaactacaattcaaaacttaagtacattcactggatggctgtaaacagaaagccaatacaagtattggagagattgtagagaaatgagaactcatacattgctggagagggtgtaaaatttgcagccactttggaaaactattggtagttcctgaaaatgttaaacatagagttgccatatgacccagtagttctactattggttatgtactcaagagaaatgaaaacgtatgtccacacaaaaacttgtacatgaatagtcatagtaacactgcttataatagttgaacagtggaaacaaataaaatatttgtcaactgataaatggtaaaca

SEQ ID NO: 212844 - DNA, 623 bp, Homo sapiens
caaatggaaatgtgaaagtactttgtagttttttattactattattaatttttaataaaatggtaacattcatttaataatcattagttttaacttcagattgtactggatttcctctagtatttcttaagattagtgaataaagtatttctcctaataaataagaaaaaacgctggctccagaaaggtgaaacacggacacttcgggcggtcaggatgggaaatggttccaccaggaaactggagcccacgttctcctcgtgcaggggaggcccgtcctggccccacggcaagaattagcttctggtccatcggaggatccgagggtgaatttccctgaaaacgtcgtgaagagcgtggcagctgcccttaagcctcttgggatttgaaatctttttaaattggcgccccgacctttaagaaaccctctttccccctcctcttccgaggggttccgccaaaacgctaataacccttaccaggcacccgggtttccccgagaacggatctttgctttgcaccgtcgtggtaccaaaactttaccccctccggggggaccccttttcccccctttcttcgccccctctctctttcttgtggttccgtgcccccccctccccccc

SEQ ID NO: 212845 - DNA, 458 bp, Homo sapiens
tagataagtgtggaaaatagtttctgtgataggaggcatggccccaggctcagtctgcagatgatgcctggtgtgtccactgcgccaacatggggcgctgttgggaacccactcggctgctgcaggcttggaagctgctgctccacaggctgggagtttttgcccccaaggctgtgcagagccaaaatctgaaagcccttttaggggcagggattaatgtgggttactctggggaccttgcaacagaggctgagaggtgactgtgcaggaggtgtggcctgccccacagtgagtacacgcagtggctgtcccaggttcatccaggtactgggtggcccctggtcctcttcaggtttggcccagcccctccttgaagactccttccatccagtcaaggccaagcaggcggggcagggcctttatgagctaaataaataaataaataaataaataaataa

SEQ ID NO: 212846 - DNA, 346 bp, Homo sapiens
gagacggagtgtggctctgtcgcccaggctggagtgcagtggcgtgatcttcactcactgcaagctccgcctcccgggttcacgccattctcctgcctcagcctcccgagtagctgggactacaggcacacgccatcatgcctggctaatttttttgtgtttttagtagaaacggggtttcactgtgttagccagaatggtctcaatctcctgacctcgtgatccacccgcctcggcctcccaaagtgctgggattacagacgtgagccactgcgcccagccttccattccatatttttatggaaaagtctaaacaattatttccttgcccttctgtcgtcttctc

SEQ ID NO: 212847 - DNA, 481 bp, Homo sapiens
  misc_feature (450)..(450): n is a, c, g, or t
tcaacttggtgtccatatctactcctcttttcaaccgtacttaacttccaaatcaagtaaatagcaactaggcttccatgccatataatgctactatccgtcttacaaccaaaaccatgctaaccctctccccagaagaggagccaaagtccttttatgaactttttttgagacaaggtctcactctgtcacccaggctggagtgcactggtacgatttcggctcactgcaacctccgcctcccaggttcaagaccagcctggccaacatggtgaaaccccgtctctactaaaaatacaaaaaaattagctggggtggtggcagatgcctgtagtcccagctattctggaggctgaggcaggagaattgcttgaatctgggaggcggaggtggaagtgagctgagattgtgccactgcactccagcctgggtgacagggtgagactctgnctcaaaaaaaaaaaagggaaaaaaaaaagcc

SEQ ID NO: 212848 - DNA, 471 bp, Homo sapiens
ctgtttcctaaaattccatatactttccatctttatgtcctttgatcattctatttgtgtctcagtctcttttcctgtgtctctctttgtcatgtatccttactgaaatgccatttccctgactgttgaaattccatttacccttggaggtcatcactcctttttttctttttaatgagatgaagtcttgctgtgttgtccaggctggtctcaaactcctggcctcaagtgatctcctcacctcagtttcccaaatgctaggattacaagtgtgagtcaccatgcccatctgaggtcatcaatctttaaagaccttctgaaatgctgcctctgctatgaagcttttcttttttctcttctccttcttcttcttctttttttttttttttgagacagggtcttgctctgtcacccatgctggagtgcagtggcatgatcttggctcactgcaaactccacctcctggattca

SEQ ID NO: 212849 - DNA, 312 bp, Homo sapiens
gaagggcaaaaactacaatgacttttgcaccaacctagtatgagcataaggggcaacagtgatattagtcaaagagtcccagaataaggtagtaaagcttttgggagctgatacatcaccatgatgaaacaacatggccatcagaggagcaacatttaattaagtgggggatgggttgttgtgatacttgttaccagaaagattcattttggtgctggtgacatccttgtatactatcctgacaaggcatgtttatgtgagtacacatagcaggtggaggcaacatcaaataacagaaaagatttcaggtga

SEQ ID NO: 212850 - DNA, 409 bp, Homo sapiens
tgcccactgcccagcaccccatcagtcacatcacctcacagtcagaatgcatatgacagtgccctgtcacacaaactgcaaactgctatactttgcagaaaaggacaagactgcacgatgctggctggactcacacctgtaataccagcactttgggaggccaaggtggatagatcgatcgagctcaagagtttgagaccagcctgggcaacatggcgagatccgatttccacagaaaaaaaaaaaagaagaagaagaaattagccgggtgtggtggtgtgtgcttgcagtcccagctgcttggagggctgaggggggagaatcacttgagtccaagaggttgaggccacagtgaactgtgacggcaccactgcactccactctgggtgacaaagtgagaccctgtctc

SEQ ID NO: 212851 - DNA, 350 bp, Homo sapiens
taggaagtaaaatggatggaacttgatgatagattcaatataatgcatgagagaaagggagagagtcatgttgaggatgactcaacggtttccagcttcatagctttatggataatgataccgttgctgagcaaaggaacactggaaaagaaccatattctacatatccaccaatttcattatttcgtacatagcattaatatatctcccttgtattatagttatttataggcatataggtttctgatatcaaggcttttcagaggtttgcaaagtaaggcccacgggtcaaattaagacctgtttggcccatagctaagaattgtctttacatttttaaggttgttaaa

SEQ ID NO: 212852 - DNA, 222 bp, Homo sapiens
ctatgctcctgagcagtgctggtcaggcagaaaagattgactccaggcctggacaaggaacagtccagtagaggccccttacagttaagcagtgggataatcatggagcagttctatctgcattttaataattacttgttttgaaaaagttctatgtctacgaggcccataaaaatatcttaatttttaaacaatcagaataaaaaatgaatagaacaacat

SEQ ID NO: 212853 - DNA, 762 bp, Homo sapiens
ctgggttcagaatccataagctggtggcctcaggcaggtcacctcatgtcttttgcctcagtttcctcatctgtaaaaagggaataatgatagtataaaacctctagggggctgtgatgaaaattaaaaagagcacgcttgggaaaccttggtgcccggcaccttctatggactgcagaaattagttaatatgttgatgttgttactgcatgtagagtctacccagtgggagttggcaattcagacccagggttgctgatacgacatcatctactcatccaagatatgctgggcttctacagtgcagcaggctccctctaggcgctggggatgctactgtgaacaggactcccaagggtcctgctttcatggagccgagtatgctgggaattccattagtgtcattgtagggggggtctgagaaacaaaagaaataaaaaggcatgagcatgcttacttcctattttctggaggatgtgctgggatccagagccacccaaaagaactaactctgagatgggtcttcagaccctggggaggggctgggggctgggaatcccctaggggagggtgggaacttttgtttcttactacattgaaaagaaaaggcacagaatctggcagctatgtctttgtcctacttggtcccagcactacctgtgtggcttcagactactctgtccccaccagctggtccccagtttcaggcatgcagggtgatctcacctacctcctgggctgttttgagaattaatggtggta

SEQ ID NO: 212854 - DNA, 346 bp, Homo sapiens
aattgataaagacaaagttagtaaaaatatagacaatttgaacaagactatcaaataatttgacatcattgacatttatataaggagaacaacagaaaacattcattttaagtgcacaaaaaatatttacaagttagttcatattctagaccataaaacaagtctaaattaatttcaaaagattcaaatcatacaaagtatgctttctgatcaaaattgaattttagaagtcagtaacagaaaatcccaaatatgtacagactaaatacacagttctccataacccatggataaaagaagaaataaaaaaggaatttaaaaagcattttgaatgggatgaaaatga

SEQ ID NO: 212855 - DNA, 937 bp, Homo sapiens
tggctcatgcctgtaatcccagcactttgggaggacagggcaggcagatcacctgaggtcaggatttgaagaccaacctgaccaacatggcaaaaccccatctctactgaaaatacgaaaatttgccgggcatggtatcatgtgcctgtaatgtcagctactcaggaggctgaggcaggagaatcacttgataccaggaggcgcaggttgcagtgagccgagactgtgccactgcaatccagcctgggtgatggagcaaacttccatctatcagaaatacagccattgctctgtccttttggcctggcttgcaaaaaggtggacttttacatcaacaaagccctatagtagccaaaatcaaaagagtttctcctctttttctttttccttttgctagccgtttttcttcctctaccgcgccatctttttttttctctctgtctgtcccgtgggaatttagtcacttcagaggctttttttccccacaatttggaacttcctttggatttgatcaagtcatatagagttgatcaaatccagtgggaaaaagaccgaaaaaacaacaaaaacagaaacaaacaacaacaaaacagttaagcaaaacaaatgatcacacagtttatatgattactgagtgctctgatggtaaggagaaattaagaccagctggttgttaatctttagccaaagcaaaccacagttcagttacttacctatgggtgggtctcaggctgataattgctctataccatcctagaagcgggttaaaacaaaaaagaaatcgaggggggggccggtaccattcgcctatatgagcgaataaattacgggcgccgttacacgtcggacgggaaaccggcggtcccctaagcgcgtaaaaacccttaccagggggataaagccaagagcctcacaaggccgaaggaggaacaggggg

SEQ ID NO: 212856 - DNA, 926 bp, Homo sapiens
tggctcatgcctgtaatcccagcactttgggaggacagggcaggcagatcacctgaggtcaggatttgaagaccaacctgaccaacatggcaaaaccccatctctactgaaaatacgaaaatttgccgggcatggtatcatgtgcctgtaatgtcagctactcaggaggctgaggcaggagaatcacttgataccaggaggcgcaggttgcagtgagccgagactgtgccactgcaatccagcctgggtgatggagcaaacttccatctaaaaaaaaatcttttaaaatctcattacgatatttcaaatagggcaaactgctgctatttcagaaatacagccattgctctgtccttttggcctggcttgcaaaaaggtggacttttacatcaacaaagccctatagtagccaaaatcaaaagagtttctcctctttttctttttccttttgctagccgtttttcttcctctaccgcgccatctttttttttctctctgtctgtcccgtgggaatttagtcacttcagaggctttttttccccacaatttggaacttcctttggatttgatcaagtcatatagagttgatcaaatccagtgggaaaaagaccgaaaaaacaacaaaaacagaaacaaacaacaacaaaacagttaagcaaaacaaatgatcacacagtttatatgattactgagtgctctgatggtaaggagaaattaagaccagctggttgttaatctttagccaaagcaaaccacagttcagttacttacctatgggtgggtctcaggctgataattgctctataccatcctagaagcgggttaaaacaaaaaagaaaccaggccgcgcttaaacgtcggatggaaaaccgcggtccaattaggcgtgaaaaaccctcggcaggggatcgccgcggcgcccgggc

SEQ ID NO: 212857 - DNA, 542 bp, Homo sapiens
agtgtcatgaaaggatgcagtagggcaagggctggagagtgaaggaggtgctattttggataagattgtctgacgagataatgagcagaaccctgaatgatgtggtggggtaatttctgcagtatctgtaagaagagctttcctggcagaaggaacaatgaatgcaaagactctccagtggggacaggcttggcaggttcaaggaaaagcacagagctgctgtggtaggagctgagcagaaagaggccagtggatcctgcagggcccggctgcctgtggcagagtttggactttattctaacggtaatgggaaaccattgagggtccagtgttcactgaaagaacatttagaattgaattcaactgagcacagatatattgagtatctgctatgtttgaggcactggacaaatattaggaattcagtgatttatgagatattgactctgccctaaatctgaaggtcgaataattacaatacagatgaaaggcacaattagagaaatattatctctgatccacgagtcttgaaaaaagaaaaa

SEQ ID NO: 212858 - DNA, 741 bp, Homo sapiens
tcttcggcctctggaagtgctggtattataggcatgagccaccacacgaggccaatagcggggtttctactggcaaaattaaaaaaaaaatcaaaatcaactgggtatggtggtgcccacgtgtagtaccagctactcgggaggctggggtaggagattgagcctgggaggtcaaggctgcagtgagccatgactgagccactgcattccagcctggggaacagaatgagacctcatctctaaaaataaaaaatacaaataaataaatacatagttggctaccattgaaaatatttaaatatcaatctaagattaaataatttaaaaagtctgaggtacagaatggaatatactatacatgttatgaatactagtaaattgaaagtagtaatataatgaaaaaatctgggtgtaggggaagactgaggaaaatattaaaaataaatagcgactgggctgggcatggtggctcatgcctgtaatttcagcactttgggaggtcaaggcaggcaggtcacttaagcccaagagttccagaccagcctggccaagatggtgaaaactggtctctactaaaaatgtaaaaactacccgggcatggtgtcgcatgcctgtaatcccagctactcgggaggctgaggcttgaggatcgcttgaacctgggaggcagaggttgcagtgagccaagatcgcgccactgcactccagcctgagcaacagagtgagactccgtctcaaaaa

SEQ ID NO: 212859 - DNA, 161 bp, Homo sapiens
ctattctttcaatttatctacctgtccaaatttgttgttaatggacacaaaagacaaactttctcaattcttttctatctccctttgagaatccattcttaacataactttatatataaattttgatcccttttgcttgttttttttttttgagatagggg

SEQ ID NO: 212860 - DNA, 295 bp, Homo sapiens
tgagccaccatgctgggcctagctttggatcttcaaaatgaaactctacatgcctctgttatcaaggtggaaattctatgccatccgccatggtttgatcacaagatcctacctaaagtataattttaaaagaaaaatatggcattacacccactgctatttggaccaattactaaacagaatatacaaaattttgtgttaaatttttccactagaaactagactggggaacatttttaacctaaagtatatgtttaattgctggtataacaagtgctattttaagatgttatag

SEQ ID NO: 212861 - DNA, 393 bp, Homo sapiens
cagacgtgtgaaactaaatgagagacctctaacttttcttgagttcatgcattctaagaagtccactggagtggacttatcaaacatcaaagtgtcaggaagaccagcagaaatgttaacttgtcaagaaatttagtatccatgagaccaacataagaaaaattaatactgtgtgaatttagtggcttaattgtgcctggattagttaattagataattaacataagaatgtgcttttcatattagctttctgtatgttaataatagaactgttcataagatgagcaaacttgacattgagaagtgctaattatttcagaaatggaacctttcatttgctaaaatactttttcattgtctccctcagagaagtggcattgtaccctatttgct

SEQ ID NO: 212862 - DNA, 448 bp, Homo sapiens
aacatttgatgcagagatatacatgttttctccatgtaggttcacacctcacttcctttattgattaattgctttttctggtagagtctttctttcctttctgttttacctgtgtttgtccctaagacttatattttaatattatgcctcctctctttcgttctcccatcttttcttccacctattttggagccttcaggaagcttgattttgctgccttgtacattggttgcccttctggaatggaggaaacaggtcatagctgattttaactgttccatctggtgacatattcttgattttctttcttttggttggggaaaaaaaaacaatgcaaaagtcattctccaatggggttgagcctcgttaagaaatagaccctccacaatggttgaactagtttacagtcccaccaacagtgtaaaagtgttcctatttctccacatca

SEQ ID NO: 212863 - DNA, 1518 bp, Homo sapiens
tggggttgatcagaggaattttggaaaggcttggaaacattcctatgtatgtgagacacacctatgccagggcaaagactccaagctcaagtttttctcttgccttctagtcacaagaacatggctttggagtgtgacactggcctaggaatccatgactcccaaaggacggggctaggggtagaggaggttcaggcaaagcccttagattttggagacatcaggcagatgtctccaaaaatgattgtgatcaagaatctgaattataagattcacagtctgctccccaacccagtgctgccaactgtacagctgcgcctccacgaaggggcatatgccaggctcgtctgaccctggaatgaggatgtaggaagcaggcagagctccggttcagccctcacaatgggactgaagcaggagagaaggctgggcagaagggctgtggggaagtagggcttgtctccatggatgacgtccagaaggatgtcaggaggaggaatatcacaggagttatagacattggagggaacagagactggcacaggacctcttcattgcaggaagatggtagtgtaggcaggtaacattgagctcttttcaaaaaaggagagctcttcttcaagataaggaagtggtagttatggtggtaacccccggctatcagtccggatggttgccacccctcctgctgtaggatggaagcagccatggagtgggagggaggcgcaataagacacccctccacagagcttggcatcatgggaagctggttctacctcttcctggctcctttgtttaaaggcctggctgggagccttccttttgggtgtctttctcttctccaaccaacagaaaagactgctcttcaaaggtggagggtcttcatgaaacacagctgccaggagcccaggcacagggctgggggcctggaaaaaggagggcacacaggaggagggaggagctggtagggagatgctggctttacctaaggtctcgaaacaaggagggcagaataggcagaggcctctccgtcccaggcccatttttgacagatggcgggacggaaatgcaatagaccagcctgcaagaaagacatgtgttttgatgacaggcagtgtggccgggtggaacaagcacaggccttggaatccaatggactgaatcagaaccctaggcctgccatctgtcagccgggtgacctgggtcaattttagcctctaaaagcctcagtctccttatctgcaaaatgaggcttgtgatacctgttttgaagggttgctgagaaaattaaagataagggtatccaaaatagtctacggccataccaccctgaacgtgcctaatctcgtaagctaagcagggtcaggcctggttagtacctggatggggagagtatggaaaacatacctgcccgcagttggagttggactctgtcttaacagtagcgtggcacacagaaggcactcagtaaatacttgttgaataaatgaagtagcgatttggtgtgaaaaaaaaata

SEQ ID NO: 212864 - DNA, 917 bp, Homo sapiens
tgcagtggctcacgcctgtaatcccagcactttgggaagccaaggtgggtagatcatttgaggtcaggagttcgagaccagtttggccaacatggtgacaccctatctctacgaaaaatacaaaaatcagccccttttcacaagatggcaccaaaagctaagaaggaagctcctgcccctcctaaagccaaagcaaggctctgaaggccaagaaggcagtgttgaaaggtgtccacagccacaaaaaaaagaagatccgcgtatcactagccttctggcggcccaagacattgcgactccggaggcagtgcaaatatcttaagagcacccccaggagaaacaagcttgaccactatgcatcatcaagtttcctctgaccactgagtctcccatgaagaagacagaagacaacaacgcacttgtgttcactgtgaatgttaaagccaacaagcaccagaagaagctctatgacactgatgtggccaaggtcaacaccctgattcggcctgatggagagaaggaacatgttcgactggctcctgattacaatgctttggatgttgccaacaaaatagggatcatctcaactgagtccagttggctaattctaaatatatgtatatcttttcaccattaaaaaaaaaattatcaaggcatggtggcgcatgcctgtaataccagctactcaggaggctgaggcaggagaattgcctgaacctgtgaggcggaggttgcagtgagccgagatcacgcagctgccctccagcctggacaacagagcgagactccatcttgaaaaaaaacctgaaatatttctattggattctgaatacaaaatttcgcatgggagaaatcttacttcttatgcctgttacagtataattcccaaatgtaccatcagaaaaaaaaaaaaaacc

SEQ ID NO: 212865 - DNA, 859 bp, Homo sapiens
tgcagtggctcacgcctgtaatcccagcactttgggaagccaaggtgggtagatcatttgaggtcaggagttcgagaccagtttggccaacatggtgacaccctatctctacgaaaaatacaaaaatcagccccttttcacaagatggcaccaaaagctaagaaggaagctcctgcccctcctaaagccaaagcaaggctctgaaggccaagaaggcagtgttgaaaggtgtccacagccacggaggcagtgcaaatatcttaagagcacccccaggagaaacaagcttgaccactatgcatcatcaagtttcctctgaccactgagtctcccatgaagaagacagaagacaacaacgcacttgtgttcactgtgaatgttaaagccaacaagcaccagaagaagctctatgacactgatgtggccaaggtcaacaccctgattcggcctgatggagagaaggaacatgttcgactggctcctgattacaatgctttggatgttgccaacaaaatagggatcatctcaactgagtccagttggctaattctaaatatatgtatatcttttcaccattaaaaaaaaaattatcaaggcatggtggcgcatgcctgtaataccagctactcaggaggctgaggcaggagaattgcctgaacctgtgaggcggaggttgcagtgagccgagatcacgcagctgccctccagcctggacaacagagcgagactccatcttgaaaaaaaacctgaaatatttctattggattctgaatacaaaatttcgcatgggagaaatcttacttcttatgcctgttacagtataattcccaaatgtaccatcagaaaaaaaaaaaaaacc

SEQ ID NO: 212866 - DNA, 239 bp, Homo sapiens
gtgccactgcactccagtctggcgacagagcgagagtctgtctcaaaaaaaaaaaaaaattatctgtggtatagaatagattttatcctcacatattagctgtaataatcctcctttaggaactcctgtttttcttgcatttatattagcatgttttggttatctttgttggagtagagttgtcctcctttttttaagttaataaagtgctttttagaatatattttgattctagtttg

SEQ ID NO: 212867 - DNA, 211 bp, Homo sapiens
gtgaggattgaaggaatatatgtaagtacatagtcctaacacatcctggaagaatattaatactctattttggtcagaatgtaaactgtggtttggggcaagtgtaatgagaaaatgtaattattttatgtgtaattggagttggtagaaaaatagtgggttgagtatgtggagaagcagttgaaaatgaactggatggatctgagttaat

SEQ ID NO: 212868 - DNA, 405 bp, Homo sapiens
ttctttgacctcatgcctcttttgccttttgcctgcagttatcctagatcccactgactgttcttctcttacctacatcattctaggctgtctctggccccatgtctttatgtccctccctgactcttaccattacccttctggttaacattagaccaaacctgtggtgggcactgtggtggcaatttggaatcaacataaaacctaaaaagggtacaatggttatagtgctccagactactcttcactcagcctttaagggtgcaggactctaagactagaacagttctttgtacataataggtattcaaaactactagctgaacggaatgttctgtcatatatagcaggagtccccaagtccctaccgtggccaggaaagcaggaggtgaggggccagtgagc

SEQ ID NO: 212869 - DNA, 449 bp, Homo sapiens
gagagcagcttagtgatacttattttaccaacttgttcttcaagtcacagattcatgtccaatgtccctctcccaacttttaaacctttggccaaatgtgtcagcatttctgcttataactggcatatcacagggtgcaaaccatcttataaagtgacgtatgatagatttttttcctaagttagatcttttatcctagtcggcaacttatcaagacacagtgatcagttagtttttgtttttttgagacacagtctcatgctccagcttgggagacagagtgagaccctgtctgaacaacaaaaaagaattgtggccagtcatggtagctcacatctgtaatcccagcacttttgaggctcaggtgggtggattgcttgtggttacgaggtcaggatcagcctaggcaacatagcaaaaccttgtctctctacaaaaaagaaaaagaa

SEQ ID NO: 212870 - DNA, 426 bp, Homo sapiens
atgggcaagaatttacctttgatctatatctaggagtggaatcgctaggtattaggttatatcaacgttcaatattaggagaaaatgccaaactcttttccaaagtggttgcaccatttctacttcctccagtaattgtctctattgttgggcagcgtccaatccagtggaacataagataagctaatgaaatgatttaatattaccgatacataaatagggtgaataatgaaatggaagcttcaagatatgcctcttagggatgagaggacagtctccccctcagttgatattcattggtgttctgtctacatagatgtttctatttctctcctatatgtgcttctcttgggttcctctccatcttggtggctgtgggaatgttttaccctttaattcattggcaaaactaaaagcccctcccaa

SEQ ID NO: 212871 - DNA, 523 bp, Homo sapiens
acatgattatctcaatagatgcagaaaaggcctttgacaaaattcaacaacccttcatgctaaaaactctcaataaattaggtattgatgggacgtattttcaagaaactttacagtgatggagcttgttcacacagagcaagctctcagtccattaaaaaaagacaaaccctgagaagagagcttttcagggagcttccgaaaaggtcatatagtgacatttctctgggaatggatctttggggagctctaaacctgttctgccccctccagtacctggtaggctcttcattttcatagctaccctacttgcaaagctgttggttttcaaggctacttcagagctggggagagtgacatggaaatagagcaatttaaaacacaacagaggtaattattcttaccaaaattcagctatttttcttaaatgagtgctccttggattcttgcaaagttctgaaaaagttgatttcaacaactttctgccagtattctcattgcttttattgaggagcagattttt

SEQ ID NO: 212872 - DNA, 443 bp, Homo sapiens
atagctagtccagtatggctaggatgctggcctttgccaggattgaacaaatattatttgactacaaagtacttgtggcctgtgccgattaaattatcccacttgatcctcatgatattcctatggtagggaaaaagcttatccctactgttgccattttatagataggaatgtaagctacaatatgttgagtgattactccgggtgtccacttggtaaggggttgggacttgatcccaggtcattgagatccggtggccataatcctttggtgccacagcactggatcatataaggacgcatcctgtcacctttggagagcccacctgcaggtctggacctgggctttgtcaactgaaaacagaactgccctggagtgccgtgggtactcaacaagtagggaggcattgatgggccccacttttcaacataaaaagaaaaaa

SEQ ID NO: 212873 - DNA, 844 bp, Homo sapiens
taaagcacagagtggatttaattaagcacacaaatgctaaggcagaattttgagggtgggagagaagaaaagggaaagaagctgaaaatgtaaaaccacaccagggaggaaaaatgacattcagaaccagcaaacactgaatttctcttgttgttttaactctgccacaagaatgcaatttcgttaatggagatgacttaagttggcagcagtaatcttcttttaggagcttgtaccacagtcttgcacataagtgcagactttggctcaagtaaagagaatttcctcaacactaacttcactgggataatcagcagcgtaactaccctaaaagcatatcactagccaaacgagggaaatatctgttcttcttactgtgcctatattaagactagtacaaatgtggtgtgtcttccaactttcattgaaaatgccatatctataccatattttattcgagtcactgatgatgtaatgatatattttttcattattatagtagaatatttttatggcaagatatttgtggtcttgatcatacctattaaaataatgccaaacaccaaatatgaattttatgatgtacactttgtgcttggcattaaaagaaaaaaacacacatcctggaagtctgtaagttgttttttgttactgtaggtcttcaaagttaagagtgtaagtgaaaaatctggaggagaggataatttccactgtgtggaatgtgaatagttaaatgaaaagttatggttatttaatgtaattattacttcaaatcctttggtcactgtgatttcaagcatgttttctttttctcctttatatgactttctctgagttgggcaaa

SEQ ID NO: 212874 - DNA, 550 bp, Homo sapiens
gttcattgctgccctctccacgcactcctgctctacacagctccgctgcacgcataagtccaagctagtgtgtgtctccctttatccagacaagactcctcagggcgctgaccaggtcttagttatcctagcgtctcccaagctgggccctgcttgtgcgtaccaggtatctgaaaaatggctgctggaacaaaacagaggccggtcaagtggaggagattaaggttaataagtgacttcgtggagaaagtctaacatcaggtgagtggccctgcacggtggctcacacctgtaattccagcagtttgggaggccgaggtgggtggatcacttgaggtcaggagttcgagaccagcctggccaacatggtgaaaccccgtctctactaaaaatacaaaaattagccgggtgtggtggcacacacctataatcccagctacttgggaggttgaggcaggagaatcacttgaacccgggaagtggaggttgtagtgaaccaagatggcaccactgcactccagcctgggtgacagagtgagactccatctta

SEQ ID NO: 212875 - DNA, 487 bp, Homo sapiens
tcgaagaagtctccttccaaaggtttatgtgatttttgggaatatcctcaggttaactgtgctctgaagaaaggaaagaacggtagctcttcctccagttgatgtcagaagagaatactcgctggagtattaggccctagtgagagattggcagggatttgtgagccaaggtttgaatggtgactggagcaataaagttgggaaagagtttgagcttttcctacaaggggaaagaaaatggaaagtcgaggagagaaaaaccagaaccaattggaatggaacaaagagggatggttaccttaggcatatatggaatatagagaacatcaaggagtgatttgttaaagatgagtttaagaagagaagtagaggccaggcatggtggcttacacctgtaatcccaacactgggaggctgaggtgagaagattgcttgagcccaggagatccagaccagcctgggcaacaaagggagatttcgtctctac

SEQ ID NO: 212876 - DNA, 386 bp, Homo sapiens
gacagaaagtagtagatcagtggttgtatgaggcttcaggcaaaaatgcagtgcctgcaaatgagcatgagaaagcttttcggggtgctaaaaatgttctaaaacaggactaggatgatggttgcataactctgtaactacaaaccactgaattatacacttaagaaaagtgagtggctaggagccgtggttcatgcctgtaatcgcagcactttgggaggccaagacgggaggatcacctgagaccaggagttcgagaccagcctgggcaacaacaaagtgagacccccatctccacaaataataaaaacaataaaaaataaaatcttaaaaggtgaattttatggaatgtaaattataattcaattaaccttttatgaaaaatt

SEQ ID NO: 212877 - DNA, 553 bp, Homo sapiens
atattagctgggtgtggtggtgcatgcctagagtcccagctagacaggaggctgagatgagaggatcacctgagcgcaggagttcgaggctgcagtgagctatgatcatgccactgcattccagcctagatgacagattaggagacctatctcaaaaacaaacaaaaaacagtaaagtaatgcatcagtactacactctgttcatctttttgttgttgttttctattgctgctgaacaaattattcatcttttagtgtgcagttgtttttttattcttcagctgcttgcaaaaagtttgcctaagattgtagaatatatgataatctttgggctttgttcttgtttcttttgaatatttgtttacataagggatagttatttgatttaaagaagatagagcatgtaattacaaagttccctctgtgtgattaggtcttggaaatataatttcttatcataaattttgtgattttactaaagtctttaaacagccaaaaattttgaattaactatatttggggttgtactcaacttcacttttgaaaaaaaatt

SEQ ID NO: 212878 - DNA, 206 bp, Homo sapiens
ccaggtgatgtgaatactgttggtcagtgtatcacaattaagtagcaaggttgtagaaaagtccacattcataccaactgggtgaactctcaagggaagccgatgaaagtaattatggaaatagtgaatttacaatgaattgtagcccaaacaatgtaaggctaatagaagctaagaaaacaagcattatcctgctgtcctaacaa

SEQ ID NO: 212879 - DNA, 429 bp, Homo sapiens
tttagcatggctcttggtcagcacagtgcggacaactcagctctgttccagttgtctcatcctccagcaacttagcctgggcatgttttcatggcagaggcagaggtgcaagagtaagagaagaaacacaaaatgctcctgtcacaatcgctaattttatccttccatcttaatgttttgtttgtttgttttgagatggagtctcgctctgtcctccaggctggagtgcagtggcgcgatttctgctcactgcaagccccgcctcccgggttcacgccattctcctgcctcagcctcccaagtagctgggactacaggcacccaccaccacgcctggctaattttttgtatgtttagtagagacggggtttcaccgtgttagccaggatggtcttgatctcctgaccttgtgatctgcccgccttggcc

SEQ ID NO: 212880 - DNA, 966 bp, Homo sapiens
ccaggggaaggcggtgaacagaaccctcaccccgtcctgtctcggggtgcctctcctgaagcacagagtcccctctgggccttcgtttccccagctttcctgccgcggggcacacagagtctaggctcagtcagaagccccggcgccacctgaatgggagcctggggaaccctgtatggtcctccctgaacaggacagtggggatggggcagggccagggaagcagagaagggcacaccctgtgagggacaccacacgcaaccatgcagcctgggatgggcactgtggtgctctcgtcgccaggcccccatgtctgccctcgcagtcaaccttggtccctgggggatcgcctgcaatcccacgacgcctgggcagcataactgtcatttatcacatggtcatcgccggagacgccgagcggagcccccaaacatcctgcacctttgatgttcacgcggactctgtgaggcaggtgctgttctcatcccgttttacagacgaggaacctgagacgcaactgcaggccccgcagcagccggtacttggctgtcctaacccatccgctctggtgcagacaaagtggatatctgtctaacatgcaaaaggagggttctgaaacaccctacctgccaggaaggtttctagagaggagccggcccactccaccccaagctggccactccgctcacggggcctcaggcctcatccccgccacctggtgccctgtgcccagcctgatcgttgttggtcttacccactgattcttttagatggaagcgggatcttgctgtgctgcccaggctggtctcgaacccctgggctcaagcaatccttcttccaggacttcccaaagtgctgggattacaggcgtgagccaccgtgcccagtcagaactaactactttaaaatatcagggtgggtgccatggctcatgcctgtaatcccagcactttgggaggccaaggc

SEQ ID NO: 212881 - DNA, 113 bp, Homo sapiens
agggaatgtgagggagaccttttcactatttaccttcttgtttctcttggtgtgttggacagaatgaagggtaagagagataggagactgggatcagttgggaggtgactgac

SEQ ID NO: 212882 - DNA, 138 bp, Homo sapiens
atggggttgtgcaaacagggtaatgaatggggagaaagttgagaggaattacctggaccactgatctaaacaggggcccaggatctgacacgtatcaacacaaatttttccttgctggggtcccaaaaaacatttttt

SEQ ID NO: 212883 - DNA, 231 bp, Homo sapiens
aaggaaggtagtatgacctgcttcggcttcagacatattaggtttgaatgctggccaacttcacaggtaggaaaagtcagctggatttgtggaaccagagctccagcacaagtgagggctggaggcaattgtttgggagttatcagcaagatggtgacccctaaagtcacgagacggaaagaggatcaccaccagagaaaaggcagacctcacaaaacaccttagatagaa

SEQ ID NO: 212884 - DNA, 375 bp, Homo sapiens
gcattgtaagtcttaaaactgggaatgtaagtcctttgacttttttctaatccaatactatgaacaaaatagatggcagatgaaattgaaaatttcctagaaaggtgcaaactactcaaactgattcaacaagaaatagacaatgtgaatagatatataacaagtgaagaggttgaattagtaatccaaaaacacccataaagaaaagccaaggaccagagagcttcccagctaaattctaccaagcatttaaagaattaaaaccaattctcacaaactctttcaaaagactaggagagtgggaaatgcttctcaattcattttatgagaccaatattactctgataccataatcagacaaagacattgccaaaa

SEQ ID NO: 212885 - DNA, 149 bp, Homo sapiens
aaaatttggaactgatttaacgtgtaaaatgttaacagtggttatctttaggaggtggaaatatgataatgtttcagttctgttttcctatattttgcaaaatttctttaaagtacttatattacttttataataacaaaaatactttt

SEQ ID NO: 212886 - DNA, 131 bp, Homo sapiens
cccccgacaccatgacctctgctctggccatcttattatctcatactgctcagagcatactgtgccttctctcaagccccagaccacacaagctgttctctctgtctggaatgttcttcttcaccaagcac

SEQ ID NO: 212887 - DNA, 457 bp, Homo sapiens
agacagagtcttactctgttgtacaggatggagtatagtggcacaatcacagctcactgcagcctcaactgcccaggcttaagtgatcctcccacctcagcctcctgagcagcttggaccacaggcgcttgccaccatgcctggctaatttttaaaaacttatttgtagagacaaggtttcaccacgttgtccaggctgttttcaaactcccagggtcaactgaccctcctaccttggcctcccaaagtgctgggattacaggcatgagccaccacacccagccagttttctacatagtgaaaaggagttgtcagggtcaaaagttctcaacagtcagaatattatgagcttgagggtaagagacagtccaaatgcaaagacaaaacaatgctatgagggtgagacaaaaattgggttcctggaggagagccatcatctgcagaatccaccttaact

SEQ ID NO: 212888 - DNA, 501 bp, Homo sapiens
taggacacacacagtcccatcccccaccctctgaccccatacaccccctggatactcaaatccactgatgctcaagttccttgcataaaatggtatagtgtttgcatgtgacctatacacaacctcttatgtgtactttaaatcatctctagattacttatattacccagtacaatataaatgttatgtaaatggttgttatagtgtattgtttagggaataatgacaagaacaactttctatacatttgcagtacaccattgttttacccccaaatatttttgatccaaggttggttgaatcggaacccagagatacagagggctgactatactttaagaattagaattagctgggtgtggtggtgggtgcctgtagtcccagctactcgggaggctgacgcaggagaaaggcgtgaacccgggaggtggagcttgcagtgagccgagatcgtgccactgcactccagcctgggcgacagagcgagactctgtctctaaa

SEQ ID NO: 212889 - DNA, 512 bp, Homo sapiens
actttataatgccattagtagaaacttaacccttgatttttagcctttggctttacaatcatatattgcaattgtttcttatatgtgttctctccacagattggtcaggccattctctctatagggattgggaatgatatttttatttgtatgtgcctcaaatgcccaattttattgcacatacatttatttaatatttgcttgacttgaatacaaaggtaaatatttgcttgacttgaatacaaaggtaaataaaacttggcattaaggacttgtctaatgtgggaaaatgataaacaatggagtatgtataatgaattattgttgttatgccagaagtggttagagggtaccatggatcacagtgaatataagggtcaagactctcagagaggtcagacaaagtctttacagaattagcaatccagtactcaggaggctgagaggagaggatcacttgagcccaagagttcaggtccagcctgggcaacatagtgagaaccccgtcaata

SEQ ID NO: 212890 - DNA, 292 bp, Homo sapiens
ttgtttctttgtgattcttttttatgtgttggttcctgacacacaagttgatttggggtggataacttgagatgcataaatgacatgtacagcagtggcacacccttggtgatcattaatatgttgctctgccatcaagtgccttgctaagttcttgttccccagaagcagattctaagacaaggatgtgggtgtgtatagtttatttaggagttgatcccaggaaacaacagtagaggatggggaagtgagaccaggaaggaaagatgaagctcaaaacaggtcaaaaaag

SEQ ID NO: 212891 - DNA, 539 bp, Homo sapiens
ggccacactcttcagagtcaaccatccccagtggcttcagggcaattccccctaatgcccaggaggccagacactggggtctcctacaagtgagggtttccaggaagcacggcagggaacctcaactggactgcgtcctgggggtcagcacccagaactggagttttcaaggcttaaagcagggaacattcttctgggggcaagagctcaccttaggtaaatcatataaaaacccgaggcaggaagagggaccaggccacctcctgcccgatatgaaggacacccacgccctctcaagagacctctgagcccccgatgtgggtggtgggtccaaaaccttccacaatcacggcggggctcatagacgtttttgtctgacaacaccaatatttggatgatcatctcaaatgagctcatcacagctgaaataatctatttttagtcttttcccttgagtactgctcgtattttcctgtttttttttttttgtataatgagtaattttggactgtctattagacattttgaataccatgttc

SEQ ID NO: 212892 - DNA, 322 bp, Homo sapiens
aggtaagtgaggactatagaagccaacagcaattctatctaaagaagggtgagggaactcagcaaggcagtggaactgacagagggctgtaaacagagttcaaacaccttccccaacctcagagaggcaaattccatctcagctaaatggttttcaggaaaataatataacctgcctgtgtctcaaaactggtaagtggcatcctcttcctcagagctatttagctgagatgccagaagatgcaaaatctgaaaatttctttaattagtatccttcttcttggctttatcaactgccgagatttctgtgctcagggccgtgt

SEQ ID NO: 212893 - DNA, 336 bp, Homo sapiens
aagtgctgggattacaggtgtaagccaccgcgcctggcccaaagcttgtcatctttatccctcaagtccctcaccaaaaagctaaagcaaaaaaataaaataatttaaaaaaaatggttcagaatatcagttgctattaacgttggtcatgtcacaagcatttattgaatacatcttccttcagaaggaactcactgggctttgagagccgtcagcactcttgctttactatttgcttagactaggaacttaaggctggcaccttaaaacccccagcggaaaagaggataacacatagagaaagtgaggccgagtctcctctacaggctatggctg

SEQ ID NO: 212894 - DNA, 192 bp, Homo sapiens
ttcccaccaggaatgtgcatggggtccaggcaatctgcatctgcccctttgcttggtgccatcagatgtcaccactttttcccacttaaatgacagtaaaatgttatctctgtgatttggacttgcattttcctgatcactaaggatattcggcctctgcatatatttgttggttatatgttccattttttt

SEQ ID NO: 212895 - DNA, 1696 bp, Homo sapiens
cttgccagcgttgggacgcgcaaatcccgcatcagcaccgatttacgccagaaaaatacgcgtgcaagtgaggtgggggggcgggcgttgggacgtgctgctgcgggtgagacgggaggagggtagtcacgggcttagggctggaggctggcgggctagggctgagtgcagcgcctgcttagagaccttcgggagaacttctgccggaaccccgacggctcagaggcgccctggtgcttcacactgcggcccggcacgcgcgtgggcttttgctaccagatacggcgttgtacagacgacgtgcggccccaggactgctaccacggcgcgggggagcagtaccgcggcacggtcagcaagacccgcaagggtgtccagtgccagcgctggtccgctgagacgccgcacaagccgcagtgagtccctggtgctcctggccccgccagggccctaaccctggggcggcatgctttgatgtctgggaccagagcctggaaatggttgagactaccctgccacgacttcgctcccgctcccgcctcggttcacgtttacctccgaaccgcatgcacaactggaggagaacttctgccagacccagatggggatagccatgggccctggtgctacacgatggacccaaggaccccattcgactactgtgccctgcgacgctgcgctgatgaccagccgccatcaatcctggacccccccagaccaggtgcagtttgagaagtgtggcaagagggtggatcggctggatcagcgttgttccaagctgcgcgtggctgggggccatccgggcaactcaccctggacagtcagcttgcggaattggtgaggcacaactgcctgtctcccacagagaggagctgaggcagggccagcatttctgcggggggtctctagtgaaggagcagtggatactgactgcccggcagtgcttctcctcctgccatatgcctctcacgggctatgaggtatggttgggcaccctgttccagaacccacaacatggagagccaggcctacagcgggtcccagtagccaagatgctgtgtgggccctcaggctctcagcttgtcctgctcaagctggagagatctgtgaccctgaaccagcgtgtggccctgatctgcctgccgcctgaatgatatgtggtgcctccagggaccaagtgtgagattgcaggccggggtgagaccaaaggtacgggtaatgacacagtcctaaatgtggccttgctgaatgtcatctccaaccaggagtgtaacatcaagcaccgaggacatgtgcgggagagcgagatgtgcactgagggactgttggcccctgtgggggcctgtgagggtgactacgggggcccacttgcctgctttacccacaactgctgggtcctgaaaggaattagaatccccaactgagtatgtgcaaggtcgcgctggccagccgtcttcacgcttgtctctgtgtttgtggactggattcacaaggtcatgagactgggttaggcccagccttgacgccatatgctttggggaggacaaaacttgtaagtacagtcaaggacaagacttgtactcaaagttgagatttaataaaattaatatttttactacttcaccaaggactttcttaaatgaaaatggtttttccccctacaagtaaacagtaataaagaagagaattattccta

SEQ ID NO: 212896 - DNA, 1050 bp, Homo sapiens
actgggggctgggcacgagcctgcccccagaggtcctagccagaagatggcaggtctagcatctgtcccaggagtctgttccctgtcctaattccccactcctctaggcagggccagcatttctgcggggggtctctagtgaaggagcagtggatactgactgcccggcagtgcttctcctcctggtgagcctcccttgtgtttggggacccagtctcatcccaccttcccctttccccaggcaagctaacaagtgagccttggggcaatggactgagagtcactgacctagcagagcttctctcccagccatatgcctctcacgggctatgaggtatggttgggcaccctgttccagaacccacaacatggagagccaggcctacagcgggtcccagtagccaagatgctgtgtgggccctcaggctctcagcttgtcctgctcaagctggagagatctgtgaccctgaaccagcgtgtggccctgatctgcctgccgcctgaatgatatgtggtgcctccagggaccaagtgtgagattgcaggccggggtgagaccaaaggtacgggtaatgacacagtcctaaatgtggccttgctgaatgtcatctccaaccaggagtgtaacatcaagcaccgaggacatgtgcgggagagcgagatgtgcactgagggactgttggcccctgtgggggcctgtgagggtgactacgggggcccacttgcctgctttacccacaactgctgggtcctgaaaggaattagaatccccaactgagtatgtgcaaggtcgcgctggccagccgtcttcacgcttgtctctgtgtttgtggactggattcacaaggtcatgagactgggttaggcccagccttgacgccatatgctttggggaggacaaaacttgtaagtacagtcaaggacaagacttgtactcaaagttgagatttaataaaattaatatttttactacttcaccaaggactttcttaaatgaaaatggtttttccccctacaagtaaacagtaataaagaagagaattattccta

SEQ ID NO: 212897 - DNA, 1796 bp, Homo sapiens
cttgccagcgttgggacgcgcaaatcccgcatcagcaccgatttacgccagaaaaatacgcgtgcaagtgaggtgggggggcgggcgttgggacgtgctgctgcgggtgagacgggaggagggtagtcacgggcttagggctggaggctggcgggctagggctgagtgcagcgcctgcttagagaccttcgggagaacttctgccggaaccccgacggctcagaggcgccctggtgcttcacactgcggcccggcacgcgcgtgggcttttgctaccagatacggcgttgtacagacgacgtgcggccccagggtgaggcccaagcttgggggctacagagccggggctggaagcctggaaccggagggccggggcgaggtctcggcctgatggctgcccgcaccggccgcagactgctaccacggcgcgggggagcagtaccgcggcacggtcagcaagacccgcaagggtgtccagtgccagcgctggtccgctgagacgccgcacaagccgcagtgagtccctggtgctcctggccccgccagggccctaaccctggggcggcatgctttgatgtctgggaccagagcctggaaatggttgagactaccctgccacgacttcgctcccgctcccgcctcggttcacgtttacctccgaaccgcatgcacaactggaggagaacttctgccagacccagatggggatagccatgggccctggtgctacacgatggacccaaggaccccattcgactactgtgccctgcgacgctgcgctgatgaccagccgccatcaatcctggacccccccagaccaggtgcagtttgagaagtgtggcaagagggtggatcggctggatcagcgttgttccaagctgcgcgtggctgggggccatccgggcaactcaccctggacagtcagcttgcggaattggtgaggcacaactgcctgtctcccacagagaggagctgaggcagggccagcatttctgcggggggtctctagtgaaggagcagtggatactgactgcccggcagtgcttctcctcctgccatatgcctctcacgggctatgaggtatggttgggcaccctgttccagaacccacaacatggagagccaggcctacagcgggtcccagtagccaagatgctgtgtgggccctcaggctctcagcttgtcctgctcaagctggagagatctgtgaccctgaaccagcgtgtggccctgatctgcctgccgcctgaatgatatgtggtgcctccagggaccaagtgtgagattgcaggccggggtgagaccaaaggtacgggtaatgacacagtcctaaatgtggccttgctgaatgtcatctccaaccaggagtgtaacatcaagcaccgaggacatgtgcgggagagcgagatgtgcactgagggactgttggcccctgtgggggcctgtgagggtgactacgggggcccacttgcctgctttacccacaactgctgggtcctgaaaggaattagaatccccaactgagtatgtgcaaggtcgcgctggccagccgtcttcacgcttgtctctgtgtttgtggactggattcacaaggtcatgagactgggttaggcccagccttgacgccatatgctttggggaggacaaaacttgtaagtacagtcaaggacaagacttgtactcaaagttgagatttaataaaattaatatttttactacttcaccaaggactttcttaaatgaaaatggtttttccccctacaagtaaacagtaataaagaagagaattattccta

SEQ ID NO: 212898 - DNA, 1630 bp, Homo sapiens
  misc_feature (1595)..(1595): n is a, c, g, or t
cttgccagcgttgggacgcgcaaatcccgcatcagcaccgatttacgccagaaaaatacgcgtgcaagtgaggtgggggggcgggcgttgggacgtgctgctgcgggtgagacgggaggagggtagtcacgggcttagggctggaggctggcgggctagggctgagtgcagcgcctgcttagagaccttcgggagaacttctgccggaaccccgacggctcagaggcgccctggtgcttcacactgcggcccggcacgcgcgtgggcttttgctaccagatacggcgttgtacagacgacgtgcggccccagggtgaggcccaagcttgggggctacagagccggggctggaagcctggaaccggagggccggggcgaggtctcggcctgatggctgcccgcaccggccgcagactgctaccacggcgcgggggagcagtaccgcggcacggtcagcaagacccgcaagggtgtccagtgccagcgctggtccgctgagacgccgcacaagccgcagtgagtccctggtgctcctggccccgccagggccctaaccctggggcggcatgctttgatgtctgggaccagagcctggaaatggttgagactaccctgccacgacttcgctcccgctcccgcctcggttcacgtttacctccgaaccgcatgcacaactggaggagaacttctgccagacccagatggggatagccatgggccctggtgctacacgatggacccaaggaccccattcgactactgtgccctgcgacgctgcgctgatgaccagccgccatcaatcctggacccccccagaccaggtgcagtttgagaagtgtggcaagagggtggatcggctggatcagcgttgttccaagctgcgcgtggctgggggccatccgggcaactcaccctggacagtcagcttgcggaattggtgaggcacaactgcctgtctcccacagagaggagctgaggcagggccagcatttctgcggggggtctctagtgaaggagcagtggatactgactgcccggcagtgcttctcctcctggtgagcctcccttgtgtttggggacccagtctcatcccaccttcccctttccccaggcaagctaacaagtgagccttggggcaatggactgagagtcactgacctagcagagcttctctcccagccatatgcctctcacgggctatgaggtatggttgggcaccctgttccagaacccacaacatggagagccaggcctacagcgggtcccagtagccaagatgctgtgtgggccctcaggctctcagcttgtcctgctcaagctggagagatctgtgaccctgaaccagcgtgtggccctgatctgcctgccgcctgaatgatatgtggtgcctccagggaccaagtgtgagattgcaggccggggtgagaccaaaggtacgggtaatgacacagtcctaaatgtggccttgctgaatgtcatctccaaccaggagtgtaacatcaagcaccgaggacatgtgcgggagagcgagatgtgcactgagggactgttggcccctgtgggggcctgtgagggtgattacgggggcctattgnctgtttaccacaattgttggtctgaaagaattaga

SEQ ID NO: 212899 - DNA, 319 bp, Homo sapiens
tcagttaaatgaaaatatgtttgaatttctacttctacctttggtcattcattcatatgttacaggtacttatcaagttatatttcctaaaactcaaagtcttactgtaatttgattcttttcctgccttcaaatagttatgaactatatttacaactttgcttttggcatatataccatcgtaccagccatgtgtcctgtttgtgacttaatcctttgcaagatttagcaaacattttctgtaaaggggcagatagtaaatattttaggctttctggaacatagtttctgtcacaacaactcaaccctgctattgcag

SEQ ID NO: 212900 - DNA, 441 bp, Homo sapiens
taccgcggagtatgaattgctgcaaccttttagaaaagaatctggcaatatttagggaaataaaaaatacagatatcacttgaacaaaaactggaattcaaaagtctgacttttaagaatctatcctacagaaataaaagtaccagtatataatgacgcatgaacaaggatacttttgtactattttgttcttgtgacaactggaaacaacctgtgtatccatcaataggagaatgtttgagtaaattttggtacataaatattatgaaatattttgacttttgacctagagaatcttatgattttgatggggtgatgaaggaatgcaagattaacttctttatcttttggaggagacgttaaatatattatgaaatacttaagacatatacagatatacaaggaataatacaatgaacctctcttctcaccacccaacgt

SEQ ID NO: 212901 - DNA, 353 bp, Homo sapiens
gcgctgggataacaggcgtgagcccccgcgcctggcttcttaattgttctaacagcagccacaacaacaaaaacccagctctgagattccagccccggcgactctaacagtcccaggcccgatccctcacctagaaccgagatgccagccctgactccacagacttcacccccaacccccacactcagctctggaagcccgtcctgactccagcctccattttcggaaccccacagcctgaagagctcccggcctaaacacttcaccccacgcgccacagtccccctgtgaatatgcagccccgattcagctgcagctccacagcacccctgccctgcacccccgctgcaccc

SEQ ID NO: 212902 - DNA, 1707 bp, Homo sapiens
  misc_feature (37)..(37): n is a, c, g, or t
atagttggacactactcacagctactacacagagacnccgaacgagctgatatacacctggaccaccaccaatgtatatacacaagcaaacattccctggctttcttctgaaagagtctagaagcactgacaccctcatagcagtgagcacacatagcttgatttttttttacacattcctttttttagacatttagtaaccatgctttcctcagaaaaatgactgatttcaagattgaggcaaggaaggtacaagatgaacctggaacatcctggattgctcgacactaaggaagtgctttaaaaaaagatgggggcatttcatagagagctaacttgaaaggactcacattggccaaatctgggacaattttgagttgtaaatatttaaggacaggaatgattataaaccgttggaaaaaataggaattcttggaaccatattgataattaatggataaacaactaggggaaaggggaagtcatttcctacagagcaaagatgagtggtaaatgtagaggatatgttggagttggaagtcttcattttgcaaccatgttcatagtaaggattggttcaccaagaatcatgaatattaagtctaggtggaaaattgaagagcatcatcttgcatgatttttaagtgtttctctatagagtgcttctgcattgcaaggaaagtggagaaataggacagtatctccaaattaacatcaccaatgaggagtaaatggagatcgtacacattgggctatgatactctgatggacccaacaccacttaacatgccatttggttcaggaatgtaaaatcttagtctaattgtgagggaacattagatgaacccaaaatgaggaacattctattttaaaaagattttgaaaaaagaaaaatttgcagaagtttgggggcatattaaagacacaggagccaactgaaagagttcccaactggccaagactggaacaatttgaacaccaaaataaaataatattggattgtaactcagagtacaaaataaatatccttgagttcatactggtataaataattgattggatatataaattaatgggatagaagggacaaatcccctgtgcagaattctaaatgtatatagatactccaccctcaaggaggtgaagctaattcccactctgtaagtgtgtgctgcacatagtgtgttcctcccagagagtacagtgcacagagaggggaaaggagtgatgttacagtgcagcagcccgactgacactgtctcagccaggtggtgaaggttaacatccacaggctaagccatactggcgtatatgtactcctgacatgatgtgatgacagtggcactttacctctctggtcttcctcccagaaatacataacccagcttaatcatgaggaaaacatcagataaaccataattgagggagtttttatgaaatacttgaccagaactcaaaactgtcaaggtcagtaaaaacaatgaaaacctgagaaatgtcacagccaagggagcctagaaacatgacagctaaacataatgtggtatcttgaaggggatcctggaacaggaaaatgacattagataaaaactaaggaaaccgcgtacatacatacatgctgacagcattattcatgacagccaaaaaatggaacaaacccaaatgtctgtcagtgatgaacagataagacaaatatggtctgtccat

SEQ ID NO: 212903 - DNA, 523 bp, Homo sapiens
acaatcttgaaccctattattatctaagcttggtttttgtaatgatacgggtacagcaattgtgaaactcttttagatgtattattggttgggtgaagtgagtaactaaatatgttggtggtgttggaagccagaatttcttactgtggaagtgagatgcaaatatgaaataaaggaaggcaaggaagaacgcagtggcaatgaattggaattggaggtattggtgtggacttacgagtttttaaaatatggataggtatgtgggtatggacatagtaactatttgtgtatatgtatatacacaagcaaacattccctggctttcttctgaaagagtctagaagcactgacaccctcatagcagtgagcacacatagcttgatttttttttacacattcctttttttagacatttagtaaccatgctttcctcagaaaaatgactgatttcaagattgaggcaaggaaggtacaagatgaacctggaacatcctggattgctcgacactaaggaagtgcttta

SEQ ID NO: 212904 - DNA, 446 bp, Homo sapiens
catgttgagttaaaaaaaaatgcaaagcatggttcctgcttgtgtcaggcgccttgctgcggcctcaaagcaccaggctgcttctcagcacgaggatatttgcaaatgtgattgtgctttctctgcgaagaatgcccttctactctttttctcttcaaaatccaatgttagtgccttcctaatccctattcactctttaaaatttcacgtggcattatccctcttccagaatgcctcttataccatcctattaaggattcaccatagcacccaaggcacacttttatctcagcactttgcgcatctattttattgactgctccatttttctgttttccctggaaatttgcactttgtatctcaggcctctgccacggaacttggggcttaggaagtgtccaactgatgtttgaaaattaataaatgaatgaaagaataaatcttat

SEQ ID NO: 212905 - DNA, 433 bp, Homo sapiens
ggtgcagtggagagcgggctgaaattaagcccttaatgacatggggtggtgaaccagtaaccagtccccctgcgcccaggcaccacgggacttccaggggacagtgcaggaagctcttcagcacatggttaaaaatcactgatttagtccaacctccttgtctcacaaatgaggaaagcaaaggatgctcagtgtgaagccacccagccggtgttcagtggaggtttaagtctcctataacaaaagatagacattttctcactgattccccaacagccatataaaatagcatttattacaccacgcccatttttagagataatcaaacattgcttttccaaggagccttcttctgacaacccagagtaacttaagtgtcccacatattcatttaatactttgtccttctctacttgacatccttatcagattg

SEQ ID NO: 212906 - DNA, 493 bp, Homo sapiens
tggtgtttcctctgcagccatctggtccctatcccaacactggggcgccactcacagtcctccccatggaagtcacacagaagggtgctgtccaggtgggtgcaggcagtggccctgtgtctctgtgacccatagcatgactaggctctgtacacagccaccttctaaacaaccagtagtttgggaagagctgaatatcttctcagcggagcagctgtaggagacaaaaactcagccccctttcaaggggaggtagcttctcatctaaaaaagtccaagctgctatatcactcttacctgagccaaatacccagcagcaccaaccagggcaattcaagatttcctcacctatatgtggggtgaccattaataattacagcaaacaattagttatcgagggcttcctgcgtgcagatagtcttttaagtgctccctgtagattagcttattgcattttcttggtaaccttatgatgcaaatacaaccatagcct

SEQ ID NO: 212907 - DNA, 310 bp, Homo sapiens
gccctggggaatcctcactactcctgaagagcctggttcctgttgggaatacctgggagaacatgacacctttgggggccagtggggcagagtgtagaaacagaaacgtaaccctccctactcatggacacctcctgccaatcagcccttgcattgatgcccaggatttcctgagatttctttctgctcagcacagccataatctagtgggccagctgcactccaggaacctgcgaaaggagagacagatggcagccagactaaaggacacggcccaccccagctctatgtctgtccttgccccgggctt

SEQ ID NO: 212908 - DNA, 390 bp, Homo sapiens
aagaacatccggggtagagatccaaggaccagagagaaaacctaactggtcaaggtcacgtaaaattcaacaggaaacactatatattctaactgataatactagatctaggtaaatagaactttaagagattttgctacacaacagcattaaacttaggtaataatagcatcagactggctgagcatattaagagctaattctgtttttcataaggaagacagcagaattcctaatcacaggctctaatgaattgtattctcttcattatcataaagctgtgttacatcttgatattcatgagtgagtcttctaatccaaaggaaggaataaaaaacaaaggggaaagaaaaggaaggttccccgtgaagttccagggtaccgagctcg

SEQ ID NO: 212909 - DNA, 374 bp, Homo sapiens
aaatacaggtgcgatttaataatcttgaatttcaaacctgattttaaaataaatacaaaatctggacttcttagccagtgctgtggactgaatgtatcccccccaaaatacatatgttgaaattctgaccctgaaggtgaaggtgttggtaggtggagcctttgggaagtgattaggtcatgagagtagagccttcctgtttgggattaatgctcttacaaaagagacctgaatgagatccctcatcccttctgcatgtgaggacagagcaagaagatggtcatctaggaaccagaaagcaggccctcaaatctgccttgttcttggacttcccagcctccagaactataagaaataaatttctgttgttttta

SEQ ID NO: 212910 - DNA, 278 bp, Homo sapiens
cctgagaagacttaccaaggcggctccaagaaatgattggtttgggatttcctgtggccatgcattccaaaactacagtctgatgaagagatgttgttatgttctgtggacctgctataattgttgccttaaaggatatgttagaaaccagtatctcttgtgaagaataaacatttatgtgaagttcaacaatgtcttcagtccaggttttcttctactacatttaaacaaacttaacctttgaaataaaaactatcatctattgcattttaatgaaa

SEQ ID NO: 212911 - DNA, 875 bp, Homo sapiens
cctctgcctcccgggttcaagcgattctcctgcctcagccaccagagtagctgggattacaggcatgcgccaccatgcccagctaatttttctatttttagtagagacgggatttcaccatgttggtcaggttggtctcgaactcctgaccttgttgtgatctgcccacctccgcctcccaaagtgctgggattacaggcatgagccaccgcgcccagccctgactttcctcattcttttaacagcttcacatacatagccaacattcccctaatttctcagccaccttgcctcaagttaaaaccatgagaccggttttgccaaacagggtgtaagtgtaatgtatcactttcaggccaaaccacttaaaactaagtgtgaccttcttgcttgtttcctttgcaataatcagaggcccatttttgagatagagaaaccataatatggaagcccctccatctctgagttaccacataagcatcagttgccctacagggtcaactatcccagtggtgcaattgacagaaaagactcattttatacagtaagcttccaggatttaacaaaaaaggttttgtatctccgggcaccacaggacatgccattccttacaagacttttaaaagcaaagcctagacagctttagcaataccctctttcttgacaaactgttagagatctaggcctgaagggcaaggaaaggacaataaagtctgtctttctacatcatttgcttctcagtgatgctcatcaaattgctatcaatcactgtgtcatgtttccactgccaatttttttagatattcacaatacagcccccaaaccccaacctatcctgtgtcttagtccattttttgttgctgtaacagaaaacc

SEQ ID NO: 212912 - DNA, 1047 bp, Homo sapiens
tggaaggccctctttaacagtaggtatttgaagtgttataaaaaaaaaaaaaggtgaatttttcttttatttctcagtttgaaagaacagctttattcttggttattcctaatgtccacctagtcctcttttacttttcttggtagggttagggtggcatggggaaatgggacggtatcattttgtctttttaactttttttttttccacctacagcagctgtttttaccctgtggtcagtcaggtactatatttagtttgcagttgcactgctgatcgacccttgatggccccagttggaagttgtttggggggaaggaactaggagaggccagggcctccatttaaaccagtgtctgtaagtgtctccttggaaggaaaaaaagatactgttccaggtcatggtttcctggtagttgacgtttaaaatgggcctcatttaaaaatttcaataattcaggctaattttttccctttatatggtaactccaccaagtttgtctaaatgtatgatttttatcatgattaagtttttacttccacatcatgtgacaactggcctgggatgggatataagctcagaacacaaagtcattcacctgttaaaaaaataattctatctgtggcgggttatgttatttttgttcaaagaggacacaatatgatgcagaatacaccattgaaggattttttggtttggcaagttcttatttttttaaatggctgtaaaacctagcagtgtttctgaaattgcataccttacctgatgttcagagatccgatttacttcttgatttcccagcaagtgattttgaaaacatttaatctaatcattccccccaccgtctgttcaaatcaaaggaagtggcatccagcactaattttcatgcatttatgaaaggatgcctgaggacccttaagtataattcaaaattttgtttaatgtgtgttccttgatgaagttctttaggagtcgtagaacgaactgattgcccactgatcatcaaatgcaagttatgaacatttaataaaaatttaaaaccaaga

SEQ ID NO: 212913 - DNA, 1007 bp, Homo sapiens
  misc_feature (585)..(585): n is a, c, g, or t
  misc_feature (587)..(587): n is a, c, g, or t
  misc_feature (591)..(592): n is a, c, g, or t
  misc_feature (597)..(597): n is a, c, g, or t
  misc_feature (605)..(606): n is a, c, g, or t
  misc_feature (614)..(616): n is a, c, g, or t
  misc_feature (624)..(624): n is a, c, g, or t
  misc_feature (626)..(626): n is a, c, g, or t
  misc_feature (642)..(642): n is a, c, g, or t
  misc_feature (650)..(650): n is a, c, g, or t
  misc_feature (657)..(657): n is a, c, g, or t
  misc_feature (680)..(680): n is a, c, g, or t
  misc_feature (691)..(694): n is a, c, g, or t
  misc_feature (697)..(697): n is a, c, g, or t
  misc_feature (699)..(699): n is a, c, g, or t
  misc_feature (701)..(701): n is a, c, g, or t
  misc_feature (703)..(703): n is a, c, g, or t
  misc_feature (708)..(708): n is a, c, g, or t
  misc_feature (712)..(712): n is a, c, g, or t
  misc_feature (714)..(714): n is a, c, g, or t
  misc_feature (720)..(722): n is a, c, g, or t
  misc_feature (724)..(724): n is a, c, g, or t
  misc_feature (728)..(729): n is a, c, g, or t
  misc_feature (740)..(741): n is a, c, g, or t
  misc_feature (744)..(744): n is a, c, g, or t
  misc_feature (750)..(752): n is a, c, g, or t
  misc_feature (756)..(756): n is a, c, g, or t
  misc_feature (765)..(765): n is a, c, g, or t
  misc_feature (767)..(768): n is a, c, g, or t
  misc_feature (771)..(773): n is a, c, g, or t
ctccttcccaggccttttgttcctgtcccggaaagccggcgtcctgccgcgcgatgcccctgctcggacttcttcccaggagggcctgggcttcgctgctcagccagctcctgcgaccgccctgcgcttcgtgcaccggggcggtccgttgccaaagccaggttgcagaggcagtgttaacatcccaactgaaagcacatcaagagaaaccaaattttattatcaagaccccaaagggtaccagggatcttagtcctcagcatatggttgtgagggagaaaattcttgatttggttatcagctgctttaaacgtcatggagcaaaggggatggacaccccagcatttgagctgaaggaaaccctgactgagaagtatggagaggactctgggctcatgtatgatctgaaggatcaaggtggagagctgttgtccctccgctatgaccttactgttccctttgctcgttatctggccatgaataaggtgaagaagatgaaacgttatcatgttggaaaggtgtggcggcgagagagcccaaccatagtccaaggccgttatagggagttctgccagtgtgattttnanaaanntgganaaaaaaannaaaaaaannnaaaaaaananaatttaaaaaaaatgngtaaaaanaaaaaanaaaagaaaatgggaaaaaaacanaaaaaggtgannnnagngnananaaaanaggnanaaaaannnanatgnnaaaaaaatgtnnaanaaaaannnaaanaagggaaanannaannnaaaagcctgcaactgtaggactttcctagtaaagctgttgtatttcctatatgtctgtactcttcctgtgaaatttccatcctttttgtgtgtcaggaaagtaggtactgccattgttttgagtggaagggcattgacaagcacttgggtcactgacattgagttctcaggtaaatgaccggcggattgtggatgggatgtttcctgtctgtggcattctatagatgtttctaa

SEQ ID NO: 212914 - DNA, 214 bp, Homo sapiens
caggtaaatctatgcaccctgaacacacaatgcaggctaagctgggggaaatagtttcaatctttgaggttcttggtatgggatgttctacttagttccccatccccaagctcaatgtcagtccacagaataaatttctgagatagaaattaaaatgagttaaaattcttatctgtgtctgtgagttttatatacacagaggagtgattagcat

SEQ ID NO: 212915 - DNA, 317 bp, Homo sapiens
agggtcgggggtggctggagcacatcctgggggcaatttggcaacagctctcagaattaaaaccgcacagagcctcttggccaacacctgccctgccaggagctgacctgggctagaaggagctcaccgtgttggttatgatggcagataaacccggcaataacctaaacatcagccggccagaggccggttcaatgcaatacagccacccacacattggaacacccagtgaacttctctctctccctccttcccagtctccatgcttccttcttgaatatttcagcccaaagccatcaggttggggaagaaaggta

SEQ ID NO: 212916 - DNA, 664 bp, Homo sapiens
aggcgtgagccatcgtgccgggtttttgtttttttttttttttttttaagagatgaagtctcactatattgtccaggctggtctcaaactcctggcctcaagtgatcctccacccacttcggcctcccatagtgctgggattacaggcatgagccaacgcacccagtctgcaagtggatttttaaggaacaaagaagagagagttcctaaattgttaccaagaatttacattgaaacagcataaggtatctgcaggtctggctcagaaaaaaagataacagaaggtattgattggctatgcactgtttattgtatcacaaattccaggaacaagaagctaatggggagggcagctgtgcaggaaccactgcctcgggcatgggtggaggaggcgtgtgaccgaagtcccctattcactgtacagtctccctgggcctgatacatttcgcatagctcagactgatctgagctatttttcttttctcaagttgggtgggggtggcccctctggactggaaaagcctcatttttcccccaagtgacacacctgagtttgtttgacttgtttcccccaagtgacacacctgagtttgtgggacttgtgtggagatgatgtatttatgtcacacttcagtcttcgctgatggctcacctttttttatat

SEQ ID NO: 212917 - DNA, 660 bp, Homo sapiens
ttgcggtgagcatcgtcgggtattctggtatggtttaattcttaaaagatgaagtctcactatattgtccaggctggtctcaaactcctggcctcaagtgatcctccacccacttcggcctcccatagtgctgggattacaggcatgagccaacgcacccagtctgcaagtggatttttaaggaacaaagaagagagagttcctaaattgttaccaagaatttacattgaaacagcataaggtatctgcaggtctggctcagaaaaaaagataacagaaggtattgattggctatgcactgtttattgtatcacaaattccaggaacaagaagctaatggggagggcagctgtgcaggaaccactgcctcgggcatgggtggaggaggcgtgtgaccgaagtcccctattcactgtacagtctccctgggcctgatacatttcgcatagctcagactgatctgagctatttttcttttctcaagttgggtgggggtggcccctctggactggaaaagcctcatttttcccccaagtgacacacctgagtttgtttgacttgtttcccccaagtgacacacctgagtttgtgggacttgtgtggagatgatgtatttatgtcacacttcagtcttcgctgatggctcacctttttttatat

SEQ ID NO: 212918 - DNA, 471 bp, Homo sapiens
aaatattttggggtcaattaatcaaatattttactcagaactcacctgtctctttctgccttgttgctgttttgatgaggttattgagagataaagtgcatgtgtgtgtgcgtgtgtgtgtgtaagagagagagagagagaatggaagcaagcctaaaattgggagattatgcctaaaactataattacttttatagagcaagtcaggaaaaaatgacaagaccacacatctaaacacattacagtgatttttccattgctagcttgatagtgcttttagtctttagcctgctgaaaccaataggtgctgagttatgaacaggcctaggcaaatggtaatgttttacttttccttctaagctttgtaatgtctctgtgtggtcttgatgagaaagaagaaacttccatgttaagaactgcagtgaattcagtttcacatttatttcagtgaaatagcataggataaaaaaa

SEQ ID NO: 212919 - DNA, 241 bp, Homo sapiens
ccttacctaagtaccctcttcattcctataatctttcctgtgtaaatattagctgtgattcttttgtctatcttgcttcccgtagcaggaagtgcctttaagaatctccttgaagaacttaggtgctgacctcagttaggtctctaaagctgagttcttagtcccagttgggtcagtgtggtatgatatgaacctttaccttctcaatgatgttcacattcccctcccctactaggaggtg

SEQ ID NO: 212920 - DNA, 558 bp, Homo sapiens
tcttattagagcactcctctatttttctgttactaaaatttctagcttcccttctacaaagtgataataaaaatcaaacattaacttttcctctaagaaaatccatgaaaaaaccatggtcatcattggtaatattcaactagttcaggttctcctccctcttgggcacataataggatcatttccccatcccttgggtgggagcatgtgactgattttgatcactgaaatgtgagtgtacgaggatgtgtcacttcaagagccggaacacacacatgcccaggtagaagcatatgttgaggagatttccatcagcctggacctcagaggaactacagtcagcagacacaccacaatggccacatagcacgagtgaaaaaataaaccttgctctcataagccattgggattttggagtaatgcattacctagcctaccttgattgatacaaaaatcaagcctggaaaagggttcttagttaggaatcaagagattctgctttgctgggtgtggtggctcacacctgcaatcccagcactttgggaggctgagacaggc

SEQ ID NO: 212921 - DNA, 108 bp, Homo sapiens
ccccagagtccccaggcaagcactgactcattagaaatcccagttgtcatgttcctgagcttgatgcattccagtgtccctcaactgtcaaaagactcagaaatgcta

SEQ ID NO: 212922 - DNA, 805 bp, Homo sapiens
  misc_feature (773)..(773): n is a, c, g, or t
aacctatgttatctgcttctggcactaccaagttttcttttcaatttattgttgaagtgttagtttcataccacagatttatctttagtccctgtatctatatctctcagatcacttatgaaactttttagggcattcccttccctcctcccccattgcttccgagacatctctacttactccaaaaggaaggagggaaagaagaagagaaatacaagtttaaaaaatatgtatacagttgattctcattattcatggtagctatgttctataaagttactgtgaacactgaattagtgaatgctgaaccactgtccctaggataaatatgagtgagtttttaaggagcatttggtaacattttcatcagctgatcagtacataaacttgttttatgtgtgtttctgttaaacacaccttatttaatatatactgttgattcactagcgttaaactcacagccaacagcactacagatagaatatccctaatctgaaaatccaaaatccaaaatgctccaaaatctaaacaccaacatgacgctcacaggaaatgctcattggaggatttcagatttctcattttcagattagggatgctcagctgatcagtataatgcagacattccaaaatccaaaagaatccacacccaaaacccttctgatctcaagcattttagataagtgatactccacggtttactcaggctgaaaggaactatttggcgggtttctcataagggactagcttgttcttgggatgacgctttgggnatctggcgcgccgttgagaccaccacgttggg

SEQ ID NO: 212923 - DNA, 415 bp, Homo sapiens
tctgtgtccacctctaactctcccaggatctgtctctctatctctgtctctcacagcatctctctcttcctttttgggtccaactcttaagactatctctctctaaatctctgtgcttatctctccctgtgtctcttcctttctcggcatctatctctctctcttcctttctcggcatctctttctatctctctctctctgcctctttctgtctcttactgtctctctgtctctgtctctcccagcatctctgtctctgtctccccctcgctggtttccgctcagattaagccggggacctaattccaggcccaggatcgaattttctggcaacaaagggaaatagcgaatcgatcggtcgctctggagattaagagacaagcggcgcgcggatctatcacggctaaacggcccc

SEQ ID NO: 212924 - DNA, 275 bp, Homo sapiens
ttcatccaataaatattgagatcctaccaagtgctgagctctgtgatatggcagtgaggcgtagcagtaaacaaaacagcaaaaatctctgccctcacagagcttacattctaatgggagggaggcagaccaagaaatgaaataagtaaaatatatagtatgttagatggttatgaactctctggtaagaaacaaagcaagaaagaaaataggaagggttgggggaagctgcattttttttttttttttttaatttagagacagggtctcactct

SEQ ID NO: 212925 - DNA, 288 bp, Homo sapiens
acctctgcctcctggattcaagcgatactcctgcctcagcctcttgagtagctgggattacaggcgtgtgccaccacgcccagctaattttgtatttttagtagagacagggcttctgtgtgttggtcaggctgatctcgaactcccgacctcaggtgatccaccaacctcagtttcccaaagtgctaggattactggcgtgagccactgtgcccagcaaaaaaaaactcctttaaaaaatagtacatatttctgaggtgcattggtaaaacattagcctccagtgga

SEQ ID NO: 212926 - DNA, 154 bp, Homo sapiens
acctctgcctcctggattcaagcgatactcctgcctcagcctcttgagtagctgggattacaggcgtgagccactgtgcccagcaaaaaaaaactcctttaaaaaatagtacatatttctgaggtgcattggtaaaacattagcctccagtgga

SEQ ID NO: 212927 - DNA, 171 bp, Homo sapiens
tggaagtttggcttttggatgttacaatttataatctgctctgttctctctgaagatgagattaacgtgagcatggaatgttctctgagttgcttctccaagcagagagatatgtgtgcagggccacccatgcttaccatttccctactgaggctcttaggatacttttgt

SEQ ID NO: 212928 - DNA, 578 bp, Homo sapiens
tctgccagtaactggatgtgtaaccttcgacaaatgaccaaaaacatctctgctcccagatttcctcatctgagaaacaagagggttggattagatgacctttaaattcccttccagccctacactccattgatttgtgattcctcatggggaggtacaacttttgatttctaaggaccaatggttgaaaaagtaagcatttatatagcatattttatatatgcaaaatcccttacaaatgtttattattcttacatcaggcaaatttttaggttttactagtgtcagtgcaagtacataaatttgccttctttgtttcttatgttcttcatatttttcccacgttcttcatatgttcttatgctcttcatgaagagtattacagctcttcttttaaatttcattcatttacattgcagttcttaagatagtacttggtcagccaactcacttgagccagtccctcctctcctatccagtcctattacacaatccttgagtccttgagtttagttctccctaacttgggacctaatggtccttccccttatttagattgagccccacttacctgtgtc

SEQ ID NO: 212929 - DNA, 468 bp, Homo sapiens
gtggggagggagagcatcaggataaatagctaattcatgctgggcttaatgcctaggtgataggttgataggtgcagcaaaccatcatggcacatgtttacctatgtaacaaaactgtatatcctgcacatgtacccaagaacttaaatgaaattattaaccctctatatccttcaaattagcacattttaattagttatcctttatattctacatggaagctaattcggaaaattactcccccctcaacaaacacagctacttatttggagagtaggtccctaaagatttgaaatgctttctgctctcttcagtgtggtttgtgtctttagccccaccgtacaacatacttctgcatttagtgaatatgaaataaatgatggtacacagagtgtatagaagtgattgtatgctgtgcttgtaaaaatgattaaacaacttgaatcatttcaattcagttatatgatt

SEQ ID NO: 212930 - DNA, 1119 bp, Homo sapiens
cttatagtagctctgacaagatatttctgttcttttattgggctattacttagtaggtgcttttaaagcttgttgaaataaaacagaaatgagttagaccagtgaatcactggcatttccattcttccagatgacaactctggaagaatatctaggaaatggggactggtacaattctagctaccctttagaaatcagaaccccagtgggggccccaaagctagatataagatctgaatgcacactaccatcaccatcaagaatcctcggccaagagaaagtacagtctggaaaatgatataaacactggttcttgaaaagaaaaatgcaaaactgctccccaaaatgctcaccttttaagaattaaaaatgacataaatagccatgagtcagcatatgcaaaagtcaggattcctagtcctctgaaaaagactctaaatcagtgtttaaattgttcataggaacagaatctataaggcaagaacagactatcatgaaaaaagaaaaagatctagaaaagagcccaaatgaaattctagatatgaaaaaagtcattttcattgaaaattcagtggaagtgatgtgaacagctaaggaaaagggtaagttggaagaaagatctaagaaaattatctagaatataccagagaagatgcaaaatatgaaagcaaaattgagacaatgatagaagagaaaaatctaagttacttctaataggagtcccagaagaaactataaaatatgaaagataagcaatatttaaaatgagtttatggcaaaatatttccagaaaagtcctcagattaaaggactacacagagctcctaacgaaaacaaattaagtcctagacataccagattgaaacagaacgtcaagaactaagaagaaacattttttaaattacctgagatagaaaagtttcattataaataacactgagagcaaacttaccagtagtaataaatgccataagacagagtactgagggaaaacattaaaccttatatttttaccagttaactcatcatttaagcatgaaggcaaaataattccatgtaggccgggcatggtgtctcatgcctgtaatcccaactctttgtgaggccaaggcaggtgga

SEQ ID NO: 212931 - DNA, 767 bp, Homo sapiens
agtgtcgggattacatgcatgagccacggtgcctggcctaaatagtaccattgagggaccttctaattatgaatttagctggtatttcatatggtggaagcactatttattgtgtcctaaatcagaggagatacatgttatataaacttgccagtcatttgggatacatagggcatgaaatatttacttgaaatcattatttttgtatatataacatgaaatacttagaataaagatatgattcttgatagctaccagttgagtgcctgctccataccagatgtttcataatttgttaagtcttaatacagtgcctggcacattgtggatgctcattaaatatgtctgtctattagatagtactacatagtagtaatgctattgtagatataaatatataattctcctaatagtgaagattgacactctgcaattatacaggcagtagaaaataaatgaatagtagttaggattgatgtaagagtattgtccttattttacaactgaggaattagattaagtaacttgtcaaaggttgtgcagaataagtggcaagtctgagcttcaaaccagggccgattcctgaaacctcggctcttttcaccatgccatatggttttccgaaattggtactggatgacttattaaaggaaagcatatctgagaatgaaatggcatgtggtatagctcatactaatgagcttatgcttcctttgtgcaatataaggaaatatgtggtgctccagagacataaaataattctttaa

SEQ ID NO: 212932 - DNA, 277 bp, Homo sapiens
tgaaaagttacttccttccccttcttagggcttttaatccctctttatgttgcatttcagaaaatgccctatagcgtactatgaaagaaagacattcattcctgtctttgctgctgtgtggacgatctgtattccttgctccgtgggagttgtgggtttatgtctattcttgcatgttttgcctgaaggaccacagtgacctacttggtggtctccctgctttcatggtttcactatgctgatctatccttcacttaattatagagtctatcttaaa

SEQ ID NO: 212933 - DNA, 410 bp, Homo sapiens
tcaaaatttaggaaaatgagatgtttgggttaaatagtcttcaagaatccttcaaattctgaaatactgtaattcctttaatctgtaattttgctttattcacctataaaaattcagaattcctaagacagaggcaggattttcagatgacaaggcaataggtgtttccattagggggccatgtccaattgatactatggttttcagagaaggataaaatagaatttgaaaagggctgttaagtgcgtaacattctttaatccactagttagagtcagtcagagttgaatgaggcctctattcctaaatttttatatcattgccttgaaggcattatttgaagaactactattttttaactatttagatcttgtgactattctcaacagagaaactgttcaaagaagact

SEQ ID NO: 212934 - DNA, 320 bp, Homo sapiens
cttggattataggcagggaccaccatgtccggctaatttttgtgtttttaatagaactgggatttctccatgttggccaggctggtctcgaactcctgatttcaagtgatctgcaagcctcagcctcccaaagtgctgggattacagccatgagccactgtgccaggcccctgacctgcttttctgaggacaaaggttttctgggatcttcctgccctccccacctccacctatgcactttttaccaaccaaagtttgcttgggtcaaaaattcacaaaagttaacaacattaaacaaaacatgttttggtgtggtctaa

SEQ ID NO: 212935 - DNA, 497 bp, Homo sapiens
tcaaaaatttaaatataggagtatgatgggactatcagcctttcatacccaaggatacatatacttgattccttcaacctgaagcagatattgattgcatataaattgccttccacccacgaaaacaaaggatagtttatccagcaataagatgaggagggttattaggagatgagagagctgcaagaagagataaagagttacaaaagatcagtttcacccaatttcaaattgtagaaaagggaaggaaactttattcctcctttgcaccaactgggcccctgctatcagaattcagaatttaaattagaactgtctgctaacacagacttttacaggtacggaaaaaaaaacaacctctatataagtttcatgaggaaattataattcaactactatcacagtgaagttgacagtccataggaggcagagaggatgaggtcaagactactggtaaagcattattattattattatttttagacagggagtctcac

SEQ ID NO: 212936 - DNA, 331 bp, Homo sapiens
aacccacagatgtggaacctttgaagatcatctggtacgaaacagatgtgactgtaccagtggctgctttatcaagctgggaacaaatattggaaggaaattcaccaaaatgttaaactgatggtcatgggaatgaggagtgacttatctgatctccttcttctttcgaacttctgtgatgcagagaggaaaaaatataaacccgatatttagatgaaaagcatcccaagcccagtctccagacagatgaatgggtgtgtatgccgatttgacacggccggtgtttgttcttttcatgcttttttttttttttttttttttgagatggagt

SEQ ID NO: 212937 - DNA, 268 bp, Homo sapiens
aggataaagcattttctggtctggaaatctatatggaatcatagattctggttatgttgtacttcagtaaccctgaaacagaattctatgaaaagaagtaagttagtgtacacagctggtacttagctaggttatggtaaattgtatttttgttgttgttgttgttgttgagacagagtctcactctgacacccaggctggagtgcagtgagccgagatcacgccactgcgttccagtttgggcaacagagtgagactccgtcacaca

SEQ ID NO: 212938 - DNA, 415 bp, Homo sapiens
cacaacaataaaaaatatataaattaggccaggtgcaatggctcatgcctataatcccaacactttgggagatcaaggtgggcagattgcttaagcccaggagtttgagaccagcctgggcaacatggcaaaaccccatatctacaaaaaaaaaaaaaaaaattggaaggttaaggtaggaaggtcacctgagccctctggggaggtcaaagatgcagtgagtcagcctgggtgatggtgaactacctcaggctgggtaatttaaaagaaaagaggtttaattggctcatagttcagcagaccttacaggttctgtggggagggctcaggaaagtcacaatcatggcagaaggcaaaggggaagcaggcaacatcttagatgccagagcaagaggaagagagcaaagagggaggt

SEQ ID NO: 212939 - DNA, 441 bp, Homo sapiens
tgtgaaattagagaaaacctatgtgaaatgggaaagtccttaaaatgtcctatctctagttgattctgggtcctctttttccttcctggccccttcccactcgaaacccaagttcactctagccatatgctgacatgggtaagcaccagacccgggccgatttcccacaattccaagtggcatttgcataaatgttcctggagctggaaaacccaccttgtccaagcctcttgttttgtggatgaggaggctgaggctggggcaaggtaagtaactaacttgctcacatggctagtaacaaacttcctacaggttcctctaccttatgagatagtgagtactcctgcactcaaatatattggggttcatgttaattgcatgaattaatccagtcatcaataactctaaatcttaaattttgaatttggaatctgagtgaat

SEQ ID NO: 212940 - DNA, 392 bp, Homo sapiens
ttaacgagagaccctgcagaggcgtgcaagcccacccagggagcagatgcccatgttatcagtgccttcggtcccgagaggggttcacactgaggatgaaggcgttcaggcctgtggcagggaaggtatttggggcagttgctctttcatggaatcgcagagcaggttcacctgcacagccctggcaccttcttgcttccaaatccacagcgccttagcgaaatacaagctcatccagtcctcaaagagtgttaactttccaccaacaggtgtacttttaaaaaagaagggtgccgccaacctaaaaagacacggcccacaatgagccatctgaaagatgactggaggctctgcttttaaagaagttgtcaatcagtcgatcagcaagccag

SEQ ID NO: 212941 - DNA, 483 bp, Homo sapiens
cacttcaccggaacctagagctacctgtgaacaggtctcctacacgttgaagatttttctggatttagggtgtctaacctttgatgggaaagggcagcttcatcttggagtgtttactttcaagaattgctatgggctaaaaatcaattctctttaaaagcaaagatttaatctgataaggaatcaatgcagcatgctaaatacctttcatatggcatgaaaacgtcttcagttactcaagccacaggcaatgagaataaggtgccacagcaccgtatttttcacaaaaagagtgacctgggattcaagaaacctgtatagtataactatcgccagttcgttttgtggctttgggcaagtcacttcaccttttgtgaaagtctggagcttctttaaaatttctgaactgcattagataacgctttaaaaatatacctgacattctgtaactttaaataaatgaaaaatgccaatctattaagt

SEQ ID NO: 212942 - DNA, 546 bp, Homo sapiens
atctgtcccattcacaggaaggcatcggggctgcgccgggcgggtactgcggtcaatgtagtgtgaagagcaggcctccactcaggcagcctctgttgtgcagtttgttttattgtagatctgagttatgacgcacacacactcacatgtactctctcaaccaagaagagatgcgaaaatagccttgctggcttcctttcctccccctttattttttgaagcacgtggttaactcagcaggtacaattctagtgcatgaaacacacttggttcatagaaagtcagttaaaaacacacatccacatggacctttctggctgggtggttgtgtgttaacataaggactccatacttgtactaggattcttctagaaattagtgggttttgttgttcttgctctctcttccccacctctttttttgttttttgtttgtttgtttgtttgtttagcactttccattgtgaaaactattttggttgtccagtttggattgttggtctaatatttgtggtttctaagtcttaaaatgaaagaagagaaagaa

SEQ ID NO: 212943 - DNA, 105 bp, Homo sapiens
ccatatcgattctgcagcagattgaattagatctaaaagccacccaggccttggtcctagcacccactcgagaattggctcagcagatacagaaggtggtcatgg

SEQ ID NO: 212944 - DNA, 480 bp, Homo sapiens
ctgctgccacggagtttgtgccttacctgggtttgtgctcgtgggcgttgatctgggttgagggccgcagcctcgctcctgtttatagacactcggggtcccagcccaatctgccccaggggctccctgaggctctggggtcctacagacctgggtcagaagccccacacgggctccagcttgcagggatgctgggtgagtccctccctgcctgtgggctttgcactcctgcctgcagaatgggggtgcagaagcacctcctcatcaaatgctcaggtggcttgagtgagccgatgcccagggcctgcccgccttgggggatgcccaggacacccacactgccatccaagtttggctttgggcgagttcccagctgcctgcagctctgtctcctctccgagaggcggtcatgttctgcctgccctccaaaacaaaggggatggaaatgcgttggggtgagaaggacctacccggtcagac

SEQ ID NO: 212945 - DNA, 441 bp, Homo sapiens
tataggtcttctgggcttttctgtatcttaatcaagatacggaatctttctctcctctaacctgtcctcagcttttcacggggtgaggtccagatttaagatgggataccagattaaacatacttcagaattgtatattaagagagaaacatttttggctgggcccagtggctcacatctgtaatcccagcactttgggagactcaggcgggtggatcacttgaggtcaggagtttgagaccaggctggccaacgtggtgaaaccctgtctctattaaaaatacaaaaaattaagggggcatggtggtgcatgcctgtaatcccagctactcgggaggctgaggcatgagaatcacttgaacctgggaggcagaggttgcaatgagccaaggtcctgccactgcactccagccttggggacagagtgagactctgtggcca

SEQ ID NO: 212946 - DNA, 379 bp, Homo sapiens
taggacagttccccaggtggccttggactgatccagttctcccctctttctcacttgtagttctcaagaataactgtagaatgtgctgacaatacagcaccctgtgataacagaggagctggttggaacaggctctgttccagcccctcacatcagaaaacaggatgtctttccatgctttagaccagggtgtcctgctttgtgaaaaacccagggcaggctgctttgtgggatgcctcagctgtggtgcaagtggagcatgtacagaacagaccccatctatcccaggcagctttcttgagctggggaactgttccctgctgcctgtcagtaataaacccacttctacatggtgaaactcaaacttaaacattcttgg

SEQ ID NO: 212947 - DNA, 334 bp, Homo sapiens
caggcaatctagaaaatagcctgagaccagggtgtatctcccagcctccatgccgcaggccgggaggtttgtgtagtcgacgttctccccctagtggcctgagtgaagatgacaggcaggagggaaaaaaagccttttcacctgcgaggcctggctgccaagggctcccgagctgcggatggacaccaggatccagctgctcttccatgactcgccctcccttacctcgccctgatcccggccctgtcagatctcatctttacttaacattctgatattttgtttatcatagagtttttgggttatttttgatttattaaaatattgtattaaa

SEQ ID NO: 212948 - DNA, 274 bp, Homo sapiens
aattttacttaatcagcattttttatgatgtgtgacatatatctttcttgtaaaaagaattccttcaaaatatgttttaactaattaaccatactataacaaaattacataacttaaatgttcttagtcatcagtattaagctcttgttcctcaaaagacattgttaagaaaatgaaaagccaagcttgtgatcccaactattctggaggctgaggcaggggaatcacttgaactcgggaggcagaggtttcagtgagctgagatcatgccact

SEQ ID NO: 212949 - DNA, 371 bp, Homo sapiens
tcttttccactggtgtttttctatttatctgtgaccaggtcacaaaatagctcattaaagtttaactttgagccgggcgtggtagctcacgcctgtaatcccagcactttgcgtggctgaggcgggtaggtcacttgaggccaggagttccaggccagcctggtcgtcttttcacaatttttataaagtataactattttttaaaaaattaacagctttgttgagctataattcacacaccctacagtttccctatttaaatgtacaattaaatggtttttaatattttcacagagttgtgcaaccatcatcacagtcaattttagaacattttcatcaccgctgctatgaactaaattgtgttccccccc

SEQ ID NO: 212950 - DNA, 261 bp, Homo sapiens
ttaacgggtgttagccagaaagccagaatggctggagctgagggagtagaggaggcggcatagaaaatgaggtcagagatggaggcagggccggatcacagaggggcacagagaacgaggagggaattggatttttggaaaagattgtggcaaaatacaaaatataaaatacaaaaataaaatataaaccataaaatgtactacctttaccattttaagtatgcagttcagtagtgttaaatacatttacatcattgttca

SEQ ID NO: 212951 - DNA, 441 bp, Homo sapiens
ggagaagctataaagagagcccaggtttcctgactccaagtccagagtgcattccacaggacatgatggaggtgctgctgacattatcaggagagaggaactggtgaagaaagtgaagggggcaaaatcttgtctaatattcagcactgcgggcagtcaagtaccaggcctaaaagactgagaatcaggatgctgccatgctacacaaatcaagggaagacaatgtcaggaactaacccaatgtgtcaaatgttgtacagatgtcaaacagaacaaacgacgtctctcttcctagaaatcagaataaagctagtaacctttgagacaatttttgtagagtagtagaggccaaagttagactattgtgaacttcactaaagtgaagagtaaagcaaggggacgaaactgaaggcagccaagacaggacaatttttctcaaga

SEQ ID NO: 212952 - DNA, 610 bp, Homo sapiens
tggtctgtgtatttcagtgtgtttttgtagtggctggtaatagtttctcctttccatatttagtgcttccatatttaggagctcttgcaaagcaggcttgaggtggtgatgaattccctcagcatttgcttgtctgaaaaagaccttatttctcctttgcttatgaagcctagtttggccagatatgaaattctgggttggaaattattttctttaagaatgttaaatattggcccccaatctcttctggcttgtagggtttccactgagagtttcagttagtctgatgggcgtttctttgtagatgacctgtatgcccctttttaaaaaatcttcacattagtactgacaatggaagtaaaggcttccagagcttgtgcaatgagggccatgatggtatgtacaaagtgtgcccccagttactatgtctgagctcagaaagacctttaagaaattttgtgccaggcatagtgactcacatctgtaatcccagcactttgggaggctgagttgggaggatcacttgaggtctggagtttgagaccagcctgggcaacatggtaaaaccctgtttctattaaaaaattaaaaattcgttgggtgcagtggc

SEQ ID NO: 212953 - DNA, 253 bp, Homo sapiens
ctcaaagtgtcagtggtcagaggcccagggccaaaccacaaactgttgtcccagtggcccatgtcaagataagtgtagaaatcgagagcgtttaggcatttttagagcaatttgcccttgctgtgacatctagtaattaatatttttgtgtgtttgcagaagtattggtctgctataaattggacatttaaaaatttgtgaaataagccagacatagaaaaatattgcaggatctcatttagtggaatgtaaa

SEQ ID NO: 212954 - DNA, 506 bp, Homo sapiens
cccctcatctcacactctggttgctctgtgtagttgaggctgaggattgcggtctgctgggattctacaatcagtgctaggattcagggaggagaggctggtcaggaagagacactgcccacgatcctctaccgcatttgtggcctccccagggtcttgggggtaacctagaaagaagataaacagagcaggcttgtgacaattgaaaatatctatttttctcccaaagccagacacaagaaggaacagggtgacttcttcagctcatctcaagggaacactttgatccaggtctaatggatcactaaagtctcttctccccgctgagtgggtagaatgtcaacagcccagagcaacagtacccccagttgtgttccaaatgtcttcagtctctcattcattctgcaaataaccccacctccaggtccagcccctgtgatgtgccaggtgctggcattatagcagccaggcaaggctctgctctcaagcagctaacattgtagctc

SEQ ID NO: 212955 - DNA, 268 bp, Homo sapiens
agcttttgaaattgtgcacaaggtatcatatactgggcaagatacagaaatggaatcagatctggaggtcagctctgacaaatgcacttcctagttatgtgatcttgggttcatcatttagcctcagtggactacacttttctcatgtgtaaagtgaataatgatctgtaagattacataattttaactattgaaatgtatgcagttgaggtaatgaaacatttaagaatgtaagtaaaaaaacagtatctcttaaaatataaaaaat

SEQ ID NO: 212956 - DNA, 278 bp, Homo sapiens
tctgcctttccttctcaaaacacttttctctcttcagacacctttgtgcctctgattctggggcttcctgatattgctggagaaaactgtacacctggattgatttgcaggaaaaagtaatttgagtgacgcagcctcagtgagatctctgttgttttccatcctgttctccaggaatcctgtcaccttccctactgagccaagccaagcctttttcacttgcttcaaatcccatcccagttctggagctttcacactaagaaacctggagactcctc

SEQ ID NO: 212957 - DNA, 917 bp, Homo sapiens
gcaatctcggctcactccaacttctacctcccaggttcaagcaattctcctgcctcagcctcctgcgtagctgggattataggcacgtgccatcaccctcggctaatttttgtatttttagtagagatgaggtttcaccatgttggccaggatggtctcaatctcttgacctcatgatccacccgccttggcctcccaaagtgctgagattacaggtgtgagccgcctcgcccggcctatggcattgcttttgatagatcattctatacatttgaattgagggtaggtgtcctatctacttgttcctcttatttccccaaggttcttaccaagatgcccttttctctttactaattaccactagcttcaatttagaacagtcagattggctcattataaaacattctgaaaatgcttaaaagcaaagagaaaatatgaaaattaccttaaatcatatcatttattgataacaatcatgaacatttttactaatttgcttccagtcttttcgtctttatagacattacttgcaatctttaaataaagctgggatcatactacaaatgcatccgagcagccttcttttcatgtatacatttaaaatagtatcttatgccattaaatatttaaaaaatataatttgcaatggtgcttaacatcccattctatgactctatactattcacccttcctcctttatgagacattcagattgtatcagtattttgatattctaaataaataataatatcgtttgcacattgatgcttagtagacattgttggctgatttctgtcactcaggtgccatttaatccacaattttgatggatagcacataaaactgtaatttagatttctaggccacttagtaccctcagcttgttccccatgctgtagcctatttattatagaggg

SEQ ID NO: 212958 - DNA, 538 bp, Homo sapiens
ccgctgcccatgaagacccgacagcccacttgccatctgggaacctcgcgccctgctgtgcttggagttttcggaaacgatggattccaaacaacttccagtgagcaattggtgatattaagttaactgagttcatcttaccctttttattttgcctcagagagtaaaataagatagaagcaaacataccagcccacaaacatgtccatgcttccttttgcttctagaaggcgtatgttgggaaattaatcagaccaacgttagccccttcctcccggccctggaagaatgcctggtgtgtgtgcatccccctctccagttagcaattaccgaacaacttctgtggctaccaaggagagcatgatagggtcccagccctccagagcttacaatgtaagagaacaaacaggaacatgagtctttacaatacctgcagtgagcgccaacaaagtggaataaaatgtcacctgaaatacctgagaaaggggcttctcaagcttggagaaggcagaggctttggagagatgtttgatctgag

SEQ ID NO: 212959 - DNA, 486 bp, Homo sapiens
catacattatttcattacaacctgagaggtagttgttattatcctcattttacagatgagcaagtggaagctcagcggggtcactgaaggacccacagcaagggagtggccgaactgggatttctttcgtgggtctgactcccaaagccgtagatgttccctccacatcactgtccaccaaaatgtgctccatgatccatccacatgcaaaacctctgggaaatcattaaaatgcatgttctcagctgggcgtggtccctcatgcctgtaatcctcatactttgggaggccgaggtgtgagccaccaacgcctagcctcagagacttctagtaacatcatatagttagtaaaggggacagctggttttcaagtaaaggtctgtttgattttttctattatagaaatcctttcccctttcttaatgtctctttggtattcttgaaaaaaacaaaagagagccaacaaataaaaaaagttggcggccg

SEQ ID NO: 212960 - DNA, 359 bp, Homo sapiens
gtttagtaagttaaactaaaaataataatatgaaaccatcatattttataagcccttttcagcttatgaaaatatttccccaaatataagttttatgaaagcatctttcagcatttccttctgaactgcaacccaaacaatgcctaagcacatttctaatataataaagtgttgttgggaaaaaacactgttagggaatggctttcacttggcattagtttgaatgacttggcattgtcaccaggggtggtggtattttaaacacagaacattctgcacagtgattttcattgtaaagtctgtgatgtcaaacctcaataaaatttctttctggaaattgaacctgcaaaatgcaaaaa

SEQ ID NO: 212961 - DNA, 291 bp, Homo sapiens
gcacccagcctatgaatgattttttaatgtgttgtttaatttgatttgtcagtattttgttgaggatttttgcattagtgtttatcactgtgtctatcatctttttttgatgtttctttgcttttggtatcagggtaatattggccttgtagaatgagtttggaactattctcttcactattttttggaataggtcgagtaggattggaattagttcttccttaaatgtttggtagaattcagcagtgaagccattggatcccaggcttcttttttattgtggcttttact

SEQ ID NO: 212962 - DNA, 174 bp, Homo sapiens
ctcggctgggcttgctcgtgtgtctttggtcagctagcaggttatctggggcctgattggtctaggatggcttcacttgcacatctggcacttagatgtgtgttagctggagcaatagggggcctggaccccgtgggtctccttttccagcaggccacttgggcttgttcacag

SEQ ID NO: 212963 - DNA, 391 bp, Homo sapiens
ttgaggaggtggaacataattgtagagaaaaaggcaagcaaactttaaaaaatgtctgctggaatgatgattcacttggaaccaaacattgttagagtagaaatttatatttggtagtatctgtttgaaaaaatgggaagagagagggattgtgaacttgtacaactccttttttaatgtctagttaagttgaaggtgcatatatcctttgatccagaaatttcacttctaaatgtagctcagagaaattcttatgtgtagaaatagatgaggacatttagaacagtatttcttgtaatggcaaagcaatcctgtttgtaaataggaaaatgggtatatattgatacaatagaataatgtagtggaaatgttattataaatcctgatatat

SEQ ID NO: 212964 - DNA, 558 bp, Homo sapiens
caacttgcttcctcacttccttcagatctccaaaaagccatcttcttggtgaggtcttctctgattaccctaataaaaacttcagcatcctccagacactccttatgttccccctgcttttattttatccagagcactcacctcctcttagtatttggtgtaatttacttatttattttctttctttgtcttgtcttcccctgcaattagactttcagctttataggaacagggacttttgtctgtttggttcactaatgtatcctgagtgtcgggcatatagtaagtatcaataaatatgcaaataaatgaatagtctttagaggagataatgggagtataaaaaagagctaaggagtgcagtcagtatgattggggtgagtgatgcttttcatgttggaaaagttgtcatgaagggccttacatgtcattctaaggagcttagattttatcctataggcggtaaaatgtcagtaaagtagtcagtggtctgaattggaattttagaaatgcgttctggctgtagtataaagaatgaggccgggcacggtggctcat

SEQ ID NO: 212965 - DNA, 141 bp, Homo sapiens
ctgaacctagtatcttcctctctgattctgctctctcactgtactttctctgttggcaacatcctaccagttatatttggttccttcttctacattactaccattaataatggggcaacccaatgtttctgtcaagcctat

SEQ ID NO: 212966 - DNA, 332 bp, Homo sapiens
ccacactgccactactggggtaagtgtgcatgaatgccattgcaatgcccctgttggcatgaaggcatcccaccatgccaccatctgtgcaaatgcacacatggacactgccaaccgacttttaccaccattgtgcccaagctgatgtgcagacaccacactgtgccactgcactgtggctgctggcatgcaaaagccagcacatgtaactctgccactgttctgatgaagcactttggttggcaacccccatcagtgttgtggccagcaaaatggaaactcctcagcctctccagtgcagcaggttcctaacctccaggggagacaggata

SEQ ID NO: 212967 - DNA, 213 bp, Homo sapiens
cgcacccggcctctgtcacttttttggccacacttcattcacgcgactaaagtaacctgatctactaagtggttcttgaatctgaatgttggggaaccagaagcacggttcttttcgtactcagatataccctcacataacctaggacagcctgtacagaagattaggccagatgagaggtgtgagcagcaggtcttagtgtcttaccctcct

SEQ ID NO: 212968 - DNA, 1046 bp, Homo sapiens
gcgccagggctggacgcggcgaggtgggaggcaggatggaggggcgggagccaaggccgagggggcggacacgggtggcgtctggcgctccataaaggggttgcgggggccgcgctctcttctgggagggcagcggccaccggcgaggaacacggcgcgatgcaggttcagtgccagcagagcccagtgctggcaggcagcgccactttggtcgcccttggggcactggccttgtacgtcgcgaagcctccggctacgggaagcacacggagagcctgaagccggcggctacccgcctgccagcccgcgccgcctggttcctgcaggagctgccttccttcgcggtgcccgcggggatcctcgcccggcagcccctctccctcttcgggccacctgggacggtacttctgggcctcttctgcctacattacttccacaggacatttgtgtactcactgctcaatcgagggaggccttatccagctatactcattctcagaggcactgccttctgcactggaaatggagtccttcaaggctactatctgatttactgtgctgaataccctgatgggtggtacacagacatacggtttagcttgggtgtcttcttatttattttgggaatgggaataaacattcatagtgactatatattgcgccagctcaggaagcctggagaaatcagctacaggattccacaaggtggcttgtttacgtatgtttctggagccaatttcctcggtgagatcattgaatggatcggctatgccctggccacttggtccctcccagcacttgcatttgcatttttctcactttgtttccttgggctgcgagcttttcaccaccataggttctacctcaagatgtttgaggactaccccaaatctcggaaagcccttattccattcatcttttaaaggaaccaaattaaaaaggagcagagctcccacaatgctgatgaaaactgtcaagctgctgaaactgtaattttcatgatataatagtcccgtatatatgtaatagtaggtctcctggcgttc

SEQ ID NO: 212969 - DNA, 463 bp, Homo sapiens
tcatgaaacttctcccgagagtaggtactgtgcattttttacttggatatctgtcacttcaagctcacaactgaagcccccacagtcatctttcctcatcttcaccacccacgacacccccctcccaacttctgatgttcatcactgtcccagtgagccagacttaaaacatcttttactccttttcctcatgcttgggtcctagttagtctccagtgcctactaatactttgtgtgaagtatttttttcccatcagtcccttgtctcagcaccctcttccttcatcagtgcaacagtctcctttcagacttccttaagacaaaaagcacttgaaggctgggtgcagtggctcatgcctataattctagcactttggaaggtcaaagcaggtggatcccttgagctcagcagtttgaaaccagcctgggcaacatggcaaaaatctgtctctacaaaaaatac

SEQ ID NO: 212970 - DNA, 562 bp, Homo sapiens
ccatcagaggtctccctgtttcaggagcagtgatctgctcctgtgggctctcttaggagtcatgctgtttattccttttcattttcaaacttcttgcgtcctcaccttaaactcctctagtttttttcccctcctctgcttaatctgtgccctcatttcttcccaatcctttggactcttctcaagtcccattttgctggacctttctgcaagtgttacattttaccctcatctttctggaaacttctcattccatttcctaaatgtggtcattcacttaggactcggtccctgggctccctctcttcctttgtcatccctgatgggagcaagacgcatcttgctcccatcagggtgtggggcatttctgagtttcaaagatgcatagcgtagggttgctccttcaaactcttttaaactggggtccgggttaacagtggctgcatgcaaatccttccaaatgtcactattaatctttcccccattcagaacagcaaaatcactccatggctgtttctcgttctctggggtgggagatggcgttacagaactaagtgaccct

SEQ ID NO: 212971 - DNA, 509 bp, Homo sapiens
tctttatagccgtacattatcagggaccagcacatacatatacccctccccacacttgctgtctcaaaatagtaatgaacatctttaggtcatcagctccagttctctgcctaaaaggtgtgggaggtaagtgtgaaccccagcatccgaattcaaagagaacaaacttctgttactttgtaagagcttttctataaagttctacaaagagaggagaactgggacgcaggagagaggtttctcccctctgcactcaggactatgcattcttttggaccgggtcactgaagagcaatttgctggaacaatttaattaacccaaaataatgatcaaattaatttaaagtctgattcccttagggtgcttaattaaattacactgtaattttaaaagttagaaaactgaaaacccaaggtttatatgccatttgaggaatgggtgaaagaattctttaaaaatgctcaaagtgtgaaaaaacggaaatcacattcaggccaccccaaagaaa

SEQ ID NO: 212972 - DNA, 118 bp, Homo sapiens
atagctattgcaagaaaggcaagaaaacgtaataaaatatatatgacatttatatagtttgtatatttgtcctcacccaaatctttttttttaagagctttcttgccttttaatttct

SEQ ID NO: 212973 - DNA, 191 bp, Homo sapiens
agcatctgtatctcaaattcaactacttgtcatctcagctgctgcctcatgagttcaccaccagctatatcacctgcactgctacaccatcttcccaaatcatcttctacctccactctggccccatcagtcattcctccacattattgaataaatcaaattatgacactatcttaaggaaaatccttctc

SEQ ID NO: 212974 - DNA, 310 bp, Homo sapiens
gttgaaaacactcttttctcctctgggataggtgctttcttagtcctgagcctgacattctacacagtggccaagggaattttccctaagggtccttctgggtgatatttgggactggatccttctcagcagcttggacatcgtcagcctggtcaagtgtcatcctctctaaggccctggctcgttccatcctgtgtgtgtgcacagatgtccatatcctgggtctctgcttggcaattctgcagacacttccagagctaagcacactctggttccctagtttctctctggctttctcagatgtgcttga

SEQ ID NO: 212975 - DNA, 207 bp, Homo sapiens
ggtgaattagcaacagtaacactgattatccaacatatattttggaatatctactatgtgcaaggaatttttcttaaactctaaggttatgaatcactgggcaaatccatataattagagaattttaagtgctttagagcggtgtgattctactgtgctcagcctagtcaatttcgcattaaactgattatcagctgagtatcaata

SEQ ID NO: 212976 - DNA, 559 bp, Homo sapiens
ttatatttattgtcctttttgcttcttttttcctccttgccttgccttgtatcagattgacagcattttctatttttcctcctttattcttctggtctgaattgtatttctattattttagtcattactcttaaatcaacatacatactaactgtaattttttctaataaaatttaaaagttgttgtacataaagtccccaaaaaggcaaggatcatgttactttttacccattgaacaacccatttcacccatcttccttattgttggtgtctagattttcatgttttaaaacgatttaaactggccagacatggtggctcatgcctgtaatcccagcactttaggaggccaaggcaggcagatcacctgaggtcaggagttcgagaccagcctggccaacatggggaaatcccatctctactaaaaatacaaaaattagccagatgtggtggcacatgcctgtaatcccagctactcaggaggctgaggcaggagaatcacttgaaccagaatgctgaggttgcagtgagccaagattgtgccactgcactctagcc

SEQ ID NO: 212977 - DNA, 400 bp, Homo sapiens
tgagcagcatatggaatattctaataaagtcaagtataggtttaactcctttaggaaacaatcaaacaggtaaaacgtgagtctttgggtgaattttaaataaggtttgacttatgtgtaacctgggatcttagaataaaaagggaatttacaactctttcaattatgttttatattgtatggggataggcatggtactcagcaaatttcagcccaagcaacagttttggggaagaaccataatgataataatgccagaatttattctttccgtgtgcctaagtaattcaagctgatggtggtgtttctgattacagactgaaagcttttcgcttactctcatttagaacaaatggtatatcaagcaaacagattgcatatattataggacctgagcttt

SEQ ID NO: 212978 - DNA, 553 bp, Homo sapiens
ggggtaaggaaatgaattaggcttcttcccaattattagggagctttcggtctttacagtctaatgggggtgaaggacaagtagacttatcaattataaagtgattaatggtatgtttagggttcctcaggaacatgaaggagaaacatctaattcagaatgcggaactgagaaaggctgcatcttgaaagatgatttgtagttagccggaagtgtgaagggagagggatatcacagagagaaggtgggaactgttattaatgttttatttctgaaggtggtaatgagttcttggaagttcattgtattatttgtatcactgtatatcagaagactttaataataagcattgaatcattaagccttagaggtgatttctgggtattgataacaaaatatgaaaggattttctattgtatagaaactagaggcaggggtactataaatgagaaataataatagatgagtgaaagtaagtttatatattacttgccttttcaggataagtttcatttgggggaaatagttttactatttttgaaattaagacata

SEQ ID NO: 212979 - DNA, 452 bp, Homo sapiens
aattcattcctcttttagacaatgatcatccatccatcacttaaattctccctctcagccaacatttgactccaaacctagcctcatccatctcacatttttcacgtctcaagtatttgttcctttccttctggccactccctcctagttccctcccgactcttttccgagattctttttctcccgcaatcatccattccccagcagtgaaaaccttttgtcatcatcctaccttgtgcagcagaagctacatcctgccagaaggaggttttctttccctttctacctcctccagtcctccgtactcaggggcatctaggaaaggataaattgtactgcaaagggggcttcagtcctgcgataactattgcctacgtgcagtcaggcaccttaatgattgactatttggtttctgccgttacccggaggacttttaacctgaaagctgccaa

SEQ ID NO: 212980 - DNA, 265 bp, Homo sapiens
tgctgaggtggctatcgcccagatgtcaacggctcaatgccacacaggagacttgtgggaaaagtcttaagccattaggtcatggaagataactgcaagagggggaaaggacgctggcttgggaaacactggtgtgtcatatgataaaaacagtgaccagccagcctgagctctgtgcctaaacacatcatctgcgccctgcacgatgcccctgtgaagtagagacacgcggatcagaagccccaggtccccgatagccaccctt

SEQ ID NO: 212981 - DNA, 443 bp, Homo sapiens
caggggcgtggtggggagccgtagacccgagtttttatccttctctggcgccgacactcggctgcggaatcgagtttgagctcggtgtagctgaagtttaaattgtagctgtttcaaaggtagaccccacctcacccccacccctggaccaagacctctggaagcgtcctgcctggaagccgcttgtggggagggctctcctagggtctccaggctcccgctggagcacgcctggagatgccttgggagtctgaggaaccccagattcagcacccctgcttaacctgcttttaagaagaaaaaaatggaacttgataaacttcactcaaaggagagacccactaataactccacacacctcacaccgagtgaaggtctggctgtccctctgtcttcatcttttcaggctgctgtaataaaatgctataagtgggtgacttata

SEQ ID NO: 212982 - DNA, 441 bp, Homo sapiens
ttctaactttattggtgacaaaggcatcactcacttcaagtgcataagtcagtgatattttaagtaaaatgaccaagttgtacagccatcaccataaacaagttttagaatatttccatcatcccaataagttgtgtttgctccttctcctcaccctaggtagccactaatttgcattctgtctctgtagattttccttttctggacatttcatagaaactgaaccatataatgtatggtctctgtgtctggcttctcttactgagtgtgaaagtttttgggtttcattaatgtcaaagcgtattttactacttcattcttatctattgacaaataatacttcattgtatatgtatagcacatatttctattcattcattagttgatggatgtttagattgtttccaatttttggttgttatgaataatactcttaagaac

SEQ ID NO: 212983 - DNA, 276 bp, Homo sapiens
gatataaggacacagaaatcacatagttttggtacaagtggattacagataaacctttttcaaatttaggcctgttccaagatccaaatgaaaaaggaactcctaaatagagatgaggcttagtctccttttggtggccattaaattctgctacccagcaaccaccaaaagatctgaacatcagcaaaaggaaataaacatgaactctaaggaacgcaattaaaaagggaactttgtcaatgtgcatacacagaacaagccaaagcccaaggggaa

SEQ ID NO: 212984 - DNA, 337 bp, Homo sapiens
gctgatgagcccggtccaggagccccagccccccaggagcttggggctgcagacaagcatggtgatctttgtgaggtgagcctcacctcctctgcccaaggagaggccagggaggatcctctccttgacaagcctactgcacagccgatcgtgcaggaccaccaggagcacccaggcttgggcagcaactgctgtgtgccattgttgtgctgggcttggctgccaagaagaaggagataaacatcaccatcctcaaagagctgctcaagaaatttttaaataagaaaccaagttatggggttaatctcctacacaattcatttacttcctttgaatg

SEQ ID NO: 212985 - DNA, 422 bp, Homo sapiens
gaaaaaggaatgatcttcaggaaatcaattatttttacatggtgatctttctgtaattggtgaaaatagaattgtaggtaggcagccatcatgtttgagttctaagataacaccaagcatggatatttttctgggactgggttgaaatcatattgttgtagttgggttggatgtgttagataggtgacatataattattagtaaagttaatattcaggtgatacatgactataggggattattagaactgagtgagagataatgctgctagagtaaacaagtcagatctgagctccatgcaggaactaatttgcatttctggacctctcatccacccacttgtttcttctcttggtgttttatgtggaagcacattgttggttctcattacgtatttgctgagtgaataaagaatcaaatgg

SEQ ID NO: 212986 - DNA, 256 bp, Homo sapiens
ggcctcccaaagtgctgggactataggcatgagccacctcgcccggccaacgacagcaatttattctctaacagttctggagcctggaagtccaaaatcaaggcgtcagcaggaccctactccctccagaagctcaaagggaggctcctttctgcctcttccagatgctggtggctccaggcattccttggcttgcggcttcagccctccaatctctgcctttgtcttcctgtagttcatgtagtcttgctctctc

SEQ ID NO: 212987 - DNA, 341 bp, Homo sapiens
ctgggttcaattgagtctcttgcctaagcctcccaagtagctgggattacaggcgcccaccaccatgcccagctaattttttgtattagtagagatggagtttcaccatgttggccaggctgatctggatctcctgaccttaggatccacccatcttggcctcccaaagtgctgggattacaggcgtgagccaccgtgccaggccgggtatggcttggttttatacattcacgatctgcacttcttaagtccagtgcgtttatttaagacgctcagttggaatatgcttaggaaggtccaaagcagaatctcaagcttatctgtacctgtggtttaggaag

SEQ ID NO: 212988 - DNA, 699 bp, Homo sapiens
cagaccaggtcctgtctgcccctgtggcatataaggtttgctctcctggaatgcccttttctccctccacacagcactggatcgcagcatctcaattagccctttccgtgtgttcccatttctctatttgcccatctcccccggtgaactgtgagcttcccatgagactgtatcttattcatcctgtgcttagcccagtgcttagctcagtaaatgtttgtggaatgaatagctgacttaatttctctctttcctagtcccctcttttaacttaagaaaggtttattgggacactttaaaaaggtttattgattgaatattgttcggtgaacaaacatgcaaagataaaactacgagacggactcctttgccccaaaagccaggagttagctgatgaaataaaacctgtacacaaatacatggtcagtagtggtaagggccgtgaaaggcccaagaataacatgtgattggggtacaaggcagagaaatcactttcccttacagcaggattcttgacccgggggcatgggctccctagagggatttgggggaagggtctttgaactccctagaattgtggttgaaaaggtctctgtataggtacatatgtgcatctttccctggaagagggtctgtaacttcttaaaaggatacaaagccctcaagggttaagaacctttgtacaggcttctctcaagt

SEQ ID NO: 212989 - DNA, 466 bp, Homo sapiens
aaggctaggggtaaagagtgaaaaatatgtaggattttttctgagaactgcctcagtgcgtttgtcataacttcttctttatttaaaaaggagaagtttattaatgtagagaagaccagatattgatctgtttccagtttacagaacagtgattttgatactacaataatactcaattagaagaaattcaggctggttgtggtggctcacgcctgtaatcccagcactttgggaggtgaagcaggaggatcacttgaggctaggagttcaagaccagcctgggcaatgtagtgagactccatctctacaataaattaaaaaattagttgggcacagtgattaatgcctgtagtcccagctacttgggaggctaaggtaaaaggatcaattgagcccaggagcttgaggctgctatgattgtgccactgtacactctagccttgacaagagagcaagactgtctctt

SEQ ID NO: 212990 - DNA, 369 bp, Homo sapiens
ttctactgtgtcctctggaacccctggcacatgctaaacaatttttcctgcatctttagttttactacaggaggcttctgccagctaagtctcaacttaaaactgaatttatcctcccaaaaaactattctccctccatcactctcaaatggttgttgctcaatgtaccacacttcaagtagggaggtagggttggcaacctcttcagtccctgatgctgcatccagatcattaaatgcggtttaccttccacatgtcgtcactattgtctacttccaatctctttgttatttccgatcattcattaaagtatctgaaaactagaccatagacttccactccattaaaaggcctaccatcatcttgaga

SEQ ID NO: 212991 - DNA, 608 bp, Homo sapiens
tctcctggagcctcctgcagtagaaaccttttgttcaaaacctatctcaggctgggtgtggtggctcatgcccgtaatcccagcactttaggccgaggtgggtaaatcacttgagtctaggagttggagaccagcctgggcaacatgatgaaaccccatttctacaaaaaatacaaaaattagctgggcatggaggcacgcctatagtcctagctactcgggaggctgaggtgggaggattgcccgagcctgggaaattgaggccgcagtgagccactgcactccagcctggatgacagagcaagaccctctcataaacaaacaaacaaacaagcaaaaaaagcctatctcaggccctggctcaagtctgttcctccccatctctgcagggctcctatctctgttagtggggcctctagccccctaaactccctcctgaatcaggcagcccaaccagtctatgagatcagctcgcctgtcagagccatcagtaaatctgtcggcatgttggctcacacctgtaattccagcactttgggaggcccggagggaagatcacttgaggccaggggtttgagaccagcctgggcaacatagtgagcctgttt

SEQ ID NO: 212992 - DNA, 153 bp, Homo sapiens
aagtttctagaataaagagaataatggaagtgtttgcacttggtgaaccccagcaagctctgctggactgagcatcccttcctttgccttatttcagttccagcacgaggtcagggctaatttaccaactgaataaacttgggaaagtcactc

SEQ ID NO: 212993 - DNA, 289 bp, Homo sapiens
attggggggcctcacattatattctaatacctgttataacttcatctcatcccactgagccgatgtcattcttatatccacagtttagcacaagagcagggattgataagtaagtacatgtatttatatcaactgaactagaatatctgatggtaaaaaggctcaggggtccctacagttgcaaaacagtctcacatcccacttaatttcctccatagctgctttggttctgccctgggctgtgtcccgctctaatctctgctcatctccctgctcctcccccactctg

SEQ ID NO: 212994 - DNA, 455 bp, Homo sapiens
aatatcttgctgttggattttggggtgctgctccagacatttcagggtgaaagggctgtttatgtccagcatatgcaccacaattcctttctaaagtctgaaaatttctaagtttagactcacatttggcctcaagaatatcagataaatagctgtgagcctacattaaaaaaataattgacaccagctagtaggcaaacgtgatgcctcagttattttaatttacatttctttgtttactagtaaggttaaatatatattacctatctttagcatcaatatgattattcagtttttgtttattttggtagagattttggttgtctagagaatttcttttttatgagagacatagtctgtaactttatttggctgatgattgcaaggatgtatacatttgtcagaactcattgatctgtacattttactatctgtaaaatattcttcaaagaata

SEQ ID NO: 212995 - DNA, 219 bp, Homo sapiens
ccagtcgaatttgggagccagcaagagtcctgacagcagcacattggccaccagaagacacccaaaggtagggaggcggcagatactgcttaagttcaggagctcctctggccattgctgacccaagttcccccagaggcatccacagcctggggctccttcctcctgcctagagtttgctttcctatgcccaggccccaaccaggaggactggctctg

SEQ ID NO: 212996 - DNA, 492 bp, Homo sapiens
gcaatttgacaactctttccccagttgtctgtactgaacctggccctgtgctccgtaatggtgacctagctgtgaataagatagaatcaccttaaactcagaggggtaatgttctgttggggagggagaacctagttttgcatgctaagtagaatgatgaatgaagtatttacaaagggagcatgatgactgatatgattcattggtattatgtattaagagcctatatcatttcactcattcaaagatttagtgaattaagaatagaagcatgggaacaagtaaagatattgctcttgcagaacattttccactgaaagctcatcatattttcctcttttgtgaggataaagaaaaagtattatttctacatggaaatttgatgtaatacatttcaaccctaaaggcttttaatgattgctggaatctctaaaacccacttatgaacttctcctttagggggcaggactcagaataacaatagtaccactt

SEQ ID NO: 212997 - DNA, 399 bp, Homo sapiens
ccgccactgaaatctggagccaaatatatctggtaagtacccacagatttccttgagttgtatagactcttccatggaatagttctttaaatagctgtgagcaataaactctgtgtgactgtttttgttagaattggtttttgtatatgtatatgtttatttcaggcacaggagtgagagaagaggggatgagagatgagaagggataatcaagtgtgatggcaattgcatctccttccaaatacacccatggggctggctttagttgaacttgcccacctactaaaatagtgccacagacagaagcccaagattataagcttgaggttttaacaatttggtcttgtagatgcctagttacaaataaatttggctttagtaaaatggctcatctttaaa

SEQ ID NO: 212998 - DNA, 3270 bp, Homo sapiens
  misc_feature (2092)..(2092): n is a, c, g, or t
  misc_feature (2488)..(2488): n is a, c, g, or t
  misc_feature (2577)..(2577): n is a, c, g, or t
  misc_feature (2579)..(2579): n is a, c, g, or t
  misc_feature (2675)..(2675): n is a, c, g, or t
ttgtgtgtgtctgaggatccgagtgtgggttcaagaaagtggggaaagtcttataaaatgaattggaattatttctggatatgacatcagaagcataggcccaaaaaagagagagagagaagaagaaggagaaatagctaaatgggatggcaatacatgctgtggagagaaataaggcagggtaaagaggatggaaagtggtaagaggtaaaggatcgatatcgtagaggacattcaagtcaggcctcactgaaaatgatgcttgcacagaggcctgaaggaggtgagggaatgagccatcatgatatctggagacagaaaatccaggcagagggagcagcatgcgtgagcctttgaggacaggcaagaggtggccatggttagaacagagttgagaggagcattgtaggagatgaggtcaaagatgtagcagaggtcctgatcacctaaagcttcatagccatttttaggactttagcagttaccttaagtaggataaggagccacagaggattgagaggggaaggaagccatttggtgatataccttatgaaaggatcactctggcagctgtgttaagtatagtgcatggggtgatgagaaatggataaggactaaagtaaaataattgacagaatctagtaaagaattcaagtaggcagttagatatattaatctggaggtcaagggagagatgaaataaataattttggaagtctttggtgcacagttggtttttaaagccttgagagtggataagctgacaccaaaggactgagtacaaagggtaaaaagaaagggtccaaggactaagccctgagacctaccagcatttagggggtaagcagatgagaagggagcaccacaagggactaagaaggagctgctgccgatctccagtgcaacatggaggcaagagcctcattagatttaggtccagagaaaattagaataaagaaattgcaatagggagtgagtgataacttcacatatatctagctaacccacagctaccttgatgggagctctattggtgggaagaggcaggaagagcctgattaagtgggttcaagaaaacctaagaggaaatgagttggatactaccagtatggaaggtctttgaacaggttttgccctacaagggggaagaaaaacgaggtagcagttggagagaatacaagatgaagacagtttttagaaggcagtgatgttacagaatatttgtgtaagacaagccaatagagaggagaagatgacgatgcaagagaatccattgcaggagcaatgttcttgagtcagtgataggggatggaacataatggacaagtggagtggtgtgatcataaatcactttgatgtaaagaccatctcatcaagaactccaacagctttcccccactgcctcctttgcataacaccaaaggtccatctttgtgttctaaccacagcctacctttcatctatgaaaagtgaatactcttctaacttatatcagtctcctcatgtttatacacacatctaggattcctttcttttgtgtactattgagtaaggaaagaaggctatacatattcactagaagctgtactttgagtatccatacaaccatctgattttttactttcagtaagtatagtattcagtaaattacatgagatattcaacacttttgttataaaatgggctttctgttagatgattttacccaattgtaagctaatgtaagtgttctgaccatgtttaggctaggctaagctatgctgttcagtaggttaagtgtactaaatgcatttttggcttatgatattttctaattaccatgggtttattgggatataacctccatggtaagttgagaagtgtctgtacctggtgaagcattgtattggccaggtctggaagccacatatatcacttctcgcatcccattggagaacagttagttacatggttgtaccagatcacgagagaggctgggaaatgtattgttgctggacatctagctactttattacggtggaaaaagtgtagcatgggtttgggtggacagctagcaaactctttcttaggcatcttttatgataccagtagntctttttgaatatgaatgcgcttatacaattttaagcaataaaacataaaatgtacaaaagggtacaaaaaggaattcaaatatgccattaatcctttcttaacgagactctatcaaatattctcctcttagagctcaaggttagaataatgaacctgttttgactaacagcattcctgtagccttcagattgagctgtttgtatattgagagaggcatttttgtgtgtgtcctctattaaggttttgtcagcattttacagttttagaagatgaatttgtttttgttccaagggtttttaagtgcttcagtcagtggtcaaacaggttttgagcctagctttcaatgccaacacggagagggagaaagaaaaataatcaaaaacaaattccacantctaaaatgaacttttatcaaggcttttgctcttttagacttgagtttatctttataattaaggagaatggtttttaaaatttagttcntntgacaccccaaaattatcaaaataaattatgttgtagtgaatctgtgttttgaaagtcattgataggacttatatgagtcaaaattttatggattntaaactaggctttatctggttggaaataattgcaatacaagaagcaactttattaaattagacctaaagtcacaatcttcttctttgctgctttttaaaaattacctattacctttaaaagatcccaaatttagaagaggaattaaaataaaagttaatgcaataaaacacttccacaatattctattacttcaacctctaatcaatgaaaacattaatggactactcttactacgcctggtagggatgtgtttgggacataaaacagtttaaaaccttcaaaagacaatgactcaatattttcttgttagacaagtactattagcacctacagcacatttgaaggtctaatggcatacttctgaaaagcattctgcatttcagcattattttgacctgtacattacacttttcccttccctcatcttagtgaagtagagagattactgatctatttctttatcttaatcattcctccctaaccccaagacaaagaatacaaattagaatttacaaaatgtattgtgcccatggaaatacatagttttgttactgtactcatagatatttactacccttgttagtttcattctga

SEQ ID NO: 212999 - DNA, 1234 bp, Homo sapiens
ttgtgtgtgtctgaggatccgagtgtgggttcaagaaagtggggaaagtcttataaaatgaattggaattatttctggatatgacatcagaagcataggcccaaaaaagagagagagagaagaagaaggagaaatagctaaatgggatggcaatacatgctgtggagagaaataaggcagggtaaagaggatggaaagtggtaagaggtaaaggatcgatatcgtagaggacattcaagtcaggcctcactgaaaatgatgcttgcacagaggcctgaaggaggtgagggaatgagccatcatgatatctggagacagaaaatccaggcagagggagcagcatgcgtgagcctttgaggacaggcaagaggtggccatggttagaacagagttgagaggagcattgtaggagatgaggtcaaagatgtagcagaggtcctgatcacctaaagcttcatagccatttttaggactttagcagttaccttaagtaggataaggagccacagaggattgagaggggaaggaagccatttggtgatataccttatgaaaggatcactctggcagctgtgttaagtatagtgcatggggtgatgagaaatggataaggactaaagtaaaataattgacagaatctagtaaagaattcaagtaggcagttagatatattaatctggaggtcaagggagagatgaaataaataattttggaagtctttggtgcacagttggtttttaaagccttgagagtggataagctgacaccaaaggactgagtacaaagggtaaaaagaaagggtccaaggactaagccctgagacctaccagcatttagggggtaagcagatgagaagggagcaccacaagggactaagaaggagctgctgccgatctccagtgcaacatggaggcaagagcctcattagatttaggtccagagaaaattagaataaagaaattgcaatagggagtgagtgataacttcacatatatctagctaacccacagctaccttgatgggagctctattggtgggaagaggcaggaagagcctgattaagtgggttcaagaaaacctaagaggaaatgagttggatactaccagtatggaaggtctttgaacaggttttgccctacaagggggaagaaaaacgaggtagcagttggagagaatacaagatgaagagggaggaggaggaagatgaggaagatgatcaggaggatgatgaagg

SEQ ID NO: 213000 - DNA, 1290 bp, Homo sapiens
ttgtgtgtgtctgaggatccgagtgtgggttcaagaaagtggggaaagtcttataaaatgaattggaattatttctggatatgacatcagaagcataggcccaaaaaagagagagagagaagaagaaggagaaatagctaaatgggatggcaatacatgctgtggagagaaataaggcagggtaaagaggatggaaagtggtaagaggtaaaggatcgatatcgtagaggacattcaagtcaggcctcactgaaaatgatgcttgcacagaggcctgaaggaggtgagggaatgagccatcatgatatctggagacagaaaatccaggcagagggagcagcatgcgtgagcctttgaggacaggcaagaggtggccatggttagaacagagttgagaggagcattgtaggagatgaggtcaaagatgtagcagaggtcctgatcacctaaagcttcatagccatttttaggactttagcagttaccttaagtaggataaggagccacagaggattgagaggggaaggaagccatttggtgatataccttatgaaaggatcactctggcagctgtgttaagtatagtgcatggggtgatgagaaatggataaggactaaagtaaaataattgacagaatctagtaaagaattcaagtaggcagttagatatattaatctggaggtcaagggagagatgaaataaataattttggaagtctttggtgcacagttggtttttaaagccttgagagtggataagctgacaccaaaggactgagtacaaagggtaaaaagaaagggtccaaggactaagccctgagacctaccagcatttagggggtaagcagatgagaagggagcaccacaagggactaagaaggagctgctgccgatctccagtgcaacatggaggcaagagcctcattagatttaggtccagagaaaattagaataaagaaattgcaatagggagtgagtgataacttcacatatatctagctaacccacagctaccttgatgggagctctattggtgggaagaggcaggaagagcctgattaagtgggttcaagaaaacctaagaggaaatgagttggatactaccagtatggaaggtctttgaacaggttttgccctacaagggggaagaaaaacgaggtagcagttggagagaatacaagatgaagacagtttttagaaggcagtgatgttacagaatatttgtgtaagacataacccggggggataactctagagtcagacttcaggcatcaagcgtgcatgccgtac

SEQ ID NO: 213001 - DNA, 501 bp, Homo sapiens
atgggattctcctccatctggagatagtcactcccctcctggtctatacccgtggggttctcctcaatcaggaggtggtcactcccctcctggtctatacccgtgggattctcctccatcaggagatggtcactctccctcctggtctatacccgtggggctgctcctccatcaggagatggtcactcccctcctggtctatacctgtgggattctcctccctcagaagatggtcactccccctcctggtctatacccatgggattctcctccctcagaagatggtcactccccctcctggtctatacccgtggggctgctcctccatcaggagatggtcactctccctctcggttgctcagtccaaaaacaacctctctggaaaactgcgtggaatttttttttaaagaattgaaactagaactagcatttgatccagccatctgcctgctgggaatacacccaaagaaaaataaatcattatataaaaaagataaaaaa

SEQ ID NO: 213002 - DNA, 653 bp, Homo sapiens
gtgatactcacttagaaatgatctttgcagcgtttgtttatacagatataaaatactcaacttttaaaaacatacagtgcacttaatcactaacagcctactaggctgttggacaccaggcacccagaggtaaagccgttccttcaatggtcagccccctgccagcgcccctgggattagggagagcatggccttcagaggctggagcctgtagtcctaactgcacagctggtccagcagggcgtaacgcatctacctagagagtaaaatgaccaacagttgttccctaagctcagcacttgcaagaaatcttttgggaagatctcttcaaatgtctagaactctgcgcaaacaataggtaggacaagtgtgaacctacccaacctctgttgacaaatacagctgcacacccctcagcgaggcctgctgtgaaatgccaccttggtgaaatgagaataaagggtgagtgagccagctgcttttggatgaccaaattaattcttagcctcccattaagacaggcctgctcagcaagattttcatgggattagtgaattggtggttgccaaatgccataataatgcaccatgcagtagacttgctgtaaagcacagtttcatcataacaataactgtaaataatgctactgaaca

SEQ ID NO: 213003 - DNA, 599 bp, Homo sapiens
gtgatactcacttagaaatgatctttgcagcgtttgtttatacagatataaaatactcaacttttaaaaacatacagtgcacttaatcactaacagcctactaggctgttggacaccaggcacccagaggtaaagccgttccttcaatggtcagccccctgccagcgcccctgggattagggagagcatggccttcagaggctggagcctgtagtcctaactgcacagctggtccagcagggcgtaacgcatctacctagagagaagatctcttcaaatgtctagaactctgcgcaaacaataggtaggacaagtgtgaacctacccaacctctgttgacaaatacagctgcacacccctcagcgaggcctgctgtgaaatgccaccttggtgaaatgagaataaagggtgagtgagccagctgcttttggatgaccaaattaattcttagcctcccattaagacaggcctgctcagcaagattttcatgggattagtgaattggtggttgccaaatgccataataatgcaccatgcagtagacttgctgtaaagcacagtttcatcataacaataactgtaaataatgctactgaaca

SEQ ID NO: 213004 - DNA, 372 bp, Homo sapiens
tctttctcatagaaagactgttggttctggtgttctgcactctgcacatttctactaataattaaaatacttactgcctctgagatgcctccggacacccttctgaatcacagtgttcagaaatgctctctaaatcaggaaggtgtggatgacctttggaccttccctggtgtgaggagtttagcacactgagagtaatatatgaaaaagaccgccaggcgtggtggctcacgcttgtgatcccagcactttgggagaccaagccaggaggatagcttaaagccaggaggatagcttgaggccagaagttcgagaccagcctggacaacgtggtgagatgttgtctctacaaatatagcccaaaaaaaaaaa

SEQ ID NO: 213005 - DNA, 425 bp, Homo sapiens
agccccaataaggcagtggcaatgaaaagcagatgaattctgaaaatgtgagcaagctgggttggagtgtgagaaggaaacagatatctaggcagacatcgacgctgtttaattaagatggaaaataaagtaggaggtgttgctttggggaggaatatgatatactagtttgctggccaaagtttgagggcctgtgggacacccctgtaaatatacttaggaggcagcaggattcaaagggcagaggtttaggacaatcatatggactggacatttgggagtattaatgtagaggtggcttaggaagtgcaacagtgaagccctggagatcctcaacatttcatcaaaccagtgttattgtgtgtatgtgtttttgtgtgtactatctatgtatatcttctcctaagcaactacttcgcatccta

SEQ ID NO: 213006 - DNA, 412 bp, Homo sapiens
gatggccatgagatcaggttctggccaatctaaacacagatttccacacctaaagagaaatcctctgggggtcacctctgacgttcttgcttttctaataagaatacggaagtgactgcttttgctggccttgtaaactcatgtagtggttggagcttcggtagccgtcttacagccataagctaaattccaatagactcacaaagatgctgggcctaacattgttgaaccagtgaaccatagccaggaaccatagatactctaactatgtaagaaaaatgaacctgtctttgtttaagtgactgaactttcagattaatgcactcccaacagatacagagcatgatcccatatatacctgtatgtgcaaatatgaatagaaaaataaagtgattatctctgcgtgatagga

SEQ ID NO: 213007 - DNA, 457 bp, Homo sapiens
tctgcatatttcctgggaagagataaaaggtcttctgcatttcatctccctccacctcccacctcttgcccagcatggcattctgctccattataagctatcaaaggatttttcagacaagaaggggagaaaggagaaagaaagattaaaaaaaatgatttatccaaggtaaagaaataaaggaggatcaaaggtgataagacctgagggagaaagagataggaagataaaacataactcactttgtttagactctggttcagaagttatgcctttgcaaaaactgttggctggaattttggctgatgttttacttagttcagcacaaggaaaatttcaacttggccttctccttgaggaacatttatgaagaaataagagttatatgaagatgtgaatgaggagtcaactcacatatacccttacttaaagtgaaagttagcagctaagtgccacc

SEQ ID NO: 213008 - DNA, 140 bp, Homo sapiens
atcctaccactgcactccagcctgggcaatagagcgagactctgtctcaaaaaaaaaaaaaaatcggtaagtggttgcctaggcctgggagaattggggcaattgaggagtgctgctaataggtagtttttcctttgggg

SEQ ID NO: 213009 - DNA, 823 bp, Homo sapiens
gttcttttctcagtagctgttttctcctcagctttgtggagtctttccctcagcctgtgcagctctgtattcagccaatgatttgaggccactgtaagcagctctttccctttggagctctttttgtaagcaaaagctcagtttcttacgtaagaaaacccaattccccttgaggaagagaaagagctggagtcctttaaaattaactgcctgtttttctgtggctagggagccttatctctccctttgccaggcattgtgaagactctgtttctctagctgtgcagctgcaaggtcactagacagataatctcaagtcgtaaaatatgccgttccttgaaaagtaagaaatgatgtaatgcatgtctctactgaataagtgtctttgtttctcgcttctgttgtatgcttccccctgcacagatctcttcctgccccagaaatgcttaaaaggtaactggactctttgtttggggctcagtcattttggatgttgatctgactgggccggtgcacctaaataataataagaaatcctcctcaacccctcagtctctctgattcctaaattatctcactgcaaaggcaggagaattgcttgagcccaggagtctgagaccaacctgggcaacatagtgagaccctgtctctacaaaagattaaaaaattagccaggcattgtggcgcatgcctgtggtcccagctactcgggaggctgaggtggaaggattgcttgagcccaaaggcccggtatgagaaggtgatcaacaaggcttcagcgatgaaagagactggtccaccccccgggtctggacagcccggg

SEQ ID NO: 213010 - DNA, 993 bp, Homo sapiens
atggcccggacgaagcagacagctcgcaagtctaccggcggcaaggcaccgcggaagcagctggccaccaaggcagcgcgcaaaagcgctccagcgactggcggtgtgaagaagccccaccgctacaggccaggcaccgtggccttgcgtgagatccgccgttatcagaagtcgactgagctgctcatccgcaaactgccatttcagcgcctggtgcgagaaatcgcgcaggatttcaaaaccgaccttcgtttccagagctcggcggtgatggcgctgcaagaggcgtgcgaggcctatctggtgggtctctttgaagacaccaacctctgtgctattcacgccaagcgtgtcactattatgcctaaggacatccagcttgcgcgtcgtatccgtggcgagcgagcataatcccctgctctatcttgggtttcttaattgcttccaagcttccaaaggctcttttcagagccacttacattctcactgaggatagctgtcacaccattggtcgactgtcttaaatcaactttaaagcagggataaactggcggaaagtcgtcaagggttgttcattctgattccttgcagtgtcctttgtcttctaagacggtccttttcacttgtcctctgtgacccatctcacaagggtctcactttctccgaggaaagtcagcaaatctatatccaaggtcaatccgcttcaaggggaaagccaaagtccttcctgcacatgctgtcctttggggatagcatctccagaaccccataactaacaattagattacaggttaaatgagatgccatttttaactgaaacgggcactgcccttgggtcccctggaagcttgctgaaaatcacggacatgaggccggttgatttagcacatagacacgggagacttcaaaatgaggacccacccaccaatgagatacagaagtttatatatcaccttgagattatagaaagagtgcaagcttggaacctgggaa

SEQ ID NO: 213011 - DNA, 399 bp, Homo sapiens
actctaggcatcccttgtgtttgtcaggatttcagcttatttggggtggctgcaaggctttgagacatgcccatgatgctatgcatttttctaaactcagcctttgtcaaggtagtcagggattgttcattttgaaacctctgtagatatctgcatgtttgctgcaaaggttttgtctaggtgagatggactggctcatgtttcctaatgctgatgcccttccctcccttccatctgtcttttatacacacagatctatttattactttcttttctttgaaaagtataacttagctttggataaaggaggaacaggatcacatttgattaaacgcaagcaacagtttacctcgcatgggcttggatgaataaggaatccaaaaggagcggtattcagga

SEQ ID NO: 213012 - DNA, 928 bp, Homo sapiens
aacagccaacacagcgagtcctcgtctctacaaaaaagaaaagaaaatggaaaacagtatcagctaccatttattgaggactaatcctcacaacagctttccacagtgggcatcattttacaagtaaggaaacaggctaaaagcacttagggaagttgtccaagttcacagtcagtgacaaaacaaggtttgcatccaatggcccaggactcctcacttgtaattatcaggctaatttctccaaagccaagagagcccctctgtggggagagaaacaactctcagttgagtagaaatatttagcattgatcgatgggatggtgtgatttaggcaaccaggacaaattgttctggtttgggggcctacggttcagtgtccctggtttctagacaaccagagagactgaaaatggagcccaggagagtagctttaataaaaggaacttgagttatgtctcctggaaaagagaagcgggaggagtgatttaataatcatgtcaaatctccaaggatggcagccggcagttctgtagctccactgagagaagaacaagaaggaacaggtttccaatccagtgagaggaattaaagttgagtacctagacagatgtcctagcactgcaggcttgtagcttccacaccctcggtgtggactttcctccttgggagagatttgaacaccttgcggaggctcagctggccaggcaggctctgtcctcccaggcaggctccgtcctcccaggcgccgggtggagaggtgggtgtcacccctgtcagcaggctctgctgtgccaagtgcgtttcacacaatgtaacaaaactgatacaggttggtgctaaagtaattgcggtttttgccattactttcgcacaaaccttaatacttaaggagtacaggtcactagccaggccttgtgctttatgtgta

SEQ ID NO: 213013 - DNA, 471 bp, Homo sapiens
aggaaccattctttaataagtggcttattgaattaaaaccattcagtctagctttccctgaggatgcaatttagagaaagtttatcttttattactataaaccagatgtgtctacaaaacaagtgtggagttactagtgaattctagcaagaatttaaggaagaaattaacagcaattctacataaactcttccagaaaatggaagagaagggcatacttctcaactcattctacaaggccagctttaccccaatactaaaattagataatgacactacaagaaaattacagaccaatgtctttcatgaacatagatgcaaaaagtctaaacaaaattttagcaaaacaaatttggaggtgatatctttttagagagcttaaagcagagctatgtgaacatccaaagaaaggacaagtagcatttgctggccctgaataaagtcagtaggggaactgcaatgactgaggca

SEQ ID NO: 213014 - DNA, 257 bp, Homo sapiens
ctgcagagttagatccccagaacaggatctcagctggctccatccttcctcagctgggcaaccatggccaatgactagctttctgtgcctgagttgctccatctgggaattgaagattgtcatagtccctgcttcaaagagtcactgggaggattaactgagaaagtgcagggaaggtgcttggaactaaatgctcaaaaaaagtccatctggccaggtgcggtgtctcacaccagtaatcccagcactttgggaga

SEQ ID NO: 213015 - DNA, 658 bp, Homo sapiens
gcacacattctctctgcctactgctaaatctcataggcccgaacaccatatagtggaagccgcccttaaaactcttgcttctccagtgttaacatgtaggtgccaccataacagaagagatatattataattttaaaacaataaatataaatgcagttattaaacttaagttcttatattttcctacagatggcaaagtttaggcttaaaatgacttaggttttctttcctttttttgagacggagtttcactctgttgcccaggctggagtgcagtggcgggatctcagctcatcgcagcctccgtctcccgggttcaagtgattctcctgcctcagcctcccaggtagctgggattacaggcatgcaccaccacacccagctaatttttgtatttttagtagagacagggtttcaccatttgagccaggctggtctcaaactcctgactcaagcgatccacctgccttagcctcccaaagtgctaggattataggcgtgaaccaccacgccaacctcaaatggctttcctttaaaatttcttgagcctagtccgaagatagtgagttatctcagttgattgttcacagtcagttacagattgaactccttgttccactcttttccccattctcactactgcacttgactattcttt

SEQ ID NO: 213016 - DNA, 934 bp, Homo sapiens
cttttcccggatcattacacgcaaatgcaacaaagccttccattctgtcatacggctttccttttaatgtgtttgttgaagcttattggaggtgaagtttctcacagctgtctatctttgtattttcctttgaatctgtttcatataccagactcgttagaaaaagttgacagatcttattaaagggacaagtgaaataagtgaaaggaggcatcccagcgataaagtatttatgagcctttgggagagtatattgtaaaacatcagctttatttctctctacctactggctaaatgctcatcttggacagaggacaagataattaaaattgttgtggccttctaagctcttgcttctccagtgttaacatgtaggtgccaccataacagaagagatatattataattttaaaacaataaatataaatgcagttattaaacttaagttcttatattttcctacagatggcaaagtttaggcttaaaatgacttaggttttctttcctttttttgagacggagtttcactctgttgcccaggctggagtgcagtggcgggatctcagctcatcgcagcctccgtctcccgggttcaagtgattctcctgcctcagcctcccaggtagctgggattacaggcatgcaccaccacacccagctaatttttgtatttttagtagagacagggtttcaccatttgagccaggctggtctcaaactcctgactcaagcgatccacctgccttagcctcccaaagtgctaggattataggcgtgaaccaccacgccaacctcaaatggctttcctttaaaatttcttgagcctagtccgaagatagtgagttatctcagttgattgttcacagtcagttacagattgaactccttgttccactcttttccccattctcactactgcacttgactattcttt

SEQ ID NO: 213017 - DNA, 496 bp, Homo sapiens
  misc_feature (82)..(82): n is a, c, g, or t
  misc_feature (85)..(85): n is a, c, g, or t
tgacaatcgtgacaaccctgtgatgtaggggctattattttccccaattacagatgtggaaactgaggaacagagaggggcnggnagttgtctgaggtcacacagcaaataggtccagctgggcgacagagcgagactccgtctcaaaaaaaaaaaaaaaaaaaaaagaagggaagacatataaccttcatgcgatgtgagaaggtgcgttgaaatgccttctacaattcttgcttcggtcggaagtcacaaagggattgaacttcattttggctgctcccacttctgtgatggccgcaaaagggaagagaactacatgctcctttttatttattttgtatggagattgggtctcgctatattgcccagcctggtctcaaactcctggcctcaagtgatcctcccacctgactcttcaaagttctggaattacaggagtgagccattgtgcctggcctctacgccccttttaatcctcctgacaaccctgtgatgt

SEQ ID NO: 213018 - DNA, 551 bp, Homo sapiens
  misc_feature (518)..(518): n is a, c, g, or t
  misc_feature (527)..(528): n is a, c, g, or t
acttacccctcctgactggggggggacctgcctcctactgactgggggggaacctgccacctcctcctgggacctgccccctcctgactgaaacttgctctcccctgactggaacctgtcaccttcagactgggaacagccccctcctgactgaaaccagccccctcctgacagggacctgcccctcctgacagaaaccagccccaacctgactgaaaccagccccaacctgactgaaacctgccaactcctgactgagacctgtcttctcctgaaggggacctgccctgtcctaactgaaacctgccgcctcctgtcagggacctaccctctcctgacagggacctgctgcctcccgactgaagcctgtcacctcctgactaggacgtccccctcctgactgggacctgccctctcgtgacagacacctggccctcctgcctgaaacctggctgctgactgaaagcagctccctcctaacagggacctgccccctactgacaaggaactaccctctnggtgtgggnnaaatcaaaagtccgagtgaatga

SEQ ID NO: 213019 - DNA, 480 bp, Homo sapiens
ctaaatgtccattagtagggattggttagataaatcatgatagctgcatacagtggactgctctgtggctgtaaaagatgactgaatatgctctttgtgcacaatgttccgtgttgggaacaatctctagcatatgtgatgcgagaaaaatgtagtacaattataatggtaatgtgcagagtagtatgctagtgtttgtaaaaacaaaggtgtgcagaagtatttgcagttgtttgcaatcggaagaactctctagaagcatatacaagaaactcgtaatactgattgcttccaacaaagggaacctcagggttgcaggacaaagggacaagaactttcagtgtatactttttgcacttgctgaattttgaaccatgttatctattcagaagtttttttctgtaattaaatctccaaaataaagtatactatactgtattctaaaactaagcataccaaatatatttataaatcactgta

SEQ ID NO: 213020 - DNA, 572 bp, Homo sapiens
gaacaagagtgcaggaacggaagcctctatgtgagagataacactggcgtcctgagctgtgagctcatagacctggacctttcttggttgggccatctttttctgttcccccgttggagttacctccctcctgccaggtggaattcctcaggggaagggcacttggagctgtgggatgcccctgtgccagtgtttcctttgaccatcagtcctggccccgtcacgcctatccctgtcctctacccagagagtgcttcctgcctgctcaggctcaggtaatttccccctctaggcatggcaggggcgctgtaaaactgaaggatgatgctgggtcagtggagggagagaaagaaaagggcattgatagtaatatagactgaatgttccaaatcaagggaatggtgggctttgaatattaagaaggtaaagagaagggttgttcaagggatctgtgccttacctaagggaaagagaattttgaaggtttttagcatagcttgctttgggctatggacattttgtatcattaccaggttattctttactgtggaagggacagcatttatagggaa

SEQ ID NO: 213021 - DNA, 679 bp, Homo sapiens
gaacaagagtgcaggaacggaagcctctatgtgagagataacactggcgtcctgagctgtgagctcatagacctggacctttcttggttgggccatctttttctgttcccccgttggagttacctccctcctgccaggtggaattcctcaggggaagggcacttggagctgtgggatgcccctgtgccagtgtttcctttgaccatcagtcctggccccgtcacgcctatccctgtcctctacccagagagtgcttcctgcctgctcaggctcagaaacaagctcagaggtgtgcagcgaaacctggctgggagtctagttcgattgagtgctctggtgaaaagtaaacagaaagcttacttcatcctgtctcttggtagatcacacccagctgtcacccacgtgtccatcatcgtgcaggtccctgcccagctggtgtggcacagagcccttcggcctggtacagcctatgtgctgacagaactgcgagtgtccaagatccgtggtcagcgccagcatgtttggatgaccagtcagtcctcccgtctgttgctgctgaaaccagaatgtgtgcaggagctggaactggagctggaaggacccctcttagaggctgaccccaagccactccccatgcccagcaactcggaggacaagaaggatccagaaagtcttgtcc

SEQ ID NO: 213022 - DNA, 1525 bp, Homo sapiens
tatcaattttgacaaaataagtcctttaacaatccacttagagttaatattgtaccacttaacttaaaatgtagaaaccttgcaactatataggtccatctgtcctcttctcatccttcatgctatagttgacatgtgcattacctctgcttatgtagctaaccttcaaaaccatgtgataatttttgctttaagcaattacatggaaagactctggctgtcaacatcagtatgttcacctctttgcatgcaccaatacaaagtagtttcttcagtgtaacactcctgtttttccttttggaaataataagtaatttgtgggcagatactgcatataggctgtttctcttccaacttgcatctgctacttttagtattgttgataattcttacttgaatcagttattaatttgatggttggttgccaagtggatattttcctactttttaaaggtagaaaattgaacattttggtaattttataatgtactgaaaatagcagtctatatgacatcacccatatcattcacgaaattaaaatatagtacttagagtttttcagttaatacagcatttactttttttgcatattcttacaagcaaagcatgtgagatttgctttctgtagtttaagaaaataaataggcatgttaagcatattgattttttttaactacaagaactttttgatattatttttctacccaaaccccctaatttgagaattgcctatttaaatcatgacattcaattcatttggatcatcactttaccttggctctcagtgattaccaataaatattaaatgagtattacccataataaagtattttggattaagaaaataattgtacatttccagccttcactaagtttacattctagataattaacttttaaaaattaaaacttggtcactgctcatgcctgtagtcccataattttggaagcctaggcaggcagatcatttgaggcaggggttccagaccagcctgggcaacaaagtgacacacgtctccacaaaaaataaaaaaaaattagttaggtgtggtgacatgtccctcgggctgcagtgtagtgagctgtgattgcaccgctacacctcagacatatatatatatatatggcctatttttttaaaggcagatgtttcattgattttttatgttgtgaataatgagcatgataagtccttgaaattatatacctctgtactccataaattgagagggaacattgtgaactcaaaaaatcatggtttattttcaacatgcaaatcactttgaaaccttacacagtctcactgagttaagcattttgcagcgaactgactttcttcctgtcatcgaagacctctgtgagtcccgtttggtttatacttgtgttcatttaaatatttcaaaactaccccagaaaaaactttattatcacataaccatgaataagaggtataactcttaaaactcacctttttttgcacattgagctacaagtatcccttcataaatgcaagaaggagtaagct

SEQ ID NO: 213023 - DNA, 540 bp, Homo sapiens
gcgcttgcttggtgctttgattctaagactatgcatttttgttcctggcctactttttagattgtattatattttattttttaagctgtttcatgtatatggccaagaatcaggatggtactaaaaggagtgccttggaagtgtcggcccacccctgccccacgcgcccattcctcaccggcaggcactgcccactggtgtgcttctgtccacacccacttgtgtttttaaacgcataacgagtggaaagataggagtattcttttacagatgataacatagcacacgtgtgtttctaggctgtgtgcatgtgtattcatgcttttctccctctcccctggtgccatcctgtccgcagtcggctccctgtccacggcgtgtggctccttcaggacatcagtcacctgttgtccatgtggcacatcagtggactgtgcacaccccccgccttccccagctgtctgtccctagaacgcatcaggttccatgttgccgttacagtggagcgttccgtgtccataaaacgttttttaactggga

SEQ ID NO: 213024 - DNA, 606 bp, Homo sapiens
ttttttttttaaagagatgaagtctcactatattgtccaggctggtctcaaactcctggcctcaagtgatcctccacccacttcggcctcccatagtgctgggattacaggcatgagccaacgcacccagtctgcaagtggatttttaaggaacaaagaagagagagttcctaaattgttaccaagaatttacattgaaacagcataaggtatctgcaggtctggctcagaaaaaaagataacagaaggtattaattggctatgcactgtttattgtatcacaaattccaggaacaagaagctaatggggagggcagctgtgcaggaaccactgcctcgggcatgggtggaggaggcgtgtgaccgaagtcccctattcactgtacagtctccctgggcctgatacatttcgcatagctcagactgatctgagctatttttcttttctcaagttgggtgggggtggcccctctggactggaaaagcctcatttttcccccaagtgacacacctgagtttgtttgacttgtttcccccaagtgacacacctgagtttgtgggacttgtgtggagatgatgtatttatgtcacacttcagtcttcgct

SEQ ID NO: 213025 - DNA, 521 bp, Homo sapiens
cagagcagcacatctagaagaaagagtagtttagatctagacattgcctctggctagcttagggccttaagcaagaaaatggagtaatgatccctacagttcgtgttgttttgaggagaaactgagatgatgcatgtgataatgtaaactataaaatgccatacaaatataagctattgtatcttgagatgtatggccagccaaagaagaaaaagaatagtttaaccctgactttcgacaagaccacagtgaaaaaaccatgtttcccaatgctgttttagcaataccctagggaagatcccaggggcctgtgggactgccacaaaattcttgcaaaattgtcttaaccaggacactttaatttcaccatcattaaaaaaataacttgccattgagtacatctgggaacaggagatgtcagaaaatcaaagattgaatgtcaaaatagtgaaatggtagatgaagatttaggaagcattcggttaaaccaaataaaacaagttatttgctgctgttttact

SEQ ID NO: 213026 - DNA, 628 bp, Homo sapiens
ccatgcgcgggatataatctcctggtgtgccatttgctaaaaccactggaaaagtgcagtattagtgtgggagtgacctgattttccaggtgccgtctgtcacagcttcccttggctaggaaagggaattccctgaccccttctgcttcccgggtgaggcgatgtcttgccctgcttcggctcatgctcggtgctctgcacccacggtcctgcacccactgtccgacaagccccagtgagatgaacccggtacctcagttggaaatccagaaatcacccatcttccgtgtcgctcacgctgggagctgtagactggagctgttcctattcggccatcttccagtatactttatataatctttagattgcttacaatatccaatgtagattctatgtaaatagttgttatacaatatttttaaataaatattactttttattgtttttatccccaaaatattttgatctgtggttggttgaatctgtggatgcagaactcattgctatggaaggctaactgtactaaagagcgttcttcagttagaaggaaaatggtctcagacagaaagctagaagtggagaaaggaatgaggaaagatgaaaaggataaatgtgtggatagatggaa

SEQ ID NO: 213027 - DNA, 756 bp, Homo sapiens
tttccctttaactttacagattacactcattcccaatgttaagtgggtcagcaccttattccctaaccaccttcagtgaagttgttttataaacttgtcatatacttagacttgtcactttctgcattccatccttgtattctccaaactaattttttttaaatttgtacctgttaaggtttatattttgccataaaatcctatggattttgataatgcttaatatcttgcattcaccactactgtattatacaaaatattttcaccaccctaaaaattcccctgtgttttatatatttagctagtccttctccaccacctactgaacatctggtaaccactgatctgattaccactgctacagttttgcttttttagactttcatataattggaataataatatgcaatatgcatttaagtttcatttatatctttccattggcttgatagctcattgcttttcattgctgaataaatttcattgcacagtatgtcaagtttgtttaatcatctattcaagaaacacttggttttgctctgcttttggtgaataaaattcctataaaagtttgcatacaggtttctgtgaagttttcaactcatttttgtaaatacctaggagtgcaactgctggattttgtgttaagcctatgtttagttttgtaaaaacctctcaaaatgtcttccaaagtagttgtaccattttgcattcccatcagcaatgaataagagttcctgttgctccacatccttg

SEQ ID NO: 213028 - DNA, 617 bp, Homo sapiens
aggcagaggttacctcgaatcgacagtttctctttgccagactagactaaagaaggagcactactttattctgataaaacaggtctatgcagctaccaggacaatggaatctacgttgactttagcaacggaacaacctgttaagaagaacactcttaagaaatataaaatagcttgcattacagggtctctctcctttgggatctcacctcaccacaacctctgtttcccaggctcaagtgatcctcctgcctcagcctcctgagtagcttggaccacaggcacatgccacaaggctcagctaagtttttgttcttcttgctttgctggtgatcatgtcacttggattaggcctggggcttggactcaggaaactggaaaagcaaggcagctgcaggaagaagtgctttgatgcatcatttagaggactggagaactgccggtgtgatgtggcatgtaaagaccgaggtgattgctgctgggattttgaagacacctgtgtggaatcaactcgaatatggatgtgcactagatatcgttgtggagagaccagattagaggccagcctttgtcttgttcagatgactgttgcacaggaaagactgctggctgactat

SEQ ID NO: 213029 - DNA, 487 bp, Homo sapiens
aggcagaggttacctcgaatcgacagtttctctttgccagactagactaaagaaggagcactactttattctgataaaacaggtctatgcagctaccaggacaatggaatctacgttgactttagcaacggaacaacctgttaagaagaacactcttaagaaatataaaatagcttgcattgttcttcttgctttgctggtgatcatgtcacttggattaggcctggggcttggactcaggaaactggaaaagcaaggcagctgcaggaagaagtgctttgatgcatcatttagaggactggagaactgccggtgtgatgtggcatgtaaagaccgaggtgattgctgctgggattttgaagacacctgtgtggaatcaactcgaatatggatgtgcactagatatcgttgtggagagaccagattagaggccagcctttgtcttgttcagatgactgttgcacaggaaagactgctggctgactat

SEQ ID NO: 213030 - DNA, 330 bp, Homo sapiens
gaaagaggtctgggtgcttaaaaagatagaaactttttcaacttgtaaagaaatgtgagccctgacaaatatgctccccttcctctatgataactctgcagcctaacagggactatttcaaatgtgagcctggcctcaggttgaagaatgccgggcctagcccagatcagggttatggagtctttgaactaaatttcagcacctggtctggtgaagaagggaggaaatgggtctgtgccccagctacaaatgccagccacagagcaagctccatgacacctgcagttaagcagtgggaaggactgacccctatacaggaagagcccttaa

SEQ ID NO: 213031 - DNA, 532 bp, Homo sapiens
atttattgaataaagcgtcctttctctattgtttatttttgttgactttgtcaaagatcacttggttatagatgtgtgagtttattttcagggtctctattctgttccattggtgtatgtgtctatttttgtaccaatagcattctgttttggttactgtagccttgtagtttagtttgaagtcgggtgatgtgatgcctctggcttttctttgcttatgattgccttggctatttgggctctttttggtcataattttaaaatatgggagtagaaaacaacaaagaatggaatggactcttaaaacaatgaaagagcatttatcgtttgtcccttgaatgtagaatttgtttttgatttcataattctgctggtaaatgtgacagttaaaatggtgcattatgtatatatattataatttagaaataccattttataattttactattccagggtgacataatgcatttaaatttgggatttgggtggagtattatgtttaactggagttgtcaagtatgagtccctcagg

SEQ ID NO: 213032 - DNA, 624 bp, Homo sapiens
  misc_feature (11)..(12): n is a, c, g, or t
cgggtccctgnntaatgattaaagatcttattgtacagctcactctatttgagccacgcattcccgctctcccgtgatgttcatgcatctggtctgtggaccacactttgagtagtacctaactagctagcttatgcccttacccactaaagtgcactattgcgtgttctatgccacagctggattctgtacttccactgcctccattactcaacattacatctaactattggctggttcctctgattgcttcctgggtagggtgaccaagtgtctcagtttgcccaggaatgttcctgttctagcactggaagtcccatgtcccctcagtcacaggcaaaccaggatggtcctgggaactctggctgtttcccagactctccaactgtgccttcaccccagtaactactgcatgggccctcgggctgttaactcgcttcagttataccattctttctggctctcctctagtctctctagctggccactggtcaatcaggctgctacccacactggatacatgtttaatgctcacttgacttgttccctagttcctctggttacttcccagggcctctggtggaccctcagccccaagcacattttggctgctccctctggctg

SEQ ID NO: 213033 - DNA, 281 bp, Homo sapiens
tgcctacagtcacacaataagctggtctcacaggcaagaccatttccaggtctccaaatgttctgcctggagctctgcctaggtttcctttaaacccaaactcatgcagggatggagcagatgaaagtgtgtgagagggcagaggttaacacaagagtcctgtgggcccatgtcttacaaacgcaaatgctggattattctgttataaatccttcttgggaggaaatttattattattattattattactccagcctgggcgacagagcgagactccatat

SEQ ID NO: 213034 - DNA, 552 bp, Homo sapiens
ccaaactttttgatcacaccttcctatttgtgaaatagttttgaggatacttacaaagtaattataaatctgtactcctataaataggaaagctaagtctttcctttagttaaagcataaacagaactccaactgataaagctttcttcctgccctcaatggctatcttgagcactgcttatctactgctctagtttaggagctcggtgaggacagcaggggtgtttcattctcgttgtattcccaggatctctaccgaacccaaaacataataaatgaaaaaatgaattaatttacttaacagatagtggggcccctctgtaggccaggcccgtgctaggtactggggacatactggtgacaagaaagagccctggccactgttgtcataaccctacaggctggtagggtgggcaaacaatgattttccaaaaaagtgtaacaaagaccaccgaaccataagagccctcaaacaggagagtgtcacctaggaagcagggccagagataatttccccagaacatgacgctccaggtgagatctgaggggtaa

SEQ ID NO: 213035 - DNA, 530 bp, Homo sapiens
ctgctgttgaagtagtcagatgagtaagcattgtgtgcacaagacttttccttttttatgtaaggtcacagctgcttgtgtttgccattgtgctacacatttctctactgaaaagggggctttaatttctcatttgacaagtgctagattactcagtgcctgattatcaagttacggattacctaagattaccatccctcccttccttccttccttcaccatcctggaacacttccttagtggtaattctaccagcagatcctgtgagacagaggcccacgcagtagtatcagagtcataggagcggcaggaaagcgcccctcagtatcaaccggtgccggttgggtttgtcctctacctcccatttgggtctagtcgcactgtacagctacggccgtgtgatttaaaaacgattttatccatgcaaaaagcatgtagagatcgtccagaaaggttccatatcacctttcagtagtgtgttctaatgtctcaccattcttttctagtattcaaataaaaatacgcattgc

SEQ ID NO: 213036 - DNA, 541 bp, Homo sapiens
  misc_feature (43)..(43): n is a, c, g, or t
  misc_feature (496)..(496): n is a, c, g, or t
  misc_feature (533)..(533): n is a, c, g, or t
tgtttatctcatgtagctgtactctccgcttgactaccatcangtatgctcctcgactcttgaggataacccatcgcatgtgccgctccccaactctgcatctggagcctgcatctgtttatgcctctcctcatgttgctgctcgtctccttgtgaatgtctcctcccttcctttccagccatctcaatcctgcgtgtctttgaaggtccagccagaaagttttcttcccctatgaaatcatcctggagtaatcgaatccatttctaaattctaaatgctatttgttactgacctatgctccaccctgcccctcttccaggtaaatgaatggctgtttgctataggcaaaaactgggttttgtgataaatcattcagattttactttttttttttttttttttttttgaggcagggagcggcacatgggagcggcaaatgcgttgggagcggcacatgcgttgggagcggcacatggaggggcaggtgatccgatngagtcgaagtcatacatcatgagctaaaatcatgaancagaacct

SEQ ID NO: 213037 - DNA, 483 bp, Homo sapiens
  misc_feature (43)..(43): n is a, c, g, or t
  misc_feature (451)..(451): n is a, c, g, or t
tgtttatctcatgtagctgtactctccgcttgactaccatcangtatgctcctcgactcttgaggataacccatcgcatgtgccgctccccaactctgcatctggagcctgcatctgtttatgcctctcctcatgttgctgctcgtctccttgtgaatgtctcctcccttcctttccagccatctcaatcctgcgtgtctttgaaggtccagccagaaagttttcttcccctatgaaatcatcctggagtaatcgaatccatttctaaattctaaatgctatttgttactgacctatgctccaccctgcccctcttccaggtaaatgaatggctgtttgctataggcaaaaactgggttttgtgataaatcattcagattttactttttttttttttttttttttttgaggcagggagcggcacatggttgatcctatgagtctgctcatncataaggagataagttcaatagagcgcaacct

SEQ ID NO: 213038 - DNA, 469 bp, Homo sapiens
  misc_feature (437)..(437): n is a, c, g, or t
aggttctgctctcatgaatttattgcttattgcatgcactcgactctttggatcccccaacccatgtgccgctccccaactctgcatctggagcctgcatctgtttatgcctctcctcatgttgctgctcgtctccttgtgaatgtctcctcccttcctttccagccatctcaatcctgcgtgtctttgaaggtccagccagaaagttttcttcccctatgaaatcatcctggagtaatcgaatccatttctaaattctaaatgctatttgttactgacctatgctccaccctgcccctcttccaggtaaatgaatggctgtttgctataggcaaaaactgggttttgtgataaatcattcagattttactttttttttttttttttttttttgaggcagggagcggcacatggttgatcctatgagtctgctcatncataaggagataagttcaatagagcgcaacct

SEQ ID NO: 213039 - DNA, 467 bp, Homo sapiens
  misc_feature (4)..(7): n is a, c, g, or t
  misc_feature (64)..(64): n is a, c, g, or t
  misc_feature (449)..(449): n is a, c, g, or t
  misc_feature (462)..(464): n is a, c, g, or t
cggnnnnctctgctgctcgatttagtaccgtacgtagcggccgactctagtgagccccaacgcngtgccgctccccaactctgcatctggagcctgcatctgtttatgcctctcctcatgttgctgctcgtctccttgtgaatgtctcctcccttcctttccagccatctcaatcctgcgtgtctttgaaggtccagccagaaagttttcttcccctatgaaatcatcctggagtaatcgaatccatttctaaattctaaatgctatttgttactgacctatgctccaccctgcccctcttccaggtaaatgaatggctgtttgctataggcaaaaactgggttttgtgataaatcattcagattttactttttttttttttttttttttttgaggcagggagcggcacatggctcaaacagagtgaagttatactataagttctttancatcaaccaggannncct

SEQ ID NO: 213040 - DNA, 678 bp, Homo sapiens
ctaatcaaactgtaaatatttgaaggataatggaagccaagtttctccatgtcagagaaaggagttacaagcatatatggaaaaagctactttcaatcctgtgatactgatttgtaataagcagtatcagcatgaacttaacagttttcaatacgtaacatggagaaataaacagatatatgtatacatgtatgtatacacagatacacatatattcaacacacacacacacacacatgcacatacaccctagctctgtccaactaatggacctgaaaccagcaacatcccaatggtaatgagaaaaccaaatgccacgacttcataaataccacctactactaaaaggaatcaggactctttaggaaaatggccaattccaaggctaagcaggaaaagtataagattagcctggaacattttgttgtgccagaaagtaaggaagttatcaaaaaaaatgaaatggtatcaaactgacccacagaagtgatatcaaaagggttcttactggccaaatcaggacattttgagcatcaaaataatgaaattaaaagaatataccccatcgaataaaataagccatgagtccatacagattacaaatcaatgttaatttcttaaatgttatggttgtattgtgatatggtcctggtttgttaaaaatacacactaaaatac

SEQ ID NO: 213041 - DNA, 338 bp, Homo sapiens
  misc_feature (1)..(1): n is a, c, g, or t
  misc_feature (3)..(3): n is a, c, g, or t
  misc_feature (18)..(18): n is a, c, g, or t
  misc_feature (23)..(23): n is a, c, g, or t
ntnttgaaaaccgtttcnaatcngctcggtaccccagtctagtgattttaggcggtgggacaccgaatttattcttaatacatgtatttgtagtaaagaatccaaagtccttattctaagaaatttgacagaagagtacaaggcacatctatatacccaccacctagaatcagccacggttaccattgccttgtatttgctctgtgtgtataacatgtttgttgttgcactattggaaaataggtgcagaggtgccgaccttcacccctaataaatactccccctctgtctcctgcgaggaaggaaatcctctcattttcacctaaaatgactgccaa

SEQ ID NO: 213042 - DNA, 445 bp, Homo sapiens
cagggaggcatcatccaatgggagcggccagcctcgctatagactttccaacactaatgaatcgggaactccatgctgaatagggtttagtttgatgggtccctgtgccagcagaaggatgtatttttcttgaaagaccaaggtgccagaaatctccatgattacgttactggagaaaggttcttttttgtggtttgtgaagttgagcgtcaggactgcaggattctcttgctctttctcactcttattttttccaggtcagaaccagagcttggggtggggaggaaaatcctgctgaatgagcaagttctttcttaaaaagctctctccaagtccaaaaagacttcagtggacttaggagaaagaaatttaatacattgccatagaatcgtcattaaccaagttaaagcaaagtccacagcatctttgtcttataaaagaaagc

SEQ ID NO: 213043 - DNA, 413 bp, Homo sapiens
gggtaagggtgagggtggggtccctccagtgtttcagaaataaaagagctgttcccaggggtaagcgatgcttgattggaagtacaaagcctttcttgtcttcataagcctgttgatgtctctggtcctgatcctgaaatcacagatgcagacagactaacagacacaggcttacaacttgcagggcaggctcacagagcaggtaccacagagggcctggggtcactgtgcacttggaagggccagagcttctgtcccctacatctgatatctctcctctgcctggactctccatgcaacaactgggcctccaaactccaagcccctcttgccttgggacccctccagcccagggacaccagcctgagttgtacatattgtagtccctgcccctagaggtcaaaaaaacaaaa

SEQ ID NO: 213044 - DNA, 458 bp, Homo sapiens
ataatagttttaaatttctgagtgagttatgtaatcttgtaattatttaatgctattattcttagattttaatagtgtatttttcttatatttatttttaccttgttaccgtattctttaaacagtaatatctcactggtctgtaaagttttcaagttgtatttagctttagttacctttgaaagataaataagtatgaaaaaaatcgtacaattagggctataattttaacttcttgtattccctagaggatatattttatatgtaagttaaactgtaatgtatttatatttaattgcaacatcttgtatacaagattttattattcttgtgttgcactcttagacgtggttaaatgtattgttacctaaaaatattactctaatgaataaaaaatcatattgaggttataagtctgctttatgatacttcatatattaaacttttgctcactaaag

SEQ ID NO: 213045 - DNA, 735 bp, Homo sapiens
tgcaaattaagaaattatggattaacttattgattattgctcagaaaacgtaccttatttttactctgaaattcactttatttataatactttaaaacaatttagctaaagtagtgtttataggatgttacttctctggttagacatgtttcacacaacagttttcaatgctgaaaattcatttgataattttaatcacaatttatgattgattgatggattaatcagtaatttagatgccataagaaccattgaaaggaataatctgactattgctcattgtacaatcttgatcattagttataagccaagaatctgatatcccactcttgaattacatttttcaatgtgtgtatttggtcaacaacaggtcacagtgagccgagatcatgccactccactccagcctgggtgacagagcaagactccatttcaaaaaaaaaaaaaactgaaaataccaaatattgacaaggatttggagcaagtggaaccctcatacattgctgatggaaatgcaaaattatacagccaatttggaaaaataactgggtgtggtggtgtgcacctatttttccaacaacttgggagactaagctcctgccatataaaatgccggctcctgctttgcctttcaccatgagtaaaagcctcctgagaccttctcagaaacagatgctgccatccttcctgtacagcctgcagtaccgtgagcaaaataagcctcttttgtctata

SEQ ID NO: 213046 - DNA, 645 bp, Homo sapiens
tgcaaattaagaaattatggattaacttattgattattgctcagaaaacgtaccttatttttactctgaaattcactttatttataatactttaaaacaatttagctaaagtagtgtttataggatgttacttctctggttagacatgtttcacacaacagttttcaatgctgaaaattcatttgataattttaatcacaatttatgattgattgatggattaatcagtaatttagatgccataagaaccattgaaaggaataatctgactattgctcattgtacaatcttgatcattagttataagccaagaatctgatatcccactcttgaattacatttttcaatgtgtgtatttggtcaacaacaggtcacagtgagccgagatcatgccactccactccagcctgggtgacagagcaagactccatttcaaaaaaaaaaaaaactgaaaataccaaatattgacaaggatttggagcaagtggaaccctcatacattgctgatggaaatgcaaaattatacagccaatttggaaaaataactgggtgtggtggtgtgcacctatttttccaacaacttgggagactaaggtaggaagatcccttgagcccaggagtttgaggttacagtgagctgatggc

SEQ ID NO: 213047 - DNA, 262 bp, Homo sapiens
aattgtgtgtacaatacagatgccagcgagagaaaacaggaaaatggttggcatgtggaaacaaacacgtgaaaacaagcaaaggaaactaagcaaaactactacactccttgcttccgtgacagttgggagccgaggcttgaagtccatggttccttctcccatcactcatcctggattttcccctccctcagccgggacctcagctagttggtgatctttacttgatgaaacaactaaaactttcatttcagaaggttct

SEQ ID NO: 213048 - DNA, 679 bp, Homo sapiens
tccaaatatagaaagaaatttactaattttaaaggcatcacttcaagtcagttgagaaaaaaatcatcagtagtcttcatcaaaatatacatttaagagttttttgaagtagacatgactatttctctttccttcgtttaatgaaatgttttgagagtaaaagcaaaggaattataaagaaaaactgtgttagattaaattacatacatttgaaaattaagagcttttgaatgccaagaaaacagcatatacaaaataaagaaaaacactaaactagcaaaaatatgtaacattatataacaggcaaaggattagtgtccctaataaataaagcattgtacaaatcagtaagaaaaaaattgaagcaggctgggcacagtggaccacgcctgtaatcccagcactttgggaggccgaggagggtgtatctcttgaggtcaagagttcaagaccagcctggccaagatggtgaaaccccgtctctactaaaaatacaaaaattagccgggtgttctggcaggcgcctgtagtcccagctactcgggaggctgaggcaggagaattgcttgaattgcttgaattgctccctcctgggagacgaggttgcagtgagctgagcttgcgccactgcactccaacctgggcgacagagcaagactctgtctcaaaaaaaagaaaa

SEQ ID NO: 213049 - DNA, 246 bp, Homo sapiens
aagtacaaaaacaagattttatatatctagattataccaggagtgggagggggctgccctggcaagtggagtggatggtaataagagggtaccaggaaagtatgagtgatgacgctgatagctggcattaggtgctacactcagaaggtcactggtgtttgcccctaatcactcaggtagcaatggctgacccaagacctgaatgtgaacggctttgttcccaagctcttgctcttgttgcagcag

SEQ ID NO: 213050 - DNA, 460 bp, Homo sapiens
ctcagtgctgctcaatagtctcataataggctgctggcttttcaccgagtaatctaagagaggaaggttgaagccaaaagacttatagcctagctttggaaggctcacactgtcatctctgccatactctaaatagagtcagacaagcagaactgatttcaatacagattatatgagagcatgactatcagaaggcaagtattattggtatcatcttggagattggctaccacagggagaaataagaaattttgtttttgttttgagagacagtggtatttttattcatttgcatcttccctggcagtaggtctctagtcattacttttacaaatttagacaaatttgagatagttggtgcttcttcatgacaaaatgttgagttaacatttgtgggattacaggcatgagccactgtgcccagccagtaaagttagttttaaaaaagagaggaatctaa

SEQ ID NO: 213051 - DNA, 528 bp, Homo sapiens
ttaaattttgaggctgccaggatgaatttatcctgaaaactccttctgagggtatctcacaaaaatataatgacttacactgagcagcaggagtggtagggaacttacaatctgccttagaacaaaatggacagttactgaggagttagtgacaagtgtggtaccacgcagtgccttactccaggtgattttgaatgaatgctttattagccattgttctcaaaacagcagtgtaaaatcatagctacacctagtgggcccagatggacacagttttaagatatactctaagaagagtcacagaataattgaacttcttaattgctaaccagatctggaagttatttccagagttagtgatacttaggagtctaggtaaagaattacgatatggattaagtgagaggcttcaccagaggctttccctagaaggtaaaatgtgtcagggtgtgagaaaattgctgtctggcaggtctgcttttcctccatccctacctgcatcatctatgggaaaatggtttccctcta

SEQ ID NO: 213052 - DNA, 514 bp, Homo sapiens
acactccagcctgggcaacagagtgagactctgtctcaaaaaataaataaataaattttgagatttatgtgtgtgccagacacacacacacacacatatgtacacaagcaatttttgtgtgtgtggctcaagccaggcagagaaagacaaatactaaatgatctcactcatatgtgaaatctaaaaaagttgatctcaaagaagtagaaaggagcctggtggttatcagagtctggggagggggttggggagatattggccaaaggatatacaatttcagttaggtaggaggaataagttcaagaagtcgattttgactatagttaataatgtgttgtattcatgaacaaggctaagagagtggatgtaaagtgttcttaccacaaaaaggataactacatgaggtaatgcacatgttaattagctagatttagtaattccataatgtatccactgtgtccttcaaaacatcgtgttgtaaatagtaaatacatacaattttatctgtgaatta

SEQ ID NO: 213053 - DNA, 188 bp, Homo sapiens
agagagcgcacgaggccagggaggaagtggtatctttggctttcgttctcatttgattactaataaggtgtaaaattgctgctgctgtgatgattggacactcagcacagtgcttagcacacagcagctgctcaacagatatttcctgaacaagcaaaaaatgaatgaaagagcaaagtcgttaaaag

SEQ ID NO: 213054 - DNA, 286 bp, Homo sapiens
gaatcccccctcccctctctaaaccaaagtataaaagaaaatctagtcccttcttcggggccgagagaatttcgtgcgttagccatgtctcagtcgctggctagtaaaggactcctgaattcgtctcaatgcgtggcatttctctctaactcactcgggtacgacagtttcaactatggtagaagactcgagtaaggcaaatacagtccccctaaatttgactattattcaggttaatggtgagtttagaagaaataaggctacacagagtgggctaaagtgcaaa

SEQ ID NO: 213055 - DNA, 493 bp, Homo sapiens
ccttgccccacgatgtagagcttttatgtcatagttggtccaatgttctgtggaccactaaagagcaaggatggactgccccaactggtttttgtaatttcctaaaaccatacattcatttaactagaggatcatagaagttaaagaggtaaaacaaactttggcaattaagacaggatagcaagatgcaaatgcctggttggaatagatcaaatatttgtccacatgttaaacaaaagcaattgttatgcttgtgcacatggcaggccagaggcccaaattgtcccctttccactagagtggtcctccagttgaccaggtgtgggctgcatgatagctcttttccaggattctacagcctggagtaataggtcatgccaagctctctctgctatatcctgaagtctggcaccctgtgggtcagcccctgagggccatccagcttctaagttcacttcgtgtctctcatgacagggagaaaacttagtgtttc

SEQ ID NO: 213056 - DNA, 308 bp, Homo sapiens
ctcccatgaaagaagtcgccaagtagatgccatgtcttatcccctctctgacacagagcatgagtgtttccacttgctgttatttgagtagagaaagaagtcatcccatggattgaaaacaggactcagtacaggttgaatatctcttatccaacatggttgggaccagaagtgtttcagattttgatttttttttaattttgggatatttgctgaatacatccctgttgagcatttctaatgcaaagatccaaaaaatggaatgctccactcaggatttcctttgagcatcatgtcagggctcaaaa

SEQ ID NO: 213057 - DNA, 619 bp, Homo sapiens
ccccaagcaggatcttcttctcaccttttcttcctcctctagcacttctctttccaagtgtcttaagcagatgcaatgtcttaaagcagatgcaaatgcatttgccatcttctccattaggaaaatgatggttatgtgatatgttatatttaggaagtagtgtgtaaggtatcctgaaaaggtttgctctcaagctagaaggacatttcaccctgtgggtcactgtcaccttgtcagcgtgccggctctcagtggtccccaggaggatggggatagctgagatcgtggagaatgggaaataccattgcatctctttgatttaacactcatggctcacctttagtagagttgttaataagttagaaacttgtgtccctaaggcccaagagaaaagatgagcttcttgggaggattctgggtttgttttcccctcagaattaaaaaatagtttttaattcagctactttttcccctcagttaaaaggtagcaggagctattggctgaaatttgttacagtgaatgaatgtggagaataaataagaacaaaccctgtaggattcttgttgacgtaactttccatcccacctctccgcctctccttcatcaccagccttcatc

SEQ ID NO: 213058 - DNA, 351 bp, Homo sapiens
caattatgttcttctcttcttgctagtcactggtttagaagtgggcatgtaatttaggaataaccaatgagacttgagtggaagtcttccagaatctcataggaaagccttcctgggtcctaaagagttacacaaataggcttctttctcaaaacactgtcaagtctgggtgtgacatctagaactgctacagccataaggtccccatcctcaggataaaccaatacggagatgcacatagaacagagagaatcacagagcagccaagtcccccgataatgttttccagatgcccccacctgtggaattcttatcatgttaactaatatgtttccctatttcttaagccaa

SEQ ID NO: 213059 - DNA, 408 bp, Homo sapiens
agaagggactctattaagaacataagcttgaaagcagtgttttacacattgagaacttaaatgtgaaaacaggcattttcaagaccttagaaacagagagggggaaaaaaaaaagcagaccactgccttgcattgtagagtaaaagagaactgaccgggccaggcacagtggctcacgcctgtaatcacaggactttgggaggccaaggtgggcggatcacctgaggtcaggagttcgagaccagcctgaccaacacggagaagccccgtctctactaaaaatacaaaattagccgggcatggtggcacatgcctgtaatctcagctactgaggaggctgaggcaggagaatcgcttgaacccaggaggcagaggttgtggtgagctgagatagcgccattgcactcc

SEQ ID NO: 213060 - DNA, 126 bp, Homo sapiens
cctgcaaagatgtagatgagcaaatcaaccggcatttcacagtcagacacagctctcagcacaccgcctgttaaaatacaaggtgttagggctgggcgcagaggctcatgtctgtaatcccagcac

SEQ ID NO: 213061 - DNA, 985 bp, Homo sapiens
aagctggaatatctgagggagtagatgtctgtgttggatgaaagaaaatttcagatttagtttagattaagcaaaaaaaaacttgtagaatatatatgatcctagttatattaaaaagaaaggatgttcttaaaaatcagctttattgaggtgtaatgtacatacaataaaatgctctcattttaagtgtgatggttcagtgcattttttttttttttctcagagtctcactctgtcacctaggctggcatgcagtggcacagatctctgctcactgcagcctctgcctcccaggctcaagcgattttcttgcctagtctcccaagtagctgggaatacaggtgcgtgccaccatgcctggctgatttttgtatttttattagagactgggtttcaccatgttggctaggctggtctggaactcctgacctcaagtgatccacccagctcggcctcccaaagtgctagtgtgagccaccatacccagccacattttgacaaatgtatgcatctgtgtaaccaccaccatagtcaaggtagacagcatttccatatgcccccaaatttccttacactcctttgccatcaatacaattcatgattttagatgcaattgtaaatggacttattttcttaatttcatttccagttactagtatatagaaatataattgagttttgtattttgaccttgaatcgtttttaaaaattttgaatccttggtgtcctacccaatggtgggcgggaatggcctggttacctgtaccagggtgaattctggttaccgtttggaaatctgaaatctactatgcaagcggatcacggagtgtgtccctgagaccgaaaccgggggcgcccccgccatagagggaccggggtaacgcagacacgcccaactgcccactggatgacggcccgaaggaatttttgcgcagagacgcaggtgtcgaccgcgggcggagcggagtagcggagcggcggcgac

SEQ ID NO: 213062 - DNA, 356 bp, Homo sapiens
acaggcgtgtggatgtggaaccctttctgggacggcgaaaccagctcttacgccgcttccgcgcgccatcactccctaccctgacctcgcacagaatctgtttcattaatctgctattaatgttttttccccaactcatgttactagacgcaggcgtttaactaccatgttttgttattgaaaactttttctacttgaaggcttttttttttttttggacgattctgtgtttagattttggcctgttcctcattttaaaatcttgcacccccagtattgtactgtacattctgtcctgccacatttaattgatatagatgtagttctttaaataatacagtagtcgtaagacaatg

SEQ ID NO: 213063 - DNA, 815 bp, Homo sapiens
tttcagggagacgtggggttttagcttccagggaacaggatcaactcctgaaaaatgaagctgatggttcatattaactttaattattatttaagctaagaataaaatatagatctctaccaattaaaaaatgtttagcttattatatgtttgaagttatagatgttttctagattcagggatatcctaatagcttgtctgtagtttaattgtgtggaataattggatattaattgttgaggcccagggcttgcccattctgaggtagtttttaaataagctttctttatttttagatgacttcctaaagatatgctattgtctaatcaagttaaataatctcaagacctgtaagtttgcaaatatatataatcactttcctctcctgataaatttggactttcccatctttattgctacctgataataaatcagtggctagtcagtcttcatggtccattagatttcactgaggttgaggcccttcaatcttaactctggattgactgtttaaaacataatggcacttggttaaaaaaaaattgaattttgaacaaagtctgtctggtaagatgtcctaattcatcagagatcggcttccctccctgacattgctggcacacaggctgaatggcggctccctgggtcatggaatcggaggacacggaatgaaccggttaacggggggttcggcccaaaacgaggggcacaagggggcccaagggggccggaaaacccaaagtggtacaggttgcaccggaggtccccacactttggaaccccgataaggaaccgcataactcacacgcgcgccg

SEQ ID NO: 213064 - DNA, 164 bp, Homo sapiens
tggtgaacatggaggattttattgccagtgaaagtgggtctcagcaggaaggagaactggcaaggggatggagctggaaggtgattttccccaagtctagccatctccagctggactcctctccaaagcaacaccatcaagctgcccctctgaagtcaagctgc

SEQ ID NO: 213065 - DNA, 238 bp, Homo sapiens
cttaggcaaccactaatctactttatatatagatttgcctttcctggacatttcacaaaaattgatttacgcaatgaatgagtaaaaccgtcttccaaaggaagagggcctcccaaggcaggtgtgggcatgggcttgccacaatatgtggcattttgtgcacttaatgttattgaggattaatctatgttgtaacatgtggcggtattttgctccttttcattggcattctcttggg

SEQ ID NO: 213066 - DNA, 349 bp, Homo sapiens
agctaccctggaggctgatgtgggaggactgcttgaaacagggaggcggaggtttcagcaagctgagactacagcactgcatttcaacctgggtaacagagaccccgttttgcagtaaaaaataaaaataaatttagggtcgcctaagtgtacagtgttcataaagttgatagtagtatacagtaatgtcttaggccttcacattcacttgctcagaccaattcactgacttgcaagcaacttccagtcctgcaagcgctattcatggttcatattaagtgcccaatacaggtacatcattcattcattaagatggagttttgttcatgtagcccaacctggagtgcag

SEQ ID NO: 213067 - DNA, 220 bp, Homo sapiens
gttgctgctggcagtccttggtttgtggctgcaacagtctggtcttaaggccagcatcttcaaatctctctctgtcccatcttcacattgccttctctgtgtgtaaaatctccatttacttgctttttatgaggttaattgtgattgaatttatccacatattccaggataatctccccatctagagatccttaactttataatatctgcaaagaccttt

SEQ ID NO: 213068 - DNA, 502 bp, Homo sapiens
cacttggtagggcaacctggatgggagggccttcaacaagaggtgttgagaggttagggttaggtgtagtctagggaaggaaacaaggattccgtgagagctgccacgtgaccatgacagagagctctgtgtttggatcaaacagagaggaggaaaacaaaaggtgcttttaagtgagcccaggcagaactgtgagggcggcccatgctgcaggctgtggctgtcagcaggctgcttctccacagctggtcccatcctaggattcacagggcagcagcagggtacactgggtgactgctgccctctcctggtggcacagggcagacctgctggtgaacacagatgcacgcttttggggaggactagggagaaagcaggtattggagaagcaggggattgtttatttgctaaaagtgtggccctttcactcagcaggtctgctactgcctactaaggaacggcctctcgacagtccagaattgcccgatagatctcgtagagc

SEQ ID NO: 213069 - DNA, 745 bp, Homo sapiens
cggatggaacacttactccatgcacacttgcagttcttgtttttttggtaacagagcaatcatcaccaaagttgaattggaggtagcatccattttttcatggggatactttttcaccatcttgcacgctgaagtaggaaatgcctccccaggggcagggttggcagtgccctctggcctcactggctctgggcctcacaggatgggtggggactgatcctcaagtgctcttctcttcctcccataggagacttggcacagaggcctccttttctttggttctttctcagccatttcctgtcacggctactctcggcccagctagtcttggtatactgggtggcaggggatgcggtgaggaccagggtttctgcctccctaagaaacaccctggaagtctgaattccaggcaaatagaaagtagaaggtggactgggcgcagtggctcacgcctgtcatcccagaaccctgggagaccaaggccggcggatcacttgtggccaggagcccgagaccagcctggccaacaatggtgaaactccgtctctactaaaaatacaaaaattagctgggcgtggtggtgcatgcctccaatcccagctacttggaagcctgaggcatgagaatcacttggacccaggaggcgattgttgcagtgaaccaagatcgtgctattgcactccagcctgagtgacagagcaagacttagtctcaaaaaacaaaaaatagcaacaaaaaagtagaa

SEQ ID NO: 213070 - DNA, 504 bp, Homo sapiens
ataattggattgaaaggggagccttgttcaggttattatcattctatctgtaccttttcggtacagatgaagataaatgcagtatttccatctgttctgaagggctatgaacatccgggctatgaacatcctggctatccgggaagcctccacgtagacaccaacattgaggcttcatctcactcgtgcttcaagccatgtttacctgagaaacaaaatgtgctgaatagaggggaaaactggcaaagttgtcctctttgttcaccaggtcattccggtcactgggaacttaatactctacatttataccttcaactctatcaactcatgtaggcccggggctgcccacaggggctgccttccgtattttctcctttatgaaaatcatggagtggcgctcttttaatctgcacctgtcccagagaggggattcttcagctatttcaagtagaatatcttaagaatttatacttagcaaatataaaatacttcaaagacgggagc

SEQ ID NO: 213071 - DNA, 444 bp, Homo sapiens
gttgtgagggtgtgataaggtattcatggcagatgggaagataaattgtgatagttgttttaagggattgtcagattggagaagtacaggtaatctgacagtattctgtactgatagggccttaaaaagtgtcaggtaaagttatcaggagttaaactggtaggcaacaacataaattttccatacaggatatttttcacggaagatggttgagaaagggaaattcttgcccttgaaagtatatgtacatctgccatatatctgcttatgtgtacagatgtcttcataaaatgctttgcttctgagttcatgacgagggttgagaaagggaaattcttgcccttgaaagtatatgtacatctgccatatatctgcttatgtgtacagatgtcttcataaaatgctttgcttctgagttcatgatgagtcatgacatcacatgat

SEQ ID NO: 213072 - DNA, 222 bp, Homo sapiens
tatgcctccatcttgctcccatcagcccagctcccccatctcacagtcttctgccttctgatgggctcaaggccctcctaacgatggctttccttagcaccctcttagtgcctactcttttctgcatcctttgatcccctccccttcaagaggcttgtcttataattaactccagtttgcaatcccccttcctctcactctcctgatgggacgaacatgcgg

SEQ ID NO: 213073 - DNA, 544 bp, Homo sapiens
cagtgcaattgaaggttgaaagggaagatcctccaatgcacaaagaattcatgcttcagaaacattctcttcctgaggatacatttgggaatttaggtagaaattaactgtcttgccttcatatacagtgtagtggagaccactgtaggtctccaactttttgtcttttcttaataacaagtccccagtttttgctaggtacatagctacccagagaaaagattatgtggccaccttactatgttctggccaatgagatgtcagcagaggtaatatgcggggcctctgagaaggccctttcctgctacctggtacctggctggaggctgaaaagccattagggacgagacatgctaaggttggagggtcagcgtattacatggagcctccttccctgatggccttgggctgccataccagccctggattgcctaattcccgacttcttttgtaaaagggagaaataagggtcaatttttaaaaaagcatctattactttgacattttctgtcacacacagccaaatataatcctaactactata

SEQ ID NO: 213074 - DNA, 287 bp, Homo sapiens
tactgatgtggagaaaatgtcaatgtggatatgaagaaaacaccttagcaaacagagggatgcaatcggggtgcagggtacccagatttgtgcaggtttttggtaaagctttagttcccacatcatgtggttggttcaccatgttccattacattattatgctgtatagagtacacctatgtaacattatgtgatttttccatggatcaaatattatattaaagataaagtgaacttcaaatccctgacaagtagaaaaaaaaagataaaggaaaaaagttaaatat

SEQ ID NO: 213075 - DNA, 161 bp, Homo sapiens
tgacaaaggaaaaagcaaggaggggccttgaagaagcatgacctggtgaggattttcagcctgatggggatgatcagtgcccagaccaaggcaccatagtctagaacttcactgcttaaagtgtggtctgtgggccagcagcattggcatcatctgagagt

SEQ ID NO: 213076 - DNA, 382 bp, Homo sapiens
agctgaggcctctgttgagactgcattccaggcagattcttcctttgcccaaccctgcttccttccctcccacaggtgcactcctaaatgaacctccagcataatcctttccatgtcattgtcttcctgggagccaagtctgtgaagcccacaccagcagtggtaaaacagaacagatactgggatgtcatcttggagctcagtcacctgccaccagagacaggtgcctactgcaaggtgaagcagcgactggccctggcacaaggagccacaccagcatcaaaacttggaccagaggtcagcggggatcacagaccagcaggtgtgatataaaagacatttaagaaatatcgggaaataataattagcagggcccagaatc

SEQ ID NO: 213077 - DNA, 597 bp, Homo sapiens
aatactacctctcatccctttatctcttcccttttgagttttttccagactcatcacctcagcaggatgtgttgttctagcactttgtacattctggcacttgtcacattggattatagatgtctgtttataagtttgtccttcctgaggtgtgatccccgtcaggggagtggtcagagcagtgactttgtcatttaccaattctgtgtccttgggaaagttactaacctctccatactgtttctttctctgtaaaatggagataacagtagtgcctatcatacagtaccaaagtgatgaacaagtgagatatttaataagtctttagaacagtctggcacagagtaaacacctgataaatgttggccattatcattataaaggtactatgcctggcagatattaagcatttagcaaatgtcaggttaaaattgtatgtatcatctaccacacagtgagatgtctgtgaatattgagttcacaaacatttttttcagtttaaaaaatatttcaaaaacattttgaacaaacactcaataaaaccacatttggatggggtgggcctaaataagaaatgagaggatagagctttagttt

SEQ ID NO: 213078 - DNA, 1639 bp, Homo sapiens
  misc_feature (837)..(837): n is a, c, g, or t
  misc_feature (871)..(871): n is a, c, g, or t
  misc_feature (1639)..(1639): n is a, c, g, or t
ggctttataaaactaccatgatgcccccctcagactcacctgacaatttttaactcatctggcagatgctctttgagtttaaccagattagggcagaaacatttgggtagactgggaagggacttcaggtaactctaaggactgaaaatgaatcttgctctaacactattttccataatgtagagtttggtataaggcagggttatcttgaattccatcccacatgatttggctactgatttgcacaattcttctaagaactaggttacagttaggggccggtgacttggacttggattttgtttactaccagagactgtacaagtgtgtcaggaaataaaaatctcttctgttagttgtagttgtctgatcacgtaacactgggctatttatgggacaagtcagttagccaacaatgaggtgtaggggagtgccagttatctattttagactagtgcaatgctatagaacacttgagaagtgtattatttagggcttttaggcattaaggctgggatcactgtagacccaatttgacccaagacatcaaatttcagtggttgtgagttcaccaaaacacttagataaaagagctctctccagaagcaattccactttataatcaaacactggaagtcacttaactgcacaatgtattttttaatcaaataaatcatatcgcaagattttggaaaaccagaacagataccaaatcatgatttttggatgaaggataaggaatggatggccaggcatggtggctcacgcttgtaatcccagcacttcaggaggctgaggtgggtggatcacctgaggtcaggagttcgggacaagccnggccaacatggcgaaaccccgtctctactaaaantacaaaacaattagccaggtgtggtgccatgcgtctataattccagctacttgggaggctgaggcaggagaatcgcttgaatctgggtggcagaggtggcagtgagccgagattacatcactgcactccagcctggcaagagagccagattttgtctcaagaaaaaaaattatataagggatggatgaatgaaggtgcttaggcacttaagtatatggaagagtgataaaagaatgaagagaagaatctaggtgttagtattcctaagtagtaaagagtaagaagtaggccctcaccatagctctcaatgaatatgtgagtgataccaacagatacaaaaattctcttgcatctgcattcattaggtgaattgacttcagagacaaaagaaggaaagctatgaaaacttttatctccccagagactccttcccagcccactcaaataaaacggcattctggtcactctctatcctcttaatctgctttatttttcttatcatttatcaattcctgatattgatcatatatttgcttactgacttcccaccagggtgaaatcaccatgaacacaatgactttgttttgttcaccgtgctttctcctgggtctagaacggtacctggcacataagcatcataatttttttgttgcataaataaatgtatacacacaatttgaccgattctattggctcttttcaaagttataattgaacaatatatcagtatgaaacaccaaggcatgaaaatggaacagatttccattn

SEQ ID NO: 213079 - DNA, 303 bp, Homo sapiens
acttctctgctgacaggatgttggtaagttcttaagtgcctgtggctggggtattgcattcatctgtggcagagcttgcaaatagtgtcctctggatcagattccatctaaagaactctggctcacacaatttataaaaataggaaatttactttaaaaaacgtttctgactattgagaaaaacagttcagattccactggattccagggtctgcattccatcccatagtggtgttgcttgcctgcggctgggtagttggtattccggttgagggtggttgcaggcaatgtcagtccttcctc

SEQ ID NO: 213080 - DNA, 430 bp, Homo sapiens
ttcactagcacatgaagcagtgaggtgacacactgagcagacaagataatggagagatgtcgtaacttctgaagctctcacactccaccaaggaaagattgcaggtccaaagaggacaggaatcagttaatgctgactcctaagcagtacacttccaaaacgcccttgaggcagccagactcttgaggttaagcgaattaccttcagaagtagaaaggcttattctgtttggaaccataaggacagagaacagtgagctgagggctaggcaacagtcaatccttttaatactctatattcaagttcatagatggcaagatgaaataaataggcccacaaatctacatagggcaagaactttggcaaagagtaagagaacctaggagaccaaaaaggcattcactcaatgttctctcatgttccaactgac

SEQ ID NO: 213081 - DNA, 565 bp, Homo sapiens
catcttcccatcttcggtgataaaggtgtccttctctctgagtatcaggaaggtacctctcatgtgagggtcttatgtcgtatttcaggggagaagaaagtgtcagagtgtcctttctgtacctgccatttttcagattccttcagcttaaaatattcaatatggcaagctgccatattttggggtagtatgtcctaaaccccatcatttcaatagttttactgtttaatttctgtttgtcattattactattttttgccccattggatttggagaattctgaaagacatatatcgtatatatttctaaatgaagttctccttgcatttctaacactttatatatttagctgctgtatctaatacatacaaagtaattactagtatatcttttacctaaattgtactttttggcccagcatggtgactgatgcctgtaatcctagtgttttgggaggccaagataggaagatcgcttgagcccaggagttcaaggctgcagtgaactattatcatgccgctgtatttcagcttgggcaacaaagtgagaccctgtctcaaaaaaa

SEQ ID NO: 213082 - DNA, 204 bp, Homo sapiens
taaatttggctggcttttaaaagaaaaataaaataaaataaacaaaagctggaaaggatgaaggaggcccttggatgaaacaagttactaagtgggctttaataattcattcatattctcaaagtgacaatttactctctcaggccagcctaagcttttgagccaccccagtaggcttattctcctcccttcagtatcaaaata

SEQ ID NO: 213083 - DNA, 680 bp, Homo sapiens
gagaatgctggagtgcgaaggagtcatcatgcttgcaagccacagataaagagacgagtgggaagagatgagtgagaaaagaagggaaggaagtttgaaaacaaaaggaaatgtgaacttagttaaggaagaacacatcttcctctcagaaatatgaaggagaaactaataggatagaaagataaagaataagtgaaaatagatatgactatgagatgaattcctcagacaacactgtaagaaatgtcttcttcattgaccaattccaagaacatcatgcttctatttctcagctggacaagtggctgttaggggtgcccagcccatcatccacaactcttctagctccagctgggagataacactggctttgaagggatgacagcccacccatggggaaagaaagatataacaaatatctgaaaattcagccctaaccccttaaagtttggctcactgaatgatggctactgtgaggtttaagggaggagtagtatagaaagctcctaacatcaactctttaaaaataaaggcaatttacctggggaaaatgtattaggaacatcttgtgtcttgggggccaactagattttaaaacctttggttttgaggaccatataagcccagcagagtaaaatgctatgaagactcatggctgttaataactgaggacgcaaaga

SEQ ID NO: 213084 - DNA, 439 bp, Homo sapiens
tgtatggagtcctctttggggtagggatgctaagtcttcatgcagaaaagctgcatggtttctgcagagcacaattggctagaaaggctgtaacattaaatgtttatctagaattaacatgagtaggagtaaaagtggctgtggcatcagggcgggcagcaaagcattctggagcgagggggctagggtgactggggaagaggctgatgaaaaaaataaatcaattaaaagagttcagggacttaacaaaatgagatttgacctgtgccaaaactattttgagaattttaaatatgacatttttcctggtatgaataaatttatagcaacaaacaataataaagatacaattgatcttgtatgttatgtatgttgacagagaaatttgattttgctctaaaaaagataatagtgatcaacatagatggagaacaatgcc

SEQ ID NO: 213085 - DNA, 515 bp, Homo sapiens
ttcttttcttttttgacaatttccttaatggcttgcatctaggccaatatgctcatagtcgtctgctcctgcctgggaacacaccaactttccaggcaggtctggttccttttcatcagaaaatggtacttacaaattaaactctagataccaactgctagatacctatgtacaaattaagctctagataccaactgcctagataactatgtacaaattaagctctaggtaccaaccgttagacacctacattattggggtcattatttttagacattctcagtgcacagaacttggaaatatatgtgtatataccacatcaatgctcacacacacatatctctattgctacgcctatctgtatgtatgtgtctaaacttaaaacatatatacaagacgcatggtggctcagctcaagctgtaatcacagcactttagggggctgatgggggcagatcacttgatgtcaggagtccgagaccaactggccaacatggtgaaaccccatctctact

SEQ ID NO: 213086 - DNA, 403 bp, Homo sapiens
catcatgtctccttgcttttgcctgtgccccttcactgttatgtcttgtcctccttgggaattctctacagacctcaaaattcacctcatccatgaggtcttcctgaactacattgtctgtactcaaatggctcattgtccatgttatttatataaaatatatcatttttagctgtatttatatatttataccaaccaaattaggagcattttgtaagcattccatgctcaattcttaactgtgcctagttcatattgtaggttttcaaaaatgtttagtgaatgaaaaaaatatataaactcttggctaaaatcaaaacatttgaaagtgctcccaaaattgattaagttttacatataatcatgattaatgtttgtttttcccaaaattgtttaagtttta

SEQ ID NO: 213087 - DNA, 335 bp, Homo sapiens
aataagtacattctaaaactatgataaacagtatagtaacataactattatcattatcaaatattgtatcctgtacataactgttcatgctatacatttatactactggcagcatagtaggttcatttacaccagaatcaccacaaacacataatgcattgcactatgatagtgtgattgctgcgatatcactagatagaagatgggaaattttcagctcccttgtagtctcatgagtccaccatcatatttgcagtcagtggttttgaccagaacatctttatccggcgtgtgattacttttctgtctcccagtgtccccttctctcccaagcc

SEQ ID NO: 213088 - DNA, 135 bp, Homo sapiens
cgcgcatgcgcgcacgcgtgtgtgtgtatttaaacatgctcccacttagtcgttctgtttgtattgaagtacaagctctttgtatgccagctacccgctcttatactgagaatcatacataggaatacctcacca

SEQ ID NO: 213089 - DNA, 355 bp, Homo sapiens
ccatctttgaatgtacacgtgactgtactttcatccaactagaaatattgcatggcaatttgaggtggcctgtgaagcattagtggaaaagtactaccctctgtctaaaggggtgcattatttagggaagttagaggtcaacaactgcatcttcaattaattttctatttatactgctttcaattatagttatattattactggagcattttcttgattatgttctctgcatttcatctatggaacgcagatcactccagccagaaatgttcctgctgaaagagcaaattggcaaatagggatgagtaaacttagtggtggatcacagaagagtttttgacctttgcttttaatg

SEQ ID NO: 213090 - DNA, 887 bp, Homo sapiens
acaatctgatttacacaaaaatttgctcagtcaatcctgttttctctgccaagagcatccaccctgatctcaagggtattattccacaataagcagcccataggactactgaaaaaccaggaagttacatttatgccaaagctgttcagaggttgtgcctcagaagacacacagcaggaaccgtgtgggctctgatcaaagcaagaatgtcatcccagagttgctccagtattgcttcacaaatattacaaataaaacacgatgctttttgagtcgtcatggctcacacaaagggtaggtttcaacatcagcctctggagagccacattcccagagtggccgtcccggataagaaggccactacagcacgactcacagcaccatggaggtttcctccacctgcgggacacagcaggatggagacggttgggcggcctcccttcctgggacactccatggccagcccctcagggactacttgaagaacagaacccccaaaagaccagtttctgaaaagggactcaaagtctaagggaggcagcctccttttatccccaggggagggcagctctggggcagacaggttcatctggatgtcatattcactcccgcacagaaaacctaggccaagcaattggcgaaccccctgaaggcaggtgggcgccccagggtggcgccacctgtttcgtagcagcggctgttgtcccgaacaaagctgcggccccagaacagcggcgcgcccaattggggaagagaaacgccaccaccgtggtgacgtcctccagcagacgccgagcccatgggagaagcagcaccacagagcgcacacgcagcgtacgcgacgacaatatatctcttcaacactaatagctagcggggttgtgcgc

SEQ ID NO: 213091 - DNA, 264 bp, Homo sapiens
tactgtgtcctggggatgtggggctgtgtctggggctttctagtgcatactatgttataggttagaatccctggtagaccaggtattgttaagtagtactgctgcatgttgcctgggggtggggtgactggctggagaatagagagacggctgcgtacaaaagtaaagtgaaaggaaaaaagaaaagtaaacaccaggacacagggcagagaatatgcttctaaataaaatcagttgtctcttctcagttttaagggactccaa

SEQ ID NO: 213092 - DNA, 864 bp, Homo sapiens
  misc_feature (10)..(10): n is a, c, g, or t
  misc_feature (31)..(31): n is a, c, g, or t
  misc_feature (72)..(72): n is a, c, g, or t
  misc_feature (83)..(84): n is a, c, g, or t
  misc_feature (86)..(86): n is a, c, g, or t
  misc_feature (88)..(88): n is a, c, g, or t
  misc_feature (95)..(95): n is a, c, g, or t
  misc_feature (100)..(100): n is a, c, g, or t
  misc_feature (103)..(104): n is a, c, g, or t
  misc_feature (131)..(131): n is a, c, g, or t
  misc_feature (226)..(226): n is a, c, g, or t
  misc_feature (228)..(228): n is a, c, g, or t
  misc_feature (237)..(237): n is a, c, g, or t
  misc_feature (252)..(253): n is a, c, g, or t
  misc_feature (258)..(258): n is a, c, g, or t
  misc_feature (270)..(270): n is a, c, g, or t
  misc_feature (273)..(274): n is a, c, g, or t
  misc_feature (279)..(279): n is a, c, g, or t
  misc_feature (291)..(291): n is a, c, g, or t
  misc_feature (312)..(312): n is a, c, g, or t
  misc_feature (324)..(324): n is a, c, g, or t
  misc_feature (356)..(356): n is a, c, g, or t
  misc_feature (364)..(364): n is a, c, g, or t
  misc_feature (376)..(377): n is a, c, g, or t
  misc_feature (383)..(383): n is a, c, g, or t
  misc_feature (390)..(390): n is a, c, g, or t
  misc_feature (392)..(392): n is a, c, g, or t
  misc_feature (403)..(403): n is a, c, g, or t
  misc_feature (429)..(429): n is a, c, g, or t
  misc_feature (433)..(433): n is a, c, g, or t
  misc_feature (822)..(822): n is a, c, g, or t
cttctctcgngggctctttcccttctgtatncctttgtctgtttgttccccctcctcccgggtcctggagtncgtcgtgttcnnanantttttgntcttnttnncgttgggctgcctgggcctcctttcanccgtgagacttggagcggcccctggggtcttgggtgtgcagcacggatcacgcgagacccctgagacctcaaatcatctaacgtgaagccacagncntcttgggcnattttaatcatcaannaaganatatgtcattanganntagcngggtattttganagagttggaaaacatcatgantttgaatacttnaagtaatactggtgatacccaaaggttgaagnttgcctcnttggttgtaaanntaatanttttttntntttctgagttnttttttttcttttttttttttttttntttntccattgggctaaaaaagaaaagttagaaataacaaccaaacacaatgcagagctggcaagctatgagagccagattgccaagctacggtccgaggttgaaaagggagaagcattgcgacaaagtctggaatatgacctagctgttgctagaaaggaagctggtcttggaagacgggctgctgaagaaagattagccgaggcacataggatccaagaaaaactctgtgcacagaattcagaacttcaagcaaagacaaatgagactgagaaagcatttcagacttctcagcaaaaatggaaagaagaatgcagaagatttgaacatgatttggaggaaaagagacaatatgatccaaaattgcaatcgagaatatgatttacttatganagaaaaagcagactagagaaactctacaggagcaagatactg

SEQ ID NO: 213093 - DNA, 483 bp, Homo sapiens
gagccaatgcattcaccacgtctgcatcggataccaaaggaccttgggcctgctttataaaagcttttagagatcctttgagattgcaatgagattagtgttctgctcattagtgttctgcctctccagcttgcagaacacggcggttccctaattcaaccgcaggcgagattacaccagggtagttgaggctgacgcgaaggccagccacagaaaggcctagctctgggccgggcatgctggctcacgcctgtaatcccagtactttgggaggctgaggcgggcgaatcacgaggtcaggagatcgagaccatcctggataacacggtgaaaccccgtttctactaaaaatacaaaaaaatagccaggcatggtggcaggcgcctgtagtcccagctactcgggaggctgaggcaggagaatggcgtgaacccgggaggcggagtttgcagtgagccgagatcacgccactgcactccagcc

SEQ ID NO: 213094 - DNA, 613 bp, Homo sapiens
cttcttgggaggctgaggtgggaggactgcttgagccaggaggttgaggctgcagtgatccttgatcatgccaatacactagcctgggtgacagagtgagatcctgtctcaaacaacaacaaagagaaatgtaatggtgaagagcatactggaaactttgaaaagcttggcaatggttgattgacctctacaggctagaactgatgatggaagatgctgtcatgacaatgggctctgtggtatcaatgtagatagatgatgggatgctgaaattttgaaggccaagttgcagaacttaactgtcaggggcccagtggacctaattaacttaatgggcacctaggcatgaatctgtgaacaaggtaaagttcatgatgttccaaggggcaagacagaaggacagctgattaggatgttatttgagttgtataattgacttgttatataatgatgttgattgacttgtattatttgactcctctcacccctcaaaaaagaaaattgagaattggcaaggagaaggctgacatcaatcttggtaatgaaaaaccatagttccccatccagtttccagatctaaagctcatgatgcaagggaaggcccagatcccct

SEQ ID NO: 213095 - DNA, 404 bp, Homo sapiens
tgggtagggtgggccagaatcaggagtgactgctaaaggtacaagatttcttctaggaggaacaaaatattccaaaattggattgtgatgatggatgaaaaaccctgtgactctatcaaaaattaaatcatacaatatagatgggcgagatgatggcatgtgaacgacatctcaacaaagctgtttaaaaacataagacaaatccagcatgtattttttttaacaaattttatggattcctaatagttgtacatatttatgggctacacatgacattttgatacaagcatacaatgtgtaatgatcaaatcagagtaacagaaatatctaccacctcaaatatttatcacttcctgtgttgggaacattccaaattttctcttccagctattttgaaatatata

SEQ ID NO: 213096 - DNA, 428 bp, Homo sapiens
ttctccccccagtccctggcaaccgccattctttctgtctataaatctgactactttaggtacttcatgtaagtgaaatcatacacttaatgtccttttttatctggcttatttcaattcacaaaatgtcctcaagtttcatccatgttgcagcatgtgtcagaatttcctttctatttaaggctgaataatattccactgtatgtacataccgcagggtgtttatccattcatctgtcaatagacactgggttgcttctaccttttggctattgcatgatgatcattttaaaaatatgttttcagttgcaaaaagcaagcagatatctacatggtaaacccctggactttgttgtgggtcaatttactggtttgtgaaatctctaagtctgggacttacacaattttgtatctgatgtagagatgtg

SEQ ID NO: 213097 - DNA, 456 bp, Homo sapiens
atggagggcaggtagccaaggcagttgctttgaagaactggaaaaggagtctctttctcagacactggtgggaaaattgtcatgagaaatgtacagttctggaaggtgtatggtgtgaatggtacaccctgagacgtggtgttgtgcggtgcacaagacatacaactgaataaggcactcttggtggggctcgcagaagagggccagcatcttatttatttatttattaattttgagatagagtgtcactctgtcacccatgctggagtgcagtggtgtggtcatggcccactgcagccgtgaactcctaggctcaaatgaacctcctgcctcagcctcccagctacttgtgaggctgaggcaggagaatcgcttgaatccgggaggcggaggttgcagtgagccgagatcatgccacttcactccagcctgagtgacagagtgagtctccgtcta

SEQ ID NO: 213098 - DNA, 400 bp, Homo sapiens
atggagggcaggtagccaaggcagttgctttgaagaactggaaaaggagtctctttctcagacactggtgggaaaattgtcatgagaaatgtacagttctggaaggtgtatggtgtgaatggtacaccctgagacgtggtgttgtgcggtgcacaagacatacaactgaataaggcactcttggtggggctcgcagaagagggccagcatcttatttatttatttattaattttgagatagagtgtcactctgtcacccatgctggagtgcagtggtgtggtcatggcccactgcagccgtgaactcctaggctcaaatgaacctcctgcctcagcctcccaagcagctgggactacaggtgcgcaccaccacgcctggctaatttttctattttttgta

SEQ ID NO: 213099 - DNA, 655 bp, Homo sapiens
ctactagaaatgaaaatttgaaatttacaaattattttcatttgacttatcgggtgatttccacatgctggaaatatcaagaaatatttggccggctgcggtagctcacacctgtaatcccagcactttgggaggctgaggtgggtggatcactggaggtcaggagtccgagacctggcaaacatggtgaaaccctgtctctactaaaaatacaaaaattagccgggtgtgggggtgcacgtctgtaatcccagctacttgggaggctgaggcaggagaatcacttgaacctgggaggttgaggttgcagtgagccgagattgcgccactactgcactccagcctgggtgacagagcgaaacttcatctcaaaaaataaaaaatttaaaaaattaaaaaatatatttaaataaactgtctgtgatggccattatttcttgaattctatcttattccacttattccacattactaaaagatccctgaatttctgactgaagtttaaagagaaacatcacaactagatatcagagtccaaggaagagacacaaagacctcagtggtactgacaggcaatagcaaagtcattcgaaagacaaagattttggctggtcgtggtggctcacgcctgtaatcccagcactttgggaggccg

SEQ ID NO: 213100 - DNA, 510 bp, Homo sapiens
taggcagttcttcctggagttaggaatatctgatacacatatgtttaatactagaattctgtatgcagttatattagtggttaactttaaatgactgctgacttttttgtactttatagtttacagataactttcactcatatttttcatttctaggcagggtaacattagcacaatgtccttatttctaaatactctaataatcccatgagtatttttcagtcagtaataactgcacaatagcaactaataaaaaatgctcctggtgaacagagatttggacagcatacacataaacactaaccactgtattctttttttaaaaaatggcaattatctttaactgacataatttttattattcacctacaatgtctgccatttcttagtggggatatatcaagaatatttcttaaccacctggaaaattggttagggccctgtgtgagagacattagaagtgtagtgatgagaaagaaaaagaataaagaaggagaggaaggaaagaaa

SEQ ID NO: 213101 - DNA, 350 bp, Homo sapiens
aagaatagcttgaacccagaaggcagaggttgcagtgagccaagatcataccacttcactccagtggcaggggtaggggatgctaaagccatctgagtgaaaggttggggtggaaagaaaacacgtggagtaggctgaccattccaccatccccaaccttatcactaaaagagggtcattcacacaccatatactacttgattatgaagcaacaagaaactagcacaacacctattaagtattcctgaccaaaagataaataatccaaatctagacctacctactaactgcaagttactagggaaaatggagagcaagcagttaataagtcaaatccagaacgtaggtgt

SEQ ID NO: 213102 - DNA, 324 bp, Homo sapiens
catttgacaaaattcaatatgcctttttaaaaacatttacagttcagacatggtagctcacatctgtaatcccagaactctgggaggttgaggcgggcaaatcgcttgggctcaggagttcaagaccagcctgggcaacatggtgaaaccccatctccacaaaatatacaaaaattagccaggtatggtggcacatgcctgtaatcccagctacttgacaggctgaggcaggagaatcacttgaacccaggaggcagaggttgcagtgggccaagatcacaccactgcactccagcctgggtgacagagtgagactctgtctcc

SEQ ID NO: 213103 - DNA, 1240 bp, Homo sapiens
acaacatcagcgatttcacacaggaaagacttcctttgcatgtactgaatgtggaaaattctctttgcgcaaaaatgatcttattacacatcagagaattcacacaggagagaaaccgtacaaatgcagtgactgcgggaaagccttcactacaaaatcagggctcaatgttcatcaaagaaaacatacaggagagaggccctatggatgtagtgattgtgggaaagcttttgcgcacttgtctatccttgttaaacacaggagaattcacaggtagtcattttgggaaagcctcttgccagatgtaggcccttaagatatctgcaaagaagagtaatttcatgaatgcagactacatggttgtttatttagtgatcagttacttcatgttttgtgtcagagaaaacatgtacaaaacatttgagaaaatattttaggacattatgtctaaaaattgtatactgagaaaaatcctatgaatgtggcagactataaaagcctttggtgggaagataaaccccctcagaagtgatcatagatcatgaataaactactaattcgtggaaatgtaataattataggaacgtctttgcccaaaaataaaacttcaacagattgagagagttcacactggagaaatactttcctctggcaaacccctgtggcagggttttcagtaaaatgttttgcctcatcgtgtgctaggaaataatgcagaaaaaaacttatgaaaacattcaatgtagaagacttttaggaaaatatcagagaatttaatgaaggaaagaagctgcatttttgtttgttttttatatgtagctttaagaaatcttaacacatatattgattcatgtcaccaccaccgtaatcgagattcagaatgttgcatcaatgcaaactccctcatgctccttgtttatagtcacaacctctcctcagccctaacccttggcaatcagaaatcttttcatctttagttttgtcattagtagcatgttataaaaatggaatcatacagcatgtacccttttggtattggctatttcaactaaagcagattaacctgaaatccatccaagttgttctgcatatcattgttctgtttttattggccactaataatctatgatacgaatataccactatttgtttattcacccactgaaggacattagttttgttcccggtttttcttactgttacaaataaaaatcctatgaacatttgtacacacaggctt

SEQ ID NO: 213104 - DNA, 1836 bp, Homo sapiens
acaacatcagcgatttcacacaggaaagacttcctttgcatgtactgaatgtggaaaattctctttgcgcaaaaatgatcttattacacatcagagaattcacacaggagagaaaccgtacaaatgcagtgactgcgggaaagccttcactacaaaatcagggctcaatgttcatcaaagaaaacatacaggagagaggccctatggatgtagtgattgtgggaaagcttttgcgcacttgtctatccttgttaaacacaggagaattcacaggtagtcattttgggaaagcctcttgccagatgtaggcccttaagatatctgcaaagaagagtaatttcatgaatgcagactacatggttgtttatttagtgatcagttacttcatgttttgtgtcagagaaaacatgtacaaaacatttgagaaaatattttaggacattatgtctaaaaattgtatactgagaaaaatcctatgaatgtggcagactataaaagcctttggtgggaagataaaccccctcagaagtgatcatagatcatgaataaactactaattcgtggaaatgtaataattataggaacgtctttgcccaaaaataaaacttcaacagattgagagagttcacactggagaaatactttcctctggcaaacccctgtggcagggttttcagtaaaatgttttgcctcatcgtgtgctaggaaataatgcagaaaaaaacttatgaaaacattcaatgtagaagacttttaggaaaatatcagagaatttaatgaaggaaagaagccttggcaaaatgatggatgagagctttctgtcacaattctaaccttaacagataatatgcctcatgtgcatttgggaacaggatagcttgagccatattcctagttgccttgtcactgattttatacattttaaattgtgacttcctctaatcacgaactaaaatttaatattgtatataataccggagtattttatgcctgcctcattttattatatgattagctcctgcatttctttggttctaagtttgtgttatttcagaataactaaagtacttcagaatgaaactggatacagtatattcagttcataagtgtaattgaccatacttgaatatgtttaagtttataagtaacatcaggtgttatgaaattaatataaataagatgtttttgtaagtttttattttgaaataagtttagattcacaaaatcttaccaaaatattccagagttcttgaatgcccttaacccagcttcttccaaagataacaacttacataagcatggttcattaccaaaatacaggaaagtgaaattgttacaatactgttaactacagaatttatttggaaatcaccagttttaacatgcatgcatttttgtttgttttttatatgtagctttaagaaatcttaacacatatattgattcatgtcaccaccaccgtaatcgagattcagaatgttgcatcaatgcaaactccctcatgctccttgtttatagtcacaacctctcctcagccctaacccttggcaatcagaaatcttttcatctttagttttgtcattagtagcatgttataaaaatggaatcatacagcatgtacccttttggtattggctatttcaactaaagcagattaacctgaaatccatccaagttgttctgcatatcattgttctgtttttattggccactaataatctatgatacgaatataccactatttgtttattcacccactgaaggacattagttttgttcccggtttttcttactgttacaaataaaaatcctatgaacatttgtacacacaggctt

SEQ ID NO: 213105 - DNA, 417 bp, Homo sapiens
cagtctgtaaatggacccggccaagtcaatgacacgtggattttgagtgtctaaaccagttgtctctctatgcctttaggcctcactgcctcaggtccactggactaggaagactccaagtttggcgatgtgactatctggcacccccacccctcccacagcaggcactgttagaatgaattctgttggaggtgactccccacttcctggaatcagccaacaactgcattcacttaataagaatggcagtttctgtcacctccagggtagacaaaaaaaagaaacagagagagagagagagaagaaggaaggaaggaagaaaggaaggaaagaaagaaggaaggaaggaaagaaagaaagagagagagagagaaagaaggaaagaaagaaagaaagaaagaaagaaagaaagaaaga

SEQ ID NO: 213106 - DNA, 737 bp, Homo sapiens
  misc_feature (8)..(10): n is a, c, g, or t
tgggattnnntttttaaccatgatgacgatagcaagcagcccgactctttaggatcccccaacgcatgtgccctccctatgtccttgaggccaccagccctcccaatcctcatcctgatctcactcagcaatttcctcccacttctgagccctaagccgcgttcattctcacctcagggcctttgctggtgcccggcaccctgcctggcatgctctggctcccccatctctttcaactacccatttctcaagattcacctcttctgggaagccctccctccagacttcacttgttcccttccctgagctcatgtcttgttgtttattgctgagaaaacccactcggggagtgtatgttgatttggttcattctctaattgtttcctgggagcggcacatgcgttacgcatgtgcgctcccaacgctgtgccgctcccaacgcatgtgccgctcccaacgcatgtgccgctcccatgtgccgctcctggtactcacgcagctgccgcgccatgttctgcttggcccgctgcagggcggtcttcagcttggacaacttggcgttggcatccttaatggccagcttttcacgctgctcggcatctgcaatggcggcctccaggaaaccctttggcctttgaggcccttaaatctaggctggacccggctgatgttccgggtcaattcaaagaacctaatctttgggcgcccgaagtaatccccgtgctttcaaaccagct

SEQ ID NO: 213107 - DNA, 461 bp, Homo sapiens
  misc_feature (8)..(10): n is a, c, g, or t
  misc_feature (452)..(452): n is a, c, g, or t
  misc_feature (457)..(457): n is a, c, g, or t
tgggattnnntttttaaccatgatgacgatagcaagcagcccgactctttaggatcccccaacgcatgtgccctccctatgtccttgaggccaccagccctcccaatcctcatcctgatctcactcagcaatttcctcccacttctgagccctaagccgcgttcattctcacctcagggcctttgctggtgcccggcaccctgcctggcatgctctggctcccccatctctttcaactacccatttctcaagattcacctcttctgggaagccctccctccagacttcacttgttcccttccctgagctcatgtcttgttgtttattgctgagaaaacccactcggggagtgtatgttgatttggttcattctctaattgtttcctgggagcggcacatgcgtgggtgatccgattgagtcgaagtcaactaacatgagctaaatcattaancagtnacct

SEQ ID NO: 213108 - DNA, 299 bp, Homo sapiens
agctgtgtagcccgtagggtcccaaggagacagcccagcagtgaaacgctcagatggggcgggccccaggcacccggcctgcctccagggcaggtcctaggggcccctccagggccctagccaacaggaaccaacagggccaggggctccagtgctgaagctccaagaagaggggacccacagggtccctgggtgcccagctcttccttcatgagaacgaaactgtcctttcgggtttcaccatctatctatactgggttgaagtgtcccccaaaggctcacattcacccagaacttca

SEQ ID NO: 213109 - DNA, 961 bp, Homo sapiens
aaaatcctgctggatccttttttctccctctctcttaacttcctaagaatgacttattcatttaatgaattttttttcagttcctacacagtggtagatgtatgccaagtgccctgctaggcactggggttacagtggtggaatgtaggcactgggtaggcaccaggattacagtggtgggatgtaggcaccagggttacggtggtgggatgtaggcaccgtgtaggcactgcagtgacagtgtggaatgaaatggtttctttcttcgtgaagcttatatctaatgatggaggccaaaatgacaattacaaactcgtataaatgctttgaaagaaaggttcatgtgctgtgagagggtttaacaggcacaactgctgtcagtttattgggtaggagcatcctggaagtgaagaatgagtagtccacatatccaggcaaggtgggacaagaagctagggcaagggtattctagtcaagggaaaacccacagaaaggaggtacagtaggaaggagcagaggatgctggaggaactgaatgaagctagggtgacaggaactgggagagctggagatgaagtcagatgaaaggaaagagactggccggcagaatccaggtcacgtaggacctttagactatgtcacaggttttggtcattagctgaagggtaagagaatgcatggatgaattttaagcagggagtgatattcaaatttacattttctaaaaattatgctgtattctcatatcctcaacttaccttaaaatgcttcaaaaagataagatgattaatagatggatagggggatgcagagataggtgataaagaaaatgtagcagctgggtgctgtggcttgcacctgtaatccgagcaattcagaagggtgaggtggaagggttgcttgaggccgggagtttgaaaccagcctgggcgacatagcgaggctttgtctctggtacaaa

SEQ ID NO: 213110 - DNA, 885 bp, Homo sapiens
  misc_feature (153)..(153): n is a, c, g, or t
  misc_feature (228)..(228): n is a, c, g, or t
  misc_feature (238)..(238): n is a, c, g, or t
  misc_feature (272)..(272): n is a, c, g, or t
  misc_feature (344)..(344): n is a, c, g, or t
  misc_feature (352)..(352): n is a, c, g, or t
  misc_feature (437)..(437): n is a, c, g, or t
  misc_feature (471)..(471): n is a, c, g, or t
  misc_feature (491)..(491): n is a, c, g, or t
  misc_feature (877)..(877): n is a, c, g, or t
cgactgctgagggagaaaatgatgcccaggttgggctccccggcccaccggccgaggagaggcctgcgctgcacacgcgcagaccgagcatccgcgtcaagaggcgaagagagcgcgcgctccccacgtcctgcgctcctggctgccgggcantcgtctcagccgtgactctcgccaggccggggctggcgcgcccacgtctgaagagcgatgccccgggagatcatnaccctgcagntgggccagtgcggcaaccagattgggttcgagtnctggaaacagctgtgcgccgagcatggtatcagccccgagggcatcgtggaggaattcgccaccgagggcantgaccgcnaggacgtctttttctaccaggcagacgatgagcactacatcccccgggccgtgctgctggacttggaaccccgggtgatccactncatcctcaactccccctatgccaagctctacaanccagagaacatctacctgtnggaacatggaggaggagctggcaacaactgggccagcggattctcccagggtgagaaaattcatgaagacatctttgacatcatagaccgagaagcagatggaagtgacagtttggcagggcttcgtgctgtgtcactccatcgctgggggtacgggttctggcctgggctcctacctcctggagcgactgaatgacaggtaccccaagaagctagtgcagacttattcagtgtttccctaccaggacgagatgagcgacgtagtggttcagccctacaattcactcctgacactcaagaggctgacgcagaacgcagattgtgtggtggtgctggacaacacagccctgaaccggattgccacagaccgcctgcacatccagaanccgttctt

SEQ ID NO: 213111 - DNA, 910 bp, Homo sapiens
  misc_feature (153)..(153): n is a, c, g, or t
  misc_feature (228)..(228): n is a, c, g, or t
  misc_feature (238)..(238): n is a, c, g, or t
  misc_feature (272)..(272): n is a, c, g, or t
  misc_feature (344)..(344): n is a, c, g, or t
  misc_feature (352)..(352): n is a, c, g, or t
  misc_feature (437)..(437): n is a, c, g, or t
  misc_feature (471)..(471): n is a, c, g, or t
  misc_feature (491)..(491): n is a, c, g, or t
  misc_feature (902)..(902): n is a, c, g, or t
cgactgctgagggagaaaatgatgcccaggttgggctccccggcccaccggccgaggagaggcctgcgctgcacacgcgcagaccgagcatccgcgtcaagaggcgaagagagcgcgcgctccccacgtcctgcgctcctggctgccgggcantcgtctcagccgtgactctcgccaggccggggctggcgcgcccacgtctgaagagcgatgccccgggagatcatnaccctgcagntgggccagtgcggcaaccagattgggttcgagtnctggaaacagctgtgcgccgagcatggtatcagccccgagggcatcgtggaggaattcgccaccgagggcantgaccgcnaggacgtctttttctaccaggcagacgatgagcactacatcccccgggccgtgctgctggacttggaaccccgggtgatccactncatcctcaactccccctatgccaagctctacaanccagagaacatctacctgtnggaacatggaggaggagctggcaacaactgggccagcggattctcccagggtgagaaaattcatgaagacatctttgacatcatagaccgagaagcagatggaagtgacagtttggagctccagaacagctccagagtgatcagggcttcgtgctgtgtcactccatcgctgggggtacgggttctggcctgggctcctacctcctggagcgactgaatgacaggtaccccaagaagctagtgcagacttattcagtgtttccctaccaggacgagatgagcgacgtagtggttcagccctacaattcactcctgacactcaagaggctgacgcagaacgcagattgtgtggtggtgctggacaacacagccctgaaccggattgccacagaccgcctgcacatccagaanccgttctt

SEQ ID NO: 213112 - DNA, 403 bp, Homo sapiens
cattgtgtattacggtatagataagatatcctagagaaggtatagttaggggaagagtataggtagtgcaaaggttacaaattggctatcactgacagagggtgctcacagactaattttgggcaacttgggcaattttattatgcccaccttgtgctttaaaaagcagtaggacccagcagatgtgatacttggttaccatacaaataggtttatacctattacatcctacctaccactttatacatgtgtttaaccactgcaggcatttgagtttttgagcctttgttcaaagaaagtattaaagggatgtggggaatggcaagagaaaaccacaggaacatttcataggcagatagaatgtgatgagtcagcaagggagtataaagagaattaaggccac

SEQ ID NO: 213113 - DNA, 145 bp, Homo sapiens
caatttgtcctagcacagccgtatgactctcttaatgtttggggaaatccatggttcaacagcgccgatgcccgataaacaacacagcaccagtaacctgtgccaggggctgtggacgggggcaacacaggagcaggtcacgggg

SEQ ID NO: 213114 - DNA, 593 bp, Homo sapiens
ttagcaaatgtccatttgtagcagtgctctatctttaggtcaagttctttcatagactcctcttatgtggcacagagctgcagccattcagttgctatgatgagcagccttttgtagagagagccacttctccactgtgccccttctctttgccaggtatcttagaaagtcccagggaacacagtttgcaaccacagccgcctcctgatcttagaattgaatccatttaaacctcagcggagttggtcacttgcgaagtcttaccttcctgccaagacggagccaggactggaagctgtctccagatcccatcccagattcatgccctgtcatgctgggaccaggactggggtgttcctgtagcctcggctatgtcctagtacatctggactttgcccagacggcccagtgtagacaacgcaggaaaggacagaagcccatatcacagatgttctcagtagaagggacttaggtgtcatcaaagccagcctcctcgtttacatggaaagaaattgagatctagaaaggctgaaatttgtccaaaatcatatagttgcttaatggtccatagctcattgttcaacatgagaaaa

SEQ ID NO: 213115 - DNA, 582 bp, Homo sapiens
aaaacacagatataaaagaaaagcatgaagatcagctctaattgcgacatccagagataaatattttaacgttttgagattgattatgcctttttacaaaatgagattatagatcttctcatttttataaaaaggcagaatctctgagacacagcaatagcagtattaaatgagaagattatagtgctaaatgcccacatcaaaaagaaagacctcaaattaacaaactgacatcaaacttggaggaactagaaaaacaagaacaaaacaactccaaagctagcagatgaaaagaaataatcaaaattagagctgaattgaataaaagtgagacatgaaaaaccacacaaaagatcaacaaaaccaaaagttggttatttgaaagaataagattgatagaccactagctagactaattaaaaaaatagagaagatccaaatagacacactcagaaacgacaaaataccatcgacccacagaaatataaaaaaccctcaggaactattacaaacacctctatgcatacaaactagaaaacctagaagaaatggataaattcctggaaacatactaccccacca

SEQ ID NO: 213116 - DNA, 440 bp, Homo sapiens
tagtctccttttcaaagttgttttggttaatctaggttctttgcattttcatataaattttaagatgagcatgtcaattgctataaaaaagcccactgcaattttgattgggatttcatggaacttgtaaacaatttgggaaaattgccatcttaaccacattgagttttctgatctatgaacatagtaactctccatttatcttgttctttaatttctctcagcaaggttttcaggatacaggtcttatacaactctcaacagtttattttcatatcaacttgtatttatgtatggctaatatataagaaatgcagttgattttttttttaattgatcttatatcctgcaatcttgctaaattacttgttagttctgtttttgagacagagtctcgctctgtcacccaggctggagtgcagtggcttgatctcagctca

SEQ ID NO: 213117 - DNA, 192 bp, Homo sapiens
tccctgtgccgtgccccctccccactcagggcctggcactaggtgggtttatgcaggtgcctggtgatgtatgaagagccccaaatgcagcctgggctcgagtctgcggctgggtgtggtcacacatagtgtgtgcctgtgtcccacgttcagggctactcagggactctgtctgtaggacagggtggaagg

SEQ ID NO: 213118 - DNA, 543 bp, Homo sapiens
ggggactggctcaggggccagtcttggtccatgtgcctggagctgggctctcagagctagtgtggatgggagagcaccatcctgctagggccaccgggattctgataactcagccagtgagcagctgtcctggggaaatcaaggccaccagaagcagatgctggagccatgcatcttacacagcctgcagaaccatgagccaaataaacttcttttcttgcaacacaaaacggactaaaccagagggttctcactgagaaggacccatgaccaccatgtacagttgcataggctgctgactgcatatggatgcccagccaagagggtgagcagaagctgaaaacctgcctactctccattcctcaaatatgactgtgactacttgaagaggagatgcctttttccaattcacaggaaggctctgtcctttggcccaggactgccactgggaaccaagacaggtcctacctgggcaagcagcatgccccctgcacttggtcccaagaaaatcccaccctgacctttgtcctgaatcctcaggct

SEQ ID NO: 213119 - DNA, 864 bp, Homo sapiens
tacccaggtgaatatagtctaatttctgtgctgattatagtgtcttacaagatatgcatttagttgctaatatttaatataaagagtgtacagagtgtaagagaaaaattgcttaacatgtgaggaggcccagtgctgtgaaagagagaaaagagtttagcaaatggagtaatctgtaagggcattctgatagataaagggaaaaaaaaagtgtgttcatgaaacaagataattttgagaaaaaaattaaatggagaaactatgtaggcccggcatggtggctcacgcctgtcatccagacactgtaggagggtcaggtgggaggatcgcttgagcctaggagttcaagaccggcctgagcaacatagtgaaacccctgtctctgtaaagaagaaataaaattaccaccgtgcccagcctttgttgctgtctcttcctttgtgcagatccaggttttcatctggtctggatttcctgctgaccgaaggatttctgtaaccttgcttgtagtgtaggtctgttacggtaagctctttcagcttttgtacattgggaaagtctattttgccttaatttttgaaaaatattttcactcgttagggaattctaggttgacaatttttttttaaagatgtttcacctcttttgggttccattgtttcccatgagaaatctttcattattatttttgttattttgtacaaaagtggctttttttctttgcattttaagattttttctttcttttttctttttttgagagagtctcgcactgttgcccaggctgggttgcagtgagccgagatcgcgccaatggcactccattcagcttgagtgacagaggtgagactcccatctcaaggt

SEQ ID NO: 213120 - DNA, 901 bp, Homo sapiens
gtttttggtgttcttaccacctcttaatacctactattattacaactcttagtgaaaattagatagttatcaggtcaaaggaaactattagtttaccattgtaaacgaattggtaaaccattagtttaccaatttggggaaggaggtaagtagaggatagaaaatgagagagaatttgggcttataatgggatggggtaggtgagtcatttaggttgggccttaaattcatgatgtgccttaaatttaggtttttgcctctaatcccagctacttgggagcctgaggcaggagaatcacttgaacccaggaggcggaggttgcagtgagcccaaaccacgccactgtactccagcctgggtaagagagtgagactccttctcaaaaaaataattaaacaaaaatttttaaatatcccctattcagtttttatatacacttgtgtttttttgtatgtgtattaaagacattaaactataaaatatactacaaattattgtgactcttattttggcttttttccccccttttatatgtagggaaccagagcctctcttgacctttgaaagggacaaagagaattttagatagaaaatagcatcagaaaggtctggtgtggtggctcgtgcctgtaatcctagcactttgggaggctgaggtgggcagatcatgaggtcaggagttagagaccagcctggccaacatggtgaaaccctgtctctactaaaaaaaaaaaaaaaaaaaaaaattagccatatgtggtggcgcatgcctgtaatcccagctacttgggaggctgaggcaggagaatcacttgaacccaggaggtggaggttgcagtgagccaagattgtgccattgcactccagactgggcaacaagagagaaaccacatctcaata

SEQ ID NO: 213121 - DNA, 1137 bp, Homo sapiens
aactgaagtgccctccctcttccagcccttggacttcagtaccttcattgggtcctacatctgacccaatacctttcagtgtgtccaggggtctgatcggccactgcctgactcctgaccccttcgatcctgatgtccctgatactcttccattgcaaataaatactctcgccaagatggtccagcttttccaggcagtctgctcaacaaagcttgtatattttttgcccttcagaggctggcttggccaataagccaccaattgcaggctggcttcacagggcattctctgtgtcccagacagccatgaggtctctcttaacactggctctacttatcccttagatgtgtgggtcctcctttccccctgtccatccccaaataagtgcccaggactggcctcagtgaaagagccatcagaagtgtgtagaggtttgtgctgaggaagatgaagtgtcaaattgtatcctgaagttaaagtcaatgccctgccaaccttccagaatctttatgagataaagagtttgttcgtacgaaaaatgtgtttgttcttattattttgccaccagcttccctagtatttgatgtaggctacatatccagcatggaaaaaagaggaaaaactcttagctcttaaacacgcaacagtgatggtggaatttcagacaggaggggcaaggtactctgtgcatgagtaggtattattacagggtcaaggcatcacccagcagtgagtcccatccacagcagcatgtcttacccaataccacccccaatcctagcaagcatgtagccctgcagtgaggggcctagacatacctgggtagaggtgaggggtggtgtcaacctgagagtctctcctgcattcattacagatcgcaaaagaggatgctgtcctaccagtagctctcttcccatctctctgcgagttcgtctttcataacaaccctctggtggcccatacacgaggtatagtgcccgcaaacctgccccctctcaacccagtgcccaaggagcagtgtggcaccctcatccccacctcatcaatgccaagccctgggatctactctgtgtcggggtggacaaggttcatggtacattgaggaatggaggaaatagctctgtaccagcgcttcc

SEQ ID NO: 213122 - DNA, 486 bp, Homo sapiens
  misc_feature (452)..(452): n is a, c, g, or t
gcattgcagagacctcatgttgaattcgtgtctgcttgtccatcatctgagcacagtgctcatcacgttgcccccatcgcctgctgaattgagtactaagtccccactcagagtgtccctccattctgactctctgccgcctggtatcttggctccagacaaaccaagccgcactttctcttctggacttttttccagcctgggcgacagagtgagactatctcaaaaataaataaataaataaataaataaataaataaataaatagtatttttgagccttcaagatacagttcctgaatattctaatttaaattgttataattggattacctaatattcttttcaagactcctgatgtattaacttcatgttattgtcacttttcaaaaaaggaatttttttcaggagttaaataaagtcagtcttttatatccaagggtttcaaacccncagattaaaccaacaacagatcaaaaatagaaaa

SEQ ID NO: 213123 - DNA, 440 bp, Homo sapiens
cacacccattccagttccttccttcctgtattctgctacaacacgtgacaaaaaacacatgaaaaaagtggcattaggtattacagcctaccaccaaatcttcatgtctcttgagctcatgacaatttgaacacatcagattactagaaaagttagttatttacaatgcaaaggacacccagtccccagaccaaataattatacagctcaaaatctcaatggtgccatggttggcccttggctagaacaaaggctgaacacttgtgtgatcttggctcactgcaacctccacctcccgggttcaagcaattctgcctcagcctcctgaatagctgggattacaggcgcacggcaccacgcttgactaatttttcgtatttttcgtagaaacggggttagccaggctggtctcgaactcctgacctcaggtgatccacccg

SEQ ID NO: 213124 - DNA, 1107 bp, Homo sapiens
aagtctgttcttatacatacataattttattccgactgattgtcaccttggtttatagtcttacaagtagaatttctgcatcaaagtgtactcaaaatgttgactttggtacatacatattgccggaataccagcaatttacactttcagcatttcactgtgccttttacactgttacaaatattagatatagtcagtctttttaaaacagctttgccaatctgagaggtaggagataattcattcttattttcatttttaaattctatgttactattaatggtaagtatctttgtagtatccattttacatttctttgaaaatgtaaactgcctatttaagtccactgcctctaatcctactcagatatttttctcttatcaatttgggaaactaaccttttgtcatatgatacagatgctttcctccaattcattatttaattctcaactttttttgttgccaaatgcttaaaagccttaccaaaaaaaatcaattatttccttataatttttagttttttagttatgctaagaaaaactttccctctacatcaagattacaagaaatactcctgtattaattctagtgtttttatgtatttttctaaacaatgagtgaagctgtctaccttggcaaaagaagtgaagtggaaaacttcccccgacccttcctcgctggtcagtagtgttcagcagttgtccaaatgagatcaactcaacagttgcccttttctttgaaaatctgaaatcttatctttaccacagataccttctatacttgaattttcctctcttccacttacccatatgcaggtccaatctggtgtaagtaccaaagatctgtcatatgtttttctaccaagcaaggcaaatactcccttgtttctttctacagcattttcctgactgctcttgcatgtggattctttcacattgaccttagcatcatttgttcaaatacttaaaaaaaattatcttactaaaatgatagcttaatctacagaaaactgacatctatgttaacttcctattcaagaataagatgtttccatttatataaatattcttaagcatatttcagagatatatagtttcttcatgtaag

SEQ ID NO: 213125 - DNA, 295 bp, Homo sapiens
gtctctaaatcagtcaatgagatcactggaaggcgctctctgcgtctcactttccaagagggtctctttgggccaagcaggcatggtgcctcacgccagtcatcccagcactttgggaggctgaggcgggaggaaagaaggaagggaggaagggaggaaagaagaaaagaagaaaggcaggaaggcaggaaagaaagaggggaagagagaaaaagaaagaaagaaagaaagaaagaaagaaagaaagaaagaaagaaagaaagaaaagagaagcaaaaagaagaaaagagaaggg

SEQ ID NO: 213126 - DNA, 558 bp, Homo sapiens
gagctctcattgtgccactacactctagtctggccaacaaagctgagaccccatctctaaaaagaaaaaaaaaatgcctttggtgtggagaatagactgggcttcggggtcaacccaccacagctgtgatccagcaatcagaaaactgctgctggtgaaatagccatcccacacttaccagacacctaaataaggaaactgtctactgcaaaacctcactcctgaaagagcttgtcactgctgcaggaagaatggcgtctatcccttctaccttccagattttgctcaaggcattccaacatttaagaagaggatgatagaacagaggagaaggacggctaatgaggttgtggaaaatctaggacaaagaggtgtcccagaggtcaaagtaaattaaatatttctaagagagtgattaattgaatcaaatattgatggctgggacatggtggctcacgcctgtaatcccagaaatttgggaggctgaagggggaggattgcttgagcctaggggtttgagaccagcctaggtaacatagtgagaccctgcctcagaaa

SEQ ID NO: 213127 - DNA, 449 bp, Homo sapiens
gagctctcattgtgccactacactctagtctggccaacaaagctgagaccccatctctaaaaagaaaaaaaaaatgcctttggtgtggagaatagactgggcttcggggtcaacccaccacagctgtgatccagcaatcagaaaactgctgctggtgaaatagccatcccacacttaccagacacctaaataaggaaactgtctactgcaaaacctcactcctgaaagagcttgtcactgctgcaggaagaatggcgtctatcccttctaccttccagattttgctcaaggcattccaacatttaagaagaggatgatagaacagaggagaaggacggctaatgaggttgtggaaaatctaggacaaagaggtgtcccagaggtacaatcttccggagagatccaatcattccggagaggtccaatcttccggagagtccgatttccgg

SEQ ID NO: 213128 - DNA, 556 bp, Homo sapiens
aaatagaggggagacctccatctggatcacagccacaaaaaaagatcttgtggtggtaaacacttaagagacagtggtgaggggtagggataactggaggcacactttctgcctcagtagcttgttcttgcacctcaaaaaagtattcacaaacagaacagtgtaccacacttctccagtgtttctccaggaaaatatctccagaggagttgatcaagaaaagtctataaatcatgatagactgtgattgtcaggtgagaaaggaaagcctttttcagtctgaaagcctcaggactctgcagattttcaaccccatctttcaagaccaggctcagtcttcctctactgcacgagcctgaagtatccctcccttgaatacccggcctcactcctcggagcacctgatgcttgctccaccttatgaacaggtcccaccctgctctgctttacatattttttaactgactttatatttgaaatttgaaattaccaatcccacaaattttggatttttttgttttctttaaatatatacatatatataaacagaaaaaaa

SEQ ID NO: 213129 - DNA, 283 bp, Homo sapiens
agcatattggtaaagctcagtagaagctagctcccgggattcctatgtgttatgcagaaacctgtgggtatccagcagattttatcacctagtaaaagaaatgagcatcttatggtgactggactcagaatgataggttttgttgaagaaaggagagatggaattaagaatgtaacaacacctgtaggtggtcaggactttcaggtgagctctgcacgggaagggccaaggcaggacaaaatcagccagattatcgagtgatcttgctgagataaatacaaat

SEQ ID NO: 213130 - DNA, 611 bp, Homo sapiens
aagtgctgggattacgggtgtgagccaccgggcccggccaagttctgcaataatctttattggtttccctaaaccttttgcaaatgatccctttgctaaatcgcctcaaattacccagtttgagtgtaccatgtcctttcttctaggactttgatacataggagaagaacaatgtttttttttcaggaagattaattttagtagctgtataatattctatagtgccaatataccaacaataatagcaattacttaatgtgcatgtcaggtgctttatagacatcattttattcagtaattagcacctccagagattcgtattttacagatgaggaaagtgacttcagggaaggctgaaaacttatttgcctgaggttacagagctgacaagcagcaaggtcagtcttcagaatctgtattcttcccactaaacccagtggttccaaagcccagctaatcatgaaagagaaaaatctggctggcacggtggctcacgcctgtaatcccaacactttgggaggctaaggcaggcagatcttttgagcttttgaccagcctagccaacctgggaaaaccacatctctactacaaatacaaaacttagccaggtg

SEQ ID NO: 213131 - DNA, 573 bp, Homo sapiens
atcttcaaatatagtcaaatgcctttttattttttaattaaaaaatcctttgtaaacaacaatgagataccagtgtaccttttagaatggccagatccaaaacactgacaacaccaaatgccaaggaggatgtggagcaatgggaattcattgctggtgagaatgcaaaataatatagctaatctggaagacagtttggcagtttcttacaaaactaataagcatactcttaccatatgatccagccatcatgctttttggtatttacccaaatgaataaaaaacttatgtctacacaaaaacctgcacatgaatgtttatagcagctttattcataattgtccaaacttggaagcaacccagatgtccttcagtaggtgagtggataaataaactgtggtacatccagacagtgatgtgttattcagtgctaaaaagaaatgagctatcaagctatgaaaagacatggaggaaacttaaaatgcataatactaaatgaaagaacccaatctgaaaagactacacaccgtatgagtccaactaaatgacactcgggaaaaggcaaaactatgg

SEQ ID NO: 213132 - DNA, 459 bp, Homo sapiens
tcaccccctggataatttcagtcagtgtcagtgctttaaatactcttggccaggtccatggatcagcagtctccagcagtctagcagtaagaacagtgtttttctcccaagaataatttcttgggaatacgttgttgttttgggattgggagaatgtctctctaaaattccaagtaagcaccatgctttgctgaatttcagcaaatggagcctgtactgcctttttagtgaggattttgccttactaagctggattcctgctggttctttttcattattgcagcagaactggttcacatggaggactttcttccatgtaacattgatctcttaaagaccgaatctaatgtgcaaccacttgacataatgaccacaggagaagcacagaaagcaaatggagagctttgcattcctgctgtcactggtcatcatcatccaggctgcctaagcctccttgga

SEQ ID NO: 213133 - DNA, 478 bp, Homo sapiens
atgttaagtttattactagtattcaaaaacttaagaccggataatggagatttggcaaattacctttaagtgctttctgttgtatgttccatattgtggaaaagatacaatcaaattaggaattgatattgcttctttaaataaagaagctattaggctaccaagagtaatttagatgagtattccagatgttcagtacagtgacaagcttttcagtaaagaacactttgtgtctttagaagcttacagaaattagcgtctgtcttacagctgtagttttagattgaactgcggaaagtggtttttatgaggtgttaccgcaggcagtgttatgatggcagttggattgcttactcacaatttattatttgcctagtcttgagtaaatttctaaaatataacacctgtatcctgtaagcaagcattgctttaattaaggaagaaattatttgctcatttacatttgtgtaatataaca

SEQ ID NO: 213134 - DNA, 226 bp, Homo sapiens
taagattgcattaaaaacctgattgtgttcacttggtgaggagaattttttgagcactgtgcttacgatttgtgtatttttctgtgtattaattttcaataaaaacatttttaagtggatgtaatcaaacaaaagtagttgagtcaactgggtaatgaacattacatatttttctatactattctctgttgtgtatatttgaaaatctccataataaaaacccttt

SEQ ID NO: 213135 - DNA, 253 bp, Homo sapiens
ttttttttgagacagagtctcactctgtcactcaggctggagtgcagtgatgtgatcacggctcactgtgccttgacttcccgggctcaatggatcctcctgccgcagcctccctagtagctgggaccacaggcatgtgccaccatgcctggctaattttttaattttagttttgtagtttcttacaagttgctccttaaattttctcttggtcgctctgctttttgctttttaacccttctgtcgtcttctc

SEQ ID NO: 213136 - DNA, 835 bp, Homo sapiens
gtgtttttcaacttcaagtatgcttggaaaattattaagccaaggctattgtgattatacctgttagacttttattctatataaattatctaagccaaatggagtccaaaatactgacccttgactgccagttagaatagtccctaatcctcaatcatgtgctaaaagagacaaatgagctagatttgagtttgaaaactaccacctctgaataaaaaaaaaaaatgaagctgaatatgcattttggaaagacacagttaatgcaaatggtagagaaatgtggaatactattctaaactgcttgtgttcactgcttcccgagtacagacacttgcaccaagatacagagacacacacttattaactcacacgtatggatcagaatgactaaacattttaaaatcaggaaaaacaaaacccagtagattctgccccacagtctgtatagtgcacacacacccactaatacacacccttgaccagtgtaagatccagaagtgcttaaacaattttgtaggcataaattacaaattaatgaaacctgccgaaggcagacacgtaaagacacaatgttcaagatataagcattgaagcaaggcagacacctgagaaaaacagtcagaagttcccaaactgaaaagattgtatcctggacatccaagcagatgaaggattcagggcgaacagatttgtatcctggcaccagagcagatgatgggtttagggaccgcagcggtccctaaagaccattccctctagcatccaaatttctaaaaattaaagcttaatggttccaattctttataaggttgtcctttcagtgggcaaagcattg

SEQ ID NO: 213137 - DNA, 335 bp, Homo sapiens
atgattgagtagctttgctcaagctctggcaaaatttgatcatcctagaaatgagatcgctcacttgtcccactcggaggaagctcaattaacggcgtcaggcgcggtcagcccttcaccagtgcaggaaggcggcagccctgagccacacagcagtgccaggcctgcagtcctgacaagggggtgtcagaccccagccccgagggaccacagacagccctctgacagatgattcagtgtgggaccaccgcaaaaccacgcaggctgggcaggctgggtacctccaaccttttcccatttgcctaaaagtaagtgaacataaaattgaaaactct

SEQ ID NO: 213138 - DNA, 621 bp, Homo sapiens
aaatgactgtattttcaatgtgtcctggtttcttacaaaacctcaaaagcactaacacttgaaactgaagatgaatcaagcatcatccagtcatgagccatatgttcgagtctagtatggccggatgacacacagagccaagaggggctgtgtgctcctggacaaggtgctgccctgcccacctcgaccagatgagatcaagtttttttcccaagtgtgacatacacacatggaaaattttaagggttatctacaccttacattacaccctgaatcacattgagaaagttatttcctttgattctcttgtaaacctgatgacttcaaagagaaagtctctgcgtggtgctggtgggtctttaacacctcaccaacacttgccaatccctttctaacaaagggagcaggcctcaagcctggggggccttcagcccgagtggtaaccacctggaaacaacactgttttgttttcaatgtgtttatttttgcagtttccttctattatatttatggccaggggagctgggttttccagttgccatactcttgtcagttttcctttcaaaacttaatttaaaatgcaaactgattcaaaggaaattattatggggtgtgctttca

SEQ ID NO: 213139 - DNA, 277 bp, Homo sapiens
ccacttggtcaagttcatatgtctgggtttgtggaacctgttcctgttactgtccctacgcatcttgcttttccgaaggaccttctacccatccaatgttagcccagtctgctatgaggacatgggcaacaatacagcaaactggtggatgctgttacggatcctgccccagtcctttggcttcatcgtgccgctgcgatcatgctgttctgctacagattcaccctgcatacgctgtttaaggcccatatggggcagaagcactggaccatgtggg

SEQ ID NO: 213140 - DNA, 610 bp, Homo sapiens
tctgtgctggaaggtacaagacctaggtagagtcaatatcaaggtgaactgaaagttagaattgtctcattgtctcagctccctaaatcacagatggcccagtggacattcttagtaggtcccacgcccatttggtgtctttctgctgtccatacattctatgtgtacctcctgaaaggaagaggcctgtgctctggccctttaagaaccccagtcctatcaaaatttacttgtcctgagttccagaccattcttctttattgaagaagaagctagattgcaggttaggaaactttcaccaatgtgttgacatgcacattctcccaggcaactgtgtgtttttcgtaggggtcttcagaagccactgcccagatcgggggaaatatctataataatggaattttagacccatgtggcaggtggcataatacaaatttgggtgaggatggtttatgatttttcttaaatcctgtcatgaaggcagccacccatcctgtctgtgggtaaggccaactttggcccaaacctaaaatttccaggctgcatggaggggtacaggactctttctgcttcttttattggcagatcctgaaagataagattaagttgg

SEQ ID NO: 213141 - DNA, 537 bp, Homo sapiens
taccaacatttttttctatattttttataataaccatactaatagatgtgaaatttccttgtccatttttaatatcagggtaatacttgcctcataaaataagttgggaaatgttccttgcttttctattttttggaagactgaaggattgatgttagttctttaaacgttttgtataattcactggtgatgccatctggtcctgggctttcctttgtgggaagttcttgattacaagtcattctttttacttggtacaggtcttcagattttctgtttcttcttgagtcagttttggtggtttatgcttttctaggaaatgttcattttacctgggttatctaatttgttagcatacatttgttagtagtatatcttaccatatttatttctgtaaggtcagtggtaatgttttcttggcctggcgaggtggctcacacctgtgatcccagaactttggaagcctgagctgggaggttcacttgagcccaagagtgtgagaacaggctggacaacatagtgagtccctgtctctac

SEQ ID NO: 213142 - DNA, 253 bp, Homo sapiens
tttccataggcgtgcctgtggacactggagctattattttgcctatgttatagacactatgagaaatgacggtcagaacgtgtaatcagcttccgttctaggacactatcatcttgaacccaaattaaaataaatgatctaccagcatccagacttaaacattttctccactgaagccttgcttaaaattcttcagtatttcctcactacttgattattttgtgagatcgggtctcagtctgttgcccaggct

SEQ ID NO: 213143 - DNA, 684 bp, Homo sapiens
tgagaatcgcttgaacccaggaggcggaggctgcagagattgtgccagtatactccagcctgtacgacagagtgagactctgtctcaaaaaaaacttctcataaaatactgatgcgtcttgtctgagtacccccaattctgcagcagaaaaggcccaaattttactgagataccttccgagttacatattcttgtgcctcctcacttaattcttctactgtataaaaattggttctccaggttttagaatctacagctacatgcttttccttgcatttcattaggctgccagcagggctctgctttcatgagttggcagaagttgtaagcactgtttttgtggtcctccatttctgattaagagggaacagctttcctacactggagtaggtattatatagcatattatattgttattaacagttagaaaacaataataacaaaaaacactaacctttgtattttgttaattcatagtcattttcatttttttccaagtcatcttttttaaccatggttaattttgatcttgggtaatttattgcagctttatcatgtgtgcttgttcattttacaaagatctttgcaacgagcaaaaggctaaccttttaaggagggaaggattatcgggacatatggaggggtattataagaattacgcagggtacacagtttttaggggcc

SEQ ID NO: 213144 - DNA, 376 bp, Homo sapiens
tgtgcaatgtgtctcccatgactggggctccttctctcccttaacatgtcatgcgattccatccagattgtcgaggccagaacctcttttcagaagaaatttttcttttattatatatcacgaataacagagaattcaggctaatcgtatcctatttatttgtgcacagatagaaagttaatatcttgcagctatttttccttgtcctccttttttcgaccttacagagacaattcaaggaaccatttgctgttcattagtttccttaactttattctttactttaaaaagttgtttgtttgtttatttgtttgtttattttgagatggagtctcactccagcatggtgacggatggagactcttgtctcagaggg

SEQ ID NO: 213145 - DNA, 233 bp, Homo sapiens
tgtgatataaggaaatagagattagctcactatcctggccattttcttgctggacatttattactcggctcacaaacacagtgctgccagatgccctgattgtcatgacacatatattttctaggacttatttatgatcctgccccatagcttcccccacaaagggcttttgtaaacttgtagaaaagatgaagccagaccagtcccagagactcttttcttgtaggagcctt

SEQ ID NO: 213146 - DNA, 672 bp, Homo sapiens
ctgggggaagacagccatatgaagaatgaaaatgtagaaacagtggtgagggatgagaccctcagtggctgagaattataggaggctccaggtcagaccttgggaaaatatccacaatttgggctaggaagagcagcagtgatttcagatagaagaaacaaccagagaggtcagagtagaatcattacagtgacataaagcaaggtgggtagcttaagtgtcattgccaaaaagagggtaaggactggccaagcatggtagctcatacctgttatttcagcagttcgggaggctgaggtgggcatattgcttgagctcaggagttcgagaccatgctgggcaacatgatgaaacctcatctctaccaaagataacaaactttgctgggtgtggtggcgcgcacttgtagtcccagctacttggggggctgaggtgggaggatcacttgagcttgggaggcggaggttgcagtgagctggtattgaaccactgcactccagcctgggtgacagagtaagagcccgtctcaaaaaaaaaacaaaaacaaaaacaaaaaaagggtaaggactttggtgggggatcatatgatttggaacatagattttttagtttttgtttttttttgtggtcttcaagagagcagttcagagaccagggtgcatggtggtttac

SEQ ID NO: 213147 - DNA, 583 bp, Homo sapiens
ggtatcataaaatatgcttgaacttgggttaattcctcttggactgaattgtagtgccataaaccaagcttttcaaaaagattggatgcaaaactattatggcaacaggaatttttatcaacataaagcaggatttaatgcagggtgaaggatttctactgtaaatgcttcaaatcatcatcatgggggagaagagcacagcagtatttccttccaaaataatcccaagctacattggttggtaataaataatgtggttaaagaaggcagattctaagatagaattttggacctggatcacctgtagcctgcctagcaatgaagacctcatcagtggtgatagatggagaacagatacaccttggaaccagagtccaccacggagaagatgccctatacgtgtatgtaaaatgctgaattaaataacattgtttaaccattttgccagccacagaaataaactaacttaaactcatatgtagccctggtacataatgcagtgtctggtatatagtaggtgctcaataaaggtctgtttaataataataataaatgtctgatggataaagtaaagataagcatt

SEQ ID NO: 213148 - DNA, 515 bp, Homo sapiens
agccattggagagcagacagctctgggtggtcatgttctagtagcagaaacccttcaggaattcagacagtacccacccattgactattggaagaaaaaaaaatctgggtcaagatgagaactgacagagaaaaaggaggaaagaagacaaatggagctcagggcagtggtgatggtggaagtgcatctattaggacaattacccaagcagcaactctggattcctccacttgcttacacggtgtctccttcctttccttccctccccagcccttgtctctactgaacatctgtcaacactggcctcaaccactagattctatcattgtggttaaaagctgagataagcttggactcaagtcctactccctcctcttgcttgctagctgtgtggccctgctgtgtcagttaacactaagtctcagttcctcttctattaaacagcgttaataatgcttattgtttccaaaaaattgaaatacattttgtacataaagtgttgaacccaatgccta

SEQ ID NO: 213149 - DNA, 324 bp, Homo sapiens
catcaggtgacagtatgagttggaaaagggacgggtgtagccacaccaggacaacttgtggtcagaaggtcaggtttcaagggccggctccgttactggctggatgcatgttggtaacctcataatccttagattctcacctgtaaaatgaggacagtgggaaagctaccacatgagctatgagagcatctatttatattcttttatagcacttttatagcacttgctgtgtgccaggcactgttgtaatcactttacaaacatgaactcatttcatccttcttaccacgctatgccgtagttactattattatccctatttta

SEQ ID NO: 213150 - DNA, 451 bp, Homo sapiens
atttgtctgaatcctgacaaaatgtatactgagggtagcaaaacatatttgtgtatacaggtaagctacacttcattgattcatttctctatttaacaaatttttattgagcatatgttatgtgcttaaaacaggagataagtagtaaacaagaaaaatgaagaagatagtgatgatgttgataatgataataacagctagcctgtattgagtgctacccatgtgtcaggtatttatgtcgattaatcctcacgtaacaatatgagtcagattctaatatcattccactttgcaagtgagggaatagatttagagagctctcacagctaggaaataatgcagcctgactcaaacactgcaattctgactcccagggccagattcctaactaacaacatgcaaatacattcattttcctcatggagcatatgttccagctacccatttattt

SEQ ID NO: 213151 - DNA, 428 bp, Homo sapiens
ttacatttacatctatggtccatttaattttttatgaagtgtgagatttaagtggagggtaactgttttccctgtatctaaatgctccaacaccacttgttgaaaagactatcttccactgaactgcatctgcatctctgtcaaaaaatcgtttggctgtacttgtataggactatctctagattctctgttctgtaccattcatgtatgtatctatccctcaccaatatcacagtcttgattactgtagttataagtgttgaaatcatgaagagttttgtttttggtgccttcctgtggattatctcaacattttttagaattctacgttgatttatttatagtgtttctgagtgtaactcttgtttgatctttttctaccagttgttctaggcattacattatatatacagaacttatcatagcct

SEQ ID NO: 213152 - DNA, 471 bp, Homo sapiens
tgctccttaatgggctctgccctgagctcagtgatccaactggaaaacagactaaattaaaagctacttatctaagtgaaataggtctccttataaaatccaatgatagattcctgtgattttgtattaccttggcatccatttttaattttcttccaacacacccaaactcctccttgaaaaggcttaaattctttctccttgtactttgagatataaagttactactgcattttctctaaaactcagtacgagcttcagccatgtggaacagataaactttaaacttttccatttacaaaggtacagtttgaatccaactgtccttgtaaaactagtgagttttaccagtctcatgactaaaatttttttctctgcttggttttgttttgtttttcttacctcagttcaccagcagtttcaatgtggctaaaattttttaattaaagctatgaagtcataaaatgtgtc

SEQ ID NO: 213153 - DNA, 233 bp, Homo sapiens
agagagcagatttatggtgggggagataatataagtttggcttgagttataaaatgattaaatagcttcacatgcttttttaaaaaaaaggtactgatagagctgaagctagtttcttatttcatctcctttctttcatctccagaagtaactgctgtcctgaagttatgtgtgttgttcctgtttcatactttgaccatatatttatatatccataaacaatgaaaagcatt

SEQ ID NO: 213154 - DNA, 542 bp, Homo sapiens
tattgtactgaggaataaagctttaatttagagcatgtctcagtcaacaaggcacctgtgtaaacagccccctgctcaaaaggctgctgtctggactctctccacaaacactcagaggctccagccagcaagggaaagccaccctgtacagtttggaagacagctctttgaaaacccattgtggatgtcacagtgatgcattgccttatcttagggatggagctctgccgaggacaaccagttgctgagaggcaaagctcatcattttgaagggctaggtgaaggcccatttaatttcctccaggagaaaatgtcaccaccaccattggtaagcacaggggatgcagagtgaaatttggctacatcttcatacagagttgctcctagaagagaaagacatgatttatgactgaagagccagtattttcccctaggaaatttatttcatttatgaataaaaaaagggaaagatatttaaacaagaaatttcctagttttgttgatgatctgaaaacctcccctgccacttcggctgtaataaa

SEQ ID NO: 213155 - DNA, 123 bp, Homo sapiens
aagctttctgagcaaactcccagagcacccagggcagaaacaggcggctagaagccgggcaacgcgggtgcagagcacagacccacgtccatggttttcctaccagacgggcctggcagcgga

SEQ ID NO: 213156 - DNA, 487 bp, Homo sapiens
tgtgaaccgcacaccgtagtagttttatagttttgggtcttacatttaagtctttaattcattttgagttgatttttgcataaggtgagagataagggtctactttcttccttctatgtgtgaatatccagttttcctagtaccatttattgaagagactgttttccccagtgtatattcttggcatcttcgtcgaaaatcagttacctgtaaatgtggaggtttatttctgagttctctattctgtttcacttgtgtgtttttatgccagtgccatgctgctttggttactatattaatataaggagagtcttgcagtatacactgttttgtgtctgacttattttgctcaatatcatgtgtaagaatcattatgttgttatgtagaattatagattgttcgttctcatatttatagtgttccattgtatgactagattattgcagatgaactttttagttgttttctggctttggttattatgaa

SEQ ID NO: 213157 - DNA, 257 bp, Homo sapiens
ccactatgttggtggtaattttttacagcaacaacaggaaactaatacaatctctgacacctttttaatctcctgcagcttctaacacagtgtgttgcacagagtcagatatctcttgtagctgatcgctctcatcacttcctctttattctctcagtgtttaccaccctgcccatgctggaacaggactgcagtggtcaggatttctctatttgcaaatgacagaaatctaacacgaactagcttgagccaattta

SEQ ID NO: 213158 - DNA, 443 bp, Homo sapiens
gcctccgggattgggaggagggagaggaagtgggcagggcagctcccgaaacaaggtctacagtttaaggatcagtagttcatttattctgataatcactgtttagttttatgtgacattcttgtattcgacctagaaatagagtaatggagattttaaggaaacctaaacttgttattgctacaactcagaagggtctgtggaagagccctcggaacctagcaaaactactttggttttggggtgtgtgtgtgtgtgtgtgtgtgtgtgtgtgtgtatgtataacatttaaacgaaaaaaaaatatatgtgtatgtatatattttatatgcatatataaacacatatatattcatacacacacacgtatgttttctgtttaaatggattcaattttagctatattttggtgccctgagctctgaacgttaaaaaaaaaaaaa

SEQ ID NO: 213159 - DNA, 171 bp, Homo sapiens
cttgccaagagttaagtggatacagatctcctaatagctgaccttctagttgactgaatgggatcatgtaagaaagacacctgctacgttgtcccagtgaataagtttgtcatacaatacagaggtctgtggaccctcgagaaagaaacatttattacttggcacatcatt

SEQ ID NO: 213160 - DNA, 429 bp, Homo sapiens
cctgtatggaaaatgaggatgtgctttgtccttctggggaccagattctgggactcttatggccattctgaagcacttacccttgggtgaaactgcagtgtcctcactatgatatgggcataacagcagggacctgtgtcactgaattactttaaggaacaaggaagccatgaacataggttgcagctaaaggtgagccaggctggctttggccagctacccacacttcccctgccctttctctttccttcccccttctcacctctcagcagccccctcatcccccctccaagttaaagattgctgtttaggctgtgcacagtgactcacacctgtaatcccagccctttgggaggccaaagtgggagggtggctggagctcaggagtttgaggccaccctgggcaacatagtgagaccccagtctaca

SEQ ID NO: 213161 - DNA, 342 bp, Homo sapiens
tcttctctcctctcaaccattaatagctcctttcctttctccccgatcccagtgctgatgagagaataaaaatcaaccagaaggaaatgtctaacctttctccctacctggtctactaatgtacctatatctgtacccaggtactctgctggacttcagttattaatatgccctgttattatctaaggacagtcctcacttattgaattcacatcctgccttccctacttattgccacctctagcagtcatcccttctctcttctgcattgttaatgattcctctttctttaccagatcattcctatcagcatactcacatgttgaaatagctcccatcttt

SEQ ID NO: 213162 - DNA, 366 bp, Homo sapiens
atgagctctttcaactatctcttgtccctgtgagttatatggaatacttgtagtatgagtaatatttcactgctgttaaaatgcagccatggctgctgggcgcggtggctcacgcctgtaatcccagcactttgggaggccaaggcgggcggatcacgaggtcaggagatcaagaccacggtgaaaccccgtctctactaaaaatacaaaaaaaattagccgggcgcagcggcgggtgcctgtagtcccagctactcgggaggctgaggcaggagaatggcgtgaacccgggaggcggagcttgcagtgaaccgagattggtcactgcactccagcctgggcgacagagcaagactccgtctcaaa

SEQ ID NO: 213163 - DNA, 426 bp, Homo sapiens
aatagtatgaatagaatttccgtagataaagatttccttgatctagtatgaggaagtgagaccttgtaccagctgttgataccagatatagaattttggttgagttttaagccctatttataccagaaagctgtagttttaacttaagatgacttagacaatgaaaacgctactgggaaagagatactaaaatgttcacagttttgactgacagaaaaactcaggagaattgtagaactttgaaataagtcagataaatcctttctaggatgatgggacagagaaattgtaaaggtttaggattacctgtttactgcttagaaaaaaataaaaaatacacttttaccaaggccagtaagaactattttctggaacaaacggaaaaagctggataatgctactgactgagttaaggggataagccac

SEQ ID NO: 213164 - DNA, 401 bp, Homo sapiens
cagaggcacagagaggctaagctaagttacttgcctaagactttacacctggaaagtgaaagagactagatttgaactcggataatctggctgcagagccagcccattcctgactatcactctatgctcaatgaggtttataacagatataggggtctcaaacagtctaatattacctacctgcccttataatgtttaaaacttgtcttggctggaaggttaagttttcatatctcttacctaggtttggaagcaagggcatactgcttctttagattttcaccctctttcaaatgaattcccacttttaagctccaaagtgttttcccctcccccaccggaagaagaacaatctaaaagagtgacagagcaaacattaaagtattgtaacttcccacttt

SEQ ID NO: 213165 - DNA, 195 bp, Homo sapiens
gtattatttaccctccaccaattcttttatctgagctcacacagacatcactgcacccaccatataggaaatgaagacactgctgtcgttctagaagggacagggatatacagttctaggagtgtgacatggcagcagcagagacgacaggaagcagaggctggctggggactacatctctggcatatgtcaatc

SEQ ID NO: 213166 - DNA, 823 bp, Homo sapiens
cctgagcctgaaaagtgctgtcacgtcagcggaaggaggcgtcccagatcttctcagctgtcttggtgccagccttcctagtcttcctacccacactcctacctgctgtcacaggccacagccatcatgcctcggggtcacaagagtaagctccgtacctgtgagaaacgccaagagaccaatggtcagccacagggtctcacgggtccccaggccactgcagagaagcaggaagagtcccactcttcctcatcctcttctcgcgcttgtctgggtgattgtcgtaggtcttctgatgcctccattcctcaggagtctcagggagtgtcacccactgggtctcctgatgcagttgtttcatattcaaaatccgatgtggctgccaacggccaagatgagaaaagtccaagcacttcccatgatgtctccgttcctcaggagtctcagggagcttcacccactggctcgcctgatgcaggtgtttcaggctcaaaatatgatgtggctgccgagggtgaagatgaggaaagtgtaagcgcctcacagaaagccatcatttttaagcgcttaagcaaagatgctgtaaagaagaaggcgtgcacgttggcgcaattcctgcagaagaagtttgagaagaaagagtccattttgaaggcagacatgctgaagtgtgtccgcagagagtacaagccctacttccctcagatcctcaacagaacctcccaacatttggtggtggcctttggcgttgaattgaaagaaatggattccagcggcgagtcctacacccttgtcagcaagctaggcctccccagtgaaggaa

SEQ ID NO: 213167 - DNA, 1481 bp, Homo sapiens
gtgcctccaaaaaccgtttgtggagacagcagagtgcccgaggcaggaaaccgctccggcctggaggcgcccctgcccggactcgtggactgcagcgctgtcccgctcggaagccgatcctgggagtccgagcggggccgcggggcctgcgtggcagccgagtcgagggcttcgggccgcggggctgtggagcgccccttggcgctgggccgccggcagccgtgagcgcatcactgcatttccctggaggaattcctcatctgttgaatgagggagttgaggcggacacgctgggaaatggcttcgagctcacacactgattttcgtgagtggaaagagaagccctttcttaggcgtcttccataccactgcatgttccagggtcctccctgggctctctgtctcccacgccaccgcgagcacggcctaagcgggcgagcgaaggcgcgacggcgccgagagccggctgtggtgggtgccgggcgcgtcaccgcgggctggcgggggaggggacgctgggaagctctccagaaagaggagccgccaccgagcaaattcccatctgccacgcaccgcagagcctcgccctccgccgccagcattttctttctttgttctcctagccctacaaacgctgggtttcctttctcattcgtggacttttttccctggatccttcttactgctcctaccctgtggccgcacgtctggcagatgcgcggcgggcgctgcctgaacccccgaatcctcacaagcctctgtgcagcggccacggccctcagctagcggcggggagactgaagccgcagggtcagggttagttgccacatgttttaaattcctatccaaacttccattataattgtttttatttatttattcatctattttttgagacagggtcccgctctgtcgcccaggctggagtgcagtggagcgatcacggttcactgcagcctccccacctccgactccagcgatcctctcgcctcagcctcccgagtagctgggaccacaggtgcatgccaccatgcccggctaattgttaatattttttttggtagagatggggcctccctctgttgcctaggctggccttgaactcctgggctcaagcgatcttccagcttcggcctcccaaagtgctggcattacaggcgtgagtcaccccgcctggcaagaattgttgttttgaaactaactgaggttctcccatcaatggatttaaattgttactttttaatgatttttttttaagtagccaaatactaaatgtatgtaatttgaatgtggagagaagataatgcatgattcaaattatgtggctgatcatgggtgatacactgggatatagttgtaaaataagtagttctcctagggaaaatattaaagtacaactgtgttgggtttaatatcagaaaaatgtaattaaaaacatttcctgccaataatttccaatctgatacttaaacaaaacaaaa

SEQ ID NO: 213168 - DNA, 451 bp, Homo sapiens
actagacttcatggtcaccctggccacaggtaccctatcctgcatcctgagctccgctcttcctggagtcatgggctggtctttcctcctggtggccttgcgccccagctccagcttcctgacttttctcttctggaaatgggaatgccaagtcctatttcatggagttttgagaatgaaatgactggtgtacggtgcaaagtgcctgtgagtgcccaagaaatctcttttattaacaagacacgaattcattccaattgatttgacgggccactgttgtcacagcagccgcactgccccaaaggcagcagtgatgtttgagcgccgactccccgacggcacttggtcctcacaaccaccccatggagttcatgctaagatcctcgcatttcatttgtgtggcagggacttgctgaggtccggggaggggcagagaggaggggtgcggccg

SEQ ID NO: 213169 - DNA, 366 bp, Homo sapiens
tgattggaggcattgaagtcggcctgtcccacttccccttctttgcctgcctctcgtcggagttccagctggtcagctccatcttgggcttctgctactctgatctggtttgctgttaccattctgatgttggagcggccgccaacttttttggggttttcagtcctatcaccatggtcaagttgctgtgtgatcttgaacaagcctctgtcactactggggctccactttttcatttgcataaaaaggtagttgttgtcgttcgtgatgcttccatttgtagagcaccccatgttcatcaaggtgtgcattcacagacaggtgttttctcatttactcctcagaagtaaagcttctgttccattg

SEQ ID NO: 213170 - DNA, 516 bp, Homo sapiens
ttttgattaatccattctcttcaaaaataaaatagttttaaggaaaaaaataagatttataacctgcactctttataagaatcaacatatattaccatgtaaatctcacttcattacaaaatatcctggcgagtctgtacatttggttaaaggtaagcacaaaaaaactacaatctcttaagtgttcataaaccaatagtttaaaaatatcctcaaatttttttactgaagttatatatgcattaataacaaatgaaagtatttatactatacgcatgataaattctgaataaaatgtaaaattttcttaattaaaacatgtctggcattaagtgatccaattagatcttagctaactgatctcagaagaatcagatgataatggaaaacaggataacctcatggttttttaaaattatgtatttaacttcatttacctaggtttaatttgatagactacctgtcaaggaaaagcctctggggaggagaaagaggggctaaatctcaagttgatca

SEQ ID NO: 213171 - DNA, 334 bp, Homo sapiens
aaaaagaagagatagcaatacaataaagttttgggtctgaatccttaaggattttttagttttattttatttgctttgtgttttaaaattattgaatgtatctgatcagagcagttcttcctaaggccacagaatttagacttgataaactaaacatacacctaaatcacataaaccaatttctttgtcttacaaatgtaaaaagtgaagctctagcagaggtctgctggaggtggctcatactggcttgtgagtgtcaattgttaaattttcaggagtcttatgagggagctgatttgcacagccatcattaaaaattgttatgtaaatttat

SEQ ID NO: 213172 - DNA, 815 bp, Homo sapiens
aattttcttaatgacaggaaagtaaactggtaactaaaattcattttgttctgtaggtttgtggcattttatgtggggaatgtagatgctaagtgttatgagttgtccacctgtataaaactacttcccagaagccttgatgttcccataaagagctaaagacaaaaccaaatcaactgctaacaccttttatgggagatcaacttgtgtgggttatgaggcccaccttgactaagcaggatatgtaggtaaacctgcccagttggaattagtagctgatactctaaaaggagaatggtgaacaggaggccattagcagaaacagcctcattcatttatagagatcatcttgttaaaagggaaatcagcttccctagatcccaagggggtattgaaaatgctaggagagagcctagaaaacttttctgtgcagattgtcagaaaaaggtgaaaatattttcttttactgtaaaaagaaagaaattcttttccttcttccaaagatgccttaccacctttgaaaaagatttttaaaagtctcagagaaaatgaaatatagattcttaaagtggaaagggaccttaaaaatccatctggtctggttcattttatagatagaactgagaacctcaaaaagttatgtaatttggcttacatcacaagagctagtttgaagcagaagctacgattttcttactgtgtccagttgtttggaagtatgaatagtcatcattaaaatgtagggagtttatagggaagcttatgacaactattagttaatttacaatttgttcactgtagctcatctgctttgt

SEQ ID NO: 213173 - DNA, 395 bp, Homo sapiens
ggatgcagggaggaagattccagaagaaaagaagagttaatatcaaatcattctaggcctcactggtaaccccttccccagtcccatttaggacctctaacctcaccaccccctaggtggggggaagggcctgagcctcccaggctaggtcttgctgggagcgcatcttaacaaccagtggagagggcaaggtggcagtgaagaagacagaaaaacagcagggtcccagagcctgagccatgagggcaggaggaccaagcatgacttcctgaggaccagagtgagcacacctggcctgctgtgctctaggtcctatgcaagacacttggctgtgttctttaattctcacaataatccatttaaatctcactacaattgcaatttcacagataagg

SEQ ID NO: 213174 - DNA, 168 bp, Homo sapiens
caataaggcatctgctatgcattcaaaaacaaatatcaaatgtaattctccagaaatttcttatggattttatgtagactagagactatttgtatcttttaggagacatctttcttagaacaaaggtatatacatgtttattattttggtgcatgaactttttcaaag

SEQ ID NO: 213175 - DNA, 1166 bp, Homo sapiens
  misc_feature (1166)..(1166): n is a, c, g, or t
agcgggggtggggccaagcccaagcctggcgcgcagagtgcaccttcctgagctcgagcggtccagcgccaagttcggggtttggggttggagcggctggtcacgtggctggcccgcggcggtgcgcggggcgttgggtcagcgggtctgggactggtggcaccggcggcggcgtaggacggaggcgtcgctaggcagcttcgaaccagtgcaatgacgatgccagtcaacggggcccacaaggatgctgacctgtggtcctcacatgacaagatgctggcacaacccctcaaagacagtgatgttgaggtttacaacatcattaagaaggagagtaaccggcagagggttggattggagctgattgcctcggagaatttcgccagccgagcagttttggaggccctaggctcttgcttaaataacaaatactctgaggggtacccgggccagagatactatggcgggactgagtttattgatgaactggagaccctctgtcagaagcgagccctgcaggcctataagctggacccacagtgctggggggtcaacgtccagccctactcaggctcccctgcaaactttgcttgtgtacactgccctggtggaaccccatgggcgcatcatgggcctggaccttccggatgggggccacctgacccatgggttcatgacagacaagaagaaaatctctgccacgtccatcttctttgaatctatgccctacaaggtgaacccagatactggctacatcaactatgaccagctggaggagaacgcacgcctcttccacccgaagctgatcatcgcaggaaccagctgctactcccgaaacctggaatatgcccggtacggaagattgcgatgagaacggggcgtatctcatggcggacatggctcacatcagcgggctggtggcggctggcgtggtgccctctcccatttgaacactgccatgtggtgaccaccaccactcacaagaccctgcgaggctgccgagctggcatgatcttctacaggaaaggagtgaaaagtgtggatccaagactggcaaagagattctgtacaacctggagtctcttatcaatctgctgtgttccctggctgcagggaggtcccacaacacgcattgctgggttgctgtggactaagcagcaatactn

SEQ ID NO: 213176 - DNA, 1146 bp, Homo sapiens
  misc_feature (1146)..(1146): n is a, c, g, or t
agcgggggtggggccaagcccaagcctggcgcgcagagtgcaccttcctgagctcgagcggtccagcgccaagttcggggtttggggttggagcggctggtcacgtggctggcccgcggcggtgcgcggggcgttgggtcagcgggtctgggactggtggcaccggcggcggcgtaggacggaggcgtcgctaggcagcttcgaaccagtgcaatgacgatgccagtcaacggggcccacaaggatgctgacctgtggtcctcacatgacaagatgctggcacaacccctcaaagacagtgatgttgaggtttacaacatcattaagaaggagagtaaccggcagagggttggattggagctgattgcctcggagaatttcgccagccgagcagttttggaggccctaggctcttgcttaaataacaaatactctgaggggtacccgggccagagctggagtgcagtggtgcaatctcgtctcattgcagcctcaaacccttgggctcaagcgatcctcctgcctcagcctctctgtagctgggaccacaggctcccctgcaaactttgcttgtgtacactgccctggtggaaccccatgggcgcatcatgggcctggaccttccggatgggggccacctgacccatgggttcatgacagacaagaagaaaatctctgccacgtccatcttctttgaatctatgccctacaaggtgaacccagatactggctacatcaactatgaccagctggaggagaacgcacgcctcttccacccgaagctgatcatcgcaggaaccagctgctactcccgaaacctggaatatgcccggtacggaagattgcgatgagaacggggcgtatctcatggcggacatggctcacatcagcgggctggtggcggctggcgtggtgccctctcccatttgaacactgccatgtggtgaccaccaccactcacaagaccctgcgaggctgccgagctggcatgatcttctacaggaaaggagtgaaaagtgtggatccaagactggcaaagagattctgtacaacctggagtctcttatcaatctgctgtgttccctggctgcagggaggtcccacaacacgcattgctgggttgctgtggactaagcagcaatactn

SEQ ID NO: 213177 - DNA, 486 bp, Homo sapiens
tagaaaacagctgctaccatgatgacgaagctgctgaacgaacgtggtagaccgaatcttccttcaggatatcaagaaaccagactgggatgctgggattacaggcatgagccactgcacctggcctaggattaactattttaataggcatttaggaagtagaatgggtagatatgggaattcagggagaattaggggaaggtggatagaaaagaggctaaactgattttcttctataatctttggaatcaaacgaagaagggcaaatcgattattcttctcaggaaaagattttctttatctttaaacgtataggtaaattagctgtcttctacctgataaatttgttttctgtaagttttgtaccttttttaaaaaaagaaattatttgtatcattaaggacttaaataatatacatggcatgaatgtacatctgcccatgaatgctgaatttattctagaaaatattgctttgcactctttga

SEQ ID NO: 213178 - DNA, 435 bp, Homo sapiens
  misc_feature (433)..(433): n is a, c, g, or t
cgactctagaggatccccgaatccagcaaaacattactgtgtacatatttatagagtacacagtgatgttttgatacatataatgcataatgatcagatcagggtaattagcccatccatcatctcaagcatcatttctttgtgttgggaacattcattaccctccttttagttatttgaaagtatgtaatatattattgttaactacagtcatcttacagtggtataaaacaccagaacttactcctccttatctagctataattttgtactggatttttaaaaatatggtaactagctgccatcctggggtatctcttttccaccttctcctcttttatgaggaaatgcctgtcatgtcttccctgttttgttttgttttggtttggaatgttttgctggattcggggatcctctagagcgaccgcagggngc

SEQ ID NO: 213179 - DNA, 665 bp, Homo sapiens
ggatgagttatgatgtgtgtaaatcctattccattgctgaaatgcagtgtggaacacaatgaactgaactctgagttatgatgtgtgtaaatatgtacatttgtctttttataaaaagtaaattgttaaaaaaaaaaaaaaaaaaaaaaaaaaaaaaaaaaaaaaaaaaaaaaaaaaaaaaaaaaaaaaaaaaaaaaaaaaaaaaaaaaaaaaaaaaaaaaaaaaaaaaaaaaaaaaaaaaaaaaaaaaaaaaaaaaaaaaaaaaaacttttgggccctttggcccaaattatttttaaatttggaaaattttttcattgggggccaatttggggctacttgggcaaattcccctttaggggggggttttaaaaattaaagggcccggttttaaaaaactcggtgtgggaaaaaccgtgggtttccccaatttaatcccttttgaaaaaaaccctttttacccgatggggtaaattccaaaaggcccccaccatttggccttttcaaaaattggccaacccttatgggcaatgggaatttggaggcctaaatttttggtaaaaatccgggtaaattttgtgtaaaaaccccttttttttttaacaaatggcgcataattgggaaaaccccttttttactatcccccgtatattgtttgggggttt

SEQ ID NO: 213180 - DNA, 378 bp, Homo sapiens
ctcctgtgggctgagctgcatctgaagcttacagcccgtgggggaagtgaggcccttcggagctgctgcttgtctgtggcttctgcctcccaggtggcctctgcacagtggtggtgacagtgatcaaatgaaagagcattgggataataacacttggtcacagatgttctgctgctgcaaaaatgaataaaagttactgttgtgaataaaaaaccaccccctctctgtattctatgtcaccctgtatactatttcagggtattttgagacagtttttcatcaagggatcctcccacctcagctactccagagcctgaggctgggggatcccttgagcccaggattttgaggctgcagtagtgagcccatctaaaaaaa

SEQ ID NO: 213181 - DNA, 749 bp, Homo sapiens
cctcccgagtagctgagattacagacatgcgctaccatgcctggctaatttttgtatttttagtagagatgcggtttcgccatgctggccaggctggtccccaactcctcgcctcaagtgatcttcctgccttagcctcccagagtgctaggattacaggtgtgagtcactgtgcccggcctggatcttttattgtttgtatttctgttcatttcttccctaagaaaccccacgtttttgtgggcaggacctggaatcctattcagttatacagccccgcttcgtccactgctccccttcagagtctagtgccctggacatcataggtattcagtacctcttgctggcttaggaacaggaggatgcctgatggccagggtgttcctctgaagcaggggtggctgagctttttgaatatctgcattgtgctaagggttaactacccaggcagtactggtggggaagggccccagaagcaggcccagactcaggtattgttaaagcagagtcatctttgctctgaagttttttcttttatcttttcttttcttttttaattgggggaaaccttgtcctaattggcatctttattgtggcaggaataggccaggcagggctgggggagtgtgaagtctgtgaagggaggtggcctgggggcccccccacacaatgcctgattgtgcaggcataggtatgaacacattgcagcctgtgtgcacccacagggtgaccacgagcaaggcctgggg

SEQ ID NO: 213182 - DNA, 245 bp, Homo sapiens
gctaatcttgtttcatctatgtctcctgctttcattctccctctccctttttctccccctctctctctcactggagtattttaaataaaatgatatcattttattagcaaatgtatttttctaacagaaaaagattagaaaaatatataaccacaatttcattatcactcacaatacattcaacagtagtccttgaatatcatctaacacccagttagtgttcagattttcctgatggtttcata

SEQ ID NO: 213183 - DNA, 413 bp, Homo sapiens
gtcaaaccagaaacacttgctttgctcagcatttaagtttttgaatgaggaaaatggcccttttccattgtatcttgaaaagcgttgttccctgggaaaacgctcccaaagttttcacaccttttgatgatggcaacttaaatgttcaattctggactttttttttttttaaataagaaatgccctctcgttggggcataagctctcacaacagtgtggcaggatggcttttcttaacacagaaccatagaaattagagcagaggggagactaactattaggtaatttcttccctgccccatttgtggaggtttgtttcctatagcaaattctcctggtgttttgtccagcaaggttgaaatgattcaagtaatggggcttccagtagggacatatggttattttatccagtt

SEQ ID NO: 213184 - DNA, 175 bp, Homo sapiens
tagagtctatgggaatccacaaaatgtttagatttgccctgggagtgatgctgaccacaaaagagacatagctgtggaagttctgaaactttctgtatactctcatcctatatagccatagtatgggaacatctgagcatgtacctttagaagtggcacatcccaggccaggtgc

SEQ ID NO: 213185 - DNA, 287 bp, Homo sapiens
attttaaggacgaggctagattccttttgctagtcaacctatagtatatgattactcagatatatttaggttaaatcctgtccccttccatacataagtatagtgtgatatataccataattagcctctaaggcagctctgacctctcttctgagttccatacctgtgttttgagctgcctctttgcgttcccacttgcatattctgcaggtgaaataacctcacgggtaagaaagcaaattcatttcccccagctcatatatgttgctgtaacaacatatgcattg

SEQ ID NO: 213186 - DNA, 843 bp, Homo sapiens
tagaactaagatgtagcttctcttagggcagaatccaggctttataggacttaagatgctattttgctttaaaaattttgggaggagtgagagtcttatatgtgtaaatgggtatatctaaggtcatgatatcataatttactaagtagaccaacttttatcaagtatcacaaagtagaatttggtagctaggacaactcccctctcccattcttatcttttttttttttttaatagttgtaaagtttctgggaatttatgggaacatacttttctttctttttaaaaaaaaaaccctttatttccttcttcctcattttgcttcccactcccccttaataaaaatagtaacttttgtgaaagagggagaatgatgttatgaactcagcaggttcagacaagtgttgtgagtgtggaggccaggaagccatgtgtatgtaccaggaccatgttactgcctaagaagaaatgagagtgtccagatgcaagggaggtgaatagagagtcaatttcagttccccttgattattgtgatttatgtggttcttctgggactgatgtaaagaatgtttcacgacttactgggaagccctctgttttgtgtcccttgtaatagtgattttacatcagaaataagccatctgatagagggaaagaatagtgtttggatttattgcttagttacagtgacatgtgtgcggttaaagtgatgaaattgtttagtatgagttagcatatatcttaattctaatgaaactagctctaagtctatgtttatgcttgtgattttagcttttactatggtaacctcatttctatcattaaaaacagtaaaaactctac

SEQ ID NO: 213187 - DNA, 497 bp, Homo sapiens
gcgctatcatgtgacggccgtgctggccctgggggccggctcagccctgctggggacagacgtgcaggtggaagcggcacctgccgccctggagctcgtgtgcccgtcctcggtgcagagtgacgagagcctcgacctcagcatccagaaccgcggtggttcaggcctggaggctgcctacagcatcgtggccctgggcgaggagccggcccgagcggtgcacccgctctgcccctcggacacggagatcttctctggcaacgggcactgctaccgcctggtggtggagaaggcggcctggctgcaggcgcaggagcagtgtcgggcctgggccggggccgccctggcaatggtggacagtcccgccgtgcagcgcttcctggtctcccgggtcaccaggagcctagacgtgtggatcggcttctcgactgtgcagcgggtggaggtgggcccagcgccgcagggcgaggccttcagcctggagagctgccagaact

SEQ ID NO: 213188 - DNA, 569 bp, Homo sapiens
tgagtggcttcagggttcaaatcactgttttctaacttgtgtatattgtaaattatccagctgggacactatcctggtgagttttgcccataggccttagccttgtcaaaagcacttttaccagcgagagctgggaagagatgattcggcctgtgggaaagacttgaagagagcatcagagcctgcacactgatgccagcgtattaagctgaagtgtctgctcttggaactgacccaaaaaactggcctccctgtactcactggctggcaggaagagagcatccagtaagagagattgggagcagtgtaattcagttcttgacataccttggaaccttggcctccatgacattgctttgagtgactgagtggggcttggcttggaaaaagccagtaccttttctgaaagactcttgactcatcttgtcttttctagatagattattttattttattttaaagaagaaaaggtaatgtgtgctaacccaaacatctggatttgaattctctctcaggtcgtgcaactcacagccaccagcaatattcacacaaccaagcttgcattaaaa

SEQ ID NO: 213189 - DNA, 355 bp, Homo sapiens
gttctcacaaattaagaaaaacagggagacaaattacactctttatttaaaaacaaaaacattacagaacatatatctgtggacaaaacggaggctttcatctctttttctatgccttgaattgaatcacacttgttaagtacatggaagatttcataatagccaagaggtcctaacctgttgttcctaacatacaagaagagaaaatgaagaaggtggtggagaggagagaaagtgaggagggaaggaagaaaagaggaagaatgggaggaagtaaaaggaaagcaagaacaatggagggctgtttacttgtacataaagaggggcaatgataactacctgattgggttgtcat

SEQ ID NO: 213190 - DNA, 579 bp, Homo sapiens
tagggtggaggggctgctgtggcccatggtgcgctcaggagcttcagtgtgaagggttcatgctcaggcaggctaggagtgtgcaaaacttggctgagcaggggtgtctcccaggagctcatgcccctgggcttttctgccacaggactggacactcaatgtgcttgggggggtctgtttgtttttccctcctgatatgacattttggggaatctccctgaaacctctatatctaaggactttttttggtaataaaatgattttggtgacctttccctttgactctgaaagtagccaatatacatttattgtaaataccatacatttgcatgtgatttctcatagttttcactatagtaatattggacctattgtacagattgaagacattgaatcacacagcaagtccagtgcctgcttacaaccaacagcaagtcagtggcaaagctagtactggaccccattcccatctgtttctataccacacctggcaggcagagctggggctcttaccactactagcccaaccccgggatacctccactgagatcctgtaccacagagccctgatataggggt

SEQ ID NO: 213191 - DNA, 252 bp, Homo sapiens
ccatagaaggcatccagttggtgaaaaggcatatggaaaggtgctcagcatcactgattatcaggaaaatgaaaatgaaaaccgccacgagtggtttagaccatagcggcatgcatgaaagttttcagacctccagttgttgggagtggctgaggcgggaaaattgctttactctgggaggtggaggtttctgtgagccaagatcgcaccattgcactctagcctgggcaataacagcaaaactccgtttca

SEQ ID NO: 213192 - DNA, 425 bp, Homo sapiens
attctcttcttgtcctcagaaccctttttttctaagcccaggaaagagagaaactagattctacccatttctaccctatgattaggtgcttttggtggaatacatcctaggtctctcactccctctcacagtcccgctctgtcttcaaatcagagtcaacttcaggattggaaggaatcttggcagtcatctaattaaactggccctccgattcttagcccatatgattgtgtgattccatcttggatagctccactttctctttggctatctagtcttttaaatttgtgatgtgtgggccaggtgcagtagctcatgtctataatcctagtgctttgggagtctaaggcaggaggatcccttgaagggccaggaagttcaagaccaggctgggcagcatagcaagaccctatctctaccaaaaa

SEQ ID NO: 213193 - DNA, 382 bp, Homo sapiens
tctttaaaagcagctgccgacataattgtatagcttgcattttctgtcatgcctcagattgccttccaaagcagtctggaagtattgtatttattaatgaagcctccactgctgcacactgaggtcgcctaagtcttgctatcatagagtatatcacacagacatctgtacacaggcatcttgcgacttctgtgactgttttctgggaatacatccacagaattggaattactagatcaaaggggatgtaccgttgacagatttctgatgtcaattgaacgcatcacttccacgtaccccgatttttaaaatctttatcaatgtgacattgaaaattgttgttttgatttaattattagttttggttcatgcttacaagcta

SEQ ID NO: 213194 - DNA, 1061 bp, Homo sapiens
gggttacagagattttttatggagtaggcaaggttcagattcagggcagtctttcaccccatgggaaagtggaaagggtggttgaggaggtggggattaaatgaggtggatttagtgggattaggtaattaataaaggtaacttaattatttgaagtcaaggcagttgacttcaacccttagatgatgtcaagggctggagctggtgctaaggaggctcggtggggaggtttgttggtatcagggaaattaaggatttggtgaaacagcctgtggatggatagccacaggcctgctggagttgccctggatggtgacgtagttggcaaggggagaaaaacctgagattgttagaggacagcagagggatagagcttgtgaccagaaggtctgaacttttaaaaatgtcatccagagcattcatatgtgtggaatagctcatttttcagttctgccatgaactttgtagaatattagcgcaatgaagagctttgtactcacacaccactggagaagacataatgagatatgatgatgggactgacaaaagttggctgttgtgatccatacttttggatcccaaagcccccaggagcccgtgtgaactctgaagtggtttgacatctgggactgggctgctggtgacgtcactccatccagtcctcctcaaactggtggcctttgaagttgtttttgagcatgatgataaatcagccatcagttggtatttattgagcacataccatgtgcccaagtaattaggcacccgtttctgggatggtctgggaaataggaatgcggtgtagcctgcagccctaatcagaatctagttgtggagagactaatagaactttcagcccacccaagggagaccacagtgtacagacttcctgaaggtgggggaagtcctggactcttgccctgctgagttcttaccctgccaatttgcctcgaaaaagccactgggctccctggtccttgggtgtctaaagtgtttaacaaccaacaaaaatcacaggcaaatctgctttgttttcattgttcggtaagagggctaggagg

SEQ ID NO: 213195 - DNA, 310 bp, Homo sapiens
gcagttttgggtctcgagattcaagaggaaagcctggttatttcagtgattgtggaagtggatcaaggggaagatgtgatgatcctggatggagtgactatgatggtattggcagttatggtgacagaattggctttggcaaatttgaatggagtggacacagtcattggtgtgacaagtcagataaagattattggtcaaaaccacttccaccaagtgaatgcttggagcaggtactcttttctggagaaaacactgggattaactttgagaaatatgattatctaccaatagaggcaaccagcagtaa

SEQ ID NO: 213196 - DNA, 141 bp, Homo sapiens
ttagaaaatgttcagtacttttagtttcacaggtttcatctactgtagataaaaaggtagtgaaaaatagccaggaaattattactctaaaattttagctttctctgaattttgttctctcttaattgggatcctattcag

SEQ ID NO: 213197 - DNA, 404 bp, Homo sapiens
gttgtggctgtttctaagagaaagcattctcttaagtttgtgtggcataacaggtttttaaacttttaattctttttaaccaaatttagaagtcagggaaggcttagcaggaacgatatctcctttcaaggtgaaccaagattctctgagtaaaataacaggacacccaaagttcagttttagaagttctacattagctcctcattaaaaaaaaataaaaagtctaatttatctccaaaaaggaagatattaaattaagaaatttttgaggaatggtgattttcttacttttgaatatatgaatacttcttagttttattatatgaaggaaatccctaacttcaagccaaacctaattttttaaaaattccaaatttgctatgtctgtctatatttatagacga

SEQ ID NO: 213198 - DNA, 350 bp, Homo sapiens
agtgctgggattataggcgtgagctactgtgcctggcctggcctgtgtattcttgtagtttaatttttttcttagttttaatttataatgtaagtattgctggggtggaaaaacttcacttcatactcttagggtcctagctgggcacacaaattaaattgacataagagatcaacaggagaaaagcataattacttgtatactggattggacaaagaataatttgtgaagaagcaactaaattatatgtgaagccttaaagatacgagttattttaacaaggtctgtacagaattctgttggtttcaacttctcatccctgaggagaaagatattttcgctttctagta

SEQ ID NO: 213199 - DNA, 477 bp, Homo sapiens
ctcaagccttgacctcataagctcagtgaggtcataaaccccattctcccacctcagccttacacgttgctgcaactacaggtgcttgcaaccacaccaaactaattattactattattattactatgtgtagagatggggtctcactatgttgcccaggctgtcttgaactcctgggctcaagcaatcctctcaccttggcctcccaaagtgctcccagacagccaccacgcccggcctatatttgcagttttgagtgcctttcatacacttggcatgtacaaggcattttatacatatttatttaatatagttttgcatatacttcctgtgatgcatttacaaggaattaaaaaaacagtgagaagttcatctcaatcagtgcaattgttcttagtttttatcctctctttgttgatttttagtatctatgaagtgcccacatttgcagtttaatctttattagattcacatatt

SEQ ID NO: 213200 - DNA, 119 bp, Homo sapiens
ggtagagacagaactagtagcacgtgcatgtcaatggcaagtcattctttatagtgttgccagtaggctccagaataaggtataatgatttcagttatttccccttctgtcgtcttctc

SEQ ID NO: 213201 - DNA, 729 bp, Homo sapiens
aactaaaattatagagctaaaatataataactgaaataaaaaaattcaagagaggggttaaacagcagacatgatcaagcagatcctcaagcttttattctggctttaagctaataaattttctgaactggagaagaaattatttagctttttggaagttttctcatttaatattaataagtttttttaaaatacactcttgttttctaaaaaataatttataatcaacttatagcttcttttaagtgaaaagttacccttttgctgtaatggtgttaactttcaggcatactccaaaatgcagcttgacgcattcaagtggagctcacataggaaagcagaacagagatgctcaactgaagcctgtgcaaacagcaaaaccaaaacattctataaatgcacaaagatgaacatggcatgtcagagacatttagggagctttgggctccttcatatagaaatggttagtctgaaaagagctaaggagaaaccagtcttagaaatcactatgttaaaaacaaacatatgaaagtaaagtagcccattcctttattctttctcttaaatattatattgtgattttaaagaatataatgagccaactggactttcgttagcagctaccttctgtagatctatcatcccacaatttctcccaaataagaggactgtgtaatatattgaataattttaaagtaataacaaaataatattttgagatgttaactg

SEQ ID NO: 213202 - DNA, 504 bp, Homo sapiens
cagggagtctgctgggaggagaagggaaacagaggtaggaattcccctgtaaagcgccttatgtgctataccagggaggctggggcagttagctgacagcctcagaggtgccaggtgtagggcatggctggaaagcaacacataaccactcctaggagggatggggactcctgcatctggctgtccattgagaccagccagacatttaactggctctcagctagttccaaacaaatgaaggacatatgaaagacctggaagccacttgaggaagggatgtctctaccacccaccttcagaatccctccttcccccacgacatgcgggggcagcaagcttatgggagctttctggggagagatgtggagaagcagaagttggtgtccctcagcacaatgagcaccctgatgtcggggcagggggatgggctgctgggggttgggggacagggatactggctctgactttgtggggcaacaagctagtctctgagctctcttatga

SEQ ID NO: 213203 - DNA, 460 bp, Homo sapiens
cttgttgtctctttccctggctttgctcattttcctgttaacgagggatgatgcttagacaagggttggggtcaggagagtgatgggaatttatttgttctagattttggctaacatttttggaaactaagaattgttaaaatgttttacaggtgttatatttcaaacagaattaagtacttatgtatttaaaaattatttagctttctttaccaatttcaagttgactcctgctgcgtaataccaattttggaagtttaaaattctgtatcatactttattgattgatctttctacagattcttgtcagagtaaatgtctcagtggggcttattttactctggctactgtttcattgaagaataggataacctttttgcattttggttctcatcatgttttttttttatgagacggattcttgtccagcctgggcaacagagcaaaactctgtctctca

SEQ ID NO: 213204 - DNA, 873 bp, Homo sapiens
gcttttcccatagagaagcagatgatgatgggatattggattgagttgggagaatgggaaaggcatttcagtccccaagtccagctggggtggagggaaggggttgtccaggttgcctcactcttgctgaatcaggtcacaggtggaattggaagggagtaaaaaggcattggcattgagggtgaggtggtgagtagaagatattttgaaaatgggaggatttcatttagaaatcttttatgagagaaaatttgaattattgatcttcctaattgtctttcagtattccaagaaagtccacttaacttggaggaatgaagtttcccactgataaacttctttaatcctgtcacactcaaaacttcagaaacaaccagaaagccactatcttccttgtatttttgtttttatttattttattttttgagacagagtttcactcttgttgcccaggcactccaggctggagtgcagtggcgccatctcggctcattgcaatctctgcctcctgggttcaggcgattctcctgcctcatcctcccaagaagattggattacaggcttgcgccaccacgcctggctaattttgtatttttagtagagacaggatttctccgtgttggtcaggctggtctcgaactcctgacctcaggtgatccacctgcctcggccttccaaagtgttgggattataggcatgagccactgcgcccggcctcttccttgtatttttaaagaaaatgcattgtcatgaccagaattttcccttggttggttggctgatgagagtgtatatataaatgcatgtatttcaagtcttacttttcattctttcctgagttgtgtatctctttttctcacccccatctcccat

SEQ ID NO: 213205 - DNA, 3164 bp, Homo sapiens
gaattccacaataaggtaattagatttagaagtactcagtcactttaagtggataaatgtattagttaaaactttagggtttgcttttttgctgtttagatcaaagttttttctgattcttctgtcctcattgtgaacataaccgtgtagttgaaacagtcaaacttatttttgtaatgtatgttattgtgtgatgcagttttttgcttctgtctccaatattaaaccattttcctaatacttgtttctctctctgcgtgttgtattgttggtagtcattatatgttggtgatacatctgcacactcaccccggacacacactcagcacacttttcctccatttgattaacagtgctgcacacacaatgattacgggaaagcgcaaataaatacggaaaggggtgcttattttgactactggaagagctttgctgggtctcagcgcaacttttgttttttattcctgagaaggtgatctctccatgcggttctctcacacaaggattctttaaaagaggaagagagacaagcagaggggggaggacagtctttcactttaagaacggctgggctcaaagataaaaggaagggaaaagcagcagcagcagcagcagcagcagcagcagcagcagcagcagcagcagcagcagcagcagcagggaaaccaacgctgcagcacttccgaaaggcatttttgatccatttctgagtgttgcggcccgtttctccaccgaagttggctccagctctagcagccgcattggatcccacagcttactgcgagactccggtgtacaatccggatctctgccccaacatgattgcggcccaggccaagctggtctaccatctgaataaatactacaacgaaaaatgccaagccaggaaagctgccattgccaaaactatccgggaagtctgcaaagtagtttccgacgtactgaaggaagtggaagtgcaggagccgcggttcatcagctctctcaacgagatggacaatcgctacgagggcctcgaggtcatctcccccaccgaatttgaagtggtgctttatctcaaccaaatgggggtgttcaacttcgtggacgatggctcactgcccggctgcgcggtgctgaagttgagcgacgggcgcaagaggagcatgtccctctgggtggaattcattaccgcctccggctacctctcggcgcgcaaaatccggtccaggtttcagacgctggtggctcaagcggtagacaaatgtagctaccgggatgtggtaaagatggtggcagacaccagcgaagtgaaactgagaatccgagataggtacgtggtgcagatcacgccggcctttaaatgcaccgggatctggccgaggagtgctgcccactggccacttccccacatcccctggccgggacccaaccgggtggcggaggtcaaggcggaaggtttcaatctcttgtccaaggagtgccactccttggccggcaagcagagctcggcggagagcgacgcctgggtgctgcagttcgcggaggcagagaacagactgcagatggggggctgcagaaagaagtgcctctccatcctcaaaaccttaagggatcgtcaccttgaactgccgggccagcccttgaacaattaccatatgaagactctggtttcctacgagtgtgaaaagcatccccgagagtcggactgggacgagtcttgcctgggtgatcggctgaacgggattttgctgcaacttatctcctgcctgcagtgccggcggtgtccccactactttctaccgaacttagatctgtttcaaggcaaacctcactcagctctggaaaacgctgccaaacaaacgtggcgactggcaagagagatcctgaccaacccgaaaagtttggaaaaactttagaggatgatttaatcaagagccgaaattattacccttctcaaagtccttattaagtgtaaacttctgttcaattcctaatattccactccgcagtgcaaacaatctcttcctttaaaaaggaataataatacaatatttaaacatcatctcacccacccccacaaggggagaaaaagtaggggaagcggatggagaaaaacccaaagccactagtattagaagacttctttccacacgatttcctatctcccttgaaaagtacaccgtaacactccgtaaacagcccagctgtaacgccagaccgagacgaacactctgcctaactatcaaaggattatagcaatcctggtgatttaggtgcatctgtctgtgagtaaacacgatttggatatgccatctgaaagaaactgtaatgtatattttgatttgtaacaaatattgtgatctcacattgtctttgaaagtgtggatgttggtgttttgtgatttggtgaacagaacttaaattgccattctggatacttccagacattttccactaacaaagatatcatttaaaggtagatttcttcctggtacttttatctgtctttgaaagtgtctgaactttaaaaagtttacattttgtttcaaatattgcttgttctatttctaacattccataaatatacttgaaatgttatttaaatatattcaaagaaatttgaattcagcttatataataacgcttgaatatctgaattatatatttgaaaaatgcacttgaaatacactggataattacttttgtgatttagattttaatttgttgctggtttttatttaattagatggtaataaatgaagtaaaataaaagttgttgtgtctcactttaaattgtttcctatcacaagatgtaatgatgcattttgaaaatcaaacccacttgaatatcttaaatattttgagaaatatgctaatgaaatccttaaaaataaaacattggagaaaagctctttctgtataggtccataagataacaatctactctcagtctctaacttacttgtaagacaattcctttctacaacagaaacaatttaaatctacctttgaaagcttgctcttcttgtagcatttttgataatataagaaaaaaagtctatcatgacagtagagatgactgagttaaaaatctgactaattcagaggaaatgaacttaacaaagtcataatgaaacttcgaaaattatgtatgaaaactaataaaacgatcctttctgacc

SEQ ID NO: 213206 - DNA, 3146 bp, Homo sapiens
gaattccacaataaggtaattagatttagaagtactcagtcactttaagtggataaatgtattagttaaaactttagggtttgcttttttgctgtttagatcaaagttttttctgattcttctgtcctcattgtgaacataaccgtgtagttgaaacagtcaaacttatttttgtaatgtatgttattgtgtgatgcagttttttgcttctgtctccaatattaaaccattttcctaatacttgtttctctctctgcgtgttgtattgttggtagtcattatatgttggtgatacatctgcacactcaccccggacacacactcagcacacttttcctccatttgattaacagtgctgcacacacaatgattacgggaaagcgcaaataaatacggaaaggggtgcttattttgactactggaagagctttgctgggtctcagcgcaacttttgttttttattcctgagaaggtgatctctccatgcggttctctcacacaaggattctttaaaagaggaagagagacaagcagaggggggaggacagtctttcactttaagaacggctgggctcaaagataaaaggaagggaaaagcagcagcagcagcagcagcagcagcagcagcagcagcagcagcagggaaaccaacgctgcagcacttccgaaaggcatttttgatccatttctgagtgttgcggcccgtttctccaccgaagttggctccagctctagcagccgcattggatcccacagcttactgcgagactccggtgtacaatccggatctctgccccaacatgattgcggcccaggccaagctggtctaccatctgaataaatactacaacgaaaaatgccaagccaggaaagctgccattgccaaaactatccgggaagtctgcaaagtagtttccgacgtactgaaggaagtggaagtgcaggagccgcggttcatcagctctctcaacgagatggacaatcgctacgagggcctcgaggtcatctcccccaccgaatttgaagtggtgctttatctcaaccaaatgggggtgttcaacttcgtggacgatggctcactgcccggctgcgcggtgctgaagttgagcgacgggcgcaagaggagcatgtccctctgggtggaattcattaccgcctccggctacctctcggcgcgcaaaatccggtccaggtttcagacgctggtggctcaagcggtagacaaatgtagctaccgggatgtggtaaagatggtggcagacaccagcgaagtgaaactgagaatccgagataggtacgtggtgcagatcacgccggcctttaaatgcaccgggatctggccgaggagtgctgcccactggccacttccccacatcccctggccgggacccaaccgggtggcggaggtcaaggcggaaggtttcaatctcttgtccaaggagtgccactccttggccggcaagcagagctcggcggagagcgacgcctgggtgctgcagttcgcggaggcagagaacagactgcagatggggggctgcagaaagaagtgcctctccatcctcaaaaccttaagggatcgtcaccttgaactgccgggccagcccttgaacaattaccatatgaagactctggtttcctacgagtgtgaaaagcatccccgagagtcggactgggacgagtcttgcctgggtgatcggctgaacgggattttgctgcaacttatctcctgcctgcagtgccggcggtgtccccactactttctaccgaacttagatctgtttcaaggcaaacctcactcagctctggaaaacgctgccaaacaaacgtggcgactggcaagagagatcctgaccaacccgaaaagtttggaaaaactttagaggatgatttaatcaagagccgaaattattacccttctcaaagtccttattaagtgtaaacttctgttcaattcctaatattccactccgcagtgcaaacaatctcttcctttaaaaaggaataataatacaatatttaaacatcatctcacccacccccacaaggggagaaaaagtaggggaagcggatggagaaaaacccaaagccactagtattagaagacttctttccacacgatttcctatctcccttgaaaagtacaccgtaacactccgtaaacagcccagctgtaacgccagaccgagacgaacactctgcctaactatcaaaggattatagcaatcctggtgatttaggtgcatctgtctgtgagtaaacacgatttggatatgccatctgaaagaaactgtaatgtatattttgatttgtaacaaatattgtgatctcacattgtctttgaaagtgtggatgttggtgttttgtgatttggtgaacagaacttaaattgccattctggatacttccagacattttccactaacaaagatatcatttaaaggtagatttcttcctggtacttttatctgtctttgaaagtgtctgaactttaaaaagtttacattttgtttcaaatattgcttgttctatttctaacattccataaatatacttgaaatgttatttaaatatattcaaagaaatttgaattcagcttatataataacgcttgaatatctgaattatatatttgaaaaatgcacttgaaatacactggataattacttttgtgatttagattttaatttgttgctggtttttatttaattagatggtaataaatgaagtaaaataaaagttgttgtgtctcactttaaattgtttcctatcacaagatgtaatgatgcattttgaaaatcaaacccacttgaatatcttaaatattttgagaaatatgctaatgaaatccttaaaaataaaacattggagaaaagctctttctgtataggtccataagataacaatctactctcagtctctaacttacttgtaagacaattcctttctacaacagaaacaatttaaatctacctttgaaagcttgctcttcttgtagcatttttgataatataagaaaaaaagtctatcatgacagtagagatgactgagttaaaaatctgactaattcagaggaaatgaacttaacaaagtcataatgaaacttcgaaaattatgtatgaaaactaataaaacgatcctttctgacc

SEQ ID NO: 213207 - DNA, 633 bp, Homo sapiens
tttccacacgagtgcatctgggctcttagacaaaccaacagcagcttcttctgacatatacacacgcacactcaccccggacacacactcagcacacttttcctccatttgattaacagtgctgcacacacaatgattacgggaaagcgcaaataaatacggaaaggggtgcttattttgactactggaagagctttgctgggtctcagcgcaacttttgttttttattcctgagaaggtgatctctccatgcggttctctcacacaaggattctttaaaagaggaagagagacaagcagaggggggaggacagtctttcactttaagaacggctgggctcaaagataaaaggaagggaaaagcagcagcagcagcagcagcagcagcagcagcagcagcagcagcagcagcagcagcagcagcagggaaaccaacgctgcagcacttccgaaaggcatttttgatccatttctgagtgttgcggcccgtttctccaccgaagttggctccagctctagcagccgcattggatcccacagcttactgcgagactccggtgtacaatccggatctctgccccaacatgattgcggcccaggccaagctggtctaccatctgaataaatactaca

SEQ ID NO: 213208 - DNA, 3163 bp, Homo sapiens
  misc_feature (2103)..(2103): n is a, c, g, or t
  misc_feature (2114)..(2114): n is a, c, g, or t
  misc_feature (2150)..(2150): n is a, c, g, or t
  misc_feature (2157)..(2157): n is a, c, g, or t
  misc_feature (2175)..(2175): n is a, c, g, or t
  misc_feature (2226)..(2226): n is a, c, g, or t
gaattccacaataaggtaattagatttagaagtactcagtcactttaagtggataaatgtattagttaaaactttagggtttgcttttttgctgtttagatcaaagttttttctgattcttctgtcctcattgtgaacataaccgtgtagttgaaacagtcaaacttatttttgtaatgtatgttattgtgtgatgcagttttttgcttctgtctccaatattaaaccattttcctaatacttgtttctctctctgcgtgttgtattgttggtagtcattatatgttggtgatacatctgcacactcaccccggacacacactcagcacacttttcctccatttgattaacagtgctgcacacacaatgattacgggaaagcgcaaataaatacggaaaggggtgcttattttgactactggaagagctttgctgggtctcagcgcaacttttgttttttattcctgagaaggtgatctctccatgcggttctctcacacaaggattctttaaaagaggaagagagacaagcagaggggggaggacagtctttcactttaagaacggctgggctcaaagataaaaggaagggaaaagcagcagcagcagcagcagcagcagcagcagcagcagcagcagcagcagcagcagcagcagcagggaaaccaacgctgcagcacttccgaaaggcatttttgatccatttctgagtgttgcggcccgtttctccaccgaagttggctccagctctagcagccgcattggatcccacagcttactgcgagactccggtgtacaatccggatctctgccccaacatgattgcggcccaggccaagctggtctaccatctgaataaatactacaacgaaaaatgccaagccaggaaagctgccattgccaaaactatccgggaagtctgcaaagtagtttccgacgtactgaaggaagtggaagtgcaggagccgcggttcatcagctctctcaacgagatggacaatcgctacgagggcctcgaggtcatctcccccaccgaatttgaagtggtgctttatctcaaccaaatgggggtgttcaacttcgtggacgatggctcactgcccggctgcgcggtgctgaagttgagcgacgggcgcaagaggagcatgtccctctgggtggaattcattaccgcctccggctacctctcggcgcgcaaaatccggtccaggtttcagacgctggtggctcaagcggtagacaaatgtagctaccgggatgtggtaaagatggtggcagacaccagcgaagtgaaactgagaatccgagataggtacgtggtgcagatcacgccggcctttaaatgcaccgggatctggccgaggagtgctgcccactggccacttccccacatcccctggccgggacccaaccgggtggcggaggtcaaggcggaaggtttcaatctcttgtccaaggagtgccactccttggccggcaagcagagctcggcggagagcgacgcctgggtgctgcagttcgcggaggcagagaacagactgcagatggggggctgcagaaagaagtgcctctccatcctcaaaaccttaagggatcgtcaccttgaactgccgggccagcccttgaacaattaccatatgaagactctggtttcctacgagtgtgaaaagcatccccgagagtcggactgggacgagtcttgcctgggtgatcggctgaacgggattttgctgcaacttatctcctgcctgcagtgccggcggtgtccccactactttctaccgaacttagatctgtttcaaggcaaacctcactcagctctggaaaacgctgccaaacaaacgtggcgactggcaagagagatcctgaccaacccgaaaagtttggaaaaactttagaggatgatttaatcaagagccgaaattattacccttctcaaagtccttattaagtgtaaacttctgttcaattcctaatattccactccgcagtgcaaacaatctcttcctttaaaaaggaataataatacaatatttaaacatcatctcacccacccccacaaggggagaaaaagtaggggaagcggatggcgccccccccccngccccccgtcnccgacgcccctccccacccgatcccccacccccccngcaacgncccccgtcccactccgtnccccgccccgccgccacgcccgcccgcgccgcaccccccgcctcccccccnacggattatagcaatcctggtgatttaggtgcatctgtctgtgagtaaacacgatttggatatgccatctgaaagaaactgtaatgtatattttgatttgtaacaaatattgtgatctcacattgtctttgaaagtgtggatgttggtgttttgtgatttggtgaacagaacttaaattgccattctggatacttccagacattttccactaacaaagatatcatttaaaggtagatttcttcctggtacttttatctgtctttgaaagtgtctgaactttaaaaagtttacattttgtttcaaatattgcttgttctatttctaacattccataaatatacttgaaatgttatttaaatatattcaaagaaatttgaattcagcttatataataacgcttgaatatctgaattatatatttgaaaaatgcacttgaaatacactggataattacttttgtgatttagattttaatttgttgctggtttttatttaattagatggtaataaatgaagtaaaataaaagttgttgtgtctcactttaaattgtttcctatcacaagatgtaatgatgcattttgaaaatcaaacccacttgaatatcttaaatattttgagaaatatgctaatgaaatccttaaaaataaaacattggagaaaagctctttctgtataggtccataagataacaatctactctcagtctctaacttacttgtaagacaattcctttctacaacagaaacaatttaaatctacctttgaaagcttgctcttcttgtagcatttttgataatataagaaaaaaagtctatcatgacagtagagatgactgagttaaaaatctgactaattcagaggaaatgaacttaacaaagtcataatgaaacttcgaaaattatgtatgaaaactaataaaacgatcctttctgacc

SEQ ID NO: 213209 - DNA, 274 bp, Homo sapiens
ttgttactatcttggtcaaaaatgagacagcccattttttaattgatttgaaaaatgtaataacctaattatataaaagtaggcatagccatagactaaatgaaagaatgctatttaataaaattatctgtatccttccgaatcactaaccctgaatatcatccatgaggactttttttcccattcaatgaagaatttcatatactctgattgcctgctcttcatttctggaagttacttatggtttggagtttttagtgtctatatttgggga

SEQ ID NO: 213210 - DNA, 183 bp, Homo sapiens
gcctacttcctctgttgtttcactgaatgattgtattccttagtctttctgttctctctctgcagtctcactaggggatctgatctcatctatgctcttgacatatgcttatgatgcctccatttatgtctctagactcttgtctgtgcgtcagtttcatgaatccctctgctgtcgatactg

SEQ ID NO: 213211 - DNA, 251 bp, Homo sapiens
ggaaccctgatgtaaaccagggcctttagtgaataagaaaggatcaatatggccaggtgcagtggctcatgcctgtaatcccagcactttgtgagggtgaggtgggtggatctcttgaggctaggagttcaagaccagcctggctaacatgatgaaatcctgtctctaccaaaaatacaaaacttagctgggtgtggtggcaggcgcctgcagtcccagctactcagaaggctgaggcaggagaactgctt

SEQ ID NO: 213212 - DNA, 280 bp, Homo sapiens
ctgagggaatctgatcccagctacagattcctgctaccccacatccattttctgaagtgtaatgattttctggggccaggactgagggctcagagacacttctgtctaactggggctcttgcttgcttgcttgctttgcctctttctctccctctttctctcctccctccctccctctctcccttcctccctccctccctccatgggagtcttgctctgtcacccacgctggagtacagtggcgtgatcttggctcaagcagccctcccatctcggcctc

SEQ ID NO: 213213 - DNA, 712 bp, Homo sapiens
agggggggctagggaatcagcttaagtggaggagcgttcgtttagtatgtgagaggtaacgggatcgatgcctgcattctccacaggggaattttaaaagaaaaaaaaaaaaaaaaaagaaaaaaaaaaaaaaaaaaaaaaaaaaaaaaaaaaaaaataacaaaaaaaaaaaaaaaaaaagcatgaaaaataacaaaaagtatacgcatgaagcaaatataaacttagagaactgaaacgaagaatccttcagataagagtaatttgcctaacaagttataatttagcgacaagaaaattcaatggacctacccaacaaaataccctaaactgaaaaaaccattttaccaggaaactcaatcaccttaacggcaaccaccttcgccagagcgtaaactatgcaaacggctagtataaaggaattttacagccgtatgaaagccctaaaatcctaacgaaaatattccaagataatatcatgtaaaaaccagaactacataaaaggttaaaaaacctcaattctttaacacaaaagcctcgtattggccaaatccactttaatctcacaggaacacccctccatatcttacggaccgagacacccattggagcgggacactactaataaacaaggccatcaaaccgctaaaggtacacataaccgcaatcaagtcttacggacactctctgcctacacctataccagctgtcc

SEQ ID NO: 213214 - DNA, 263 bp, Homo sapiens
agcctcgcgaccctgtctcaaaaaaataaataaaatgcaaagaggtacaaggatggctagtcgtctagtcaaaagtagtaaggatatgtagaaaaaggcaggaccaagaagaaataatgtcataaagacaaacatgttgattcatctaacttgtgtgtttcaaggaaagaaaatatttcaaatcaggtgttcttatcctgagatccactgacttgaagcaaccgggggttgaaatgaagccctgattcctaaaggattctatg

SEQ ID NO: 213215 - DNA, 666 bp, Homo sapiens
agtttcctcatacttacagagttggtttgagtgttaaataggatcatgcctataaaacacttaggtcatcaccttgcatagagcatatgtcagtgaaaattaacttaaattgttatttttattattagcagatttttttcagcctgcacgtgtacatccatgcattgcacattcctttctgttcttgccctccctgtcattgtgaggatactgaaaagttggtcttcctgtctctgggaaggcaatttagtccatgtaaaatgtctcaaattccctgtcctgtcacatggctcatgaactgcctctggcttctgaaggagcctgaaggagttgtcaaacctgccgcagagtgctgacgatatgtcagtgtaggttcatccattgtaacaaatgttctaatctggtgtgggattttgatagtgggggagtctggaggtgggtagcgggtatgtggaaaatctctgtactttctgctcaattttgctgtgaccctaatgctgctctaaaaataacatcttttgggaaaaaaatatatttacacacatacaaaataatgtgagcagtacatgccaggcactgaattatgattccattgaaatagtttgaaaatgtggaaatcattaaaaaaaaaaattgtcccaggtggagcctggtagcactgccttt

SEQ ID NO: 213216 - DNA, 601 bp, Homo sapiens
actgatagaaggttaaaagccatcaatgtatcggtcagctaatgtccatccacttcttacttattcagaagatacaaaagagttctaactggctgacccttcaaagaaggtagttttttaaattaatttttacttatacatatcataaaaataggcatctgcagtatcctggaatgagtgagggttatggagacagatctagctctgaatctcgactaagccacttactaattgcattatcctgtgcaagttagaagccccagtttccctaaatacctacccctgtctcttagggttgttgcaaagtgttaagtgtatgaatgtacataaaacaccatgatttattgcagcggccctagagccagacaggggtttgaatcctggctacacccctcactaaccataggccaacatccaaagctgtgaacctaagttccaaattccttacctataatgtagaaaaatattgtctactccaaaggatagccatatgaattaaataaagcaatatttgcaaagcccctagcagaatgacagacacataataataaaaatcaaaaaagaaaaaaaaatctgatgtttaaaaaatcaagctgcaagg

SEQ ID NO: 213217 - DNA, 491 bp, Homo sapiens
aatccctcaagcatgcctttacaccatgcccaaaaacgtttctttccaacaccctcatctattcagttctctgctcaaactcctcagacagaccttctctgaatactccatctaaaaagacccaccactgccattcctatcccccttctctactttattctgttttacagcatttttttttttttttttttgagacggaatcttgctctgttgcccaggctggagtgcggtggtgcaatctcagctcactgcaacctctgcctcgcgggttcaagcgattctcctgcctcagcttcccgagtagctgggattacaggcatctgccaccacacccagctaatttttgtgtgtgtgtgtgtgtgtgtgtgtgtgtgtgtttgtgtatttttagtagagagggggtttcaccatgttggccaggctggtctcaaactcctgacctcaggtgatccacctgcctcagcctcccaaaatgctgggattacaggcgt

SEQ ID NO: 213218 - DNA, 609 bp, Homo sapiens
taaggaatcagggctattccttactcaggaactctctgacctgaccttttatcatcccatcttcctaaacaatcaaaagaggaaggatgattcctctcacattataaaggtgagacaggctgggtgcggtggctcatgcctgtcatcccagtgctctgggaggccaaggcaggaggatcacttgagcccaggagttcaagaccagcctggtcaacatagtgagactcccatctctactaaaaaaataataataataataaaattagcctagaatggtggcaggcatctgtaatcccagctccttgggaagctgagcaggaggattacttgcacctaggagtttgaggctgcagtgagctatgatcacaccactgtattccagcttgggtgagagagcaagaccctgtctctaaaaacaattaaaaaattaaaattaaaaaggagggtgagacagatatgacaaggaccacatggtgaaacccagtcactactaatacattcgccgggccgtggtggtgtgtgcctgtagtcccagccgctcaggaggttgaggcaggagaatcgcttgaacccgggaggaggagggtgcggtggctgagatccgccctg

SEQ ID NO: 213219 - DNA, 322 bp, Homo sapiens
gtgctcctaaccctagagctgaggggcttgggctttcatgcaagagcagctttcatgcaagatcacctgctggcaacgaaactgagaacgtcagctctgtgaggtcagggattttaatctgtttttagcctggcatataaaacacactcaatatatacatgttaaataaatgagcgaagccaatcaaatgatacataattttaaataaatacccagaaactaggagtttgttccaattcatcagtgtcattttccttttactttgctttcgtgtttattagcataaaaactctattttttttttttttttttttgatatgga

SEQ ID NO: 213220 - DNA, 161 bp, Homo sapiens
ttttggctggacgatttgagttaatgtttttttttttcaagctttgtgatagaacactatctgaaaatagctactttttcctccttatcacatctttttaaagttgttctgtatgattaaaaagattaaaattattatgcccaaagtgaaaatgaggaaca

SEQ ID NO: 213221 - DNA, 150 bp, Homo sapiens
gcacccagccaaatccagcctcttggtgttcactaatgcagaacccacctgctctggttcgggtctgctttatctctgtacatgggccaggcctcacctagcccagggctaagtgcctattctccttgttttcacctggatgggagcaat

SEQ ID NO: 213222 - DNA, 554 bp, Homo sapiens
catttaatcaatttggatggagctagtattttaaaaatgtactaaagaagttggtttacagaattcggatggctaaagaaaaacccctttgccttaccaaattactaatggtgagatccgtgtgcattttaagttatagaacctagttatgtgtaaggccaaggaaaacaaaatcacagacccaaaatgttctgtgattaagcagcaaagtccgttattgcacagagtttcagaagagtaggaaccctgctgtcagcagtaatgctttaaggcttgatcactctgtatttcttctcctgttacctcagtctcaggtgccaaatgagaaggccagcacagctaaggcctgcgcccctgaagcagccaagacagggtcaagttaaggtcaggggttgttctctggaaacacattaacctcggtgacgcctgtatcccaatctcacagactaatctttttgtgtaattttaaaagaaacatgtgaatgtccggatggctattagaattcagccctataatgagccttctagttcactaacccatgcattctcgatgt

SEQ ID NO: 213223 - DNA, 446 bp, Homo sapiens
tctctacaaaaaataaaaaattagctgggtgtggtggcacatgcctgtagtcccagctccttgggaggctgaggtgggaagatcgcttgagctcaggaggttgaggctgcagtgagccatgatcacaccacagcagcccagcctgggcaacaaagtaagactctgtctctaaaaaataagtaaatacataaaaaataaaaaagactatctactaaaagctaatagcaaatagtgccttatataatgaaacaaaaatcatttcagttaatatcaggaatcagacaagggcgactgttatcacctgtagcatgtaactttgtcttggacttcacagcaaatgcagcaagacaaaaagcaataaaataagtggtctaagctttggaaaatgataaattaagcagcacatctttttgctgataatagaattgacccccccccccaaaaaa

SEQ ID NO: 213224 - DNA, 380 bp, Homo sapiens
aaaaaattaagaaaaatccatctacaatagaatatatataaaaaaatacttaggaataaatttttaaaactccaaaactaataatactcccaaaacaacacaacattgttgaaaggaatttcttctttataatcctgcagccattgtcaatatactgtgagatgtccttgcacacctttctccaggctcatacacatgcttgtatgtatgcatacacatcaccacacacacacacacacacacacacacacacacacacacacacagcactccccgtctaatcctgcagccagtgtcagtatactgagatgtgtccttgcacacctttctccaggctcatacacatgcttgtatgcatgcacacacatcacaccaagtgc

SEQ ID NO: 213225 - DNA, 471 bp, Homo sapiens
agttgaagaaatcactcttattccagcccgggtgtggagaggcggccatccttggcgggatcttatttccagtttgttagtgtttcagagattatgggggaaagggggttctatgaatgtcagacactgcgtgaggcacatttggtttcagtaattttagcatcattcattgtaaagtgatgatccctcggaacttcttcacaatgagaaacctgaaaggtcccagcagccagcaatgaatgaaaggtggggtggggccgctggcagggcgaggccttgtgagccatgtgcctgtgctctcaagtccgaagtttgtggggatgcatgcaggagattctggccctgattgtttccccagaaccaggatgcgttctggttggcaggacaactggccttcacttggtggccttcagtgggtgttctcattggttgccttcgtttagtgccctcagttgtttctcttcagttggc

SEQ ID NO: 213226 - DNA, 362 bp, Homo sapiens
tcactgggcggagttgcttgcttggctgggaaccctcaggcccactgggaatctctgccagcctgcctcctaggcccactcatcctctccctcttcctgccatctctctctcagggatggacaccactgtgaccctgatttggcaagaaggaaacttgggtgttatccttgatttcatatctcctacccaaaatatcccatagatgtatcttccttgttatttctggactctgccccctcatcttagtctttatttcaaatactgcagttaaagcagcacaacctttccccaggaattttataacattctcctaacttgtctcctttcctcagatctcgccactccagtccattttccaatc

SEQ ID NO: 213227 - DNA, 399 bp, Homo sapiens
cacatatatgtgcatctattaatattgtgcctgcgatgtttgcacatactattacatagcacatcataaacctttccactgttgatcaggaaacaaaaaagtcattttatgagtatgatgtcattagaagtactattacagggctcatatgaaggtaaaacaaaaaaattaacttttttaatgaaggttatttactaccaaaattgaagccctctaagtgtctacatgataaagaaataccttctgcatcataaaactcaggatttcttcttcccaaattattcatttatcacaagtaacttttttatttttgagataagattctcgctctgtcgcccaggctggagtgcagtggtgtgatctccgctcactgcaacaaaaacaaaactccatctcaaa

SEQ ID NO: 213228 - DNA, 348 bp, Homo sapiens
  misc_feature (263)..(263): n is a, c, g, or t
aaagcctttgggatgtcgatgagtgtggaaggctcatattggcaacttattaacatcaaaattcttcagttataaggattttgatactttattatatacctgtgcagcagagtttgactttatggaaaaagagactccactgagatacacaaagacattattgtttccagttgttcttgtagtgtttgttgctattgttagaaagattattagtgatatgtggggtgtcttagctaaacaacagacacacataaggattttgngaggacaaggattgtctaatcaccagtttgatcatggagagctggtttaccatgcattgcttgttagcatatacagcccttggtt

SEQ ID NO: 213229 - DNA, 224 bp, Homo sapiens
gaggctgtccctacatatttctggtactttgagtaaacatggagagaaagttcacagtgacctaatcagaagcagaaatgaaaatggggcaaaatgccatgtgggggcattttgcaataagaagcaacaggagtctggcacctaaatccagcaactgtgtagccagggttggaaaaagtccaggttaccagcaacatgcctgttttttacggagaatgagtgaa

SEQ ID NO: 213230 - DNA, 476 bp, Homo sapiens
aattaaactgaaaacattgttaaagattcatttaaaaagaataaaactcactacatgttatcataaataatattttttacaaaaaatattttccaaaacacaaacagtctagtgggaaaagtgacattgtttcacatttttgcaagtttgtttcatatcttgcttactagaagacacactctcacacctgcttctgcagtcagtctgttgcgatatcatgcaccatgtagtctctggaaaattccactgtaagcatgtgagaaaatgaaagcaaaaaaatcaaataacatattagctttatcataaaaataattttgacctcattgattcccaagcttctccagaccacactttgaggactattgatcttactcagtgataagagctttcatgtagattgattcaactgcacctcacaaagtttttaaatgcctttgattatccctattacacactcagggaaagtaatccttgga

SEQ ID NO: 213231 - DNA, 402 bp, Homo sapiens
gactgtgacagaaaatcctccccctctcttatggcctaggagcaaaggactttccctctcccaaggctccactttctgtttctccttctcctgctatatctttggcccagtgagcttctcaatcctgttcagagaagcacacaccttccgtgggctcacctgtggcgatttccaggtagtcttgactcttcatcaggctcagtgttgagaggcagccatcacttggcatccatgaatggcacccttacccccatagttgtgtcacctggctgccatgttctgggcttatgtgttccccatcattccttttggccacactaccagtattgtggtaaaatgaagggaggtgaaggggtgtgtatcattctctgtctgccctagcatcccctgcaagcttgttct

SEQ ID NO: 213232 - DNA, 136 bp, Homo sapiens
ctcgagcgggctcggctcacagcgaccggcggccggggagatgtgagctggggccggcgggcgcggccggaccgccgcgatgtggctcaagcccgaggaggtgctgctgaagaacgcgctgaagctctgggtgacc

SEQ ID NO: 213233 - DNA, 178 bp, Homo sapiens
cattagggtggcgacctggatgaggcgtccttgcttctgggtgcaaagactcctagctggaagtctaggaaaaattacctaggaaaaaagacttcaattataactgataaattagagaaagttgacgtttaaggattagcgtcatagatgacttcagggcattaaaatttggagcact

SEQ ID NO: 213234 - DNA, 216 bp, Homo sapiens
tatgatttcaaattatatttttaggcaacagatgcaacttattaataatttaatgctgtagcaaagaactactgaaaatgaatcaaacagaaactcacccccttagggtataatctagggttggtatatatttagctcagtctgctttctctaaccacagaatctttaatatttctataatgctctatgctaaccaaagtgtacgcatgtttcttt

SEQ ID NO: 213235 - DNA, 483 bp, Homo sapiens
aaacagaaatataaagacttctatcatgaaagaagagcctgaggaatgaactaaagtgttaacactctgctcagcagatgtcagctcggaacaatggggtgagggaagtgggaaagtgagacaaggagatcaatgaagcaacggtatgcagtatatgacttcacagtcagctaagtgtgattttagcctactctgcctatgtaggagccattcttatttcctttaatttcctaaaaaaagaaaaacatatatttaaaaagtgattttatatttttcaatggttgcaacataatcaaaagaatcatatgtcagccaagcacggtggctcacacctgtcatctcagactttgggaggccaaggcgggcggatcatgaggtcaggagttcaagaccagcctggccaacatgatgaaaccccgtctctactatctgaggcaggagaattgcttaaacccaggaggtggaggttgcagtgagccaaga

SEQ ID NO: 213236 - DNA, 393 bp, Homo sapiens
tccaaagtagattgtttcctcatgttacacattcttctattttcccatcattatccttcatattgacattcacagtttcattaattatttgtgtaatgatttacattgtaaaaacacaaaaaaatagttcaccactggtcattaatgtccagtgtatatttggcactgagtgaatatttgtggaataaaaaataaataaataaatctgtagatggattctaactttggcattgtccttaaaaatacctttcctagtatacaatattgaattctacttttactgactgtatgatatctttaattctttaacaggaaatatattttgatatgttatttaaaattgtgacttgaccttactgattttttcaaataaaaagtattttttcaaaaact

SEQ ID NO: 213237 - DNA, 315 bp, Homo sapiens
tgagttgtgcataaaagcagttcagactaggctggccatagaggagatgacaggcctggtgcagattcacctgggaagggaaggcagctgatgaacaggggctgcgggatactctcctgggctgccaggagccagtctatggccccaaaagcatagtgtgtagggttttagcctggaatccaggagagactggggagaagccccagtctgccctccacctcctgccccgcccaaccagttcctctagactgatgttctcctctctcctatgactttctaccctagggggggtctctgtaagccaataattgatta

SEQ ID NO: 213238 - DNA, 515 bp, Homo sapiens
aaaatttcccattgtgtgatgatgcgtgaatctttgatctctattggtctgacttcatactcaggctacttagtttattttgagaaagcaatctttcctgttgtttctcaggaaatggaagaacatatttatgaacaatgttttaactttcagtttaagtggttttaattttttaactattttcactttgaagagtatataattatgtggagaaattaagactctcaaaaagaaactagagcaaagaggtggagaggcaattgtatagtcagacttcagctaaaagggtgcatttttaaaagatgcctcacaaaaactgttacaccctgtttcttcctgtgaagaattttccaagcattaagttgtgtaatagcttaatgggggaaaaggaaattcccaggtttctctcaaatcggcatgagcataaagaaagattagaggcttaatttacaaaggagtgtcctatcacctgcttaggcttgttaaattattacaataatctctggagccactca

SEQ ID NO: 213239 - DNA, 475 bp, Homo sapiens
aagacattcaggtatcttaggtactgtggcaaactggaaagaacattcttgtcttgagttggagctccagctcatccccaactgcctgttgtcacagggaagtcaggctgaatgttaccaaatcttctgatttttaaagaggtactggaaatttcagtttttatatgaaaacttctgttttttaaacacaagcatctaattcacattctcttaaaacatttttcaggccaaataaaatccagaagctcagtcctttaagtttccacttgggatttagaccttcataaataaagaccatttcattcttcccagaggttaagaaatccaggtttcagaacacaatgcctaggcttctttgttggaagagacatggaaaaattcctctcattctttgctgatgagcctacaaccttgaacacaagacacagttaactctgtaatcaagttattctgccacgtgaaatttttcacaaat

SEQ ID NO: 213240 - DNA, 296 bp, Homo sapiens
ccaacagagctagtaagagtgggagctggaattcaaacccaggtttgtctaatttggaagccaaaggttttaattagtatattagattttataccgtttaatttatacaataaaaattaaacacatattcttaatcaggagggctgtccccttacaacacattacatgagaagcccagcaagtcatggaaatgactccagtgttttagtaacacagctctctgagagtagcatccaatatgaaacccaaagggggatttcatattttctgcttatacattggctattcatagtatg

SEQ ID NO: 213241 - DNA, 163 bp, Homo sapiens
atttactactccttttactgattctggaaatatctcagaaaaaagtgaaatagacctctaccagaaaaagagagaggtccagattccatgccactcaccctgtatacccagtggctcctccagagtcagttcaaacacaataggttcattctggtactaagta

SEQ ID NO: 213242 - DNA, 471 bp, Homo sapiens
aatagggagtaaaagttatctcaggtacacgaaagaacatgagtcaatgacttaggaaatgctcagacactgtaaggagagaatgatcacctatggagtcttccagattccaaagaaccagctctaatgaggggataccattgcattgtcagataatagacaagacaagcatcccaaacagccttcccctcttccaacagtgggattctagggcagggattaccaggtgtactttggcaacagtctttagtacctttgaagggccaatcaagggtgttttgaaattgtccaaagaaaattgtagctgaaaatcactaaccctggggaagaaagggtgattgggaaacccatttacaatggtatgaacgaatactcaccatgggtctagcgctgtgataagaacttccttctctctcactgatgggagcacacttcacctagcaatgggccatgacaatgggccactcccct

SEQ ID NO: 213243 - DNA, 391 bp, Homo sapiens
tttggctctgtgttcccacccaaatctcacctcaaattgtaataattcccatgtgttaagagcgagaccaggtggagataattgaatcatggtggcagtttcctctatgctgttctcatgatagtgacttctcatgagatctgatggttttataaggggcttcccccttttctcagcactcatcctccctcctgctgccctgcgaagaggtgctttctgccatgattgtcagtttcctgaggccttcacagctatgcggaactacgagtcaattaaacctcttttctttataaattacccagtcttgggtatttcttcatagcagcatgaaaacagactaatacagtaaattggtaccaggagtagtggatcactgctgaaaacataccca

SEQ ID NO: 213244 - DNA, 309 bp, Homo sapiens
acagtctctcatggcttcccttggctagggaagggaaatcccctgaccccttgcacttcccaggtgagacaacaccccaccctgcttcagctcaccctccatgggctgcatccactgtccaaccagtcctattgagatgtactgggtacctcagttggaaatgtaggaatcatccaccttctgtgttgatctcgctgggagctgcagactggagctgttcctatttggccatctttttggctgtatctgttttgatgctagggtcatgcagttttgattactacagctttgtgtattagattttgagat

SEQ ID NO: 213245 - DNA, 358 bp, Homo sapiens
ctcatgtttttccttccatgtctcaatggcttacagaagatattgtggcagataataaatttagttgagcttctaactgtagcatagtttttactgtcaaggagcatatagtttagttcagggaacagcaaagtataaccccacagaccaaatctagtctgctgctcatttttgtaaataaagttttattggaacacagccatgcactttcatttacatatagtctatggctgatgtcatgctacaaaggcagagttgaatcactgcaacaaagaccatatgatacacaaagtctaaaatatttactatctggtctttatttatataaaaagcgtgctgacctttggtctagcagaag

SEQ ID NO: 213246 - DNA, 457 bp, Homo sapiens
ccgtgtaatgttatttggagtactttggcagaaaacttgggactgtcttaattgtaaaaacatatagctacattttactgtttttctcacttctcttgacagttgaaacttgtaactgctcccttcttgaaacttgcctggctcttgtgatgccacagcctcctactgcttgtctggcctttctggccatttctcagcaggttggttttcctcacctgccggttgaatgttttcagtcttgaagggactgttggagttctcttttcactcttccattccccctggacatcctcacggacttaactagtttgagcacctatgcagtgtcggttcccaggtgtgtaccttagctctggttccacctgcttgctgggcaacaccttccttggctgtcccatgggccccttggattccgcatgcccacagcagtccttgtttcttccccacgccgagcccc

SEQ ID NO: 213247 - DNA, 180 bp, Homo sapiens
ttctgccaagtgtttggttgtgtgatctttgcaagtttctttactttcctgggccctagtttcctcagctgtaaattggcaataatagtagtatctgctgtgaggttggaatacccctattcatctgtgtctcttcagccaagtgcttggctactggttgagtcaagtggggttgagtgt

SEQ ID NO: 213248 - DNA, 782 bp, Homo sapiens
tctagagggtgcgatgatggaagaataaaatgggatggaataataccagtgtcctgctgcattggtattcaaattcagtatccaaggctccacatgcctgaaatacagatttactctgaaatacagtggatggccaacaaatgtttcctgattgaaaaaagatggaaggaaagggaagggagagaaggagaagctagggaagtcctgtgtggaacagtagagctgggatcaggtacctcataagagaggcggggcaaggtctgataacccctttttttcaccgttctacagtaccgtgtgcggtggggtctggagtgagccagaacagataagtcgttgccccttgccatcccccaaaactatgcccagggtagctggccaggactctgtctgcatcacactcctgccagtgtatggcatggggcctggcaaataggaggtgcctttaaaacgcttgttgagcagaacattccagttgacctgatagttcttcatgaacatagtcattcattttcattgacagaacttatgttaaatgatacgaagttattttgagaggtaagtgaccctgaccctgtccacaagaattattcagttccgtgaatttggtccagcagagtctggtttttaacagtcatttggcctgagctattgactgcaaacttttaagattcttccaggctgtctcattagaagttgacagcactttggcaccacggagacctacaggtgtccttattcccccaccacgcttctggtaatgagaaatgaaagtcgtccag

SEQ ID NO: 213249 - DNA, 406 bp, Homo sapiens
caggtggcaatggggagagcacacagattcaaggagaatatttagaaggaagaatttggcagatcggtgcccttgtgagatgtgaggggtgaagaagaagctatcaagagtgaatcccatagttctggcctgagagactgaataaaaatatcctttttttctttctttatgttttatagtttcattcctttttattgtaaattgacatttataattgaatacatttatggggtaaaaagtggtgttataatttatgaatacaatgtggaataattaaatcaagctagttaacatatccattacctcaaacatttaacattttttgtggtgagaacatttgaaatttaacaattttgaaatgtacaattctctattattaactatagtcactacactgtgcaaattt

SEQ ID NO: 213250 - DNA, 399 bp, Homo sapiens
catgaattacatcctcttagcacgtacacattctgctgatgttcaaacaactaccttagaatcctgtagctaccttcgcatttgtgtgccttccgtttataaataaagggaataaagggaagtttagaaaatgttgctgtatttacatgttcattcattctaggtatagaaacagaaacttctctcatcacagtttttactcatctccaagttaaatgacattcatctgttctgagagttcttccccactcctttccctaccccttgggaaaaaaaattgactggttttggtggctcacacctgtaaccccagcactttgggaagccgaggcaagagggtcacttgaatccaggcatttgagaccaacctgggcaacataatgagaccccacctttacc

SEQ ID NO: 213251 - DNA, 123 bp, Homo sapiens
taaaaggaaaaacacatatttaaaatttagtgccttttcctgtaataagggaaaaaacttgccaatttttaaatgcttttaaccatctctacaggtccaaacttaagttagttctttaacatg

SEQ ID NO: 213252 - DNA, 418 bp, Homo sapiens
agtctgctaaaatgttccaagaaggctttagtgaggataaatgtggttggtaccatccaccctgcctcttttggctttaaatacaggtaagaagtgagaaaaatgaactcctagtgtttagggccctgtgagtctggtatgatactacttaaagccaaaccggtcctatgtaataaagccaggcagtggtgtaagcactttacaaatattaacacaactagaattatttggggtctatggataatttaagataccatttggcagaatcttatcaaaccactgataaattgtattctatctgctataggattctaccgttccagtggtctaacactgactcagtcttcacaagcttttaagcaaaactaattacaagaaacagaataattaactcacagcctttattctttatcctatg

SEQ ID NO: 213253 - DNA, 352 bp, Homo sapiens
ttgatattttaccagataatcaaaccataaattaataatgggtagcatatctagaaaaagacatattttctacatttaaaaaataggtatactgtttatcaaaattttaaatttgtatttgtttttaaaagggcctactgtttatgtgtcaaacacttcagagtaaagtatttgctttcatacatttcctgaattaggttctataacataaccttctcccaaattctatttctttctgcaccttttattgacctgccgccttaccttgttccctgattttgagtatggcaaacggtctgtggagcctgctgaggtgggctgtattaataaactgtcagaaaatgtagccctt

SEQ ID NO: 213254 - DNA, 447 bp, Homo sapiens
gacgatgccagctggccatcgcaggatcaggtgattcctttggagcaggccagagattctatgtgatatttgttctgcactttcttagaagtcctggaaattctgtgaaattgtgtattcccctggcttttcttcttctccctccatcttctctcctcagagttctgctaccacctagagttttgtatgccatttcctggctcttctgagcagggatgattaatctttttcttcatttttgagcctgcctattctcattgatctccaggggcttggagtggtctctagcaaagaatcaatagctgatggctgcagagatgttgattcacacaccaagggtattttacttaaaaagaaaataggtgaatgcagaacctccctgttttcagatccttcatgttgattggaaccttaaacattactggcacttcatatgttattttaatt

SEQ ID NO: 213255 - DNA, 208 bp, Homo sapiens
tcgcaccaagactccgtatcaaaaaaaaaaaaaagtcactgaataaataatagttcaaatagtaagcacatttgggaaaaaccatgatgttatctgaagattatgtatgggaaagatttttatataccgatgcctacactttggcagaactatttttttttattgtgcacatacttttcctcagtgttttttttttatttttgatttt

SEQ ID NO: 213256 - DNA, 357 bp, Homo sapiens
aactaggtgaaagacataggttggataagatgtgcatgttctgtagaagcagtgtctgagctggggatgctaagctctccaataaaatctgtaaggagttgtgagaagcacgaaaggacaggagaaggtgcttggcaagggcttgggtttggctgacatctacccttagcctgatcccatggggaggctgggagtgtggatggcatcacagagttgtcatcccttctgtcgaggagcccagacttctccactcagtaccagccagtcactggctgaggggctcccccaggggaaggcaaaatctcccaagtgtttcatggttaggagctccccctaccaaccccagggcaattatcg

SEQ ID NO: 213257 - DNA, 271 bp, Homo sapiens
cacacccagctgagattcttatcttggtaattttttgcacagagaactcagctctctatcatactacattttaatgagctacacggtgatttatgacttgtgctctttccttttctaatcagctcatcaacaccatacccattctatgtcagtttactttagaattgaaattttgccttttatataatgctgttaggtggcttgcattcgatttgggggataaatagattttgaatcagcttttgctgctcaacaaaccactccaaaactt

SEQ ID NO: 213258 - DNA, 323 bp, Homo sapiens
cacacccagctgagattcttatcttggtaattttttgcacagagaactcagctctctatcatactacattttaatgagctacacggtgatttatgacttgtgctctttccttttctaatcagctcatcaacaccatacccattctatgtcagtttactttagaattgaaattttgccttttatataatgctgttaggtggcttgcattcgatttgggggataaatagattttgaatcaccgtgtagctcattaaaatgtagtatgatagagagctgagttctctgtgcaaaataataccaagataagaatctcagctgggtgt

SEQ ID NO: 213259 - DNA, 695 bp, Homo sapiens
gcgtgcgctcccggttcagtcttgaaaggcgctagaggcccagcctgtccttggagccctctgctactccccaccttctggccggccctcgaggcggtggctcttccttctcgagcaggtgtccaaggtggaagcacagaccctgtctcttctgctgcgtctccggcagatgtgggtgaggggctcatgggtggtgccctcgaggcacgggagggacctgggtctgggcccccggcacctggggggctgtgttggcaaagcaggagggcacaggtgcccagctgctgatccttccccattcctgctcagatgtggacgaatgccgaacccacaacggtggctgccagcaccggtgcgtgaacaccccaggctcctacctctgtgagtgcaagcccggcttccggctccacactgacagcaggacctgcctggccattaactcctgcgccctgggcaatggcggctgccagcaccactgtgtccagctcacaatcactcggcatcgctgccagtgccggcccgggttccagctccaggaggacggcaggcattgtgtccgtgagtgctgccagcctgggagggaggacctgggggtggaggcaggacaagctgcctcgcctgggctgttgggtggaagtgggtcttcaggaggcccccaaggctgctgagaggcctggtagggatggcacatttgg

SEQ ID NO: 213260 - DNA, 414 bp, Homo sapiens
gccagagagccaggccctgtcaggcacgcacatggaggatgagggaggtgcagttgttttcacaggtgcagactctagagggaccccacgtggactctgtggcttctgccccgacgcactcgcgggaggacacagctctgcccggaagggagagtgctgagctgggtccctgctgctcatctctgtggcatcaccctgtcagtccttccctgtcacacatatgttccgcaagacctgccgtcaaatatttgctcagtcaaacatttgttgaatgggatgagccatggaggttcagacagatgccgtgacctgaagtgtcaaatgaagggatgcgtgtgtgatggccttcaccatttatattgttttaaacttgctaagcactagttaaaataaaaaagccaacacttttcttta

SEQ ID NO: 213261 - DNA, 258 bp, Homo sapiens
agagatcctcctgcctcagcctcctgaatagctaggactacaggtgcatgctaccacacgcagctagctttttaattgccgcacaattttttgtctgaaaatattcacaggattcccagagaacagacttagatagctgttgaggaggatagaaatgaatgcactgaataattacaaatgggaatagaagggcccggtggagcagcgcatgctcagctggaagagattatgggaggttgttaaatttgctgcttcagg

SEQ ID NO: 213262 - DNA, 251 bp, Homo sapiens
ctgagagccgagttgtagcctcctgctggactacaggtgcatgctaccacacgcagctagctttttaattgccgcacaattttttgtctgaaaatattcacaggattcccagagaacagacttagatagctgttgaggaggatagaaatgaatgcactgaataattacaaatgggaatagaagggcccggtggagcagcgcatgctcagctggaagagattatgggaggttgttaaatttgctgcttcagg

SEQ ID NO: 213263 - DNA, 153 bp, Homo sapiens
tatgaggtcagatatcaggcatttactattgtatatgccagtgactagaatagtcctgtatgtttcaggaattcaacatatgaaccagtaaatgaatgaataatgaatgagtctgtttatccagttaaatgttgcacatctgccaggtctcag

SEQ ID NO: 213264 - DNA, 293 bp, Homo sapiens
aggatcactgaagtccagatgttcgaggctgcagtgagctgtgattgtgccactgcactgtagcctaggtgacagggtaagaccctgtctcaggaaaaaaaaaaaaaaaagccaagaaaggaaaataaagagggctgtgacagtattctgggcaagagatgatgacagcacggactaaggtgttagcagtagaggttgctggaatttgcgtatgaggtgcctgggtgggaaagacaaaggtgatccctagcagtggtcagtatggagttggcagctaattcgtgattgttgat

SEQ ID NO: 213265 - DNA, 254 bp, Homo sapiens
tttttgaggtgagctgaatgagaccctttgctagagctggcacagggaggaaggtcgtcctggagggagggtagacactgtggagggaagggagacctgtgtcaggagagctgagaccacctctctgcccctcactactcttgtaatctttaggagtgtaaataatccccctaaggtggggacaggaccccagtccctgctgtgcgcaatagattatgatgatcaaaataaataatcagtgaatgtggatggga

SEQ ID NO: 213266 - DNA, 745 bp, Homo sapiens
tcaagaagccaacttagaaagaagggtctcacgtggctggcctggctcctccgtagacccctgttcttttcaacctctgcccacccgtgcatgtcatcaccaacatttgctcttaagttacaagagaccacatccacccagggattagggttcaagtagcagctgctaacccttgcaccagcccttgtgggactcccaacacaagacaaaactcaggatgcttcttgacgtcaagaagctcctgagttcaagcaattctcttgcctcagcctcccaagtagctgggattacaggcacacaccaccacgcccagctaatttttgtatttttagtagaggtgggatttcactatgttggccaggctggtcttgaactcctgacctcaggtgagccactgtgcccagccaagagttgtcttttttaatgctctaatttaatcaagtgcataggtaataaattctgtaaaagtaaatctgctctttttatatatacctatagcttcctgcaacaagtagctcctggccataggagcatgcccaactcaggtgagacaggctggtgttgagttcacagctctaggaggagccctcagtgatatgtaagagttggtagataaatatggcagcttcctcaagtaggacaactttcaagcacattctgtttagtcttccggagcccaatacccacagctgtaacctgctcataaacgtacctctaaggcttccttcccttctgtcgtcttctc

SEQ ID NO: 213267 - DNA, 330 bp, Homo sapiens
gaggaaacagattagttaatgcttttccatttgccctccaacttcaaaaattttgttgctattttctcttcacttgttctttttgtctttttggatttgttcaataccttctttattcctttactgtcttttcagtgggatcttgggagggagcagaggtaaatgtggatgtatgatattatttttaaactgaaaatctctagttgtaactatacttacattgttaaacatttagtagtctgtccttaggaatgttggctataagtatatatagaacttaaaaaaataatagatttctgtaatatagtatgtaagaacagtggggacgca

SEQ ID NO: 213268 - DNA, 396 bp, Homo sapiens
atgaggtttttttggtttgcttacattgcagaattgtaagcaaaatgttgaacattgtataactcttcttggtgtagatataggttcattgcttaacattttgaggtgataatccatatatatatatatatatatgttttgagacaatttgtctttgagacatgagtcagcttcaagttcctgtgtataggtgtgtaaatttgggttagatatttaatgtctgtaagactcggttttgtcatctgtaaaatgaacataataataagtctcagttttcatgtctgtacaatgagcaacttctaaaagtgttataataattaaataagctaatacatataaaattcttagatatgcctgtcaaaacctaagaataaagcacatgttcacttttctgtg

SEQ ID NO: 213269 - DNA, 614 bp, Homo sapiens
tgtttgtttgttgttaagacaaaggtcttcccctgttgctcaggctggagtgcaatagcatgcttatagttcactaaagccttcatcttctgggctcaagtgatcttcccacctcaatctccaaagtagttgggcctacaagcactcgccaacttacttggctatttttatttttagtggagacaagttctcaccaggttgcccaggctggtctcaaactcctgaactcaagcgatcctctcacctaggcctcccaaagtgctgggattacaggtgttagctactgtgaccggccgaaggcatagtatctttattagatgaccctagtgttagaatttgggagtttgaaaatggctaaagcaagattttgtgtgcttagtattttccagtttactggtcatttaaattttctttacaatggagttcgcccattgagtgatatttcaatttggaagagtataaaggatattgtttgtggtaggtgaagcaaattactcaaagtgaaaggttaatattattttccttgttgatgcttgatcaccagaattatagtttgaggaaggaagcttaccaaaatatttgaaaaatgttgtgcatgtattttgtaagaccca

SEQ ID NO: 213270 - DNA, 102 bp, Homo sapiens
tacaggaaatttaaccgtttgggggctgaaccaggcttctttacataaattaatgttttcttggcaggtaaatgaatgagcccttcaaattcggacgtaacc

SEQ ID NO: 213271 - DNA, 483 bp, Homo sapiens
tcttcaaataactgaatagtataatattggaaataacggagccttattctcttctccaaagtgcagaactaaaaccaatagaaattacaaggcagtatttttaagctcagaaaatcctctaacatttagagttgttctgaaataaatgaaattaggtatttgggggaagtaatgtcatttgaagacagcctgcctgagaggtttgttgaaagctcttctatattaggaaacattaaaactggctgtgtaacccaagaaagctccatctcagtgttctttgcacctgtcttttagcatttaccacgtattttttttttagttatttgtgtatataccattcttatctctcccaataagcaacaacaaaacctggctcccaatgctagatacagacccatgcaaaagaacacagggcagtaaccttccttaaatttgtacattccgctttgttctacttctagcataacctcctgcatagctggg

SEQ ID NO: 213272 - DNA, 649 bp, Homo sapiens
  misc_feature (503)..(503): n is a, c, g, or t
  misc_feature (545)..(545): n is a, c, g, or t
tatgatacataaaagaatggataaacaaacggtggcacatccatataatggatgctactcagcattaaacacaaggatccaacagttgacatgcaacacgtgaatgaatttcaaatgatttacgctaaatggaagaagcctgcctacagtataatttcacttacatgacattctggaaaaggcaaaattaaagggttggaggttggggcagagagggaatttgggggacgatagacctgtatgactgtgacggtggatctgtgactccatgcctttatgaaaccacagaactgaccaccaaaatgaattttactgtatgtaaattttatttatttttttgagacagtctcgctctgttgcccaggctggagtacagtggtgtgatttctgctcactgcagcctctacctcccaagctcaagcaatcctcccacctcagcctcctaaatagctgggactacaggcacacaccacccataagttgcccagctaacttatttattnttgtagagatggtgtcttgctatattgcctaggctggtctcnaacttcgggattccagcaatcctcccaccttggcgtcactaaagtgcatggaattacaggcatggccaccatgcccagtacaaacatctgtgcctggcctgggc

SEQ ID NO: 213273 - DNA, 449 bp, Homo sapiens
tagtcttcagcttagttatctcttctttcttacttgactcattagaatttgtttaaactgttataaaattttacagcttttcaaaaatgcaattaatcagatttgaaaaaaatccatttccatctattaaaaaatatatacacatgttaatatgtgtacacattctttattagaagtaagttgtatctgtgcccagcaattgaaaagtgtgttttctcttgccatgcagtttttgtactgtacatccatgttgcatttttaaggaagtaatattgcctgtgctaggctctgctacaggaagtaaatgatctttgtgtcagtgaaaatagaaggttctatcccatattgatctcttagcacttaaactagtgtgctatgcctcagttgcctaaaataggcagcttaagaattttgtaatttaaaaactcaaaaccccatagtatctgcag

SEQ ID NO: 213274 - DNA, 918 bp, Homo sapiens
gagtttattttctaaatgtccacattctggagtagaggcttacatatttacaatatgtaagataattttttaatggtttgcatggacagatgacttttcctgaaagataaaattccaattctctaaataacagcaaaagaaagcattaaggagtgttctgttagacagattaatgaaattatgttcttaaacactgctcctcacacaccatattgcatttatcagtctagtttctaagggaccacatgactctcttatggctacttttctttcttaacttgaagttgtttacacccgtgcctcttctgctctttatttttcttctttcttctactctgaattaacttaagtttctggccactattcttcaaacctgaggtttattttccagatgtttgagacattattttcacatttctaatgcttccacccattctttaaagaagtattaggggaccatgtgtccatactttgtgtgtgtgtgtgtgtgtgtgtttgtgtgtgtgtagagagagagagagactgagaagtgaatctagtattcaatggagcaatcagtcagaagacaattggtagctcagtatagctgcagattcttacatacaggcatgtgagagagccctcattgcactgagccttggtcattaggagccaaccttagccgaagtagataaaattgcacatagccaaagtacataaaactgcacttcaagaagctttctttgaaaagtcagtagctaacctgaaaactaagggattccccattttctctgaatatatggggattttgcagcccttccttctgtgaatttcagcttaattctaggcagcaattcggaatttgcctggggtactaaccagaaaagagaaggaaatacacacacacacacacacacacacacagagagagagagagag

SEQ ID NO: 213275 - DNA, 408 bp, Homo sapiens
tggggacctgctgggaatccctttccccactgactgacaagaaacccaaaggtgcttgaagacatgatggttttccctgctgaagaggagtggctgccaccacagtatacacctccgcagggctgacctctggggagagggtccttccaggcacatccgtaaagcgacacacctgtcaatctgcctgagttttcatggtcttgtggtgtgcttctgaaggatcatgaaagaaagggcatgcgcgattttagataattgtttcaacacggggcttggtagaaaacaaaactcataactggaactgtgttttatgcatgaggcagctctggggccctgccagctcatggcttgcctaggccatacgtcctcaaacgcaccagcctcaggacatgaggaatcctgagccct

SEQ ID NO: 213276 - DNA, 1348 bp, Homo sapiens
ggggaatcacagatttgaatttgaaagtaatcttaaatgttacctggtacagactcccaccccactcagcccccttttccaggtttcctagcactttgctttttctattagcatatttagattttttctcttgagggggttggtctgttttgtgttttgttaggatggactttctgtttgtagatgtttctgtttgtggtttagttttaatgagagaagcataattggcagtagttaatgtgactataagttatttggcagatggtaccatcagcatttattaaaactaattgtatttttctagtaagcagtcttatgtcccagttgttaaaaattagtaaagttagaagtaaatgttaaagttacacagtagttctaaaaataaaacattaccctgcaatctttgaaagaaaactgtagcagaaatgtaaatctaaaaataaatgttacatcactggctttttaaaataaattcctttgaggttagattaaatatataagtaaaacgattttaaataaatagaagactagtcaagttctaaacaaatggtttcttaagaaaaatttgttttctttgcatgttagctctttgacatgcaaaatatctagctacttcccttgtttattttagacatttggatctgtgagtggcccccaagtttcctaatttgtctgtttatttactctgtctatagtacatgttgtcttcagtatcaatctccatttcatagttctggagttttaatatttatgaaggactgtgtgtattgagttcttgaaatatgttaacttttgaaaggctttgttgacttacaaaatgttaaaacttaaatattgttgctctcaaaatattatagtattggtttcttaattctgaaaatttaaactgcctgagtagctcttctccctacaagtttcagtataaactcattcaatataaagtctgcttgcttttatattatgcattccaaaataaaaatgatgaaatattagtatcagttacacaaatgtaactactcacatttgaaccattttattgtacaattcaactttcaattatgataatcagtctcttgctgaactttttagatctagatgagaattataaatttttgttattttatatgtgttatatgtgtttatatatgttttatattgtgttatttcacaaatcatcacaaaagggcaatttcaaagattcttttgagaggacagcttaaagcttaatccttaaggcttgactttcttctattaaatgagattgatacctaaaatcatggtataaattattaattgaattccacccaagttctgttgttttgttctttctcacagtcattccaaatta

SEQ ID NO: 213277 - DNA, 500 bp, Homo sapiens
aaatccaaaatctgaaacacttctggtcccaagcatttcagataagggatactccacctttataaactttttaaaaaatggcatcatcatagattacatctagattggcatatatatacctgttttctctgggaatttggatttccattattacatgtgaactcgagttcttttcactttggggctcttgttgacttactttagaagtccaagtagaacttttgaaagatggcctttcacacatatgtaaggtcttttcaggactgttagaagaccaaatctcttcctttcttttttcccctgttgtttcttttgggtttgatataaatattttcctcaggaaaaaaaatgtattgctgcaatttgagtaattacttcttttaaaaatttttcatatttgaaattctctttcagattagtttgcatttttttgtgtgtatgactactgagttctggtaaataaagggaatcttctatattataattgagtatgtaatatt

SEQ ID NO: 213278 - DNA, 843 bp, Homo sapiens
gaaaaagagaaaaaaaaactgcttgaagagggcagcgaatgcacctgcagcattaccgggaggactgcagaactttctttgctttaaaacataaaacaaacaaaaatgctcccggatgtaaatagtaagagtgtcaagttcttataaaaatagatttcaccctagctacatataggtttgtttgtatatttgatttttctacactgcatggttcctgggctggagaaccacaggggagcaaataaacaggggtgggtgggaagctagggaaacaaccgttttcctctttaggtgtgtgtaactctcacagattttatttaaattgctttcatttattttttctttaaaaatgctgtttgttcttgttttgtttgttttaatttttttctttcctggtcaagtttctaatacaaaacatgagcattaaagcttatgttgtaccaaaagaaaatgtgctttaccacggaccacggagaaagttgaccacaaagtttgacaaaactactggaaaacccaataagtctgggtgaatgacccttcatgacaaatgccatatatggtacatgatagaaggaattttgttttgtcccattggcagccctcactgtgtaggatgcctgagagagccatgaagatctccgaatgagaagaccagcagaatcattctcatgtggactaaggctataagagagatatgaccatgggctcaatgaatgaaactgccaagctgacaaatttctaaacacaagataatgtgtaacattgctttttaaattaattatcaattagcttttgtgtagtttttatcaataaaagaaaaaatattgaaaaataaatatatta

SEQ ID NO: 213279 - DNA, 1195 bp, Homo sapiens
ccagtgcttctgaatttgaaagtcttcatgcaaatgcccaggttgctggcagctgtgtctcagaaaaagctgtcttcagcaaggcagaagcagaccagggtggtccagagttggtgactattatggcatggctacccagggccagagaggtgaggtttaatgagaaagaagatagatgaaaatgactcctcctcctgctttcactgctgcagcaactcaggcctgcagacaagatccagctctattgcccaagctggagtgcagtggtgagataatgattcactgcagccttgatctcctgggctcaagcagttctcctgcctcagcctcctgagtagctgggaccacaggcaccctccaccatgtctggccaaaattttttgaattttttgtagagaccaggtttcaccatgttgcccaggctgatttcaaattcctgggctcaagtgatcttcctgcctcagcctctcaaagtgctgagattacaagtgtgagccaccacacccagccaaaatataaatacgcctttaatagtaacacctaattacctaacaccatcaaaaatggggtgctccatgaagaagcacataattcaaattattgaagtttatcccttctaatgaccacatagatttctcttgccccattaaaaaattagataatcagtatttctaggatagttgttttcttccaaccaattaaggcataatctatgtagcagaacattcagaggatgatgcctggtcaacatttgaataaacaatcactgtgatgttacctctatttaagatgactccaataaaacttctatggtttgcattattagttgatcagactttaagcattatcttttgatagggtcaaggaacctgtcttaactccccatctctgaccaaaatatacttgttttctataagctataaagccagatagccaattttatgagaattgtccctatactatatccatgtgagcgatgagtgcctggcatgaagatgcataaaggaggcagtaatatacaacaactgaagcataacctctggagccagtcttcttcagacaaatcccaattccattactcactggccacctaaacaagctacttaattcatctgcctcagttttcttcaactgtttaatgggtatgatcaacaaaccaacttcagtgggttatcataaatattaataaatgaga

SEQ ID NO: 213280 - DNA, 994 bp, Homo sapiens
gaaactctgtctctactaaaaatacaaaaatcagccaggtgtgatggaacatgcctataatcctagctacttgggaagcggaggcttaggcaggagaatcgcttgaacccgggaggcagagtttgcagtgagctgagatggtaccactacactccagcctgggggacagagcgagactctgtctcaaaaaaaaaaaaaaaaaaaacctcaattgcattaggcccgatggagccacacaccaccagcagtgccagcagtgccagcagtgccagcagtgcaagaggcaggccgcagggcctagatgtgcacaatcacctcagatcactgtgtccttcattttctttatagagctccctcacttccttttgaaacactgaggccagcaggtttcccagcagggggccccgtgtcagcaaaggacatttgaccccagttttctagatatcctcaagacctctcagcttaggttacaactgacaagaagctaatatttgttttatattgattaatattgcatgtgtccctcatctttcctccctacctcaagtatattctgcttcaggtgtttatctgagtggctgctaaggctctcctcctcctgtacaaacgtgcccagctgaggcaggaggcaggagacaagaacctaaggccaatttgcgctgccttcctagaactgaatcaaaacgaaaaccccacctctccacgcccaagtaaggaaaggatcagaagctactccctttgcaaccccccctttccactgcctcacagatgaaaaatggaaagtacctctgattggtcccctcccacaaccaatctgactggtcgtggggcaggtttcatttacatagggtgtaaccaagtaaccaatgggaaacctctagagcatatttaaaccccagaaaattctgtaaccagggctcttgctgcttgctcgagcctactcccactctgtggagtgtacttttgtttcaataaatctgtacttctgttttgc

SEQ ID NO: 213281 - DNA, 437 bp, Homo sapiens
gtatctttatggtgttctctgtatttcctgaatttgaatgttggcctgtcttgctagtttagggaagatctcctggataatatcctgaagagtgttttctaacttggttccattctccccaacactttcaggtacaccaacctaataaaaatgtgaaagaaaaataaaccttgcccatttctaaaggcatttgtaaatacaaactactgtcactgacaaaccttggcatggtaaagacacataatttccaaatctgctacattccagtgggtaaatgaataatcaggagttatgagtggctccccagtgggaagaaaatttttgggattactgaccacaaaaagaaaaatttcaaaatttccagtatttgttactttaggttgctttccatctctgggaaatctactcttaccagaactagagaccgtttccaagga

SEQ ID NO: 213282 - DNA, 313 bp, Homo sapiens
aagtcaaagtaggcaccttctttgaaggtttgcttacttggtttcctcatctacaaaactgagttaataatagttctctatgtcactattcagtaagtaaaaccaatattgtaaaaattatcttgcattttagatgctatgtcagatattttttcatgtcatgcaatgtaataattttgaggtaaatggcttagtggattgaagtgttcgctggaaactttatgccatatgttttactaatcaacacatttattcgctaaaaaactattttcaaagagaggcaaatagtttgaaataaatctgacctgcattt

SEQ ID NO: 213283 - DNA, 373 bp, Homo sapiens
gcacgcgcctataatgccagctactgaggaggctgaggcaggagaattgcttgaacccgggaggcagaggttgcagtgagctgagattgtgccactgccctccagtctgggcgacagagcaagactctgtctcaaaaacaaacaaacaaccttttttttcaccattcactactaaaatcccattcaatgctatatcactgacctggtctactgcagtagccttgttactggcttgcttattcattgcctctttagcaatattgtccctgatgactcaagtcccactctatcacacttttctattttccttacagcccttactgctttctgaaatagtcttgtttttgttggtaacagagttctttagtgatga

SEQ ID NO: 213284 - DNA, 870 bp, Homo sapiens
gctgacttacaggacttccagggatgtgtgatctgcaactatgtgagagtgtgtgtttatgaggggttctatggtgatttcaataaccagctatcaccactgtcactttcttctctgttctgttatttccatgcacaatgaaaacttctcagttataaaaatgaattggaagatgaaatggttggaaacacataattcctcgtctccttctcatcagatgactgaaagctttgtgctggtcacaggatttggaagactctaactcccctcctatgaaaattctgatttttgagagagttcttggtagctaaatcttcttgggctaccacagtgtcagagcatactggaactggtgtgaggaacctaaagcctggcagatggagctcttcgcaattgacatcccctctctgccaagcccatcttgtgctctagtcacagtgcattagtagctggtcccaaccacatcaacacactttcacacctccagacatttgctcatgctgttgcctctgcctctgttttccctacttgaccaaaatcttttctttcagtgcccaaatgaaccctcttttgtaactgtccttccaatctctgatgtagaatggatggcccccattctgggcttctagagcaattgttaatacttttcacccggcactctggttggtaatttccctttctgcctgctcactagactgctggctttgtgaagatagggactgtatctgtggtgttctgctaagctggctctcctgatttgtagcacttacctatttccatggtataaatactctccaataccatcgccaatttcaagctatcagtgtgaagtcactgaacacagaattaggaagagatgcacacaacaag

SEQ ID NO: 213285 - DNA, 1583 bp, Homo sapiens
cggcaggagcacttgaggccaggagttcaagaccagcctgggcaatatagcacgaccctgtgtccaacaacaacaacaacgacaacacaaacaaacagaaaactaaagacatgcttattgacgtttcaatttcccaatctcagccccaatagacactttaaagctgttactcagggcagtgtattcggggtgatgaggccatgcccgcttcctctcttccaggaaagctctggttcgtcctcacgatgctgctgcggatgctggtgattgtcttggcggggcgacccgtctaccaggacgagcaggagaggtttgtctgcaacacgctgcagccgggatgcgccaatgtttgctacgacgtcttctcccccgtgtctcacctgcggttctggctgatccagggcgtgtgcgtcctcctcccctccgccgtcttcagcgtctatgtcctgcaccgaggagccacgctcgccgcgctgggcccccgccgctgccccgacccccgggagccggcctccgggcagagacgctgcccgcggccattcggggagcgcggcggcctccaggtgcccgacttttcggccggctacatcatccacctcctcctccggaccctgctggaggcagccttcggggccttgcactactttctctttggattcctggccccgaagaagttcccttgcacgcgccctccgtgcacgggcgtggtggactgctacgtgtcgcggcccacagagaagtccctgctgatgctgttcctctgggcggtcagcgcgctgtcttttctgctgggcctcgccgacctggtctgcagcctgcggcggcggatgcgcaggaggccgggaccccccacaagcccctccatccggaagcagagcggagcctcaggccacgcggagggacgccggactgacgaggagggtgggcgggaggaagagggggcaccggcgcccccgggtgcacgcgccggaggggagggggctggcagccccaggcgtacatccagggtgtcagggcacacgaagattccggatgaggatgagagtgaggtgacatcctccgccagcgaaaagctgggcagacagccccggggcaggccccaccgagaggccgcccaggaccccaggggctcaggatccgaggagcagccctcagcagcccccagccgcctggccgcgcccccttcctgcagcagcctgcagccccctgacccgcctgccagctccagtggtgctccccacctgagagccaggaagtctgagtgggtgtgaaaaaaacagcacctggcggtgccccggggctcacgcctgtaatcccaacactttgggaggcccaggcaggaggatcgtttgagaatatatctccttgcccaagagtttgagaccagcctggacaacataatgagaccctcgtctctacaaaatatctaaaaattagctgggcacagtggctccctcctgtagtcccagctacttgggaggctgagatgggaggaccatttgagcctgggagatcgaggctgcagtgagccaagatcacggcactgcgctgcagcctgggcaacacagtgagaccctgtcaaa

SEQ ID NO: 213286 - DNA, 1425 bp, Homo sapiens
  misc_feature (63)..(63): n is a, c, g, or t
atggaaggcgtggacttgctagggtttctcatcatcacattaaactgcaacgtgaccatggtnggaaagctctggttcgtcctcacgatgctgctgcggatgctggtgattgtcttggcggggcgacccgtctaccaggacgagcaggagaggtttgtctgcaacacgctgcagccgggatgcgccaatgtttgctacgacgtcttctcccccgtgtctcacctgcggttctggctgatccagggcgtgtgcgtcctcctcccctccgccgtcttcagcgtctatgtcctgcaccgaggagccacgctcgccgcgctgggcccccgccgctgccccgacccccgggagccggcctccgggcagagacgctgcccgcggccattcggggagcgcggcggcctccaggtgcccgacttttcggccggctacatcatccacctcctcctccggaccctgctggaggcagccttcggggccttgcactactttctctttggattcctggccccgaagaagttcccttgcacgcgccctccgtgcacgggcgtggtggactgctacgtgtcgcggcccacagagaagtccctgctgatgctgttcctctgggcggtcagcgcgctgtcttttctgctgggcctcgccgacctggtctgcagcctgcggcggcggatgcgcaggaggccgggaccccccacaagcccctccatccggaagcagagcggagcctcaggccacgcggagggacgccggactgacgaggagggtgggcgggaggaagagggggcaccggcgcccccgggtgcacgcgccggaggggagggggctggcagccccaggcgtacatccagggtgtcagggcacacgaagattccggatgaggatgagagtgaggtgacatcctccgccagcgaaaagctgggcagacagccccggggcaggccccaccgagaggccgcccaggaccccaggggctcaggatccgaggagcagccctcagcagcccccagccgcctggccgcgcccccttcctgcagcagcctgcagccccctgacccgcctgccagctccagtggtgctccccacctgagagccaggaagtctgagtgggtgtgaaaaaaacagcacctggcggtgccccggggctcacgcctgtaatcccaacactttgggaggcccaggcaggaggatcgtttgagaatatatctccttgcccaagagtttgagaccagcctggacaacataatgagaccctcgtctctacaaaatatctaaaaattagctgggcacagtggctccctcctgtagtcccagctacttgggaggctgagatgggaggaccatttgagcctgggagatcgaggctgcagtgagccaagatcacggcactgcgctgcagcctgggcaacacagtgagaccctgtcaaa

SEQ ID NO: 213287 - DNA, 256 bp, Homo sapiens
cggctcctacggtttagtccgaattagcccatcattgccgatatgtgctacttatcagcaagatgatggattatcaatcactgtattttcaactagagcagcttgtcaaaaaaattaaccaggtacgtttgttggctggtggcatgtatgcagagtcacagaaggtgaggagagtggcacctgcacatttttgtaaatctcttaagtcttgctaactggaaaacagctgtattcacctatctgcttctacagtcaa

SEQ ID NO: 213288 - DNA, 809 bp, Homo sapiens
ttgttctgttgaggtatcatgatagccacaaaaaacatctaggcctacaactaattaccttgcaaatggtaaatcactgtgggtttgaaattgtatgtaatatgaccattcttattacatagttaatcactaggtgtaagggcttttctattcattaatgttggaaataacagactgtgctgcccataagagactgagttggattatagagagaagagagtaaaatgtgcacgtttcatttgatggtatttttaatacgataggtgctatagatatagtgattttgaaaatgatctttcccatatgactattagtaagatttctttgttaatagaaaatgtatatttagaattttgttaagagtataagagctggactctgatggcttgggtttatatcctggccatttccaaagtgtaatttggcgaatatatttaatccctctgtaactcaggttcctcatttcacaatgggcatactaatagtacctatattatacaatattttagatggttattgggaggattaactgagtttcatgtaaagcagttaaaacagcatgtagtgcttggtaaagttagctgctattagctaatactgtgacacgtaaaattcaaattattaatgattcgggtgcctaaatgaaacttttttttccttagctcctttttcttctccgagatgttaatttcctgaggtgctagctagattaccctagcttgggtacttactcttgaaggggccccaattttgttgtggacacctttcaatggcacaaccgtgccaaccatgtacaggggccacctttg

SEQ ID NO: 213289 - DNA, 357 bp, Homo sapiens
aaggaaggcagttttggagtgtctcagttcccaggcttaacttttcctttggcatagtgagtagaatgtctagaaggaagtgttatccaggtacagaacatcgctcccctgacatactgcagacgtctctagtggcccagaatattcgtgtttcttcttggacagtgtcgtataaataccgtttaattttcatcatccaatgcccttttaaaaatcaaatatgagaagtagtttactcatgccagctgtatcacacatcacacagccattgaaactagaaatttctactcattagtctttttttttttgagacagggtcttgttccaccacccaaactggagtgcagtggtgcaatc

SEQ ID NO: 213290 - DNA, 287 bp, Homo sapiens
  misc_feature (1)..(1): n is a, c, g, or t
  misc_feature (16)..(16): n is a, c, g, or t
nttttttgctgcctgnggtcactctagaggatccccgtcagcgccctgggagggggcccgttggtgtttgctgtgtgaaaagatgaattaatcctcccagggttcaaggaccagctaggagcaggattgccatggcttttttgtttttttttaacgtggagtctcactctgttgcccaggctggagtgctgtggcgcgatctctgctcaccgcaacctccacttcccaggttaaagtgattctcgagccttggtctcctgagtcgctgggatcgcagggcgctgact

SEQ ID NO: 213291 - DNA, 481 bp, Homo sapiens
tggttacagtacatggtacaataaaataatgtctgcatggttatcttctcactaaaaaaggactgaggttaataagctctttcctcccaacactcagattttctgaagtgctcaataatgatgctttgaaaaggactaaattcatttattactaactgtttgctatcatataaaatattgtttctaacatcagaatccttcaaggacaataaaaatgatttttttcttgaatgaatatattcaacctagacgtctcttattctgaatgagaactttgttgagcaggctacatcactattgtatttagtttgcaacctttaatgtcattcatatacaattacatgggttatgaaaattcagaaataataatttctaatgttgttaggtatgaatgtgaacatatcaagtttttctttaaatgcagattgttgtatacaagtcatttttgattaaaatacagataaaacatatttctcaagtc

SEQ ID NO: 213292 - DNA, 760 bp, Homo sapiens
gtgagctgcaaggccagagggatagagttaatcatgttacataattattgacaaggatatgtttttttcccccgagagggcatttatgtcttttatctgaagccaaaatatgtcaaaaccttttattaccattttacaaacttggctatttcccactgtctcctgcaaatacctttccagcctgggcaacagagaacttgtttccaaaaaaaaggcaaagtgtagctacgcgtaatgggaatacggtagttcccccttatccacagtttcactttctatggtcaactgtagtccaaaaataggtaagtgcagtacaataagattttgagagggagagagacaatgctcacataacttattacagtgtattataattattctatttttgtaaatttcttactgcgcctagtttatagattaagctttatcataggtatatgtgtatcaaacatatgccctgtggatgaaggggcgactaccataccagaaggagaagagagaatagaagagtgagagattaaagtcagagtatgggtaactagaaactttactctaaaggagatcagaaaaatgaggatgtacttagggggcaaatgaggacaccggttttaaactgttctgatgcaaggagtggtccgaaggcaatggggctagtgaaatcggagtgcccaaaacccacagagaaaacgccatctcaaacaccgaaacgaacatcacgaaacacacgagacccgctgcgcacacgccctccaccacgccc

SEQ ID NO: 213293 - DNA, 356 bp, Homo sapiens
aggggtgggatgattgctaatagggaagacggggtttcttttgggtaatgaaagtggtctaaattctgatcatggcaatggccatacaactttgtgaatatactaaaaaatcaataaattggacacacttcactatattattattattttttttgagatggagtcttactctgttgcccaggctggagtgcagaggcaagatcttggctcactgcaacctccgccttccaggttcaagcgattctcctgcttgagcctcccaagtagctgggattacaggtgtgcaccaccatacccgactaacttttgtatttttagtagagacagggttttgccatgttggccaggttggtctc

SEQ ID NO: 213294 - DNA, 645 bp, Homo sapiens
ctggtctcagactcctgacctcaagtgatgtgcctcagcctcccaaagtgctgggattactagtgtgagccactttatccagcccacttttctcccattttttgtctctgttataatttttctaataagatcttatatgtaccagctaatctctagcaaggctatgccattagaatgtttgtgttagagccaggaaatgtgggtgaaacttgctttgccaccttagtcaagctaatataattcagaacatctgaaatagttttgcatgaaatgatatatttaataaattctaaattcccatgttttattatttaattgaaataaggctaggcatggtgggcatggttgctgatatctgtaataccagcgctttgggaggctgaggcaggaggatcatttgagtgcaggagttcaagatcagcaagcgtgggcaacatagtgagaccccgtctctagaaaaaatgtaaaaattagcctggcgtggtggcatgtgcttgtcatcccatctactcgagaggctgaggtgggaggatcacttgaggtgaggaggtcaaggctgcagtaagccgtgattgcacttttgcactccagcctgggcaacagaatgagactctgtctcaaaaaaaaaaaaaaaagaaataaatc

SEQ ID NO: 213295 - DNA, 953 bp, Homo sapiens
  misc_feature (550)..(550): n is a, c, g, or t
  misc_feature (640)..(640): n is a, c, g, or t
  misc_feature (880)..(880): n is a, c, g, or t
  misc_feature (886)..(886): n is a, c, g, or t
  misc_feature (943)..(943): n is a, c, g, or t
cgcaccgccccgcgacgcagcccggcgcaactactttcttctctctcctttctttcttcctctcctttttcccctgctgggtagtggctgcggcggggtgggggagactttgaatgaccgagctcgcgtccacctttctcttcatgtcgacgtccctggaaacggccacacggatgccatggttacttttgccacgatcttacaggtgaacaaggtgatgtccatcttgttttatgtgatatttctcgcttatctccgtggcatccaaggtaacaacatggatcaaaggagtttgccagaagactcgctcaattccctcattattaagctgatccaggcagatattttgaaaaacaagctctccaagcagatggtggacgttaaggaaaattaccagagcaccctgcccaaagctgaggctccccgagagccggagcgcggagagcccgccaagtcagcattccagccggtgattgcaatggacaccgaactgctgcgacaacagagacgctacaactcaccgcgggtcctgctgagcgacagcaccccnttggagcccccgcccttgtatctcatggaggattacgtgggcagccccgtggtggcgaacagaacatcacggcggaaacggtacgcgganataaagagtcaccgaggggagtactcggtatgtgacagtgagagtctgtgggtgaccgacaagtcatcggccatcgacattcggggacaccaggtcacggtgctgggggagatcaaacgggcaactctcccgtcaaacaatatttttatgaaacgcgatgtaaggaagcaggccggtcaaaaacggttgcaggggtattgatgataacactggaactctcagtgcaaaacatcccaaacntacgtncgagcactgacttcagagaacaataaactcgtgggctggcggtggatacggataganacgcctgtgt

SEQ ID NO: 213296 - DNA, 678 bp, Homo sapiens
ccatttccccttcgagattatgtccagaggcgcaggtcatctttccaggctccattccccttgttctgctttcatattctcctgagcttgacctggttcagtttctccctggagaggctcactattttttctggggttgagatcctcgtcattcttttgacaagagatacagaatcatcatttttaagaggaagtttatcagcaggctgtttttaaaagtgagttttgtgcttgatacaaatttttatgatgtttgctttctcttaagcactcgaggtctgtacggtcagccttctttgcctcatttgctccccttcctcccctgcctcccatcttatttgactgctaacctgggcgggcccaccattcattcttgtttgagacagatgaacacagtactttgtatgccttatgaccagataattcaagctgacagtaatcaagtttggggctaattatcattaaaaggtaatttcattgctgcccataattgatcttatcttaaaccaattgtagcatttcttttgtcacatgatttaaaaatttaaaaaaaaatgcttttggcaataaacttttgaaaacagattttctacactcagttctttttaaaaccaactttacaaactttaagtgtgctcttattaatgtgatttgtctgctttgtaatattgcatattc

SEQ ID NO: 213297 - DNA, 352 bp, Homo sapiens
agcctggacaaaagccagaccttgtctcaaaggaaaggataagaggaggtatttgtgaaagagttgtagttaacggcaagttgaaagccctttggttaggagtttgttttacattgagcaaagactagtgcatagtgaggcagagggtgagtggcatcagatgaaggtgagcaagtgggtaaaatgccagatcacaatttagtcgtaaatgatatgacactgagattttattggaagtgtaacaagccatttaatgagtttaagtgtggaagtgctctgtggcttctgtaaggagaatggactggcaggctgcagaatgtgtaaatagaaagactagttgggctattctagt

SEQ ID NO: 213298 - DNA, 838 bp, Homo sapiens
agacggagtctcactctgtcacctaggctggagtgtgcaatggcacgatctcggctcactgcaacctccgccacccaggttcgggcgattctcccgcctcagcctccggagtagctgggattacaggtgcatgccaccacgcccacctaatttttgtatttttagtagagacgaggtttcaccatgttggtcaggctggtctcaaactcctgacctcatgatctgcctgcctcggcctcccaaagtgctgggattacaagcgtgaaccactgcgcccggccagagtcctgtccctctaaggtgccaagtgcccctgcctctggacagaacagggcagggtgtgaagaagcaaagggaggaagacaaccctcaccaaccacccccaccctgggacacagcatcctgtgctgacccctccgggtccagggcttcgccgtagtccatggtcagcatcaaggtccaggcagggggctgagcttactgacactgagagtgatgatgggctggagacatcagcactcaatccaagctggaaccccatcacccctgtctggtcccatcagtttctgggtcagcaaggacattctaagatggttcaaggccccaccccacagcatagcaaatatattgaaacatacatcccacagaaatagatataatttttcacttgtaaaatttttgcaagaatttttacaattttgcttttgaaattatgtggctctgagaaaccatttagtttgcatttggctatgatttatcagtcatcatggtgtattcttgggaattctggcaaaataaaatggaactggaagtttttcaaatgtaattaaattcttat

SEQ ID NO: 213299 - DNA, 482 bp, Homo sapiens
agattaggaggaatgaaatataagctctgcaacttgccagagacatttgagtggacatttcaactctggggtgcctaggccctgccaacttagatggcctcttctgcctttgctaagggaaggatgccaggctgctcaaacagacctgcctgtgatcagcacctcttccccagtgtgggccttggtgacagggaaagtggtgagtgaggaggtgctcacctctgtacacacccaggaaaagaaaaggaacctgagcatagaaattttccttaagccagacccacttaattttccagccaagcactaacaataaaggagcttggaaacatatctcttccaagagaaaatctgtcctggcctccactgtgggtgtggtatggtggctgttaccagcactaatggaatatctagggaaacacatttctttgtttgtttttttaaaatattaaatatgttagacagaagcatcccatcctttctgt

SEQ ID NO: 213300 - DNA, 164 bp, Homo sapiens
tagggaaggaggaccccagggagggagatcccaggaagggaagatcacagggagtgagggaggacctcagggagggaggactccagggagggaatatcccagggagagaggactacagggagcaagggaggactccaggaagggaagatcctagggaaggagga

SEQ ID NO: 213301 - DNA, 475 bp, Homo sapiens
ttcataggcccagcatgctttgaacggcatgctttgaggtgatcctcctgcctcagcctcccaagtagctgggactacaggcatattccaccactttcctggctcaaggaatcctcctgcctcagcctcctgggtagctgggaggacaagtgtgtgtcaccacacctggacaactgggggtgtatttgtatcttatgggatggatatttggtgatttgttatgagcaaattgatacccttctgtttgtggagattctcttgaatccttttttccatacactccattttcttctgtttggaactcatgtttacttatggagtggtcctcaaatttttaaaagtttatattttgcatctttttctcttttccctctatttttgggagatttaaatttctttttttttctttttgaggagtctcactccagcctgagcaacagagcaagattctatcacccccaccccccaccccgca

SEQ ID NO: 213302 - DNA, 558 bp, Homo sapiens
tccactgctgaatatatacacaaaagaagtgatagcagtatcaaagagatatctgtacatctgtgtttatagcagcattattcacagtagttaaaatgtggaagcagaccaagtgactattggtggatgactgaataagcaaaatgtggtaaacacatacaatggcatattattcagccttaaataggaaggaaattttgatatatggtataacatggatgaatcttgaggacattatgttaagtgaaatgagacaataacaaaaaggcaaatactgtattattccacctatatgaggtacttagagtagtcaaatggtggttgcctggggctgagcagagggaagaatgggagttattgcttaatgaatacagttttgcaagatggaaagacttctggagatgggtagtggtgatggtagcacaacaatatgattgtacttaatgccactctactgtacacttaaaaatgattaagatagtaaattttatgttatgtatgttttaccacaattaaaaattgtggtaaataaataataaagtttttttaaatgttaaa

SEQ ID NO: 213303 - DNA, 1049 bp, Homo sapiens
gaaattaacaattttggctttattatatttgaaaatatcgtaaaaatttatacatgaaaacaaagccttctattgcttaatacttccacatgttactcctatatgaatggaacaaaaactgggacagtagaaattgtttatgaatgccaaagggcaagctaaccatgacaaattattcacccttggattcaaggtaaaattattttacaacttctatgatgtagtttatagagcatgggtttttgagtctggcagacctgcttttacatttcagctctttagctatgcatctttgagcttgtcactgaggtcttctcacctgttacgtagggttttccagagactaaatgagataatgtaggaataattcctggcacagagttaatactcagtaaatgtcctcccagctcccacatcccagctcaaagtggggagtaagattttctcagtgtaagaatgtcaggccattgcaaaggacaacaagctacttccttatcatccaaagcactttccagtgttttacgtgcaataaaccacagacctctggaaccctgccctgttgtctcctcccacacacttcatagatattttcctatgcatctcttgtatccttggggtttaggacaagtgagagaaatagttgtctcagggaatagaaaaacttacagtgaaggaaggagatggaaattaacaagtgtcatcatcatcatcatcagaaaaagattttataaaacataagttgtgaataacatgcttcctacatgaaatgtcaaaataatagaaaaatgctatcatgcagttttctaaggtaaaagaccaaaggaaaacctactgaggcagaacattcagcaggtatttcctttgtatcgattttgtgcgataattatcactatggaaggctttatagtgggtgccgctctggaacgaaccggttttgcacttactcactttttcctgttataccgggaatttcctaaaccttcccctataatacaccgagatccggacggggatcggcctaccgaggggaggcgcctccccgcctcttg

SEQ ID NO: 213304 - DNA, 164 bp, Homo sapiens
cagttgggaatttgagactaaagagaaggtgtgaaatgcagtttcaatgatagagtaacagttaaagccttgagataaaaaagttggcacgtgcatctacgtacacacacagatatacccctatgttcaaggcctggatagggactccttcctttcatcgatcg

SEQ ID NO: 213305 - DNA, 501 bp, Homo sapiens
gtttttctctttgggaagaagaggcaacaagcacttcctatgggcattctatatgtgagactggtgatgacacacttcaacatgatatcccggccagagagccccatgcaaccctgccagagaggtattattaatcctactattaataattaattaacaattaataattaatcctactattaatcctacttcatcctatagatgaagaaactagaggctcaggccgggcgtggtggctcacgactataatcccagcactttggggggccaaggcaggtggatcacctagatcaggaattcaagaccagcctcgccaatatggtgaaaccccatctctactaaaaatacaaaatttagctaggtgtggtggcaggcacctgtaatcccagctattcgggaggctgaggcaggagaatcacttgaacccaggaggcggagggtgcagtgagctgagatcatgcaattgcactccaggctgggtgacaaaagcaagactatctc

SEQ ID NO: 213306 - DNA, 469 bp, Homo sapiens
tacagcctagttttgtaaataacaatttattggaaaaagccacactcatttatttacatagtacctgtggctgcttttgtgttccaacagcagaactgagtcgttgccacagaacttgtataacctgcctaaaatattcactgtctaggcctttacaggaaagtttgcagacccctgagctagattatctgaatactttaaatccttatatatgccccaacaaatccctgaaagcctgcccccagaaattccatttcaccaaataccccggccttataagttgtcaacactgagaaacattgacaagaaacatgaagaacccccttctatggagatttgtaagaagagttctcagttgggcatggagaaggggtcatccagcagagaagcaggaagtggactttttcacctcctagccctctgtgtgagctgagaccggatgatggagggatgatgtggaaggttatga

SEQ ID NO: 213307 - DNA, 496 bp, Homo sapiens
tgatttgcaggcagccattttctccttgtatcttcaatggcagagaggaagggagggaaaaagaaagagaaggctcccctgtcccttcctataagaacattaatcccattcataaggttgtcacctccccaagacctaatcacctctctaacatcatcacattggggtttaggatttcaacatatgaacttagagggacacacgtattcagttcacagcgtacctagtccctgaagacaagaactacagagtgaagggactgaatgacatccttcttactggagaaacattgccctgtcctaccctaaaaccttctattcacagcctttgtgtgagcatgagaggattttcgttatcacacctttgtgttgtttttatgaactaagggtctcatcaaaatttttcccatataggctctgctgtccattacttaaggaatgtttaatgtttttcaaaattgtctaatttccttaataaaatatttgcatatacagta

SEQ ID NO: 213308 - DNA, 448 bp, Homo sapiens
gctggagtgctgtggcacgatcttggctcactatagcctctgcctcccgggttcaagtgattctcctgcctcagcctcccaagtagctgggattacaggcattaacccttgcacctggccggaagttttaaactgttatatgatctgtcaaaatgctttcctctacggtttataaaggttctccccactccaagattatgtaaatagccacccatattttctttgacacatttaatcattaatccatttggagtgtgtatgataaataatttttgcaaaaaagaataacagcccattgtttttgtttttctatgtcaacatgtcaggtttcataattatcctttacaatggctccataattaattgccgataccccatttttggtaactagatgaaatatttgagaaagccacgctacaagtggattaagtagaggactgctaaatac

SEQ ID NO: 213309 - DNA, 392 bp, Homo sapiens
aattcctttcttgtcattgtaattaccttacataggcatgaaactttccaaacctatctaacatcaactttacatattcataatattttttacgtacagccttaacatttggtctgagacaactttttagacaatttagacaatttttcaaactacttttttgaggaagcagagtattatatggcagctacagaatgataaaggatgactggagagttttctcttcagaaaaaagaacaaacttttcttcatgtgaaaggtaaacagagagagagaagttcagcagcataattaataagatggttctgcaatgtctaataacttctcctttttgtttgcctctgtacacaataaaagtgttaaagtataattttcaaaaaaatgtaacatca

SEQ ID NO: 213310 - DNA, 917 bp, Homo sapiens
aagggagattatccagacccccaggagcgaacagcaagcagcaaccgaaggcgcaagtgccaggattacagcctaggctgctccaactatgagcccttcctcggaccctgggactcggctacttggggtttgggggtcttccacaccacagaggcacaaagctgactttaatcactttttttcctttaaacttgattctgccgcagtggagccagcacagcggatgttttcacacccagcaagacaaaggccgtcgtctccgccatgacactgttccgttccaagcagaggccgggattctggactcctcgaaaaatcaaaaagaaacaaggaaaacaaacaacaaatacagcaacaaacagaaaaaactgaaaaccaccaaaatcgtttgcccgtttgcccgtgccaggggtgatctgggcatctgttgcagcagaaggcgcttgtgtggggctaatttttcttttggtgggggggacaagctgttggcttgtttgctatttcaacttcgtttataattaacttaaaaaaaaccccaccattcagcctagtcaacaacaaacaaagaaaaagcagacatcggaagagaaatgccataggaagcggcatgaatacatgccacagccggtgccacttgccactcggaaaacctcagggaaagatgccaattctacagctgcgaagaaggcagagaaaggaggataaaggtctacaactagaaatcataaggaaagaatactgcttgtataatcctggattgcaattgcacacagcctctgctgggagaagagagggaatatttaaatggagatatagatgggtataaattaaaagataggcacctatcgattgcgtataaacacatgtgtaaggttgtatgtgtatataaatatgcatattttcagacaaacgtttag

SEQ ID NO: 213311 - DNA, 283 bp, Homo sapiens
gatgaaacccagagagaccgtggtgtgtagactgcaggaaacctcccatctgaagagttaattttctttcagaatctgtgttagaggctgctgagattaaaacacgacactttaagattggtacaggaacacttataactgttgacgataaaaagaaaacccaggaggtcagactcagccttgggagttactttggtttgagcctcataagacctttattttgaattttcctcttctttgattatgcatgctttctgctttaataaaaagaattcattaaatt

SEQ ID NO: 213312 - DNA, 510 bp, Homo sapiens
ctaggggagaactggaaccagttcttcctcacatccctcagaatgaaacaagtcttctgacaccttgatctcggacttcttgcctccagaactatgggacaatatactgtttaaaccattctgttggtggtaccttgttaaagcagtgctagcaaaggtcaatgttgctggtagaagtggcaagtggacaataccaagataaataagtaatcctagaggcccaatgtcctgaggcaggatccattctcctcagacttacaggagggaaaccaggagctgaacttttgcctctcctggtagagatgatatggtgaagccattcatatttactagatgcagtagaatgaatggagcatattaaaaatatctaaatagatatagtaaatatctcaaaggagtagtcaagggaatttgtaataaaggccagaacaagcacttgcaaagaataaccaacttgaaaattaggatgtgagaagtctataatggaaacagtggactcttatcaaacca

SEQ ID NO: 213313 - DNA, 402 bp, Homo sapiens
acattaaaataatttttgtatctgttcttaacatagagatggaggaagtgcaatgacaattttattcacatttattcaggagatgtagaaaccttgattagttctataagtaaattatggttgtgccataattcttatggttattaaatggcagtaatttaaagggggcctttgttctttaatccagagaaatatcctggcttttgactcataactttgaggtaatatgattgcttgtagtcaccacattgtaagttccctaaaggatataagctctgtgtcttgaaggttttaggtactagtgcctagcacagaatgtggcaccttttatatttgttgagtgaatggctgttatcttacataaatgttatttccaggcttttaataaagtggttaaaagca

SEQ ID NO: 213314 - DNA, 956 bp, Homo sapiens
attgctttgaatctgtagataaacttgaaaataattgacatcttaatattgggtcttgtgatccatgaacatggcataagttcttatgccatgtttgtgtagctttttaaataacgttttgtagtgttcaatgtgtaggtcttacgtatcttttgtcagatgtatccctaagtatttcaattttttttttttttttttgaggcagagtttcactcttgttgcccaggctggagtgcaatggcacgatctctgctcatggcaaactccgcctcctgggttcaagtgattctcctgcctcagcctcccgagtagctgggattacaggcatgtgccaccacacccggctaatttttgtatttttagtagagacagagtttctccatgttggtcaggctagtttcgaactcccaaccttaggtgatccactctgcctcggcctcccaaagtgctgggattacaggcatgagccaccgtgtccggctgtatttcattttttattgctattacaaatggcactatatgtaatttctgtttctgattgtttagtgctgtatagaaatacaattgaattttgtgtattgatcttatatgctcttgtaaactcccatctagtaggttttttaagatatcagattttctacatatgtgatcatataatgctaactattacagacaattttactttatcccttccaatttgaatttttttttgttgtttctttcttattttgctgggtggaacttttagtatagtgttgaacagaaagaagtgttaagagagagtggatatccttacctcatttctcttcattgaagggaacagaagggcaagcatacaaacttttgactgttcccttctattcctatttattgaggtttttgttttgtttctgtttttcaaatcaggaatgggttgatttttgtcagatagtttttctgcatccacatcatgcact

SEQ ID NO: 213315 - DNA, 516 bp, Homo sapiens
cttcaagtcaagaagctgtctcactttgggttatgtagagtccacaaaaaagtcaaactaaatatagtgagtctaaaggcagtattagcatctttgtcaaatagagaagaagcaaatgaacatttctaagttggtcaatagtccttacagaggctaagaaagttaaatgtatttaatccagaaatatctataatttttataaaatacttaaaaaattcttgatatatttaacaacatgtctattacacattttaaaatttgctatcatccttgcacctcccctaaacctgcttctccccagtgtaccatctcagtccttggcacagccatccatctctagtggttcggaccaactgaatcatctgggaaccatcctggattgcttcttcccttattgtcctcatccttggttctcttttgcattaagccacctctcaggacctccaaagctagcatagaacaaagtactactactagtcttcctgctttcattcttgccactctatattctcatct

SEQ ID NO: 213316 - DNA, 199 bp, Homo sapiens
agtggggcaaaatgtaaacaataattaagacaaattataattcgctctctgatcttggtagtggggaaaaaacgagtattctctaaatgttttataatatgaaataatcaagtattttatatacataaataacatacaaattcactctgattaaaaaccattaattcattcaacaaatatttactgaacattgatgata

SEQ ID NO: 213317 - DNA, 1454 bp, Homo sapiens
acatgattaaatccgtaaattcatccatggttgtgtatgattgtaaatggttcgttctcattgctatgtagactttcatcatgtgaatattccacaatttctttctttcttccactcttcctggacatttgggtactttccagtttggggcagttatgaatagtgctgctgtgaacattcctgtacatgaattttggtgtacatatgtgtgcacttacattggtgtgtatacctagaagggaggcagttttgaataattcagtttagcatgttggacacaatgatttaaatgatgtctccaagcacgtatcagtccctgaaggggtaataatctctgaggctgatggcagaggcagtcaggggatctctctgtgttactgagcttgtggtggtgtgtttttgtatcttcggggctgaaggagtgattctggcagggtgagtgtgggttccccaaagctatcaccacattcttgccccagctggatcgttgccatctactgaggcctggctggccctccattacctcgctgtggctctctctgtggttttgcattgagtctgtggtttgcacacatcttgatgaccccatggtttttacctgccgggccatcataggacagtgctctctgatgaaatgctggccatttgtggcacagagaagtaggtgtcaacaagaacacctagcagtgagacaagtcttcaccaagactccaaaatgaaaggttcagccttgtgggcagtttgtgaggagaggaaagagagcaagtcaagaaatgaggctcttaccccagtccctttacagggcgaatgtggagcccggcagctgtggaccagtttgtctccatcatttgcaggtcagaggttaccctcagctcctcagctgcaaatggaagccctctatcaaacggcctttgccagaatacttaggctgtgaccttccccctatgcagctcatttgcctgggtaaatgagtagagtgctttctgcgtggcagatttaaatttcaccactaattgatgctagcgtcttcaggggaaaatgcttgccattagatcacaggcctttgggagacagcctcataacaaatacatccaggacagggggcggggatggggaaagtacagaatgcagctgtaccgaaaggaactgtgggacgtgcccagagaaaccaactgagtacttttgaggcatgcccttggggactgcgcatgtgcatggttgtgccatgtgtgttttgatggcctttttttttcttgctagtgtatagtatgtacaggacaaacttggagccaaactgtctggaatcaaatcccagctctgctgcttacaagcaaatatttaacttctccattgttagtttccttgaccataaaatggggataatgatggtactttgagtcatgagatgattcagtatgttagagacctcataacagtacctggcaggttgtaag

SEQ ID NO: 213318 - DNA, 340 bp, Homo sapiens
aaccacactgagttttcctccactgccagcattggtgcttcagtactgtgaattttcttttaccattagcaaagctgtttcagctttttggcttgaaattttaagatcaaagtttaactttgaaggtgttaatgtatccctatcagaagcaaagatatttttttataatgtcctaatgcaaaaagattgttcgaatattgtctggcacactgcttactccaagtagctctcagtaaagaaagccaactttgttacatttgaaataaatgggttagtaaaaagtgtaaacattaccaaaaaatgaaaataacatatgaacaaataatctgttctccttttc

SEQ ID NO: 213319 - DNA, 193 bp, Homo sapiens
aggaagccccctgtttctatgggcttgtgttattgagtcaggctcctgcagataacctgcctacctgaaggtcatgtagtagtacaacatgatcatggtgtgataacctcatcagagccacaggttccaaggagtagggtgtaggaccttgaggggaggaggttcttctgtgggtagacttcccctggcatag

SEQ ID NO: 213320 - DNA, 217 bp, Homo sapiens
gtcaggtgatcttgagtatccctgtaatctccgagtgctcaatgaggcttgtgttattgagtcaggctcctgcagataacctgcctacctgaaggtcatgtagtagtacaacatgatcatggtgtgataacctcatcagagccacaggttccaaggagtagggtgtaggaccttgaggggaggaggttcttctgtgggtagacttcccctggcatag

SEQ ID NO: 213321 - DNA, 214 bp, Homo sapiens
tagaggaacgactgcagaggggcattctgggtcagtctggatatagtcctgtcatttctgtttacttgccattggttaaagcaatccgatggctacatctggttgcaaggaagaataagaaacatagtccagctgtgtgcccaggaggagaagagtgagttttaatgggtagctccagtctctgccacaattgtcgaaaggaagcagttgatgg

SEQ ID NO: 213322 - DNA, 247 bp, Homo sapiens
cgttttgatgtgagagaagtttgttttccttctcccaaatccttttatatttttttcatgacacgatgtggactttgaggtgccctctcaggcccgcaaggatatcctgtgaaccaaagtaacactctccgtttaaggagacccccgctgctttttcatgttatctttgaggcattctccatggagtctgaccatcattcttgttcagagacagctctgaggaatcctcggtctctcacacacactg

SEQ ID NO: 213323 - DNA, 497 bp, Homo sapiens
acagggaaaatctgcatccagctgctactgtttggcgctatctcaacacctgtgtaggatggttccacgagtggtgaggctgcaaattgagcttttctcttcaacccttcaactccttcctccactgaaaatgccatggcctccaatgtcacatgatggacttcttgtttttcactcctttttcagttgaatctcatgaattggcggtctgtctcaggcgttttcctgagggttagataatgagcagcggcgtgcattctgataacttagaatacaacattttgcctctgtgcctagtgtgggcatgtgatgagcccctgtgagactcagtgaaagaacatatagtaccttgcgtttcctcatgagccaagtgtggggccttattattcattaggaatttgagaaatctctttttatctgcttcaacaagcagaaatattttaaatcttctgtgtaagtgcaaggtattataagcttcatggtaggatatataggaa

SEQ ID NO: 213324 - DNA, 881 bp, Homo sapiens
gagcacatggcccaggggtggagccgacctccagacaccagaagaacaacctaagttcctcccacacagtcagacttgaaactagaggacagacagagaaccaggaatgtctactttgcccccatgaggaatagaaacaacttcctgactatcccttggtgggacaggaggactttcaagaggatgaaactctgaaaaagagtttaccctgtgattaattaaatgaaatcctcaatggccagagtaattatacaaagattaagtgtcaaatgggagagagtttacctggaagcagtaagattcgttgcttttattggttcatttgttttgttttctgctttcggtagaaatggatcttcacgagtcagttgaatttgattaaacagaatttagcatttcagccatttgggtgacagtgggtgcattctaaagtcagcacaccacccaaagtgatatatgaggtggaatgggaggggtggcaggtattcagcttaaaggaccgggatatcatgatcagtggctactgttttacttttaaaaaccttccttttctgggtctagaatatataaagaatgtctacaaatcaacaacaaaaaacatgaacagcctaattttttaaacaggcaaatgaattcagtaggtatctcacaggacaaatgaatgatcagtaagcactgaaaaggtgttcaatgtccccagtcatcaggacaacacaaattaaaattgcaataagataacatttcacgtccactaaaattgctaaggtgaaatacgatgaacattgacaagtgtgtggagacactggaactctttatcattgtggatgaagatgtgtctagcagtttcttatggcagtaaataaacatgcttctaccccatg

SEQ ID NO: 213325 - DNA, 153 bp, Homo sapiens
gctgtaagtttattcaatgcaaaagaatcctctccagttttactgaggtggctgaccacgtccacgaccaaatccgcctctaaactagaattcggttgctgacccagccccagcctcggctttcttgtcggcaccaggtagcacagcactcct

SEQ ID NO: 213326 - DNA, 394 bp, Homo sapiens
ccgcatactgacgacctggtttcactaaatcaacctgtgatctgctttgagaaagagtcattagaaagacactttatttcaacttctctaataatcatagatattagtcctctagtggctgagaggcagcgactagtttccactaaatacagttcaaaactctaagatctatatggtgggagaattgcagatggcatttcctgtattcatcacacatttctgtatttttaaaatgtttttattctagtatttacataaaatatatgacaggcaggaaagttaaaatcatttatagatagcagaaacattctgtaaacgttttaacatgtattatatatacatatataatatgtgtatatatacattataaatacatatatattaatcctctagc

SEQ ID NO: 213327 - DNA, 479 bp, Homo sapiens
ttatatttacaaacaatttacagtgttccctttcaagatggtgtttgtgtgtggtgcgaggtgagggtagaggttcaccctctcgcagtgtgatcccgaggtgttcagggctgtctgtcgaaggactgtcctttcctccctggattgccttggcacctttctgaaaagaatgggccctctatgcccgagtctgcttctggtctctgctctgtttcgttggtctctatgacttgccacggtgtccgaggacagcaccttgatgactgtaactctgtgctgagtcttggcactggtatgtgtgaatcctccagtgttctttttcaaaatggttttagttgttttaagccttttacatttccgttttcagaatcatctcgtgaacttctatcagaaaagctagcctggctgctgattgggactgttgtgataactgatgtggcgagaattgcgatcttaacattgagtgtttctgtgagctt

SEQ ID NO: 213328 - DNA, 394 bp, Homo sapiens
attacaggcgtgagccaccgcacccggccaatacatacaagttaacagcaaagcagcaaaaagctaaagatcaaaacaaacaacaaaagaacccacaaaaaacagtcagaacaaaatgaattgatagactgataggtgacttttcaatagcaataatgaaagccaaaagacagaggaataagagcttcagcatgttaaaagaaaacaattgccaacttttgtattcagcaaaaacatcattcaagaatggctgcaaaataaagacattttcaggtgaacaaaaactgagtgttcatcatcaatagatcttcaataaaagccattccaaaaactgtactttttaaaggagacagggtcttgctctgtcacccaggaaggtgtgcagtggcatgat

SEQ ID NO: 213329 - DNA, 145 bp, Homo sapiens
tttttttttttgtagagaggtttcgccatgttgcccagtctggcctccagctcctgggctcaagtgatccacccaccttggctcaaaccaccacacccaaccctgagggagattctaatcttccccacccttctgtcgtcttctc

SEQ ID NO: 213330 - DNA, 271 bp, Homo sapiens
ttgaacccgagaggtggaggtttcagtgagccgagattgtgctattgtactccagcctgggtgacagagggagactctgtctccaaaaaaaaaaaaaaaaaaaaaggtagagctgagtggctgagtgggtattatgctcaggttgtcctgatctcaaaaaaagaaaagtttttttttttgtttgtttgtttttttttgagacaggcttgctctgtcacccaggctggagagcagtggtgccatcatagctcactgcagcctcaacctccca

SEQ ID NO: 213331 - DNA, 510 bp, Homo sapiens
tttgacagctgtgtgtggccagtggatactgtacaggacagggcctatggaggacatttccatcattccagaaagttctatgggacaatactgatctagaaaaataatctacaaagtctctcccagtctgcatcagtggctgccatgacaactagttttcttacaaaaggcaagccctatcagtttcaagtaggcaggttccatagactgatgtaaatttggggctgaaaggagctggtcatcttttctaggattatcaaccacgcggggctcccaccaaaacatatttcaccttaagtccatggcagacattgctaatcaactgcagcactccctcctagggaaccttcagagtctttcttgacacaatgctgcaggtagccgaaactaatccagattagcacttgatattgaatctgtaatctgacctattgcaatcacaaagagtgggaaactgaggcccagtgaaataaagtaaattgcctgaagtcagatgatgagtcaaggcca

SEQ ID NO: 213332 - DNA, 821 bp, Homo sapiens
aaaatagcactggcttgaatgtttggagtgtggattctgctgaacgaggatgggcaggtcaggcagaggctgttgccatggttattatgagatggcaccttggggtagtcagaaaagggagcaaagtaaaagatctgaaatatgtcggaggcacttgctgatggataccatataaggcgggatgaagaaaaagagaatcaaggataatttctagatccaaatttgaacaaatgatgagtggtggtagtgttaagtaaaatggggagaatgagagagcaagtaggtttagtttgtggtttagaaattggtagttcttttgggggcatattttaggtttgtgatatcaggtgtttgagtagatatattaaaaagataattataacagtctggcctttaggagaggggcagaggctagagataaacgtctgatggccattggtgcacagttcctatttaaataaggcacagggcagggtaagattacctaggaagaatgtatagataaagatccaggattgagctatgtgaggttctctaatatttaccagtcaatcagagtaagggtgacagaaatgaaatgaggagtagcactcctgaggtagaggaaagccaaaacgataaaatgtctcaaaagcaaagctctttccacgtagttaccaaggaatggaaacagagggataagaggccctgtacaagcaaacccaggagttgatattcacagccacatatagctaggagtttcaccaacttctggccaatcaaaggtggccaactgttcaaaccgtgttcaagtaagcaaacatcaagctgtaaccggtgca

SEQ ID NO: 213333 - DNA, 467 bp, Homo sapiens
tcatgcctcttcccaaaggagttgggttgcacaggatgttcagactttacaaacccaaagcactgaatccctgggggaggaatttcagaccagtggggaggtattttgaggtaagggacaggcgcatatcataaagtgggagtaggtggggtttccacagaatcaatggccctcttggcattgaccattaggattcaggtgcagccagtttggcctcaggactttgtgactcctgtgacggttgcaggtcagatcataggtcctggggatgctttgattcagatctgcctactggaagcaaatctcctcagatctttgggaaacaaaactgatcaggcttggcctgggcgccgtggctcacctgtaataccagcactttgagaggccgaagcaggcagatcacctgaggtcaggagttcgagaccagcctggccaacgtggcgaaaccccgtctctactaaaaatac

SEQ ID NO: 213334 - DNA, 111 bp, Homo sapiens
tggttcttcaaaaagataaagaaaattaataaactgctagactaaccaagaagacagaacacccaaataagtaaaatcagaaatgaaaaggagacactgcaactgatacta

SEQ ID NO: 213335 - DNA, 433 bp, Homo sapiens
tatggacatcccctcaaaattcacatgttcaacctaactcccaatgcaatcgtattaagaggtggggccttgaggaggttgtcatgagggtcctgttctatgagtaggattagcatcctaataaaagaggtcgagctggccatggtggctggcgcctataatcccagctagtcaggaggctgaggtgggaagatgttgagcccaggagtcggaggaaaaaaaaaaaaaaaaaaaaaaaatttgggtttgggggtcttgggggttttatttatataagggttttatttttgggcccggaagttttttaaaggggttttggctttaaaattggacaaagtgtgggggggggaaaccattttttccttggaaggggggggtaagcaattttgtgctagggggtatggaattgggaactttttctctcttaaattgg

SEQ ID NO: 213336 - DNA, 159 bp, Homo sapiens
tactttgcatggtcatactgaacttctcaaaaaaataaaaataaactagctgcaagaacaaaactaacaaagaaatattcagaaattccattttttgaaagatattttagtagcaataaagttcatatatttcagtgtgtaagtaatatctagcttgtg

SEQ ID NO: 213337 - DNA, 493 bp, Homo sapiens
ttcctggttccatggactgcatcctgcacttaccactcccccatattccctaccatgccttcttcatctaatttaatattactaacaagatctattgttcaagccaaaacccaagtgtcactccttcaatttctctttaccttatcctccaaatttaatccattagcaagtcctctcttcaaacccatcccaaaccaaccttgtttttaaccatctccacaccaccaattaccacaaggataaaatctgaattccttaccaccaaatactatgtgatctggccctcatctatgaccttctcccattccttgagtaatctctgcctccacacataatttgcaaattactccagctacactggcctattattattattattattatttttgagacggagtcttgctctttcgcccagcctggagtgcagtggcgcaatctcagctcactgcaatctccgcctcctgggttcaagcgattctcctgccccagcctc

SEQ ID NO: 213338 - DNA, 405 bp, Homo sapiens
cagggaagaaggggagaggaggtcattagtgtgaccttgggtgtgttcagtctgagatgcctttgggacatccaaggggaaagtcactaagagggtgtggcagccagagtgtgggtgtcgtctgtgataagcaactgtgagcgtcttttcctgagcaagccacagggtccaggcagacatttacgtgtctgcatttcctacctgaggtgaacttcttagggtatgttcactttcccgtgaatctccaggcattagaacacagaaagtatgtaatgatattgtagtaaagtgcgcccaaactcatcaagggagccaattaagttatccccaagatcactgtttcccaacaccggcttgggaaccagtcaggcaaactacaggattctgtctatcttctccttcccc

SEQ ID NO: 213339 - DNA, 259 bp, Homo sapiens
ccagtccaattttctcatgatattatgtgagtaccactttcttcgtgtgtgtatttaaggttctgtgctgaaaagttgataacatagaacatacattgaaatgtaaattttctgaaggaggagaatggaaagttaatttaaggaaaaacctattgaagtgaaaaaactgaactttaataaaggacagagttttgctaagaattagaaagaaatgcattcattgcaaaatacgaattaaattctctaacctttgtagtag

SEQ ID NO: 213340 - DNA, 714 bp, Homo sapiens
taattttttgtattttttttagtagagacggggtttcaccgtgttagccaggatggtctcgatctcctgacctcgtgatccgcccgcctcggcctcccaaagtgctaggattataggcgtgagccaacacgcctggcggacttttcttaaaactgatgcaaaaataattcttatgtgtaagagattagatcattactggccttaatttctgaactcttggaaaaattaaacacctcacaataaatgaagcatcaaaacagtatttccctgtgttaccattgaacagtagcaagagcttactgctgcagttagaaaaaggattcatagaaacagtgaaaggtatagattgaccagctatctaaagtaattctatagcaaggattacagtgaagaaacatggagcaattagatgttttttctgttatatttactccagttgattgtttaagtctcataatcttatgtgccagatggaggagtattggctgaatagaccatcagtgggtacattttagttgattaaatagccaaaccatattggaggatggttctcttaggtctccagtgttttgtagagactaatttttaatcactgagtgatgaagccttgaagagatgcttacgaactttacagttagcataaagccaggggggtgtttcaaccattatggatgttaaactaaggattattaaagatcagaccaggcacagtgg

SEQ ID NO: 213341 - DNA, 406 bp, Homo sapiens
ttgatgtgttcactaaccccacccagaagctctttgaaacccccttccagtcattgacaggtgttttggagacctcattagacaggtatgattgatgacatcatcagccattgaggattaagtcgatctccagcccctctcccctccctggaggttggggttggggagcagggggactgaagttctaaccctcctctggcaaccagcccccatcctccaagagtcacctcattagcgtaaactcagatgtagttactaataatggtttggatatttgtcccctccaaatctcatattgaactttgaccccagtgttgggactggagcctggttggggggtgtttgggtcatgggggtggatgcctcatgaatgtcttggtgccgtccatgcagtaatgagtgagtt

SEQ ID NO: 213342 - DNA, 454 bp, Homo sapiens
attcatgtaatagcctagaaatcaaattatctgactataagaatgcttagatggagaaaacatttttcagcaaaaccattgtaatagtatattatgtttattgtaaggaaatagataattataagataattataataatagtattttaaatgccagttaaggtttttgaaataaaattttgttaggagattataaatgaatgtaaattttcaagtaatataaataatttctgattattaagtaaaataaatccaacaggctaactgagcataatgctttatgagtatattttaattaaaatctggagaaattgatgaatggattgagagccactaggtcattgtcttgaaagaaagttgaatctgttcctcatactttacaccagaaattttctagatggatcagttgttgaaatgttaaaaacaaaactaagaaaaaaacaatggaagatttg

SEQ ID NO: 213343 - DNA, 363 bp, Homo sapiens
agcacttagcaacagtaagtacacaagtgttcgttccttgcctccttccacatgacaaccattggtattatcagtgtttgtcctttctttccatcccgagtgaattccattacctggacctggatcccatattctacaccacccaggtcccttcctaggaatgcccctccatttatcaggatccctctaaaaacacactgcttagaactgaacacagtatctcagatgctgtttaggcagtgcagaataattacctcctttgatctatatgatttctctatgaatgcaatttttatcagtcacttcacactgttagctacagttggtggtaaataaaaccctgtggggtaattttcatgtaaa

SEQ ID NO: 213344 - DNA, 447 bp, Homo sapiens
ggttcaagcaattctgcctcagcctcctgaatagctgggattacaggcgcacggcaccacgcttgactaattttttgtatttttcgtagaaacggggttagccaggctggtctcgaactcctgacctcaggtgatccacccgcctcagcctcccaaagtgctgggattacaggtgtgagccacggcgcctggccaagatgtgttttattatttgcacttgtgtaatggcaaagaaaataggttactaagcttgctcttgttagaatatcctttgtagtcactcatttgatgatgttgagtaagaatctttcctctgttaatacgtctttgtttaaaagaaaataagttacctttgtagtctttgtacatttttctttgcagaaagtttcccctctgctggataataattaattttataaaagtgtttaatccagtactgattatatt

SEQ ID NO: 213345 - DNA, 581 bp, Homo sapiens
tacgtcgccagaagtctttctggagtgcctcttgccacatcaatgcagactcatgatcatcatgaagccagttccttattactcaccacattaaatcttttctgggtagagatagggtctcactatgttgctcaggctggtctcaaactcctggactcaagctatccttctgccttggcctcccaaaatgctggaattacaggtgtgggacactgtgcccagccaccacatcaagtcataagctaaatcctgcatttctttcgtcatgatgtatgcatagcagttatataattaatcttaaaattaatctacataataacaacaatattaaggacaatattttccttgtaacttgatttactggaacacatatctttatccattagcctgaaaaatatccatttctgtatactacctaggttactcacttaaatccaagatttgagccaaaatatacgtctaattaatcacattgtgttatagctggttataggaaactggttcccagacaaattcccatacatgatctgcttaagtgaggataacagattgactcaggaatcaaaagcaatccatttttt

SEQ ID NO: 213346 - DNA, 347 bp, Homo sapiens
gggattaggacatcagcatagtttggggaaggacaaaattcactctgtaacacctccatatacagtcatgtaccacataatgttctggtccacagtgggccacgtatataacagcggtcccataagactataattccatatttttactgtaccttttgtacgtttagatacgttgagatacatacatacttactattatattgcagttgcctacatacagtattcagtacagtaacgtgctgtacaggtttgtagcctgagagcatatagcatagccttggtgtgtgataggctagaccctccaggtttgtgcaagtacatgctatgatgctcgcacaacaacgaaa

SEQ ID NO: 213347 - DNA, 430 bp, Homo sapiens
tatctcattttgtcatcatttaaaaaaagtgttcctggatgtccttttgcatagacttttgaatgtatttctgactattttcttaacctgtcctgtacttctgcaagtagaactgcttgagcagagattaggagcaattttaaggtttttcaaaaatcttgacaaactattctgcaggaaaaatgtatcttgttaccatcagcatttttaagtaactagtgactaattgtaaaaataattgtgtttccttgtatttaagccttgcgctatagattttaaaaatttgtccttttttttttttcatttgtaaaaaaaagccatctaaaagaccttagaacctggtatcagctgaagcttactaaaccatatcaagaagatcatgtcattctcaagaaaagcatgtttcaaataaaaaggaaatgtcagccct

SEQ ID NO: 213348 - DNA, 500 bp, Homo sapiens
ccttattttgaatgaaatcaacaccatggatattgggcgggggcaagttacctcttatttcagaaaaggatttctggggagaacccaccattatttctcttctcatcttcccactcttatctcctcttttcacatcaaagatccatcaaatctctgtggcaagcctggtaataagttttctatggtggttttaaattaatgggcattagtcaggcccagtgtctcagacctgtaatcccaccattttgggaaactaaggtgggagaatcacttgagggcaggactttgagaccagcctgggccacatagcaaaatcccatttctacaaaaaaatttaaagtttgactacaggtatgtgcagtgtcacgtgcctgtagtcacagctacttgggaggacgaggtagaaggatcacatgagcccaggaggtggaggttgcagtgagctgtgatcgtgccattgcactacagcttggatgaaacagagtgagaccctgtttcaa

SEQ ID NO: 213349 - DNA, 466 bp, Homo sapiens
cacagggctcaacttcagaaaggctggtaaattttaaagtagagcatcagtggtgcacaccacacaatggttagaaaagtggagtcagtgaagacgttgtgttaaaggagctgggtgccagccatacacagagtaggggggcatttatttccgtgtgtgtttatagatgtaaatgtatttttaaaatatctgcaagaaaacagcacactgacctcttgttaccgcatgaagttttcattaccttctttaagaaaaggacaattaaatatgaatacagagtcttggagcagcttgcataaatgagctactgaccctgaagcttcagcttctattagcttctttctgcctctgtgtgaccttggacaatttacttaacccatttgctttggctttgtcatctgtaaaatggggctaattatagtaatctacctcacagagtgattatgagacacagccgtcttggaac

SEQ ID NO: 213350 - DNA, 386 bp, Homo sapiens
gggcgtgggaagcagagaatattctgagcagaggcaacagcatgggtgaggaaggcccagtgacctgtgatctggcatgttcacgttggcacagcctacttggcggcagactggaggctgcaacagaggtgaaggtaccagggtgggaggcccctgggaggctggtgcaagagttcaggctggacactgtggagtcctaccctgggggctggaatgggaggggctgaacgtaactgagacgaataagaataatacctcttggccgggtggtgtggtagctcacgcctgtaatcccagcactttgggaggccgaggtgggcggatcatgaagtcaggagattgagaccatcctggtcaatatggtgaaaccccatctctactaaaaa

SEQ ID NO: 213351 - DNA, 636 bp, Homo sapiens
gggccagatggaatgaatgttatctggagtcagactcaaaagttctgcaaccctgggcagatttctcctttatacacctctgtatcaccacctgtaaaatcatacctgccttgtacggttgttatgagaattaaatgagttgatgtgcaaaatgctcagaaccatgcttggtctgtagtgagcacttagtacatttttaatactgcgtgctcagtttagcactgactcctaccttctttgcagttcctagtactcgcttagagtttaagtaccttggacaaggtacttggccacatcattcccaaagctggaattcagactcaaatctatttgattctgaagccagggcttttaattatgcagcactgtcttccaaataaccattaacttactgacacggctgtgatcctcaaacagctcatgacctggtaaggtaagagacgactccacacggccatctcattatgcatggtacatgaagggcagtgttcttgggctggcaagaaagaggaagctggttctgttcataaaatatttcttagagaaataggaaaatgagtctctttagctggatatatgaacatttttatgtgttttaagacaaacggcaaagcttggggcttatgaggcagaaag

SEQ ID NO: 213352 - DNA, 140 bp, Homo sapiens
gcgcccggcccggcgtgttttaatatgcaatcttcatagaattatttgcattttgaaatacgaatatctggagagagcattgttacttcaaaggtgttaataccttgaattttcaggattatgacacgtgagtaggatgg

SEQ ID NO: 213353 - DNA, 502 bp, Homo sapiens
ggacacactgggacctgcagtgaaacaaaggacatctgtagcaaagcctttcaactctagattgtcctctccatcctagaaatggaggaggaagtgatagctgaagttggttaattaaatgctctgatcttctgtaaaatacctagccagtgttcttcaagactctcaaggtcatggaaaccttggaaaaactgagaaacttccatctcagaccagaggacactaaggagaaataatgagtaaatgcaatttgatatcctggattggatcctggaacagaagaaagacattggaaaagcaggtgaaatccaaataaagtgtggactttagttaatagcgatgtaccaatattagtcctttggttttgactaatgtactatggttctgtaagatgttaacattaaggaaaatgggtgaaggacattcagaaactccgtaaactatatttgtaacttttttgtaaatctaaaattattccagaataaaacttattaaaaaaaaa

SEQ ID NO: 213354 - DNA, 515 bp, Homo sapiens
gatgtactcttaattaaaaaaaattgaagtcccatatactcctccaaatctagtcaacaagtaaatattttcaagctacttttaatttttgttttaaaagtaggagactagtgggtataaaatagtaaaagagcattagatatgaaacctatgagttcacaaatatatacttcactttccaaatgaatgagaattacgataaactgttaattcatccacacagagtggcactaccttatcatcagaacttcccgtatctggatatttggtcttgactgtttcactgcgatattcagctattgcaagaatattttcttcacctcttccactggttcaaaggggttcttactttggaggtcttctagaacaccatgcctcagtgctctctactgtatgtttttaataccctcatttttcaggacaaaggtatttggaaagcatttgtcgactgtttttccaataaacactcacataataattcactgggaaatattatatttatatgtttaatgctt

SEQ ID NO: 213355 - DNA, 550 bp, Homo sapiens
gctgggcatggtggcacacacttgtagtcctatttgggaggctgagacgagtggatcacttgaacccttgagtttgtggctgtggtgagttatgattacaccactgcactccagccagggtgaaagggtgaaacccccacctcttaaaaaaaaaatttgctctcatacctatatccatcatagcatctaagtacctctagtttcacatgattaactcagtataaatatttgatggggttctcatgaaatcaaaatactttctctaggattatcaagataggagaaagaaccattagaagaaagagaaaatgtcacaaatattaatatctgaaagaattgaaactcatcagtgatatccacaatatagaaattctaggaattgctagacatagtggtgtgtgcctgtattcccaccttgttgggagactgaggcaggaggattgcttgagtctgggagttaaggctgtgatgcactatgatcatgcttctgaatagccagtgcactccagcctgtgcaacatagcaagactctgtctctaaagggggaaaa

SEQ ID NO: 213356 - DNA, 431 bp, Homo sapiens
ccccacaacagtccccagagtgtgatattccccttcctgtgtccatgtgatctcattgttcaattcccacctatgagtgagaatatgcggtgtttcctcattttttatcatcagattcaacaaacacaaaattgcatttttataaatgcaatcagaaaataacaggaaaagagagaagagtctcaaaaaactgtacatgttgctcattgaaggtatgcgtggaggtgattaaaatttctgtgcttacctcattgcagaccaataaaaaatgggacatggatcacacttttagagacttttgctttaggaattagtttacatactactaatgatattaactttgtctccaaacttgttaagggtaagaaagcaagaaaattagtatcaacaactgggatttggatactatgtagaaagatgtgaaactaagg

SEQ ID NO: 213357 - DNA, 389 bp, Homo sapiens
acatcctatgtgggcaggaagctgtgtatgttaccgcccccatcccctgccatgtgttcccaggatctgtgcctggagaaatgacacatctgtaggttatgagtatacagaaccttatctagccttctcagtaccttttagagaagggaagtgttgtactcagtgttacccagctagaaagtggaaggtctagaatgaaacccacttgctatctgactccaaaggccgcactctttccatcccagcacgcagtagaggaatctagaaaggtattagtggcagcggagtgggaagccatcaggtggagtgagggagaaaggaggtaccaagttgtttcacacttgtgataatccactccctcggttatctgttgctttataacaaaaaaa

SEQ ID NO: 213358 - DNA, 1532 bp, Homo sapiens
cgctcagtccggcagcgcagcaggagggaggcgcgaggcaggagccggcggctgggctccgcagcgcagccagcgcagcgcggcgccccgggcccggccccatgcccgcagccccgccggaccgtccttgagcgcgggcgcctagcccgcgccccctgcccgccggcaccattgccccgacggcgcggccgggcggcccggcgctccccaggctccgcgcgggccgaaagacgctgctagcggccgccgcgggtgtggtgatgctgctggtgctggtggtgctcatccccgtgctggtgagctcgggcggcccggaaggccactatgagatgctgggcacctgccgcatggtgtgcgacccctaccccgcgcggggccccggcgccggcgcgcggaccgacggcggcgacgccctgagcgagcagagcggcgcgcccccgccttccacgctggtgcagggcccccaggggaagccgggccgcaccggcaagcccggccctccggggcctcccggggacccaggtcctcccggccctgtggggccgccgggggagaagggtgagccaggcaagccgggccctccggggctgccgggcgcggggggcagcggcgccatcagcactgccacctacaccacggtgccgcgcgtggccttctacgccggcctcaagaacccccacgagggttacgaggtactcaagtttgacgacgtggtcaccaacctaggcaacaactacgacgcggccagcggcaagtttacgtgcaacattcccggcacctactttttcacctaccatgtcctcatgcgcggcggcgacggcaccagtatgtgggcagacctctgcaagaatggccaggtgcgggccagtgctattgcccaggacgcggaccagaactacgactacgccagcaacagcgtgatcctgcacctggacgccggcgacgaggtcttcatcaagctggatggaggcaaagcacacggcggcaacagcaacaaatacagcacgttctctggcttcatcatctactccgactgagctccccacgtctccctccacccacgtccctcacccgccggggtcccctccgggcggggcagacgatgactcgcccctcgcccacccgctcgctgcccggccctccccggctatgacgcccccggcccgtgctcaacaccgcctgggccacagctaggccctcccaccggctcgctgcagagccgggcccagcgcgccctgtccccgtgccagggaaccggggttgaccgcccccgcccagcccgcgctatatatttgtacaataggactgtttactgcccacctccgcctgccagcccaccccagcctggggagaggtcgcggcggcgggtttgcttcctgcgctctgagatgagctgccctcggctccctccggggtggcgcgcccgggggaggggggagttgggggctggatagcttcccagcaccctcagagcccccgcccggctgtgccccgtctgaccaaagttataataaaaacattttcaccccgca

SEQ ID NO: 213359 - DNA, 1062 bp, Homo sapiens
cgctcagtccggcagcgcagcaggagggaggcgcgaggcaggagccggcggctgggctccgcagcgcagccagcgcagcgcggcgccccgggcccggccccatgcccgcagccccgccggaccgtccttgagcgcgggcgcctagcccgcgccccctgcccgccggcaccattgccccgacggcgcggccgggcggcccggcgctccccaggctccgcgcgggccgaaagacgctgctagcggccgccgcgggtgtggtgatgctgctggtgctggtggtgctcatccccgtgctggtgagctcgggcggcccggaaggccactatgagatgctgggcacctgccgcatggtgtgcgacccctaccccgcgcggggccccggcgccggcgcgcggaccgacggcggcgacgccctgagcgagcagagcggcgcgcccccgccttccacgctggtgcagggcccccaggggaagccgggccgcaccggcaagcccggccctccggggcctcccggggacccaggtcctcccggccctgtggggccgccgggggagaagggtgagccaggcaagccgggccctccggggctgccgggcgcggggggcagcggcgccatcagcactgccacctacaccacggtgccgcgcgtggccttctacgccggcctcaagaacccccacgagggttacgaggtactcaagtttgacgacgtggtcaccaacctaggcaacaactacgacgcggccagcggcaagtttacgtgcaacattcccgtgccagggaaccggggttgaccgcccccgcccagcccgcgctatatatttgtacaataggactgtttactgcccacctccgcctgccagcccaccccagcctggggagaggtcgcggcggcgggtttgcttcctgcgctctgagatgagctgccctcggctccctccggggtggcgcgcccgggggaggggggagttgggggctggatagcttcccagcaccctcagagcccccgcccggctgtgccccgtctgaccaaagttataataaaaacattttcaccccgca

SEQ ID NO: 213360 - DNA, 1637 bp, Homo sapiens
cgctcagtccggcagcgcagcaggagggaggcgcgaggcaggagccggcggctgggctccgcagcgcagccagcgcagcgcggcgccccgggcccggccccatgcccgcagccccgccggaccgtccttgagcgcgggcgcctagcccgcgccccctgcccgccggcaccattgccccgacggcgcggccgggcggcccggcgctccccaggctccgcgcgggccgaaagacgctgctagcggccgccgcgggtgtggtgatgctgctggtgctggtggtgctcatccccgtgctggtgagctcgggcggcccggaaggccactatgagatgctgggcacctgccgcatggtgtgcgacccctaccccgcgcggggccccggcgccggcgcgcggaccgacggcggcgacgccctgagcgagcagagcggcgcgcccccgccttccacgctggtgcagggcccccaggggaagccgggccgcaccggcaagcccggccctccggggcctcccggggacccaggtcctcccggccctgtggggccgccgggggagaagggtgagccaggcaagccgggccctccggggctgccgggcgcggggggcagcggcgccatcagcactgccacctacaccacggtgccgcgcgtggccttctacgccggcctcaagaacccccacgagggttacgaggtactcaagtttgacgacgtggtcaccaacctaggcaacaactacgacgcggccagcggcaagtttacgtgcaacattcccggcacctactttttcacctaccatgtcctcatgcgcggcggcgacggcaccagtatgtgggcagacctctgcaagaatggccaggtgcgggccagtgctattgcccaggacgcggaccagaactacgactacgccagcaacagcgtgatcctgcacctggacgccggcgacgaggtcttcatcaagctggatggaggcaaagcacacggcggcaacagcaacaaatacagcacgttctctggcttcatcatctactccgactgagctccccacgtctccctccacccacgtccctcacccgccggggtcccctccgggcggggcagacgatgactcgcccctcgcccacccgctcgctgcccggccctccccggctatgacgcccccggcccgtgctcaacaccgcctgggccacagctaggccctcccaccggctcgctgcagagccgggcccagcgcgccctgtccccgtgccagggaaccggggttgaccgcccccgcccagcccgcgctatatatttgtacaataggactgtttactgcccacctccgcctgccagcccaccccagcctggggagaggtcgcggcggcgggtttgcttcctgcgctctgagatgagctgccctcggctccctccggggtggcgcgcccgggggaggggggagttgggggctggatagcttcccagcaccctcagagcccccgcccggctgtgccccgtctgaccaaagttataataaaaacattttcaccccgcaaaaaaaaaacccaaggcaaaattaggtggaaacagcgagaaggccagggcaaacgtccggccagtccgccacagtgaatcgggcccaaagacgcaatgaacggac

SEQ ID NO: 213361 - DNA, 1239 bp, Homo sapiens
cgctcagtccggcagcgcagcaggagggaggcgcgaggcaggagccggcggctgggctccgcagcgcagccagcgcagcgcggcgccccgggcccggccccatgcccgcagccccgccggaccgtccttgagcgcgggcgcctagcccgcgccccctgcccgccggcaccattgccccgacggcgcggccgggcggcccggcgctccccaggctccgcgcgggccgaaagacgctgctagcggccgccgcgggtgtggtgatgctgctggtgctggtggtgctcatccccgtgctggtgagctcgggcggcccggaaggccactatgagatgctgggcacctgccgcatggtgtgcgacccctaccccgcgcggggccccggcgccggcgcgcggaccgacggcggcgacgccctgagcgagcagagcggcgcgcccccgccttccacgctggtgcagggcccccaggggaagccgggccgcaccggcaagcccggccctccggggcctcccggggacccaggtcctcccggccctgtggggccgccgggggagaagggtgagccaggcaagccgggccctccggggctgccgggcgcggggggcagcggcgccatcagcactgccacctacaccacggtgccgcgcgtggccttctacgccggcctcaagaacccccacgagggttacgaggtactcaagtttgacgacgtggtcaccaacctaggcaacaactacgacgcggccagcggcaagtttacgtgcaacattcccggcacctactttttcacctaccatgtcctcatgcgcggcggcgacggcaccagtatgtgggcagacctctgcaagaatggccaggtgcgggccagtgctattgcccaggacgcggaccagaactacgactacgccagcaacagcgtgatcctgcacctggacgccggcgacgaggtcttcatcaagctggatggaggcaaagcacacggcggcaacagcaacaaatacagcacgttctctggcttcatcatctactccgcctgccagcccaccccagcctggggagaggtcgcggcggcgggtttgcttcctgcgctctgagatgagctgccctcggctccctccggggtggcgcgcccgggggaggggggagttgggggctggatagcttcccagcaccctcagagcccccgcccggctgtgccccgtctgaccaaagttataataaaaacattttcaccccgca

SEQ ID NO: 213362 - DNA, 975 bp, Homo sapiens
acactcttcaccccgcccctcccttgcttagtcgctcggctggcccggctcaccttcggggtgaaggctaccagcgagcgttatagcagacgactttaataaatgcaggcggcagcaggaactctgggaacttgggtgcccttgcctggcagtaagggttgaattatccggatctgaaatactttacagagccgaggggtgataggctctgcaaaagcactttttgcccctctcctttatgccaatactcgctgactgtgcacacaagtcatattcagtattaaatacaaaccggtctgtaattcaatggctctagcaagacgcctctgagagggccaggtggcgggtgcaagttgctcattaaccctttagagtcgcagtttgcagatctgagttagatccccggctttgaggtccttcagttgccctcctcccccacctccccccgccactgcgagaaaaatgtgcaaagagaaggaaatttgcacatcaaacgaggggcaatcgcggcggtagatgaacttgattaggcagacgcgtgagatcaaagtggccgggaccaaagcggacagggtccaacgtgccagcactgccaagagaaggccttttgtactcaggttaaataagaacatcctgcaaggagtctgttcttttatgcagcctaaagatcaagtaataatcattgacactgatactgagcatgtcgattttgaagagactagcatttcctggtaatgaagtggagtatatatccatatatttctgttttctggatgagaagactaacctaactaagtaggaaccttgaagaatcatgttcttcctaggaattacaaatcccccgattccatgtctaacataatttctactggcctctttgcttctcatgctttagtaccagtgcttctgaatttgaaagtcttcatgcaaattgcccagctgacagggcagccactgttgaggaaatgctgatca

SEQ ID NO: 213363 - DNA, 710 bp, Homo sapiens
aaagtgttgggttggtgtagctcaggtgggataaaaggagaggctgaatgaccatgttttggagtgtctggaataatggggtatgttttgttaagctaggtctttaggtgcatgtgacataccaagagaaggtatatattttttaagattaaacactgaggctgtgtgatttttatagtttactgtctttctactatattactccatgagggctggttccaggtctgtgtttctctccactgtgtcctcagtgcctagggcacagaaagcactcattaaatatttgttgaataaatgagtggagaaagtagaggccaggaatcaaacaagaattggacagactcaagagaccttagctctagctggacttggttttgctatttaatggctctgtgccctcggaaagggcgcttcatttttcggtttagtttcctcatctgtaaattggggataataccacttagctcataggattattatgatgtttaggggacaggatatacaaaagtaacttgaaaaatataaagtactatgcaaatgcaagcaaactgttatttagattgaggatgatttttgttggtttaaattagccaagtggaaagaaaataagcaggaaagagaaaggttttcaaaaggcacgtgcctctgggcattacatgcacctatttctgattaatgggtcaagctgttatagatcttcagcccacaca

SEQ ID NO: 213364 - DNA, 485 bp, Homo sapiens
tggggttgccccaatgtttcagagtattcaatgggcctgaacgggaccactgacctctccgggttttcatctctttgtttcacaatgtagaacatttgggaaggatggaatctggacgcgtgggtttccctgcctctaggcttctgaattctgtcttgagctcacacgaaaggtggctttgcctctagattgcttctagagttgtggcaactttatgcaagtcagatcaaagtgctccttctacaagacacaccatttccacccagcagaaaatcatgcaaagatgcggaggtgcagtgcctgtgctgagaacagtgctcctaaggtgccgcactctcctgcaaggcaaaatgcataccgatgtgggggcgcggcttccactgaaatccaggcaaactctgaacttggaggttttatatttaggttgtattagtaattttcaattcataattcataataaatacttgtattattaattattataa

SEQ ID NO: 213365 - DNA, 413 bp, Homo sapiens
ccgtcatttccttctgctaagccagcatacatctatccaaatgagcaattttcatttttttgtgtgtcactagtttgtattaaatggttagtattgatcagactgaacgtttttacctttttcttttaaaccatcccacttcacatactgagaaagtaaaaagacaaactctctgggatgaagtgttttcgggaaggatgcaggttgacaagtgcattcagagtgtgctgaagcttggccattcctgcagttttgcctatcagaaatttgaccttggccgggcgcggtggctcacgcctgtaatcccagcactttgggaggccgaggcaggcagatcacgaggtcaggagatcaagaccatcctggctaacacggagaaaccccatctctactaaaaatacaaaaaaaaaaaa

SEQ ID NO: 213366 - DNA, 617 bp, Homo sapiens
ttcagtggggaatgctgaggctggattttacaggggtcagaaaaggaagggaggatatggcttatactagttctgccaaatctaccatgtaacctccttacagccattcattcattcattcactcactcattcatccattcaaacaggggatgaggagggtgtgccaagcaccagaaaggaagggcacaggtctgctttctagagctgcagtctccatgaaagagtttttgaaggatggaatgaccaggcctgggcaaactgacttctggacaattctggagtgtgggtacagatgatcagtgcttggctggtcagaaaagggaaagccaggaatgtgggggaggtgaaaacaaaatgtttctattctctaaattcacaaaagggcagggaagggagcggccaggctcagtggctcaagtctgtagtcccagccttttgggaggtggccaaggttggaggattgcttgaggacaggagttcaagaccagcctgggcaacatagcaagaccctgtctctaccaaaaatacataaattagcagggtgtggtggcacatgcctgcagtcccagctactatactcaggaggccgagttgggaggactgcttgagcccagga

SEQ ID NO: 213367 - DNA, 143 bp, Homo sapiens
tgtattatagtcaaacaatggcatgctgcacagcaatgagaacaaactatgactacacattacaacatggacacatctcacaatgttgggcaaaagaagttagaacaggccccgtgcagtggctcacacctgtaatcccagca

SEQ ID NO: 213368 - DNA, 376 bp, Homo sapiens
gctcgataccccgtgaaagcacacccctccttgccctttggtaatactaatgactacagtcacttaaactccataattaaaagtacctagtcagtatattaatcaacctttcaatgtccattcagagctaaaacttttcccttccctagctaagattatctatagatggaagacagtgtgattagcttctctttttgttgcttatctcctcacccactggcaagttgctatatctgaccccatcaggatctaaaccaggggaaggaagagagaaagcaaggcaaacagtttttgttgttgtttttcccacactcctgttgtgaaattgctttactgtttttgaacttgatatgtgtttaaggctggccctttttct

SEQ ID NO: 213369 - DNA, 359 bp, Homo sapiens
aaagaagccagaggagtaactgaggcagtgagggctttgcagccactgtaggacttgggctttctctctgtatgtgatgggaaccagcacagatgttttttgtttgttttatagatccacaagtataaacttcaatatactttggtcagaaatggataaatcaagtcaacacaaaatatgtaaatccagagggaatttgataaaattaacataacaaccagctctaaaagtagacaatgtggctgggtggctcatgcctataattccagaactctgggaggccaaggtgaaaagatcacttgaggccaggagtttgagaccagcctagacaacatagtgagacctcctgtttctataaa

SEQ ID NO: 213370 - DNA, 1575 bp, Homo sapiens
gctttcataagaaatcccatggcaaagggtaataaaaaggacctaatcttaaaaatacaatttctaagcacttgtaagaacccagtgggttggagcctcccactttgtccctcctttgaagtggatgggaactcaaggtgcaaagaacctgttttggaagaaagcttggggccatttcagccccctgtattctcatgattttctctcaggaagcacacactgtgaatggcagacttttcatttagccccaggtgacttactaaaaatagttgaaaattattcacctaagaatagaatctcagcattgtgttaaataaaaatgaaagctttagaaggcatgagatgttcctatcttaaataaagcatgtttcttttctatagagaaatgtatagtttgactctccagaatgtactatccatcttgatgagaaaactcttaaatagtaccaaacattttgaactttaaattatgtatttaaagtgagtgtttaagaaactgtagctgcttcttttacaagtggtgcctattaaagtcagtaatggccattattgttccattgtggaaattaaattatgtaagcttcctaatatcataaacatattaaaattcttctaaaatattgcttttcttttaagtgacaatttgactattcttatgataagcacatgagagtgtcttacattttccaaaagcaggctttaattgcatagttgagtctaggaaaaaataatgttaaaagtgaatatgccaccataattacttaattatgttagtatagaaactacagaatatttaccctggaaagaaaatattggaatgttattataaactcttagatatttatataattcaaaagaatgcatgtttcacattgtgacagataaagatgtatgatttctaaggctttaaaaattattcataaaacagtgggcaatagataaaggaaattctggagaaaatgaaggtatttaaagggtagtttcaaagctatatatattttgaaggatatattctttatgaacaaatatattgtaaaaatttatactaaggtcatctggtaactgtgggattaatatggtcgaaaacaaatgttatggagaagctgtcccaagcaaactaaattacctgtacttttttcccatttcaagggaagaggcaaccacatgaagcaatacttcttacacatgcctaagaacgttcattgaaaaaataaatttttaaaaggcatgtgtttcctatgccaccaatacttttgaaaaattgtgaaccttacccaaaaccatttatcatgtccattaagtatatttgggtatataattaggaagatatttacatgttccatctccacagtggaaaaacttattgaggctaccaaagtgtgccaagaaatgtaagtccttagagtaattagaaatgctgttttcctcaaaagcatgagaaactagcattttcatttcttatttactccctttctatatcaatgcaattcacaacccaattttaatacatccctatatctcaagcatttctatcttgtactttttcagaaaataaaccaaaaataatcctttggt

SEQ ID NO: 213371 - DNA, 436 bp, Homo sapiens
ttttcagcgcaggtgttggactgagctgtctgctgtgtaacatgcaattctctccctctccacttttcctcactgagcctgtgaagctcagttcaaacccaattctgtagttcagcttcactcttgtccttcctctgaaattatatggctctcttcatttgacatttcacttgcatacaataaatatcctgttgctatatttgcagaatgtattataacaaatttttagtatcctttatctcttctaacacaggatgagtgcatcgatacattcaaatatctgattgatcaaacaatctttacatctcctcagcagttctagttgggttttaatgacatcatgaccctgcgtggacctacacacattgctgaagttgcacaccagaatgtaattatgatatatgcattcaggcatgcaatgtggacagcaaaaaaa

SEQ ID NO: 213372 - DNA, 444 bp, Homo sapiens
cacttttcttctctcaggaagctgttaaatactgtgagaagaggtcaaggtggctgtgggtagtagaagcccctagctagtgaagctaagctcctggagaattaaaacctaagtgggtctgggccgtttcccattgggacatgtcttccactgggctttgataggagctcagttacctggaatagcagaggcatctgggccaacctgaatgtttttgagttgtatctgcatcattggcaagccagttctatatccaatacccatctttctgtctttgttctctaagtgaagcattttaccactaaatcaaattacttaactagataacagatatcatggtcattttatcagatatcagtatagtttgcactgaagttcattgttgcaatagacattccaatttctattttaccgctattattagagagacatattgacaaatag

SEQ ID NO: 213373 - DNA, 360 bp, Homo sapiens
aagcattatagtactgcaaatcctttttccaccatcttttcaaacttttgccgtgacagaattgtttttgatacccacatagaaaagattaaatgagtagaaaagaagatcaatatgaaaaatttaaaggaactgtcatttttcagcctaggaagagagagaatgccgaaagacttctaatgtatggagtttaaacatcagatggtgattgattgctattaatttatgtcagcaaaggaggagaagaaatacgtaaaactgcctctgaagaatttacattaaacaccaaaagaatctgactctgaaaatgaagaaacaaggaatattgtttgttttgggaatcaaaaaaaaaaaaaactt

SEQ ID NO: 213374 - DNA, 528 bp, Homo sapiens
acaaaaaagacgtcacttcaaagatgatccttggttcttggggcatgacagaagagaaaaggtaaatatgtctggatacctctcttctcccatctcttcctagggtaaggactgtcatttactgctcacttctctagtcctagtaccaaaaccatgcccagatgcagctggggtgcacttgtggttctttcggtggtgccaaaacctatctgtttgactggttaagtgtgtagaaagtaggagccctctttgccagtaaaaaggggtgcagttgatcagagaggaaagtaaatgtacccatgtgtgacacagccatcactatgtattcaagacagatgctgtacctgaggcaaagtaccccaattctagagctaattatctgctttatttgaaacttgtctatcattttaccatgccgattcttcaaaataagactataaaacataaaacagaaaggactattgataggattttgcttgttcatggttctttgtaaaacagcaataaaccaccctggctgaggaagca

SEQ ID NO: 213375 - DNA, 284 bp, Homo sapiens
agcatgacggcttgaatgtttgctgcctctgggagaagtagagtaggagagggtataagaaggacgctgacaccaggctttcctgtagtacttattcacagagccaggtgcttgagtactggtggtggtgtggggggattgtccattgatcctccttgacttttgccataagagaggccttatttatgggctactggctttctctcatttgttatgtgtttttttttcttttcatgcagtgatcagaatataatgtccaaacattcaagccgtaagggatccgc

SEQ ID NO: 213376 - DNA, 127 bp, Homo sapiens
attttaaatggcatactctaaaaatatttgtttagaacacatatttctaaaaatatataaaatatatagctgttgtctctgtgttgtcacctgatttacctaatctgtctagttctcaccattctgc

SEQ ID NO: 213377 - DNA, 453 bp, Homo sapiens
acctatgttatttagtttaattttcacagccaccgcatgaggtatgtattaaccaaaaaaccaggagtagattttcattttccaagaatcagaacataataaatctacactaaaaactgagcaacatatcttacatttggcagcatctgcttatttcacttcaaaagaattaaggggaccgggccatatcttacatttggcagcatctgcttatttcacttcaaaagaattaaggggaccgggcacagtggctcatgcctgtaatcccagcactttgggaggccgaggcgggcagatcacgaggtcaagagatcgagaccatcctggccaacatggtgaaaccccgactctactaaaaatacaaaaattagctgcgcgtggtggcatgcgccggtagtcccagctactcggaaggccgaggcaggggaatcgcttgaacatgggaggtggagg

SEQ ID NO: 213378 - DNA, 745 bp, Homo sapiens
agatattcaccactaataatgcttcttaccatgatctacttatattttggacatttcatttttatacaattaaagttttcagaactatgaaaattaagaaaacaggtttctaagtacactctttgttaaacaaaataatttcagaaatctaactttaggcttttgggatacccacatatttctttcaggggagaaaaattaataagagcccggtcacaaatcaaaagaaaaacatgtggcctaacattatggtagaaaccatggctacattaaagccacagctgtgcataaatcacaatcaccatcaatagtatcaaggaacacaaaagttagccacaggcacactgaataaaaagggtaacctgtaacctctgtccaggcttacattgctactgaaatgccactgaacttaaaaaggaaaataatttatgtaatttttacacaattatcaagaactctggtttataaaactcacataaaacaagtggcatttataccaacagtaaaagcatagatggcttaacacatgttccattcacagggccagagaaatttttaaataggtaagaacatatcattcgcccagtaatttttactatttttgtgtgaatttgcaaaattttgaaaaatcaaatactttcagcaacagtttgattttaacttcaattttagctaaatgaaaacacatcaattatgctccactacctgataaaagtctgaatggtcaaaaaccaaaaaaaattca

SEQ ID NO: 213379 - DNA, 460 bp, Homo sapiens
tacaaaaaaagggaattacaatgagagatgaatactttggtaaattatggaacatctgctgaactgtaagagtatatatcaatttaaaagaatatgctacaattgttttataaaaaagaaaactttgtcagaggacaaaaaaatgatctgcaggatagtatatattttatggtcttgttattggaagaaatcataaacatcttttggaaaattgtgattggttaaacaagacatttagtttgaattaatattgtttgtgttcataggtagagaatgccatgtttttacttgaaaaatattcccaatttatacttaattttactatctttgtaccataatcatgaatatattataaaacatgttgatcttagaaaataggtatgatgatgtataagttcatggcatgataaatgcaaaataggctgttttctttcagaaaataaatatgctcatgcatttg

SEQ ID NO: 213380 - DNA, 457 bp, Homo sapiens
tgcaaacagtttaaaaattagccaggtgtggtggtgcatgcctgtagtcccaggtccttgggaggctgaggcaggaggattgcttgaacccaggaggaggaggttgtggtgagaaagattgtgccactttactgcagcctgggcaacagaaggagacgctgtctcaaaaacaaagaaaacacaacataacacaacgcgtaggatacagtaaaagcagtactaagaggaaagtttatatagctataaatgcctgcatccagaaagaaaacttcaaataaatgcactaacaatgcattttgcaagagcaaaccaaacccgaaattagtagaagaaaagaaataataataaagataagagcagaagtaaatgaaatagaaatgaagacagtataaaagatcaaagaaacaaaaagttgttttttgaaatcgtaaacaaaattgacaaacctttagccaga

SEQ ID NO: 213381 - DNA, 361 bp, Homo sapiens
agggcagtagaggttgccttcacaggcctctccgcagcagccatcttagacttgagggctctgtcctgatgccttacaaacgcagggtccaagaaataggattccaaaaaaaacagtggtctccagcctgggactatgaagatacgaaacaacttactttaagggacagggtctcgctgtgttgcatgcgctggaatgtagtggttattctcacagatgtggtcacagcatgctacagccttggactcctgggctcaagccatcctcctgcctcagcctccccatgtggtggcctacaggcactacctcatgcctggctatgaagtaaatcttaaaagtgcctatgagacttttaggcaag

SEQ ID NO: 213382 - DNA, 539 bp, Homo sapiens
caccaccatgccctgctattttttctttattgtatttttagtagatactgggtttcaccatgtcggccaggctggttatgaactcctgacctcaagtgatccacccacctcggcctcccaaagtgctaggattacaggcatgagccaccgcacccggcctagatgttggtttttaaggctactgtgaaactggggaggggggtgggaatagggcaatttaaaatgccacagagcttactggttttactgagattcagccattttattaaataaatgctacctgaattgctgtaagctattggttaatttccagagttctaaagttgattccgatgacttttgtcagtgttcttgttgcttttatagaggagagcatttttagaagttcttactctgccatttttactacatcccctcctagtatggcttcttgcatgggaaaatgattcagtaaaaactaagcttgacatcaaacagtgtactagattaggcaagaaattggcatagttaatatacaaatctatatgaaaggtatgaaa

SEQ ID NO: 213383 - DNA, 449 bp, Homo sapiens
ctacatggtgcctagcagccttgggttggggagtcatggagagagaagtccattagtctttctagctgctcatactttttcacttccttatagccccatggatagtcacagtctcaatgttcagttctggaatattgcttctagtaatcttgtctctacacagctgtttttacttttctttgaggtaaagtcagatcacttctgctataccatgttggtgatatcactctccctttgcctattttttaaaaattgggttatttgtctgtttattgttgagttttaagagttatttgtttttattggatattagaagtttttagataattgatttggaaatatttcctcccattctgtaagttggcttttcaagttctgaattgtgtactttgatgcaaaaagtttttaatttcagggaagtccaatttattttttcttttgtcattgct

SEQ ID NO: 213384 - DNA, 772 bp, Homo sapiens
tttgggaaaattgtcttggtagatgtataatatattaagaaattaaaccagaattgtaagttacataaatttttgagtgactaggcagtaatatttcaaaaggtatttcagattttaagacatttttatttttcacagttctttttgtgatgaaatatatcatttttattttaatattgaagatattgggggccaaagcatggaaaacattttgaaataaagggcttttaaaattctttttgcatagtaaagaaaattatctcatttccagtaataaaccacttagtttaatttttaaaaaggaaaataaaatagtacttatagaaactatgagactagcagctcttgaagagaaaatgccagtaacaactagcagtgccaatatgattacaaatttacttaacagtataaattagagctttcacaactctgaagttcttttcctactaaacaaaccttggaacatatggaaaaattctctggctggcttaatcacttaacttgacctcttttcattatttgcttggtctgtcctcaaaattaaaaggaaactattatatttcatgatgtaacatgcagttcaattatcagtaaataatttaacaagatctgaaagagattaaaaatgatttgcttaacagctttggttaactagcatcaattgtattttagtgaagatatatttagaaaaagctaaatatatagagagaagtacttgctgaatcagccaattagaggcagtatgcagagaaccagtgagctgaaaccaagg

SEQ ID NO: 213385 - DNA, 199 bp, Homo sapiens
cctcactagtcgtagaaaagagtacttctccatcataatgaaacaacataaccaaaaaggttagaacataatagggaaggagtaagagggtgtaagaaagagaaaaactaacttcagaacagaaagactataaaactctccatttattctccatctttctagagataatacttttccgaaagtcagtgatcaacaaatc

SEQ ID NO: 213386 - DNA, 569 bp, Homo sapiens
taaccttctctatttagaagaagactatgttcacaaatatttgtagatattgagaatcaaagaagtaaatgtgtctataggcaataagaattacacttttctaattttttattgaacctgaagtttccattgactacattatgttctttacatttgtctccccagtggactctactttacctttagatcttaggggaaatatatagatagatataggtatatagatgtagatatacacacacacatacacataccccactgcctattatcatatctttaatatactatttatttgttttcaagtaatagtgcactagcatttgttttgtatgtcatagtttattattattttagagtatgttctttctacacagttaactgaaagacagcctcaagcaagtccttcaggaggtattccagaagaagacattgttgtacaagttagcttctagtatgttattgttcctgaccatcttctagtgggacaagatatagaggtagaagacagtcatattgatgatctgactctgtataggcctaggctaatgtgtgtgtgtgtcttcattttt

SEQ ID NO: 213387 - DNA, 898 bp, Homo sapiens
ctctgaggccagggcaggacacgaacgcgcggaggccggcggcgactgagagccggggccgcggcggcgctccctaggaagggccgtacgaggcggcggcccggcgggctcccggaggaggcggctgcgccatggacgagccacccttcagcgaggcggctttggagcaggcgctgggcgagccgtgcgatctggacgcggcgctgctgaccgacatcgaagacatgcttcagcttatcaacaaccaagacagtgacttccctggcctatttgacccaccctatgctgggagtggggcagggggcacagaccctgccagccccgataccagctccccaggcagcttgtctccacctcctgccacattgagctcctctcttgaagccttcctgagcgggccgcaggcagcgccctcacccctgtcccctccccagcctgcacccactccattgaagatgtacccgtccatgcccgctttctcccctgggcctggtatcaaggaagagtcagtgccactgagcatcctgcagacccccaccccacagcccctgccaggggccctcctgccacagagcttcccagccccagccccaccgcagttcagctccacccctgtgttaggctaccccagccctccgggaggcttctctacaggaagccctcccgggaacacccagcagccgctgcctggcctgccactggcttccccgccaggggtcccgcccgtctccttgcacacccaggtccagagtgtggtcccccagcagctactgacagtcacagctgcccccacggcagcccctgtaacgaccactgtgacctcgcagatccagcaggtcccggtcctgctgcagccccacttcatcaaggcagactcgctgcttctgacagccatgaa

SEQ ID NO: 213388 - DNA, 464 bp, Homo sapiens
catttccttggcctgttaatttctctgttctatgttgcttgtatggaaaagtatctcaaaacctataatgtaaacctctcaatttgctttacttttcctgctcttgagattttcatgtggccctgattaaaattttaatttgtcagtagagtcaaatcttattagtgccattccagcaattgggcactgggatcatttgcaaggtcttcagggaagtttgcctttgcacagtttaggaaagattctgttaattaggtgaatggtataattgatacgacaagaggattgtttaacttaagggaagcaatttattatgcatgcatgagaagcttctaggtatttactgaccaattgcatgcccattacatatcctttttgtattttagagataataatcatcttatattgtttacctcctagcccagtttttggcacacttgaaagtactacaaattgtctttatg

SEQ ID NO: 213389 - DNA, 460 bp, Homo sapiens
tcctttgattcctccagcctatctgctatacccatatagctatgtgccttgaaggtgaagggtatgatgaaatcattcagagctgctcctagacaatgacaacaaggtctaaaaagtgcattccccacattgcccaggaatggctggaatttctgcttcatgtgatttatctctaatattatggcttatttaaaaaaaaatccctgtctcatagccaggatgcaaaagggagtcttccctctgcctccatcctcaacccttctttcctctgcaagttttccagtgaggaattaaaataaaaaatcctttagtgtcttaaagcatgtaaatgtaatgctaacattaaaatgatgccatagaatcataaacatatgaaaagatgcttaacctgacttggaatcagggaaatacataaattaaaatcacaaggagactctgttttatactcatcagattggca

SEQ ID NO: 213390 - DNA, 242 bp, Homo sapiens
tcaccgtgcgaatatctgatcaaattcctcctccccacccttgatatctgactacctttgatatctagtcaaattctttaatccctgccttccgtgttttaccaccttggcctgccttcagcaataatcctatcaagttggtttagccagaacactgttacccttgatgtttcttcttagtaattttccatacggtgagccacatccatatccttggctataaatctctacttctccttgac

SEQ ID NO: 213391 - DNA, 467 bp, Homo sapiens
aatacattttaaaataagattggcttggtttgagaagatgacttgctatttacaattactatttaatatttgcctccctgatgtgtctgaggaatagatgtcggaagtgcaaactcttaaaaaattggccttctaaaaaacatatatcagattccaaatcaaggttaaacatatgatagaacattcatggtgaaattcctatggtaaatatttttttctcaaatgaaataagtaatgtatacaaaagtgcctaagacagtacctggcttcagagtcactaagaaattgctaaaagctctgcttcgcatggtaaaaaacttaagtcctggtttgcgtagcttgatagagtgattatacaacttccattctctcactttttttttctgtatcccaccccttttctactgaatttgtggggatcctataataaaagtgaatgactaaaaattttaaaagcattccttctc

SEQ ID NO: 213392 - DNA, 272 bp, Homo sapiens
gtaaaaatggctgggtacagtggctcacgtctgtaaccctagcactttgggaggccgaagcaggtagatttcctgagcccaggagtttgagtccagtctaggcaacatggcaaaaccctgtctctacaaaaaatacaaaattagctggatgtggtgatgcatgcttatagtcccagctacttgggaggctcagcccgggaggttgaggctcagtgagacgtgatcatgccgctgcactccagctgcggtgacagagtgaaacccatctcaaa

SEQ ID NO: 213393 - DNA, 462 bp, Homo sapiens
ttacttgctgtgttacctaaggggcaagtcttgggagttccaggtgctccagcttcctcatcggtagactgggaataacgcctagattgtaaaggtcaaactatcagaaaatacttttgaacattcatgcagttacacaatttaataaatatggccaggtgtgttaaaaatctttaacggaatagattcagaatggattcttgttatcgaaattgttataaaatgaatataaaggaatccgaagtccgcccctcccccattcacctgtacttagaaggttccccaggagctcttgagaaatacataggctggtttagatttggccttagattgtattttttaaaatttgtagatcgacttttaaaatcttcatctccggtgtctattacttgttgctctccgttggttgctccgaagaccacctccgcaccgagtaggtcggcgctttccccagggtacaga

SEQ ID NO: 213394 - DNA, 436 bp, Homo sapiens
gcctcattgtctaccatgaaggcacaatcagagtgctccagggtggtgtgggtggtgaggatggagttgtagggctcaactacagctgtggaaacctggggcgccgctttagccagggtggacatagcttaaattataaaaactaaagatgaaagtacaaggaagtataagttatacttatgtaagtataaattcatgctgcctacttctaagagaaatttcattcttcataaccacataacattataatgccactgattcatacgggatttacattaattctatgggggaggacactagaattattagtgttcattttcatctaagatctttattctctaacgttcttgatcctattgaaacattgcagtatgcaaaactactgcaatgttaaacccaagagaaaagccattatcatgtgtatgctggctcgtgc

SEQ ID NO: 213395 - DNA, 553 bp, Homo sapiens
ataaatataaggtaggttcttattatcagtaggattcatcattaaaacatagctggcttgatagaataagttattctagaaaatgggggtatcattgacataagactcttcctctaaacttttatacctaatacattaactgcaatcatgtttccagccaaattaatcaaacagatatataaactatttaagacgtttgagtaggaaagccagagccactctttgtaggctcagtctgccaaaaaccattggaggcgtctctatttctaatattagatactacaattggacctccgcctcctgcctccagataactactcagtagggccgactttcagcttatgtgaagatagaggagaacaggatttgtgacattctgggattttgccagaatttagtaggtggtagaactaaggctgaaggccaagtgacaaatccactagatagctgcacaaaacataccctcatgcttttgttgattaaagtgttatattatttttctgagcatgggggtagggaggaaatagtctacttttttgaaagtgtctctcca

SEQ ID NO: 213396 - DNA, 164 bp, Homo sapiens
ctgccattgttagcaaaaccttctcttgagtggagctcaaagatttgtaatctcccacttcccagaaagataacttcagactcaacctagaagtaaagatcctccagatatggcctcaattaccctccaacccatgtccccagtacatccctttgatgtcccct

SEQ ID NO: 213397 - DNA, 620 bp, Homo sapiens
  misc_feature (568)..(568): n is a, c, g, or t
  misc_feature (572)..(572): n is a, c, g, or t
cgtgtctctagtatgaagagtgatgataaatgaggctgggaatgttatgtaagatgcagaccctgtaggtttgttggccaaattaagagcatttgtttctttttctcttgagaacaatggaaatcattggatgattttaaccaaaacaatcgtaagaaatttgatgatatatactaaagagaacacaagcctattcaggcatactgatcgcagtccagaagtagggatgatatctttgggtagtggaatgacagtgaataggaagaaagacaaaagagacttaagaaataaaatcaacaggactcattaatgaattagatgtgtaatatatggaaaacagaagtgacaaggatgactcctaggcttttggcttcagcaagtgctgaaacatactactgttactgagtttcagaatatgaagaccagatgtgaagagaagataagtttggtcttagctgttatgagtttgagacacctgtgtgatcgttggtgctgctgaacaaataggtggatatgcagaggacagatgcggatgaaaatttgagactggttaccccataaaggaatnggtnaacctttggccgcctttgggaattgccttggtccacttggattgcccc

SEQ ID NO: 213398 - DNA, 480 bp, Homo sapiens
agtcccagttctgaaatttgtcagaattgtgtttatagacagttttattacacatcttcttcctatctattaatattccaagattttatgtcatttcacgtataaggaaagcattaacatttactggtcacgtatcatgttccctcataagaatcttctatcaggcggggtaggtatcattattcaaactttacagacgatgaaacaggctcacagttgacaggtaatttttgcagaaatcacaaagtcaaattggcttctggagtctgctgctctatcatgatgcctccatgtcaccactattaactttgcctgaaggaaccatgacttgcagtttctaccccacgtggtcagtgaccatgaatacaaatgacccttactccaggtgattctgaagtttcagggagatgacagattccccctaaattttgaacagtaatattaattacaggtaataaaatataccaaaacatcactaca

SEQ ID NO: 213399 - DNA, 472 bp, Homo sapiens
tatgcatagcacatccccaaatgcttgaacagcaataagtacccaaaaaagtactgtttaggtagccaactcccactgtctaatttaatcccactgaaactggatgtgtctttttctccttttgttctaaagaaacttgttctactactatttgctggcaggaataattttctgccacctgtagtactctctgcttctgtgaaggctgaacttcaagttgctgtgaaagaatttgcattatccctctatagtcatacctaaaattaacccactgtcttaagttaaataagatatagaatgctcacaactgttatggttatcggagaactagagagtgaggctttctggcactacgagaggatgtagaagatgacacatgtggtttggcctttatttggaagcagcaaaaatcacagaggtggtggttacaagacaaaaaaggccaggggagtgaacacaaagttttggctga

SEQ ID NO: 213400 - DNA, 243 bp, Homo sapiens
ggagttcgagaccagcccgggcaacatggcaaaaccatgtctcaaaaaaaaaattaagtagttaaatatatataaaatatttatataatacattttaaacttaatcaccaacatcaatgctgaaataaatccggggaaggaggaagagaggagaagacaataggaagttagacaggaggggagaagagtgaggaggaggaaaggaagaaatgtatgtatgtatgagtaaaatacgtatacgtt

SEQ ID NO: 213401 - DNA, 909 bp, Homo sapiens
gtgatccaagctgatgtcttgttatcactgcagaaatatcgatgtgatagtctaccactgttcgctcagaaccttctagggttgcctttctaaaatctgaattattcagaattccgaaacacatcaggcccaagaggtttaggaagggatcatgccaccgtatatatgaagaaagcacttagcctagtacctggcacatagtaaatgctgtgtcaatgttaaccatttactgttgctactattactagttaaagtgcttacctcaccatccgtaatcatcatcatggaaaagcgagtgataatcacagtgagataccgtgacacacctgcttcagtggctacgataaaaagagggcacggaggagctgaggtcagagagttccacaggaggtctgctagggactggggccttttccttacatggatagggggagggttctgagcagaggaaggacatgatctgacccatagattaatagagtccctctggctgtgtgtggcagcaggagccagagccaggaaattggggcagaagctcctgctgtggtccatggtcctgcctgtgggggtgtgaaggaggggtgagcccatttatatcttgaaggtggagctgacagtgagtactgatggcctggatgtaggggtgagagaaagagagggggctaggatgaccctgaggtttgggcctggacaccagctgaggggtgaagatactgcattgagggaccccagggtcggggtttgcagggagtggcagaaggccttgtgaagaatcagagacgtggctgagtctgttcggtgctgggtgcccgtcagacagctgcgtgagatggcaaggagacagttggatacgcatacctgaagttgagagaggtccaggggggagaaggaaaagtaggggtccccagc

SEQ ID NO: 213402 - DNA, 462 bp, Homo sapiens
tgtgcttgatgaatggatgtaagggacgaagaaaaccaatgaatcacagataactcctagtttttcagcttgatcaacttggtagtactatttagtgatgtggggaagacttagatgaattagatgagctatacagtgaatgatgggaaatcagatagaagctatttttttaagttttgttttcataaaaagtaatatcacatctcagacattggaaaggtagagactagatgaaattacttatgatcctgacttcctgacacaataattttaagtgttttggtgtgtatctttatagtcttgcataggggttggcaactttctgtaaaggcagcttcttaactctgttgtagcatgaaagcagccataaacaatatgtaaacaaatgagcctgcttgtgttccagtgaagctttatttatggacactgaaatttgaacttaaggtaactttcacatattgc

SEQ ID NO: 213403 - DNA, 439 bp, Homo sapiens
gacctagtgcattgcctggtatggaggaagtaaccggtaagtatatattggttgaatgaatgatttgatttcctagtttttggaattggcccatgattctaagtgaatgagctcacctcagatgccttaatagtaaatgaaattttgcagcagaaatattttctaaaatacattgatttttatggaactagtgtcttgttttcaaaacagccctctgttttgctacaacaaaacatttcaagagtttcaaatttaaattggctactcaaagccaatttcttcatttttttcctatctcagtggtctagaggggcatcttggtgttttaagtggaacacaggcttagaagtcagacttgggtttttttgttttgttttgttttgatggggtcttgctgtgttgcccaggatggagtgcagcggcaccatctccgctcact

SEQ ID NO: 213404 - DNA, 448 bp, Homo sapiens
agccattggtttgcaaaagaagaaaagctttgctgctgccgcctgcacgcacccgcacgctcactccccttgatgctggagtgatgctggagagctcaccgctgctgcttgcttttctagttctcttccttcattttccctttgcagatttcactgattttgaatctctcacaatggagcccttggtttccagagatctgagaaacagaaagtgatcacattttcctagaggggagctcaacattctgctggggaagtaggagatgtcgagtctgaggtcattttcagacaccaacttgttttgttctatgaatttaaggagattttagaattggggaacaaataaaatcattctgtcagagcaaaggagaaacatctttgtatattgccttaagctttccatgcaccgttaagtgattaaaatgcaactgaaaactctgatagcaaa

SEQ ID NO: 213405 - DNA, 999 bp, Homo sapiens
tcctgggcctgtggctgtggccaggcagaccatgttggccccctctccctccctcagtttcaggcctccgggtggctcatctactttgcgcatcgtgcagacctctaatagcaccatcgtgcagagtgtccctttgttccctgcccactctgcacactaacctctgtcacccatattgctgccagccttcttttcttccacctggtctttccccctatccccaaactctagccccatttctgctccactcctccctgcccatcccagtcagagcccttactttgtgttgtcatgagcctccaagtcctcctcccaggatcctgacagtagtccatctgcttccaattcccctcttgcctccgctttgtatgttctgtcaaaaatacacatgcatggagttcctcaatgcttattcaaataaaccagcagctctctgagtccttttaatgtgcttatattaaaagccaattaaagatacttgggatgaaaaacaaggttgttggaatccaaagttaatgttgatggtttgaatcacagaatagataggactgaggaataaaaactagatatttgggcaagagagagatggacagtgtgacagagcagtcatccatggagctctcatgggatccattgtcctgaggatccacagatgatctaacgtggagctccccagggatccatcatcctggggatcagatgtcatgtaacatggaattctcccaggatccattgtcctgaggatccacaggtcatgtaatgtggagttcttctgggatccattgtcctgaggatccacaggccatgtaatgtggctctcttacaggatccattgtcctaaggatccacaggtcatctaacatggagctctcccaggatccatcatcctgaggattctcaggccatctaacatagagctctcccaggatccatcatcctgaggatccacaggtcatcagaaatggagctctcctgcaatccatcatcctgaagatccgc

SEQ ID NO: 213406 - DNA, 235 bp, Homo sapiens
atggctacttgacacttccactcttcctcctctgaattaggtggccctcctgtgtgctccatagcaatctgtcttgacactttgcataactatctgtaactgtcaatctttctgatctgtatcctccaatagatcctaagctctgccagggctaattccgtttctgctacatccctagcatccagaacaactgacacactacatattcagtgcaatctagcatggaaaatttcta

SEQ ID NO: 213407 - DNA, 326 bp, Homo sapiens
tgaatatgtttcatgctaatgtctcgcagaccgaggctgcgtccgtaaccacataatcatcacagtggaaattctgactcagctgtgacgtttggtaggcgggacctttgaatggtgctttagacaattccgtgcaaaggctgtagtcagtggcccagctttgcaagtctttccaaaagtcctaaagcgcactagcatgtcctcacttggccctgtcacctctgcttaaattttttcatggagaatactcactcccaatcatggtacattaaggtgaatttgatcttgggcagcctccctcagtggagtgaatcagaatcatggga

SEQ ID NO: 213408 - DNA, 1021 bp, Homo sapiens
aattggagaatgtcgaaaataagaacaaactttatagctcattgaggccagaatggcattccctgcctgtagacgacaaggcagttgatttctgccatcttttgaggagcctaggcaaggcctcagaatgttccttagctattgatccacacagcagctaacccagaggagttggtctgtgaggcgcagctgtgaccaggtgccagctaggcaaactgccttacatgtgaggaaacccagctgcagaagtgaagcctcccgctgggtcgctcagcccgtcctgtgacagctgataaaagagactgcatgttctgatccccaacacaattctgtttccactgccccagattccccagttcactggtgatcagaaagggccacaaagctgcaaaggcaccccagctggccagcggcagaagtgcatctagtccagcccctaccctgataccacctgtggagctctgtccacctgcagagctgtatccctcctcaaggctctgtggattgttcttcttctgttgtttctcttgtcttttctctctggtaagaatgttagtattggttttgactcagttagcagttgatcaaagattactccagccactagtattagaagcacctgggctgcttgtttggctactttctagtcctacccaagacccactgaatcagaatggctgggcctggggtcccagatgatcccgaaaccccactgctacactgcccaccccctcctcaccctttctcataatgttctcgacactagaaatttcccatgtgccgtgcttgctgttggcatttggtgtgaatgaaggggttgtgaacccactggttatgaagaactggctcttacagagagtgaggctagtgtccagcagggccatttatgaccgaatataatgaaaatttctatggccatttttctttcaggctcctttagagagcaaactgctacttttgtagaattcagggcatttatttttcgtttgaaccactgtgcagaaagaagaggatgatgttg

SEQ ID NO: 213409 - DNA, 435 bp, Homo sapiens
agaattaaaagtaatgaggggtagtggagtattactttcaaaggagcaattatgagattgccagaaacagatggtttcattttccacagaaactaaaaaggtagaagacaaaggaaaaatagctctgatgtgctagaaaaaaataaactgtcaaactaaaaatatcatccacaaactctgaaaaggatacacttcacaatttgttacgtaaggctagcatgtaatcttgatactacaacatgacaaggttgtggaaagaacaaaaaataacagccaaatcgctcatgaatatagaggaaacatcctaaataacatattatcaaattatatctataacacaaagggagaattaatatattttgacctaattagtatttttccaggaatataagattggtttaacagtgaaaaatcaatcagtgtaattcactatat

SEQ ID NO: 213410 - DNA, 272 bp, Homo sapiens
ttgcataaccagggtaaattctgacttctaaggtttcttccttaagtagtgtatagcttgctcaactcaacatttaaaactgaattttagtagagccagtaactgttttcatacaagggggtccatcatttccaactccctgtgtcttcctcagcggatgttttcaagttctaaggaacaaagctaataagtaatgtggatgaggctttttcttgacggttttgttttgctgtaactccctcttcttctatactcccttctgtcgtcttctc

SEQ ID NO: 213411 - DNA, 645 bp, Homo sapiens
cactgcactccagcctgagcaacagagcgagactttgtctcagaaaaaaaaaatcagcttataataagtgccataaagaaaataaaactgggagacatgaaagagactgactagggtggtagtctaacagatggggcagtcaggaagtcttccctgaggaggtgacatctgagctgagatctgaatgaaggataggatccagccacagattgatctgggggagaggcattctaggcagaagacgtggctagtgcaaaggtcctgaggtaggaatgcacttggcatgttcaaagaacacagagtcggtgtggctggagcagagcaagtgaggaagaggactgggagatgaatcaggaaggtgccggggcttgtaggctcagatgaggaatttgaggactcttggtgctgagggaagaacgtgaaggagatgattgatcagggctgacttctccggagaaccactgggctggtatggaggcagcatgagattctgagtggtcaactcagaggcgagaatcagcaaccccagcatcaacttcagttcgttgagagaagaaaaaaaaagaatttagggttaaagtctgtattcattccctgtggctgctgtaacaaatcaacacaaactggtcgggcgcggtggctcaa

SEQ ID NO: 213412 - DNA, 473 bp, Homo sapiens
gaggatccccggtgtttatcgatgccactcccacagattgatctgggggagaggcattctaggcagaagacgtggctagtgcaaaggtcctgaggtaggaatgcacttggcatgttcaaagaacacagagtcggtgtggctggagcagagcaagtgaggaagaggactgggagatgaatcaggaaggtgccggggcttgtaggctcagatgaggaatttgaggactcttggtgctgagggaagaacgtgaaggagatgattgatcagggctgacttctccggagaaccactgggctggtatggaggcagcatgagattctgagtggtcaactcagaggcgagaatcagcaaccccagcatcaacttcagttcgttgagagaagaaaaaaaaagaatttagggttaaagtctgtattcattccctgtggctgctgtaacaaatcaacacaaactggtcgggcgcggtggctcaa

SEQ ID NO: 213413 - DNA, 319 bp, Homo sapiens
aagtggtagcacctgtattcaagtcaagtccatttatctctaaaacaagagctcttaccactattgctgaagctacacatttcctaaggctcaggccatgatttcttctctgctttatgtcacttctcattctgccctaacatctggagggctgggtgttcaggtagaagcctggatacgctgccactgtgaattagtaccaagtgcaggcagcacagagcaatgggtaaggcacatgactcgctgtgggtctcgggctttgtttatctgtctttctcagagacttgctgcatagaccaatgcattgcatgtgtgcagt

SEQ ID NO: 213414 - DNA, 320 bp, Homo sapiens
tgatgtccataaagtgtacaacccaaaagagagaattacaaatctaaggcaagaaaaatgttctgaaataatcgaactgaattggcagaccaaagtccctactagactcttccacctgatatgacaacaaaatctatataagatatatgaataatccagtatgataccctttagcaaagtgaatgacaatggtatgccacatacaaaatcagttggggaattttgcaacttaactgcattccttgagaaggctggagcacttgggctgggtgtggtggctcaagcttgtaatcccagcactttgggaggtcaaggcggat

SEQ ID NO: 213415 - DNA, 443 bp, Homo sapiens
gtaattccagctacttgggaggctgaggcaggagaactgcttgaacccgggaggcagaggctgcagtgagtcgagatcgcaccactgcactccagcctgggtgacagagtgagaccctgtctcaaaaaacaaacaaacaaacaaaaataataaaaacctgtaccccgaccaccttgggtgcatgtcctcaggaccgcctgaggctgtatgttaacgctgtatccttaactttggcaaaataaactttctaagttgattgagctctgtcttagatacttttgggttcacataggaaagaaccttgcaggggagaggctgccttcatccttcatgggcccggcaaggcctgcatgagcaggcagtgctcatcacaccatggggaacagctgaggttgttcccgtgacgcagaaacaagcaagcaggctcacaaccaagggagggg

SEQ ID NO: 213416 - DNA, 681 bp, Homo sapiens
  misc_feature (654)..(655): n is a, c, g, or t
ggcatagtcaaggtcacccacaaggcctagtcactcacgtgcccaagcctgacatcaaaggtgcagaaattgtagactctcccataggaggtactccaagagaaggagaatagggtctggaggcagggaacctaaggctgatttaccctgacttcctagaactaaatcaaaaggaaaagcctgactttccacacccaagtaacaaaaggatgagaggctactgcctttgcaacccccttccccgcttttccacatggtagatgaaaaattgaaagtacctctgattggtcccccctcacaaccaatcagactgatcttgggccaagtcttcgtttgcataggagtataactctataacttcatttcagcctctgattggtcactttccacaaccaatcagacgtttgcataggttgcaactttgtaacttaacttcagcctctgattgattgttttccttaaccaattgggctgatcgtgggccactacttcatttacacaggatgtacaccaaataaccaatgaaaaacctctagagggtatttaaatcccagaaaattctgtaaccagagctcttgagctgcttgctcgagcctgctcccactctgtggagtgtactttcatttcaataaatctgtgcccctaaaccttagnnatgggtaccagctcgatcggtatcat

SEQ ID NO: 213417 - DNA, 450 bp, Homo sapiens
ccaagaattcgacatcatcctgggaaacatggggaaactccatccttattattaaaaaaataaaattttaaaaataacatgaaagaataagcttccttacacattaactctggctgggcatggtggcttactgctataatcctagcactctgggaagccgaggtgggaggattgcttgaggacaggagttcaagaccagcctggccaacaattgcgagatctcatctcttaaaaaaaaaaaaaaaataggtcaacaaattacttaaattgcttctaacatctgatatagcaaagtagcaagtaactatgatgtcatctctacagatgccaaataggactaaaagttttcatttacaagacagtgaatatctgctataatagcaggtgggaatgaaaaaatactggaggtagtgaggtggttttctttactgctttaggaaccttaattaa

SEQ ID NO: 213418 - DNA, 1231 bp, Homo sapiens
gataagttggggctaattattcacttacttttgtaaaacatttctaaggagttctgaggaccaagttttctttctatattttaagtgagatttgacttatgcccaattcttctggaacgcatcccctgaaatggatatttttattcattttaatagtactttatttatcttattttgttgacattgagtactatttgccaagcactatggtaagcgcttcatttctgggtctcatttatcctcctgcagccctataaggtagatgctattatgggtatcttcaagttgccaacgaggacgctgaagcttaggtaggttaaataatttacaaaaactataatggcagcactaagagtccaatatagatctgccaatcccaagaacttgaacagctcctgagaatgaagaatgaacagcccttgatcttgaagatctgttttccaggctccaaaatctaaactgggctctatctacatctgccttcctgggccaaacatttataagcatcagtgagagaagattgcctggatttgtttactttgtggtcctgaattttcagacaagcgcaaattcccatgaaagaagaacagacaatagctgtatcccagtagatcatttccctgttaccacctgtgctgaatttgcatttcattcattcattcatttattcagtcagtcattcaacagatcctgttgaataccatgttcagagaaatgtgtggactaaaaggatgatgcagacccaagagttgtccttaaggagcttacagcagagtgggaattttaggtgcccagatggaaatttgtccatttgggagtagtgtggggtgggaaggaaagaattagttaagactaaaaaaaaaagttcttaaaacttcatcaccctttagccattgccctattgctcttctctcagccaacctttgtaaaagctttctgcattcactatttctcattctcacctccggtttactcgccatttcactgcttctgccccctccactactccagtagaattgctcttgccaaagttactagggacttgccagttgctaaattcatggaatacactctggtctaatcttatttggcctttctgctgcatttggcagtgctgattttgtactcttgtaaagttcttcctcccttggccttgcttactctcctgattctactcacactttttggaagttccttcatgggctgcacattgactatcccctaggtttct

SEQ ID NO: 213419 - DNA, 290 bp, Homo sapiens
aaattccagataagaattttgtaaataaaagaaagtgacaagcataaaagattgataaaatttaatgtgaaaattaaaaatggttcatcaaaaaacagcctaaaaacagtgaaaaaaatcataaaatagaaaaaatatttgtacactaatacacgatagtggattagtatcaaaaatgcattaagaactcttataaatcaataaggaaaagaaaaacaactcaattaaaacaacccagtagaaaaccagatcaggaccgggtgcagtggctcatgcctgtaattccagca

SEQ ID NO: 213420 - DNA, 450 bp, Homo sapiens
acaaggagacccttaaggtctttttacttctcccatagggcaccagagcacgagggaggggaacatgcagagagaggggcattgccagagatgactgtgcagcaggacaccaaaggtgcatgagcagaaagatttggtgccaaacctccgcaggcatgaagataatgtcatctcactcagtgaagctgtaaagagaataatttatcaagcagagaatggtttcgatacttttaaatctgacgtacacaggagcacataccagtgagactattctagtctgtaaaacagtgaaatgatttcatcctggttagtaaatagccctagcaacaagaagcttggaaattccaccctggctgcccacccctgtcccagatcacaaggtcccctacaggccaacatcaggaggttgaagacctagcccagccagagtctatcaggagcctgcccaac

SEQ ID NO: 213421 - DNA, 402 bp, Homo sapiens
agaggacaaggcaaaacctctctggagaaaaatgagataatccagagattctaaaacttttaatatataaagataaggattcattttaaaactaccagacttaacaaacaagaccaattgaaaaaaaaagaatcgaaacaaactcacaaatggtttggttattggtattatcaggtacagatgctaaaataattatggttaatatgtcaagaagacaagacagaaagttgtaacaaagaacagaatctatttttttaaaaatcaaaatggaagttctagaatttaaaaacatttaacaagtgaaattaagaactcaataacagcaatctagacacaacagaagataaatctggtgtaactcatgacagaatcagtagaaaataccttgcctgggctgggtgc

SEQ ID NO: 213422 - DNA, 391 bp, Homo sapiens
taaagttgttttagaaattcagatgtgaaaatacaaacattctctgcttttttctcccttgtagctttgattcctcaatattcaatttgtcagccaatcacattaactctatgtccaattgatttcccatatgcctgctttattttctgtggttaccacttcgggacatccttctcacttcaatccccattcttctgtggtaggcaaaaatttgtaaatcccccaaccaagggtgtcctgtcctgatccccaaaacctgtatttatgacaagatatcactcccatgatcatgttatagtatatggcacaactgactttcagattatccaaatcagccgaatgtaatcacatcactctataaaagcaaagaacgtttttttcccactggtgg

SEQ ID NO: 213423 - DNA, 667 bp, Homo sapiens
gagtaaacctgtaaggtcaggttgggctttactctgatgggtgggattctcactttcctagcctcatgtttccttgcagagagatctcagctactgtgattctcttgcctctcctgccatcccttatccccctttgctcggggaaggagtgacttgcttgactggtggattttggggaaggcagtaagcaggtggggctcaggccctgtagattccctccaggttctctctttgggagccgccctccccacaggggacatgccttcctcctgccagagttgtagggccacctcccctgcgtttgtcccactatggcagtggtcaggagcctacttggctacaaacccaaaaccagactctttagtcagaaggccagtattttcatctccatccacctgactcctgttttgatttccaaatggattctagactgggagcagaggaagaaatattgagactcgtatgagcatgaacacagcacccaaggcaaaaagaagattctagggtgtgtagtgcatttcctgaccccagccccagtcccttaaggtagtattgaggcaagaaagagccattgcaaccctaaacattctgacaccttcccatctagaaagaaacagacccagagtcgggaatagaagccggggaaaagttcggggagaacactcaa

SEQ ID NO: 213424 - DNA, 816 bp, Homo sapiens
  misc_feature (32)..(32): n is a, c, g, or t
  misc_feature (34)..(34): n is a, c, g, or t
ctcgggtgttgtctgcgtcatctcgccctggnanatctctcgcccgcgtcagaactcgtgccggcctcggcgtcaccggggtgcttgcgcggcttcctttaccggtgggtcaccagttttgggccctggccctttctatggggttcagggttttgtgacccgtgccttggtccccggccccgtcacctgtgtcctagaaggtggcccattcccggcatctgtttacttgttactatgcttccttcttgggaggcattccaattacaatgactcagttacctcctccacctagggggactgtgaaaaacaaacttttaagctgaaatattcaaactatttgacatcagtctgaaaagatgcattgttcatccattcaatagacattgattgcctaccctgcaaggtgctgccatgggttgcaggacccatgatgctgaccggcagataggattcctactagcgaagcttgcagtgtaataagggccagagttgtggggcacagtgcaggatacagggcagatgatagagcgaggctgtctgaagcaagaatggaaccttgggcattttagagcagtgaatcagtccttcaggaccatgtgctcagtttttgcttgaaatgtaaccacaaaacacacttcccaaaacagggagttttgtttcctagtatattcagttctgcagtagggcagataatttggcagggattccaatccactacattcgatactgctttgacccagactagttaactctagaggttggggctccatatgtgaagcaaagttgctgagctattaaaaaataagacatatgagg

SEQ ID NO: 213425 - DNA, 210 bp, Homo sapiens
ccttcacatctttagaaattatgaaaacgtatgtgattggagggtttggaaaaccagttatcttatttaacattttaaaaattacctaacagttatttacaaacaggtctgtgcatcccaggtctgtcttcttttcaaggtctgggccttgtgctcgggttatgtttgtgggaaatgcttaataaatactgataatatgggaagagatga

SEQ ID NO: 213426 - DNA, 422 bp, Homo sapiens
tggccccacacaagcttgtggcaggggaagctggaattctctagagatactttctccagcccttcaaagggctttcttgagtcattttctatttagtttgttctaaagacactgcccaggcctcttcattttcagtgagaccaaaagaggcagtatcagttcccctgcttctcctgcgcaggcccagggaagacccccttcctgcctgagcgtggaggagggagcgttgaccacggggccagcctcctgccagttaggcctggactggagctgctggggcccaggggctgcttcactccctgccttcccgctcctggcctggcttccatctgtccatttgtgtttcacatcattttgccaaatgtaaatctgtctgtctggtttgtttattttctaaactcatgtatgttctctagacttgg

SEQ ID NO: 213427 - DNA, 153 bp, Homo sapiens
caataaggagcaatacattttttaagataatgtgtttctaataatttttgtttgaaagcatgaatttatcattttcaatatgtgctatcagagctttccttgaagtaacaggctttggtcttgagaaaatgtctgccaaatacccaagtccag

SEQ ID NO: 213428 - DNA, 463 bp, Homo sapiens
attctgcatgctcctaaatatcgcttaaaaataataacatgctttattaaaaacaaccagttgaaataaacccgtttctatgtctttcccaaggatagtgtgtacttaacgttggttttaaaaatgaacttactattgtaatattacacttacagataaacgtattatttaacaccttattaaagtgtacacaccaatgtaactattacctctaaatcgaaaaatagaattcttactaacaaatcagaacccctttcatcctcccccatcattattttttcttctctctccaaagacacccattatcttgacttctacatcttttcttttgaattgaattgaatataacatttagaaaatgtttgccggccgggcgcggtggcttatgcctgtaatcccaccactttgggaagccgaggcaggtggatcacgaggtcaggagatcgagaccatcctgtctaac

SEQ ID NO: 213429 - DNA, 130 bp, Homo sapiens
gtgagtgcccaaacccaggagaatccaagctgtcctcgctgcctcttgctgcgccgtcccctccagggctggccagagggtgacaaccctgccaggccgggagcctgaggccctcaagccactcagcatt

SEQ ID NO: 213430 - DNA, 119 bp, Homo sapiens
ttaacaggagcagcatgtggggtgagggcttggcactcacaccctctggcctgatgcttcatgcaaaccacctgccaatgaggggacagggcgttaccccataccaggagctgccgcct

SEQ ID NO: 213431 - DNA, 424 bp, Homo sapiens
atgattacatgtgaaatgataatagcttatataatattaggttaaagaaagcattagaattaatttcatctgtctcttttcacctcttaatgtggttactaaaaaattttaaattacatatgtgagtgttgtataaagaagagaaggttagcattccccttgacaaggatggaagaggcctgtacaacactcatataacttcggcattgccaccttctttgtagcatctaaccatggttttgaggatggaaaatgattgtgtaattggtacgaggtttcctttgtgatgattaaaatgttctggaactagatagtggtgtcagttacacaatattgtgaatgcactacatgccactaatagtaaatgttatgtatcttttactgcaataaaaaattatgtgtgtctcacattatatttctattg

SEQ ID NO: 213432 - DNA, 497 bp, Homo sapiens
catttatagtgtgtcgataacacatccgtgtccctcctcaaagttcttcaaaggcttcctgtcacacgtagactaaaattcaaactccatatcgtgagctgcaggctctagaggatccaagttctgtctgcttttatttacctcattggtgttgtctttatcacctctcttttggctctctgtgctccagccatgctgtttgccttgctcaacaagctaagtatattcccgcctattttcgattccttctgcctggaaagctttaatccagatctcctgtcagcttggctctgttcttcaccctgttcaggtctctactactgttaaaagaggtgttattgactgtcaactgtacaaggacaacttcactctctgtcctcttactgtgttttttttctttataacacttgtcacagtgacatttcttatgcacatatatatgcatacacacacttttttttggctttttaattctcttcttacctctggaatgtgaa

SEQ ID NO: 213433 - DNA, 386 bp, Homo sapiens
ctctctcaccccaggttggagtacagtggcgtgatcatggctcactgcagccttggcctcctgggctcaagcaatcctcccacctcagcctcttgagttgctgggactacaagcatgtgccactacacttgggtaatttttttatttattgtagagatgcggtctcactgttttctatgtcacgcaggctggtctcgaactcttgggctaaagcaatcctctcgcctcggcctcccaaagtgctggtattacaggtgcgagctacggcacacagcttcctcaggaaccatctgaaactattgctcaaaaaaagtaatatctgaatttcattgccaccagctacacggctatgtagaaatgcacaataagctgctgttttaactcta

SEQ ID NO: 213434 - DNA, 269 bp, Homo sapiens
cccaagactgaaccaggaagaaatacaaattctatacagatcaataatgagtagtgagattgaattagtaataaaaaaatcttccaacaaaaaagaagcccagaaccagatagattcacaaccaaattctattaagcaaataaagaagaaatggtaccaatcctgctgaaattttccccaaaaattacataagaagggaattttccctaactcattctttttttttttttttttttttttttttactaataacaggatggtttattata

SEQ ID NO: 213435 - DNA, 550 bp, Homo sapiens
gccagatgccacagtaaaaagtattttaggcatagagaagggctaacataaagacagattcatttatcctattaagttttggttcctatcttttctctgtcttcttttgaccccaaagtaagcttgcatgcaaaaatgtcaatgaataaaatggatgcctacactaaaaatgctatctagtttgtttccttggcattatttggaaaaattgcagtccttagtttttctttgacattatcttagattttctgtgaaaagggggagagcctgattctgattcctccacgcaccacccagaagcactcagtaattttgtagaaatgtaattgatttatttttgtttacttgataaactcaacactttagctgggaggatgtcagacttaaatgcaattttacagtctcttcgaaggatgcagttggtcaaacatcatgtagctaaagtatccgtctggctcctgaatgtcttcagaacatggaagtgtgtgccctggttacatgtttctccaaatgagcattaggaatgtttccttttctctacatccttttt

SEQ ID NO: 213436 - DNA, 347 bp, Homo sapiens
atatctcttattacaagtgacctgagcatctccctggattaagagccagttgtgtctgggtgcagtggctcacgactataatcccagcactttgggaggccgaggcagatggatcacctgaggtcaggagttcaagaccagcctggccaacatatagtaaaaccctgtctctactaaaaatacaaaaattagctgggcatgatggtgcatgcctgtagtcccagctacttgagaagctgaggcaggagaatcacttgaacccgggaggtggaggttgcagtgagccgagatcatgccactgcactccagcctgggtgacagagcaagactgtctctccaaaaaaaaa

SEQ ID NO: 213437 - DNA, 512 bp, Homo sapiens
cagggcatgcagtagctgaaccatactcattaaacacaagaggtgagcccaaacatgcaagcccatttaaagcctttgctggcattacatctgctcacactccatgggccaaaacctgtcacagatataatttgtatttacagtatgtgtggatatttcaagtggcgtgaactcacagaagaatattgtatcttggacaatgttaccataaccttttcaaacgtatttgcaaacttgacaaacttggtgtaagctttttcacttttgaaaacgttttgaacttgtggaagaatttctatggggaaagagagaaatatactttggaattcaactattgctatcacagtgttgggaaattcactgacaccagtttgtaacttgaatctacaggaagaaatgaagagagccaaaaatgacaacaaatggattaacccaacgaactccataaatatttattttttcccctttcttttctcagcttctttaaaagatgtaagatgatataaagtaat

SEQ ID NO: 213438 - DNA, 310 bp, Homo sapiens
ggaggcgcggcatgcccctggcaggggagagcgggctgggctccgcggggccatggggacccgcgcgctgacaatgcctgggtgaccggagccgcgccagccaccctgtcacctccaccatcgccccctgcacccagcctcgccgccggccaccagcaccagcctcctccgtctctctctctctctctctctccattattgtttcccactctacagaggatggggtcggctgatgattaggaagcaagtcagaccttccttcaaagcctggtaatatttatgtaggcaaaagagacagagagagataaaa

SEQ ID NO: 213439 - DNA, 357 bp, Homo sapiens
tccgcccgcctcggcctcccaaagtgccgggattacaggcgtgagccaccgcgcccggccaatttttaaggtcttttatttagttcattgaaaccattatgagacaagatatagcttgaagggggactgcatttctcaccagatgaaggaatttgtggcctgtgtagtgactacgggagacaaaaggttattttgaggagatttgatttattatataagattaatgggctgggctaggtggctcatgcctgtattcccagcactttgggaggctgaggctggtggatcacttgagctcaggagttcaagaccagtctgggcaacatggtgaaactccccccctctaccaaaaataca

SEQ ID NO: 213440 - DNA, 430 bp, Homo sapiens
gaggcagaggcagaattgcttgagaccacgtgtttgataacagcttagacgacatattgagacctcatctctacaaaacaaatgaacaacagaaacataatggtatagtggcaagttgatacatgtgaactttgttgtaaactgcattgtattttagaagagtaaaataatgcttactgattactttggaataatatagtaaaaatactctgccaatgctgactggatagatatttgatgatatgaaataacttttttttaaatctggtaatgtacttactgggttttaagaaaaggagtcctgtggctgggcatggtggctcgacgcctgtaatcccagcaccttggggtgccgaagtgggcagattgcttgagctcaggagtttgagaccagcctaggcaacatggtaaaactccatctctacaaaaa

SEQ ID NO: 213441 - DNA, 448 bp, Homo sapiens
ggatttgacggggccagctttatcggaggtgtcgtgctggtgttgagcctacaggcggtggctttctttgtgctgcacttcctcaaggccaaggacagcacctaccagacgctaatctgacccctttgggcctggactccatcctgaggggaaaggaggatgcagagggtggcctctgggcacccttgtgggtaagcggggggcgggggcgggaaaaactctggccgccagtttttggctcctgcgggcaccaagcaggctcagtgtctgatgcctgacatctcctcctgtcctgggcctggaacctgcagctgagaaaatccctcaaccacctcgtctcctccatcgcccctgctgggccccccagcctgacagtgggttgtatgcctgcctctttccaccaactggcctgggcactgcccccaaataaaggaactctgcactgcac

SEQ ID NO: 213442 - DNA, 989 bp, Homo sapiens
ggatttgacggggccagctttatcggaggtgtcgtgctggtgttgagcctacaggcggtggctttctttgtgctgcacttcctcaaggccaaggacagcacctaccagacgctgtgagtacctggccagcagcaagtacctgagtcccagctcacctcctggttcctgccccaccgttccccttcagtacccagggtgctgtcttctccatgggcaagccctcaggacggtgacagcgtgctccatgtgagccacaccccttttgtctcctccagttggggtgtttcctttgtcagatgttggctgggaccaggactcagcctgggccagtctaggagcccagctgagccctcctgtgtcttttcccttcatgctgccagcagggaagagaaccagtaggtgccagcccaggcaagcctgtggcccgcgtttctgtggctgtgggcaggagctgggccttgtgtctagttgggttttgctctgagaaggggagctgtgcctgaggccctctgtgtgccgtgtgtgctgtggggcgggtcgccacagcctgtgttaaagtgtttgctcttcctctgctgcctcctctcgaggcagggggtccttggctggctgaggcagtgtcaccttcctgagtgtcctctttggcctctgcagaatctgacccctttgggcctggactccatcctgaggggaaaggaggatgcagagggtggcctctgggcacccttgtgggtaagcggggggcgggggcgggaaaaactctggccgccagtttttggctcctgcgggcaccaagcaggctcagtgtctgatgcctgacatctcctcctgtcctgggcctggaacctgcagctgagaaaatccctcaaccacctcgtctcctccatcgcccctgctgggccccccagcctgacagtgggttgtatgcctgcctctttccaccaactggcctgggcactgcccccaaataaaggaactctgcactgcac

SEQ ID NO: 213443 - DNA, 907 bp, Homo sapiens
ccccggccacccccaccccgcgagcccatggaggctccgggaccccgcgccttgcggactgcgctctgtggcggctgttgctgcctcctcctatgtgcccagctggctgtggctggtaaaggagctcgaggctttgggaggggagccctgatccgcctgaatatctggccggcggtccaaggggcctgcaaacagctggaggtctgtgagcactgcgtggagggagacggagcgcgcaatctctccagctgcgtgtgggagcagtgccggccagaggagccaggacactgtgtggcccaatctgaggtggtcaaggaaggttgctccatctacaaccgctcagaggcatgtccaggtaagggggttcttgcacctaagccaagttgcatgggtctccccagccatagcctgccccccaggaggaaacagcctctctcaggcggtggattttgctcacccatacctgggcccggtatcagttctgcctttagctcactgagaagtcccctcctctctctgcctatttcctcatctgaaaattagtacaggtgtgtggaggggatgggagtgttagctcttcttctagtttaaggcatagcaaggactttggaagttcagagggaatgagagggagtgcttcctggaggaggtggcatcagtaatgagcctggaaggtagagatggagagagagcacatctggtggagggaactgtgtggggcttgcaagtatgttggatgtctagagtagggacagggctgcatctgaatcggaagtttagcggtgagtgggggctggggtcttgatgggagtcagggggtgggaaggctgctttgctatggatcacctgtctcctcagctgctcaccaccaccccacctatgaaccgaagacagtcacaacaggtga

SEQ ID NO: 213444 - DNA, 288 bp, Homo sapiens
atatacagagctagtttttcagcatccttgacagcacttggtgctgccactattatattgctttaataggtgtatagttgcagaattagtttgcttttctctaacggataataatgacaagtatattctcaggtactcatctactattcatatagcctctttggtaaaacgtttctcatgtcttttgcccattttctaatcgaatattttttgctgttgaggtttgagacatactccagatatgagtccttcgtcagatatgtagcttgtaaatattttctccatgtg

SEQ ID NO: 213445 - DNA, 448 bp, Homo sapiens
agtcttgaatattggcgagaaaagatgaagaagagaggatccattgtgtcgatcttcaagccctgttcttctaaaatgattgaagctgagatctccacctagtggatatataggattttgcagatctttatgggaacagccaactatccctggaaatccttaatttttttctcttagagaaataacaagttttaaagacttctacttaaatctaggatgattgtcaacaggacaattgcaaatgtatgaaacataccaatatgcatatcagttacactacagttaacaaagctgaatttttattttcatactataattaggaaaacagatcaaacacaaatatgaatatataattatccatgtagaaagcaatattgtaataccactaattgagatatgtataataatttacatgaaataaacatcaaatgtaaatctgctcaaatac

SEQ ID NO: 213446 - DNA, 196 bp, Homo sapiens
gagacagggtcttgctttgtcacccaggctggagtgcagtgggtggtgccatcatagctcactgcagcctcagcctcctggactcaagcaatcctcacacctgggcctcctgagtagctgaactatataggcgttagccactgctcccagcccagtctctcctttctttgctctaacaagtttaattgaatgtttt

SEQ ID NO: 213447 - DNA, 549 bp, Homo sapiens
attagacactgtagaagaggtgagtgtgaacctgaagccataccaacagaaactatccaaagtgaaacacagagataaaaaaagacaaaaaatgaacagagctatcaattcagaagatgttctacaatttctacaaatgttcttaaagttgttctacagctcagcgatggctctgttcattctttttgaagtagaacaacttcaagcagctgattatatatgcaatcagggcatctagaggaggctgggctggagacagaaaaaaaagttaagatataatagccacggtggctcacgcctgtaatcccagcactttgggaggccaaggcgggcagatcacgaggtcaggagatcaagaccatccccgtctctactaaaaatacaaaaaattcgccgggcgaggtggcgggcgcctgtagtaccagctacgcgggaggctgaggcaggagaatggcgtgaaccccagggggcggtgcctgcagtgagccgagatcgcgccactgcactccagcctgggcgacagtgagactccgtttcaaaaaaaaaaaa

SEQ ID NO: 213448 - DNA, 412 bp, Homo sapiens
atatattatatatatcatattatatatggtatatatatactatatatattttatgatatatgtaatatatatatagtgtatatatatatatatatatggcatcccccttctaagatattaactcctcaatgacaggggctctccaccatgatttccagctttatattttctcacaggaagtaataaattccatccaagcttggctacttcctggtccccatatgatgcttgtcctttcccactgatcgcagtgcttagcttgctatacaaacatttatttacttatcatttgttaatggtcatcaaagcccaaatgagtgactacagtacttatttgcccttctcacatttcatatggcatttatccagtctggagataagaatggtttttacatttttaaatgattctatt

SEQ ID NO: 213449 - DNA, 1965 bp, Homo sapiens
agacatcaggtttcatcatgttgaccagtctggtctggaacccctgggctcaagcaatcctccctccttgtcctcttaaagtgttgaaattatgggtgcgagtcactgcgcttggccctaaatattttcttcttctacctccacttccctgctacttctcaagcccctcaacaatatcatcattcactgatcttgtctaacatcttcccattttcattctcctctcaaaatccttgctcctcacagctgccagaataaacttttgttagtttatatcggatcatatcattcccttaatagttttccaaatttcttcacctggcccagaagctcctatgtcatccagtcccacctaagacatgaacatcctctcccctgagaggtttcttttgctttctgtcttctcgtcctgcttgctttcttccagacctctgaaaaagctgggcgggccctggaacattgctgtttcctcattttcaagtgcctttccttcttctctgcggtgccaactctctctcatgtctctatttgacatcgctgctagaacatcacttcctgcggtatctgcagtcaggcatcccttccataagaattaacaccacgttcttgaccttagcagtaattgaaattagacagtcactggttaaatcagtcacttcacatgaggtcagggaccaattcctcctttctaccatatcaccaggaaaaatcataaggcatcacagagaatagaaaaggtatatttgctaaataaatttaaacgttactaagaacccacccattaatatggaagcgattcctctgttaattcatggaatgtcacaaatgagctgaattcattcaccctcacggtgcctctaagttataaaccactaagtcatccatatactcccaaactttaccaagattcagtgtcttagggtacaacttaaaaataataacaaatgagaaatttgaaattttatgcctcaccagttttcaatttatcgtccctcatatcctaatacagctttatgatactgaatcaggatcctgtaagcattcctcctttgccagctagttgaaagttaagcttcatcaatagaggacactcgagtgatggtgaggtgcttgatgcaggaaggtgcatcccttccaagactcacactttagttattcagtaatgtttatcattaatattggagtttaagaatatgaatgttaaagaatatatttaagaatactaaagaatatactttgagaaggcaagaggaaaacttctaatagcacatttgttttaccttttattaaatattgcattctgcatagaaattaattcagaaaactcctacataaaccatttatatgagtcttttgtaatcactgaaagaaatagactgttgacagtcaccttttaaaagggtgtataccattcaactcttaggtataccatttattattttgtttcctgcaaactcaaagcatctaggagtgagattacaaaaataacaacaacaacaaaaaagcagtgttggctaatttgtcagcatatggaagttaaatttcttacagacacacaacttctgtgtaaatgtaaatcacttggccattctagctctattatcaaatttatagtttcccagagacaaacattgctttggcttttgtctggttttggatagttggttgtcttttctcttcatgcttccttatctcctttatttcatttatttttaattaaaaaacaaagagacaggaattacctatatttcattgttgaaggttaaattttgtttgtatttgtaccttagttccacacttttttctttctggaaacgtatatgataaacatatgcttgaaaacaaaggattacatggatattctgaactcccaaaaagagaatctcatgactaagccaatttcacatttctaattagcatacttgctttcattgagtgttttgaaatttaactaaacataaaatt

SEQ ID NO: 213450 - DNA, 451 bp, Homo sapiens
ctttaaagaaaaaaaaattgcgtttttgaagtaccttgcatttgtttcagctgtcacttggatgatcacattcatgagatctctaggaactccatcctgtatgtgtgtgacacatatagttgaggtatgctgccaggatttagtgaaggcctaactaaatgtggtttcctcaaattgacaggaagatttattgaaggattatgtttactggctactgtaaaaatcacttgtagtctctaaagtgattaaggagacataatgaagatccagatcccaggtttgtttttgttagtaaaaactttagagtatctgctgggcatggtagctcaaacttgtagtcccaacactttgggaggccaagacaagaggattgctttagcccaggagtttgaggtcagcctgggtaacatagggagactccatctctaccaaaaaaaaaaaaaaaaacata

SEQ ID NO: 213451 - DNA, 392 bp, Homo sapiens
tagggtcctccctgtactgggtatcagcctggtctcagcattcagggactcagagagaataatcagaggtgcatttctatcactgtgaggaccttaggctcaggccaataatgcaaagaagcaccctacctgggagaaacttactgtctagttgtaaagaaagcaccagggggccatgatgcccatcccacccatgttcccacccaaactctcctaaacccacagctcccaaacaagtcctggattgtacagatcaggctccagccaaggtgagctcactgaggtcagagcttacagaatctgggagctcaaccaacatgatggcttcagagatgaaatacccagcacatccagctgcagttgccccataaggagcagaaagtttgctatca

SEQ ID NO: 213452 - DNA, 426 bp, Homo sapiens
ggcacaaaggaacagccttctgggggtgctttcaagctcactcatgtgattattaacaggtctcaggttctttctggctgttggccagaggccaattccttgacccttccatagggcagctaacaacatgggcagctggttgttagttcagagcaagggagagagggcatccaagatggaaaccaagctctttctgtaacttattcttagagtgggagcccatcacacttgctgcatccttttaaaaaaattattgtgctaaagtgtgcataatgtaaacttaacattttaactattttaagtgtacaattcagtggcattacatacattcacattgttgtgcaattatcactatcatgcatctccagaactttctcatctttacaaaatgaaactctatacccattaaataactccccatcgtct

SEQ ID NO: 213453 - DNA, 554 bp, Homo sapiens
tattactttttaaaaatatcctttaatagatatcctagatatctgttcccaaattctaggcaaaaccagtctaccagtttcatttttccttgcaataactttcctggagcaattcagtcttttgctatagtcctgcctagttgctttctagtctggctgcacaaatgttgactagcatttgtccttccccatggtctttgcctctcccatgttagactacctgtctcctgggttcccatgtcttttccttttgtgattcatttccttattttggtggaggatattcttctgtagctttccaataaagtgtgtatgacagataagagactttgcatttctgaaaatatgtatttgcccttgtctttgagtgatagtttgagtatctatggtgttctaaagcagacattttttcaaaacttgaatatgttattccattgtcttcttacagtggtgctatttagaaatcaggtaccattctgattttttccatcctttacatgtgaaatgttgattctctgagattgttctcattatcagcattgcactgaacttaa

SEQ ID NO: 213454 - DNA, 271 bp, Homo sapiens
ttcgttctaggagatagccttgattctgttatagtttccactttaatatttacaccagcttgggtttttctgttaaatgcacatacaaaaaattttgacctgatcgaccaccattccatctttcttttaatttagcattactgctttctagccattttcataggaagaaagtataaagcaaacagaaatgaatataaaaatttgttgctgaattacaagtagtgtcacgaagtctaatccacaataaacaggcttttcaaaatcattcaga

SEQ ID NO: 213455 - DNA, 375 bp, Homo sapiens
gactgcccccatttgccagatgagaagctgaggctcggagatattgaggaatctgtcgagcgtgagatgcggttttactatttcaccaggctggtctcgaactcctgggctcaggcgatcttcccgtgtgggcttcccaaagtgatgggattacaggggtcctttctgagctcacctagggaacccaagaaaggaggatggctggctcttcattcttctgatcttcattcttccttgtgtgttaggtcccctgtcttagacactggagataggacagtgagccaatcagatgcgggtcctgccctcatggaatttatggtctaagggagatagagattaactgatcataagaataaatgtaaaattatatggcca

SEQ ID NO: 213456 - DNA, 496 bp, Homo sapiens
atacacatatcattctgaagataaaccttaggtgtaagaaaattatgaagtgtttttgtgtaagtatgagtttctgcttattttcagaagaaaagaacaattattggaacaatattttaattaggtgactaataaaaatctaaacacctcgggaatgctgaaagcaaatctatactttctgctttgtcttgaatttattaacttaaaattttgttgcttatggtttagattctcccaggaatctccctattaaagcacaggcaactttgtctccagaaataacactctggagtacaacaataaaagccttctcaaaacagaaaacaaataaatatttttaacacttattttaatgaaaattcaaccaaaattgaataattggatatatttttaatgttctttgtgtgtgtgaatgtataaaatgatgcataaaggataaataaaagaaaaatgatgttaatatttgtaatgaataaaactggacatttgttaatta

SEQ ID NO: 213457 - DNA, 1195 bp, Homo sapiens
  misc_feature (2)..(2): n is a, c, g, or t
  misc_feature (4)..(6): n is a, c, g, or t
angnnngcgatggcggagtcgctgcccctggagatgctcacatatattctgagcttcctgcctctgtcagatcagaaagaggcctccctcgtgagttgggcttggtaccgtgctgcccagaatgcccttcgggagaggctgtggctaccctgtgcttccagcaaccaggccttacctccctggacctcagtggctgctcagaactgactgatggggcgctcttggccgtgagccggggcctgcggcacctgcggcgcctgagcctggggaagctgcagcggctgacagatgcaggatgtacagctctgggtggcctgcaggagctgcagagcctcgacatggccgagggcgggaactggcccaggccctgggctgtatgcacggggctccatcccagctggcctccctcagcctggcccactgctcttcattgaaggtgctccagtttctccagctgaggcagctgtcccttagcctgttgccagaactcacagacaacggcttggttgctgtggccaggggctgtcctagcctggagcacttggcgctgagtcactgcagccgactcagtgacaagggctgggcccaggcagccagctcctggccaaggctgcagcatctcaacctgtccagctgcagtcagctcatagagcagacactggatgctattgggcaggcgtgcaggcagctccgggtgttggatgtggccacgtgccctggcatcaacatggccgccgtcagacgcttccaagcccagctgccccaggtgtcctgtgtccagtcccgcttcgtgggaggggctgacctgaccctaacactctgaggccagaccctctaggactgggggtggggccaatccagggcagcccagagggaacatcctgccacaccgcctggcagtagcctctttccagctacacgtcgctgccacaggcccctggaaatgctacctacgtgttgccgccacaggctcctgctctctggccaagccctgggtgggaggccaggcccccagcgggcagggtctggtgctgggaggagcagagcctctgcctcttgcctgccctcctctcagacctaaggccgggctccacctactcctgtgggactctcccagcaccctgtgtgcactgagcttcagcagctgagcctaggtctgtgctgtaaatcctaagattaaacattccagatagta

SEQ ID NO: 213458 - DNA, 521 bp, Homo sapiens
  misc_feature (2)..(2): n is a, c, g, or t
  misc_feature (4)..(6): n is a, c, g, or t
angnnngcgatggcggagtcgctgcccctggagatgctcacatatattctgagcttcctgcctctgtcagatcagaaagaggcctccctcgtgagttgggcttggtaccgtgctgcccagaatgcccttcgggaggtaaggcacccaccctcccccgtcccatcctcaggtgtttcttacttcagcttactcgtggccctgctcatgtatctccatccatctatccatccatccatccatccattcatatgctcatacatacacatatatacatacattcatacatacttggctctgggtacagtgctggggctatacagataaataagacatagttccctaaggagctcacattccagtgaaggagaaagacgagtaatatgaatgatcatgctatcgtgtgctcagcgctgtgacactgggaagaaagagttcgacggggacagccgggcgcagtggctcacgcctgtaatcccagcactttgggaggccaaggcgggtagatcacctgaggtcaggag

SEQ ID NO: 213459 - DNA, 1407 bp, Homo sapiens
  misc_feature (2)..(2): n is a, c, g, or t
  misc_feature (4)..(6): n is a, c, g, or t
angnnngcgatggcggagtcgctgcccctggagatgctcacatatattctgagcttcctgcctctgtcagatcagaaagaggcctccctcgtgagttgggcttggtaccgtgctgcccagaatgcccttcgggagcaaccaggccttacctccctggacctcagtggctgctcagaactgactgatggggcgctcttggccgtgagccggggcctgcggcacctgcggcgcctgagcctggggaagctgcagcggctgacagatgcaggatgtacagctctgggtggcctgcaggagctgcagagcctcgacatggccgagggcgggaactggcccaggccctgggctgtatgcacggggctccatcccagctggcctccctcagcctggcccactgctcttcattgaagtcacgcccagagctggagcatcaggcctcaggtaccaaggacgcctgtccagagccacagggcccctccctgctcacgctgcgggccctgcaggagttggacctcacagcctgcagcaagctgactgatgccagtttagccaaggtgctccagtttctccagctgaggcagctgtcccttagcctgttgccagaactcacagacaacggcttggttgctgtggccaggggctgtcctagcctggagcacttggcgctgagtcactgcagccgactcagtgacaagggctgggcccaggcagccagctcctggccaaggctgcagcatctcaacctgtccagctgcagtcagctcatagagcagacactggatgctattgggcaggcgtgcaggcagctccgggtgttggatgtggccacgtgccctggcatcaacatggccgccgtcagacgcttccaagcccagctgccccaggtgtcctgtgtccagtcccgcttcgtgggaggggctgacctgaccctaacactctgaggccaggtcagtaaccagccctgcagcacagcctccttgactcccccagtctccaaccctggccttgacccgggttgctttttgcctccctctactgcagaccctctaggactgggggtggggccaatccagggcagcccagagggaacatcctgccacaccgcctggcagtagcctctttccagctacacgtcgctgccacaggcccctggaaatgctacctacgtgttgccgccacaggctcctgctctctggccaagccctgggtgggaggccaggcccccagcgggcagggtctggtgctgggaggagcagagcctctgcctcttgcctgccctcctctcagacctaaggccgggctccacctactcctgtgggactctcccagcaccctgtgtgcactgagcttcagcagctgagcctaggtctgtgctgtaaatcctaagattaaacattccagatagta

SEQ ID NO: 213460 - DNA, 1501 bp, Homo sapiens
ccgatcccgggaccttctagctctgggtaacggttcctcctttgggccactctgtccctttagcttgggggaccgtcctccccttccctatcggccccagaagatagctgccctgtcatctccgcgagaacaggccctctgcccatccccttcccttgaagtggctgtctcctccccgctcagttctggaagatgtccgctccatctcatcgtcccgaaggatgctcacatatattctgagcttcctgcctctgtcagatcagaaagaggcctccctcgtgagttgggcttggtaccgtgctgcccagaatgcccttcgggagcaaccaggccttacctccctggacctcagtggctgctcagaactgactgatggggcgctcttggccgtgagccggggcctgcggcacctgcggcgcctgagcctggggaagctgcagcggctgacagatgcaggatgtacagctctgggtggcctgcaggagctgcagagcctcgacatggccgagggcgggaactggcccaggccctgggctgtatgcacggggctccatcccagctggcctccctcagcctggcccactgctcttcattgaagtcacgcccagagctggagcatcaggcctcaggtaccaaggacgcctgtccagagccacagggcccctccctgctcacgctgcgggccctgcaggagttggacctcacagcctgcagcaagctgactgatgccagtttagccaaggtgctccagtttctccagctgaggcagctgtcccttagcctgttgccagaactcacagacaacggcttggttgctgtggccaggggctgtcctagcctggagcacttggcgctgagtcactgcagccgactcagtgacaagggctgggcccaggcagccagctcctggccaaggctgcagcatctcaacctgtccagctgcagtcagctcatagagcagacactggatgctattgggcaggcgtgcaggcagctccgggtgttggatgtggccacgtgccctggcatcaacatggccgccgtcagacgcttccaagcccagctgccccaggtgtcctgtgtccagtcccgcttcgtgggaggggctgacctgaccctaacactctgaggccagaccctctaggactgggggtggggccaatccagggcagcccagagggaacatcctgccacaccgcctggcagtagcctctttccagctacacgtcgctgccacaggcccctggaaatgctacctacgtgttgccgccacaggctcctgctctctggccaagccctgggtgggaggccaggcccccagcgggcagggtctggtgctgggaggagcagagcctctgcctcttgcctgccctcctctcagacctaaggccgggctccacctactcctgtgggactctcccagcaccctgtgtgcactgagcttcagcagctgagcctaggtctgtgctgtaaatcctaagattaaacattccagatagta

SEQ ID NO: 213461 - DNA, 791 bp, Homo sapiens
cctgtagtcccagctactcaggaagctgaggcaggaaaattgcttgaacccaggaggcagaggttgcagtgagccaagatcacaccactgcactccagcctgggcgacagagcaacactctgtctcagagaaaaaaaaagaaagaaaaagctttcttacatggtcacagagccctcaggtagactgcactttaaatctgtaaaggatttaaggagacaggatatgtacacttaaaatttccaaataagccaagttgctagctcctggctgatagacaaaaaaagtgaaagaattcttagcaaagctgtcatgcagtattttgctcttcctcattcgttggtgctgtggctatactgctggctcctctcatagtcagctctaaagaattgaaagttggccgggcacagtggcacacacctgtaatcccagcactttgggaggccaaggaggtggatcacctgaggtcaggagttcgagaccagcctggctaacatggtgaaatcccatttctactaaaaatacaaaaaattagccaggcgtggtggttgtgcacctataatcccaactactcgggaggctgaagcaggacaattgcttgaacccaggaggtggaggctgcagtgggctgagatcgcaccattgcactccaccttgggcaacaagagggaaactccgtctcaaaaaaacaaaacaaaacaaaacaaaaacaaaagtcaagtgcttacattttgccagaagccacaaatgaagactgtgccttataggccagcagagcggctaagagcacggga

SEQ ID NO: 213462 - DNA, 316 bp, Homo sapiens
aaacactagtgaattcctcacatttcagcaggccaaggcctctagggattggtagctcaagagtatagactcaaaaaactataaactcagtttgacaggtgagatggagaggtgactgtgctaataatcgtttagctcacaaatgattcagcaaactctttagacttgtgaaaaaacacatccaaaaggagactgcagcctggtgccggtggctaacgcccgaaatcccagcacttttgggtggccatggtgcaaggatggcttgaggccatgggtttcaagaccagcctggtcaacatagaccctgcgtctatta

SEQ ID NO: 213463 - DNA, 467 bp, Homo sapiens
cagatttctttttttggggaccttggggaaagggaggccagaaacctccgtgtccaaggtggggtggaaggagagggagaaatcttagcaaaaatgtcaaccagcaagggaagatgtgctagcgcaagtaggcaactcaacacaagactcagttggagagggaagaaaaatttagtactaaattattgtagtttcttcttattgtaggcgactgggagtcataattaccaaactatttaaaatgaccaaaatgttgctcttacctgagtatgttggcatacaactggaatgtatctgatggaagaaaaagcttctcccactgaataaattttatgaggatgatgagagacaaaaaaatgtttgatcagatatcatgtatgtgcatgcttgtctaattcactgattatgcatacattcacctcaaaatgctactaaaacaacaataaaataatgaaaaagtgaaaaaa

SEQ ID NO: 213464 - DNA, 916 bp, Homo sapiens
gtggaattttctcaagggatgtcttacctgaactagggaggagggggtgtggcgcaggaacagttctcgctcgggggagtctgatgctactggtctgggaaccattttttgggaactcctgacgtaggtgatgtacctggaagttccccaaggacaaagtagtggcaatccattggttccctcttatctgagagatagttaaaagaatcatagccactgacgcattagcctgtatcagtagcattcttcaggaactagagcgagtacctcctgtcaacattttactacagtgggcagagcactggatggaaacttttctggatttctgcttccttgccagagtaatgggaagattggactcatgctgtctgccttctttaaaattctgtgacctttctttgaaaagaatatttatttcagcctaatgaggtgttttgtgtttattttttatctttttaagctaaatctccactgagagtatagatattgatgctagtggctgctggttttagttccacttcaccttataatggctttgtttctccctattgcttgtgttcgatttagggctatatggacagtgttctttagtgtagttttcttattctcatcaagttgttttatttataccacctcaaggacttgagttggtccttgtaaaaaaaaacaaaaaaaaaagtacactggatagagaggaaagcaggcagggcactagggttagaagacatgattcaagcaaagacaaagataggaatgagccaggtatgcactgagagactcacatgcttagagaggaaagtagaggttagggagaagtgataaattgcattgactgtgtacagagggtactcgaaaaccatgtagctgagtttggatttgccaaatgggaattagatctttgagccaaggtaggggg

SEQ ID NO: 213465 - DNA, 805 bp, Homo sapiens
gtggaattttctcaagggatgtcttacctgaactagggaggagggggtgtggcgcaggaacagttctcgctcgggggagtctgatgctactggtctgggaaccattttttgggaactcctgacgtaggtgatgtacctggaagttccccaaggacaaagtagtggcaatccattggttccctcttatctgagagatagttaaaagaatcatagccactgacgcattagcctgtatcagtagcattcttcaggaactagagcgagtacctcctgtcaacattttactacagtgggcagagcactggatggaaacttttctggatttctgcttccttgccagagtaatgggaagattggactcatgctgtctgccttctttaaaattctgtgacctttctttgaaaagaatatttatttcagcctaatgaggtgttttgtgtttattttttatctttttaagctaaatctccactgagagtatagatattgatgctagtggctgctggttttagttccacttcaccttataatggctttgtttctccctattgcttgtgttcgatttagggctatatggacagtgttctttagtgtagttttcttattctcatcaagttgttttatttataccacctcaaggacttgagttggtccttgtaaaaaaaaacaaaaaaaaaagtacactggatagagaggaaagcaggcaggagaatcacttgaactcaggaggtggaggttgtggtgagccgagattgtgccattgccctccatcctgggcaacaagaacgaaactctgtctcaaaaa

SEQ ID NO: 213466 - DNA, 427 bp, Homo sapiens
gaatagttcttatggagtggacacacgaaatagagtcatgtgagtgaaagaaagttgtgattcttttttttcccccttaactttacatgatataaatatagtgaaagcgaaattgttttcagtgttttgatgtgtcacatgtaaagtcataccttggccaaccgtggtagctcacacctgtaatctcaacactttgagaggcggaggcaggaggattgcttgagctcaggagtttgagaccagagcaagacctcgactctactaaaaaaatttaaaaattgaccaggcatggtggcatgtgcctattgtcccagttactcgggaggctgaggcagaaggattgcttgagtgtaggagttgaaggctgcagtgagctgtgattgcaccattgcattccagcctgggcaacagagtgagaccctttctc

SEQ ID NO: 213467 - DNA, 509 bp, Homo sapiens
caaaaataagaaattaggagaagacaatgggcgctcaaagaatttcagctcttggatcagcttcctttcttagatttcagagaacttaatattttagttggccatatgaatgttaagtgattttgtactttgattttgacctatcaaaatacacttttgcttttactaataatccttctggtgttttcctgagtacacgatcagcaataagttttaaagcaatggttgggtgcgggggctcacgcctctaatcccaacactttgggaggctaggcaggtgcatcacttgagcccaggagctcaagagcagcctggacaacatggcaaaaccccatgtctacaaaaaatacaaaaaattagctgggtgtggtggcatgtgcctatagtaccagctactcaggaggctgctgtgggaggatcacctgagtctggggaggttgaggctgcagtgagccatgattgcgccactgcaatccagcatggataatggagtgagaccctgcctcaga

SEQ ID NO: 213468 - DNA, 462 bp, Homo sapiens
aagggcagcatcgagaccacagagaggggagggcacccggggtgagcagctgctggggatgaaactgctggaggtgctggccagggctggctccccacccgctttctccctaggaaactcccacacccactaaggagcttttgcaattgggaagctaggtgctcagccccacttgtctccagtccagtgaagccctttgtgggtcaagggatttgctgggcctccctcggttcgtcactcccacccttcccaaatgttgcaaggggtggtgtttcaggctggagctatgcgctagggagccagaaagaggcctgatacaatgcttgtcctcaagaagctcacagtttgaggccgggtagcaggaggaggccgttgggacagtggaaggcaagaggacctgcctgtccccgcagcctccgatgggggccggcaggaaaggctttccaagggtcagaggaaatg

SEQ ID NO: 213469 - DNA, 150 bp, Homo sapiens
ttataaataattctgtgagcctagttatcacaatgaattgtaattttgttttgtacatcatcttcctcatggactatgaactgctggagagcaggaagttttaatttgtctttgtgttttctgcacttaacactacatttgggacacagt

SEQ ID NO: 213470 - DNA, 354 bp, Homo sapiens
gaaacaaaactatcatcattctcagatgatatgtctacatttaaaacttacttctgcaggaaaaaaaatatcagaaatgatagcagagtttagcaaggtaatttccagttattaaaaactcagatctcagaggcaaggggacaaagccataggggtattactcgcacagaggcacagggtgctgtcagcaagagcagagcccatcctggggccacttgtccccaggatgatttctacccaaggccagcattggatggtgagcggggacaagggtgagcctggacatcagtctgtagttccaccttgttggaggagaggcatggcagcctgctactcagaggctgaagtgggaga

SEQ ID NO: 213471 - DNA, 110 bp, Homo sapiens
ggtgagaatggcttctccctcccctgccctcctccctgtgctttggtttggctttgatctctctgtaaactcatcacaagaaagagcccttctaactccccatgaagctt

SEQ ID NO: 213472 - DNA, 234 bp, Homo sapiens
tcgtgccaggccttgttacatgttttctaccacaaaatttaaattgaataaaattcatttaaataaacatttattttttcagtttcatcagtcacatttcaagtgttcagtagccacatgtggctaatagctaccattttagagagagtaaatatggaacatttataattatcccagaaagttctatttgcattggttgtgtagcacttaagaagacagttttcagctgggtgg

SEQ ID NO: 213473 - DNA, 279 bp, Homo sapiens
aagtgctgggattacaggcttgagccaccacgcccggccaacatggagattttgatgaacgatgttaggatccccaggtcagaaaagcaaacttggacccatacttgacaccatacaacaaaatcaatccaagtgggtcaaaagtttaaatggaaataaaatattaggaaaaaaatgggtgaattcctgtataacctcagaataggaagaccttttcaactacgactcaaaatccagaagcccccaaatactgagattcaactacatattttaagtggc

SEQ ID NO: 213474 - DNA, 182 bp, Homo sapiens
tccttggcagagctccccttgagagagctcccctcagagctcgtaatatatagcttttatcattgcattctctgctcagaaaccttcagtggacttcctcttgctaccatataaagctcaaataggttaccatagcatccacagcctggctccctctcaaccttcccagtcctatcttcccc

SEQ ID NO: 213475 - DNA, 126 bp, Homo sapiens
aaacactaggcccagaccctttcctttgttaagaaaggaaaaagtgttttgctaggacgttagagttactatttaagaaacccagaacaatcatgtctctcagagtccttagtattacctggtagc

SEQ ID NO: 213476 - DNA, 579 bp, Homo sapiens
ctgaaagggacaggggcgcccagccgtggagggagggtcctcactgactgacacaggagagaaaacccaggtccttaacttcggtcaaagaaaacagcgttctggccacaggctgctggatgtcatgggaaccgcaggcgtgggacctccagcccggctgcctggcccaggcaggccctccctgaccaggccccgtggcagcaccctctgcccgctcctggggagcgccaggaccccggtgcttgtggactcttctttgtcttttctagaggagatcatttcctgtgatccccttggctgggttcatagcaggggctggacagttgggggaacatccccctccccgctcagcccaaacagagggctccttgttccgctcacacaaagagagcccgccatcaaaggaatccctcaggtccggctggcgggggtggggaagcccggcccccagagaccccagcagggtgggcgccgggagcacggagcccagtgacccaggcccggccctgctaaggattcacctgcatcttacctgtgtcttgcggcaggcttgccaggtaaaacacatgcttgcatgaa

SEQ ID NO: 213477 - DNA, 493 bp, Homo sapiens
ctttcatgtcctctaagattcatttcaccgtgacaatatcactgaaaaacagcaaacaggaattacagctctcactatgttgccaaggctggtctcaaactcgtgggctcaagcaattctcccaccttaacctcccaaagtgttgagattacaggtgtgagccactacacccagctttattaaatctttaactttcactttagtgttaaaaacagtaaatactaaggctaaaagtgacaggaatcttaaaggtagatcagtcaggcatattagttaacatgtgatctggttttattctgattatctgtctctaaatcaccaggtcaaattaaaatacaaaaaaattagccaggcatagtggcacgtgcctgtaatcccagctacttgagaggctgaggcaggagaatcacttgaacctgggtggcagaggttgcagtgagctgagatggcaccactgcactccagcctgggcgacagagctggactctgtctc

SEQ ID NO: 213478 - DNA, 451 bp, Homo sapiens
actgcctcagcctcctgagtagctgggattacaggcacctgccaccacacccaactaatttttatattttagtagagacggggtttcaccacgttggctaggctagtcttgaactcctgacctcaagtgatccgcctgcctcggcctcccaaagtgctgggattacaggtgtgagccatcgtgcttggctttctaagtcttttttttttggcggggggatgctattgtaagtggaatttttaaaaacttttcatgttcagattgcttattgcttgtgtatagaaatacgattactacttgtatattgagcttgtatcctgtaactgtgttggatgtgtttattggctctaatagtttatttgtgggattttcttaggattttctatatacaagattatatcatctgcaaataaaggtagttttccttcttttttttaagcctgagtgattt

SEQ ID NO: 213479 - DNA, 908 bp, Homo sapiens
gtagtcccagctactccggaggctgaagtgggaggatcacttgagcccaggatttgagcttgcagtgaggtatgatcatgccactgcactccagcctgggtgacagagcaagaccctgtctccaaaaaaaaaagtgtttattttgtaatatgtgtgtgacacatatttgtttacagtgtcccttatctgtactaaagaaagaatataatgaagtaattgaagatggctgggtgtgatggctcacacctgttattccaacactttgggaggccaaggtgggtggatcaccttaggacaggagttcaagaccagcctggccaacatggagaaaccctgtctctaccaaaaatacaaaaattagccagctgtagtggtgcacgactgtaatcctagctactcgggaggctgagacacgagaatcacttgaaaccaggaagcagaggttgcagtgagctgagattgtagcactacacaccatcctgggtgacagtgtgagactgtctcggaaaaaaaaaaaattgaagatatcatttgccatttaatttttttttttttttttggtttcttttttggtatagctgtcaattttaaggccaaatcttttattttgaaagattttacccatgttaatttctataattctgaagtcattactcacagctagaaataaatttagaaataatcaatgcacatccaaactggcctctcgttttttcttttttcttttttctttttttttggtatctgtttaattctcacttccaattttgctacattgcatatgggaaagtaatttttattaaaattctaattttgtttgagcctgatattttaatgaactaaattacttagaaatagctgccaaaaagtctctcttttttgcatgatgagcaaatcccaaactatag

SEQ ID NO: 213480 - DNA, 554 bp, Homo sapiens
aggactccctgcctgtcctggggagtgtgtttttgacacgctcatgacaaggtcccccagcgtgaggcaggaacaggacccaggcagggcagtagtggtagcacctgtccagtgtgtctaaggagtggactgttgatctcgttcacacctcatagtgacagtatggttattttcacttaacataggagaaaacaaggctcagagagacagagcaggctgcctgaggccacacagcttggcctggtggagctgggtttggatctgtattattagccacgggctcacctgtgatcggagctctggggagggaccttgctatgaacgccgaagggggatgcacacccgttgagcttccaagaggcaggacccagtctcagcctcagccttgcctgggcagcctgggcttggctcctggctcctgctcttaccgtgtgactcgggtaaactgctggccccctgcgattccgacccctcgtgtgtccaaggtgttagggttgaatgagacagcccagataaggcacccgtgggtccatggcaccaggaaggccccacag

SEQ ID NO: 213481 - DNA, 639 bp, Homo sapiens
tggtcctcagtgggacttccattagaacatcttcaaaagcaggaggaaagcaggtcttgttctacacatgccagagtatattcccactgtggccctactaccactgtttttcatctgttggtcttataaaactctgacagcagagtaagaaagggtttgagaagcaggtcttatgaggacatacattaccaagaatgtacctccatattcactctgtatattagccccacaaatcttcaataaagcaacaacatgcttgatatgcttgaatttttttgtggaagctggtgaagaggctaaattttgtgggaccttaaaaaagggtcagaccacatgtgcccaagatatagttccaggcttccctgataccagctaatgtacactgagcatgtcaggcaaaaggcaaagttatttcaacctgttagctctcctaatctttataacaaccctgtgaattaacttgaattgctacaaataacatgcctgaggctcagagaatggaggtaactcattcagctccaaaaaacctaataatggggccaggactctgaccaaggtttgtctgattactgaattggaacctgaatttcaattttagagctccccaaccagttaccatgcattgactatccatgtact

SEQ ID NO: 213482 - DNA, 500 bp, Homo sapiens
cacacacacacaaatacagtgcgctatacggagtgataattagaatacaacatgttaggaatctctgtgttcatgcctttaaccatttcatattatttcataataatcaagaacttattaatcaaattagcatttaattatcttcagatgaaatgagaaagagggtgggcaaaatgtagactgaaggctgagaattataggaattatggtcacaatcagccagtgttttaactctactgcaattgtaacaaagtcattggatcttggttcaaccaatgggaatagatcctttcaaaatgccaataaataaaatgctaaataaacattttggcaattttctcttgataaatctcttatagcaatgtgcataatgcttccattttcatccaatgaagtactagtgaaaatagtctagatagtgttaatattgatagaaattataactaaggaataagttagatggtgattaaagagttgaataagcactcaaagaaagttgt

SEQ ID NO: 213483 - DNA, 342 bp, Homo sapiens
gacactccgtctcaaaaaaaatatatatatatgtgtgtgtgtgtgtgtgtgtgtgtgtgtgtgtgtgtgtagcatcatttcttttatgtttactttctcagtgggatataccattggcctttgcctaatattaaaatgagcatacatatccattgccagaacagattccagctaacagcaaagagagctacccacacagcatgctacattatataaaatttggagaaggttatctagttcagggcattgatctgcttagatcttttcatcttaaagagagaaaatacaaattatttttagacctgaaatcaagtgctcaactccaaacaacatttctgagaa

SEQ ID NO: 213484 - DNA, 407 bp, Homo sapiens
ggaatgctacagtgaccataatcccccaaagtctacaacccccaagtcatttcaaaatgtctggggaaggctttatgattttctggcagcaagtttattttcctgatcatgttttgctccagctcgtgcagaatgacgctgcgttccctgagcacatatgcaccgacagatggtgtaagaggactagaatcacactaactccttcagaggagccagtttggaatgcaaatttaattttcagagaagttaaacaaggcaaatcgagaactgactctgaaatctgaaagccatacaaagaatgaaatgtattcctaggaagccaaactatgtcccctacgtgcgtattacacacatagcagtataccaaacactacaattgtttcgtcgcccacctttcaactacaggg

SEQ ID NO: 213485 - DNA, 337 bp, Homo sapiens
ctggactattatgtatagagtaaactgatactacctctaaaagctgagattacaggtggtattggcttcttcacacttttctactttttcacaataatttcttgtagtaattagaggtacttaaaactgaaggctaatgatttacagagaatggtagtttaaaatgattggatcacatgaaaacataatataacattcagttcttctaacatctttttagttaggaaacttcattagtgaaaatatttgattatcatggcttaacaagagtagtggcacattcatttattaattttgcataaataaagggaaaagaatctaggatatatcactttat

SEQ ID NO: 213486 - DNA, 776 bp, Homo sapiens
atgttgaataaatctgatgaaaatgggcgtcctgatcttgttccagatcttagcagaaaggctttcaatttttccgcctttggtatgatgttagccatgggtttgtcaaatatggtctttattgttttgaggtataccccttttatactcaattttttagtgttttgataataaagacatgttgaattttaccaaatgctttttctgcatctattgaaataataacatggtttttgttcctggtttatttatgtaatgtatcatgtttattgatttccatatgttaagccatcctttcatttctgggaggttaaataatatgtccagatggtaagtaagaaagccaggattttaactcaagtctaacttccaagcctatgtacgttttaccatttgagaaacttctgtattttaattctacattcataaacctatagacatatagagatccacatccatatgtataaactgtttataatatatgtagtataatttctacattaaagttttcattaagtctggtttctatccctatgtatatgttatgtttcatgggattcgacttcatctaaatctataaactagtgatatattatatatttttagtactatctatatatctcttttaaaattgttctgcacattgatctccaagatgtgaaccacctgaggtgccagaaaccagcctttcatatgatatactttatcagtcattagatttttcgaatatggcttcgataatttaccggtgtttcccaatgccttggggtccttcc

SEQ ID NO: 213487 - DNA, 482 bp, Homo sapiens
tgcatgtgcagtgcacttactgaagttgtacacatgttcatttgaggcatttttcccttaccagtcaattgttcctagaggaaggtcatataccagttaaactctgccattttgcctcttagtgcacatgcttgagcccactcttccaaatcccaagatcttattaggaagctgctgatcactagcttcaggtattttctatctgttggagactgccttcccctggcaccgctgtgatcaattattattgtagaaagacagtttaacaaccacctggccatcatctgatggtcgcctgacgttccttttggggggctctcctgccctgctcatgtctgcctagctacctaccctaacatatgcacatatacttttttctcttgttttttaattttctaaaataggatcagactatacataatattctataattttctttttttacctaataaaatttcaaagatttctcttcaagtaatgta

SEQ ID NO: 213488 - DNA, 492 bp, Homo sapiens
ctatcgagagtcctgaggacttcagcagacctccagggaggcctgtccaggatgttctcctacgtctgtaaaggagtgagcactttgtgctagtttagggaaagacagcttttctgttgggattttagacttaccctgcttgaaattggtggaaaaatacctgtctgggatggggctcaataatctgcagctgtattaggaaatgcaagtagttttgatgtgggtggtttcaagacatatttggaaaatgtgagggaaatgtgtatgtgcatttgctgagcgggggactggtgaaggatcaccgatccatttattcctaatgctcatctcagctttttattgtgccgagtaccttgataaggcttgggttattttatgagcgtttatatataaattgatagtgtccatcagatcatgtatatttagaggcatgctcctactttgagtaaatggaaagctttagagatatacactaaataaacatcagttact

SEQ ID NO: 213489 - DNA, 281 bp, Homo sapiens
aggctgggcatggtgactcacgcctgtaatcccaacactttgggaggccaaggttagtggactgcttgagcccaggagtttgagacttgcctaggcaacacagtgagacccccatctctataaaactaaaaacatcagccagcatggtggtgcatgctgtgttcctagctactgaggaggctgagatgggaggtttgcttgaacccaggaggttgagactataggtagccatgatcacaccactgcactctagcttgggcagcagaatgagatcttgccta

SEQ ID NO: 213490 - DNA, 316 bp, Homo sapiens
tactctttcccccaaccccagtccccaaattccattgtatcattcttgcacctttatgtactcaaataacttctaggcttaattgtttgttaaacaatccaatagtaaagatatccatcttaccggaaatgtctcagaagaataattttgttactatctttaaaagtgtgaaagcaaccagaggaggaaaaaatacagtaaactttagctcaattaagtttgaggttgcagtcaagaaatgtgaaattattaatatactgggtttttctactgacttctacatccataattgcagaataaaaattaagattcaaaa

SEQ ID NO: 213491 - DNA, 246 bp, Homo sapiens
tggaaaaaagtgttactgatgaaatttgaatatcgtctctagattgagcaactaagcaataatattgtattaaattgctagattgggcaatagtattgtactaaagttaatttcctgacacagttaaataattgtactgtgtatataagatgtcaaaattgagaagttgcaaggctaaatggaatttctcagttttttaaactcttactttgtacatctgaaattattttaaaataaaaactaaaa

SEQ ID NO: 213492 - DNA, 108 bp, Homo sapiens
ctcctcatttacagagtgttgagcagatctccctattccccaccaggaatccagggctcacagcctagagaaggaaaacgccaactccatgccaggtactgggctcag

SEQ ID NO: 213493 - DNA, 784 bp, Homo sapiens
ctgtatagagcaaaagcagggactgagtcatacgaggctgagtctctcttggtgcctgaggctttgcaaggtcaggagctgactaccttttcccccatgtctgacaagtggattctgtcctctgcatgttgttgtttattttatgaatcagccccagccattgtccagctcacgggcacctccagcagagagtggaggcctgcagggactcacaggtgacccacgcctgcagcagagtggagaagggcctccctcctggtcggcggaaggacatcgacattgaagccagatgctggggtccccaggaccaggtgtccacacccccactgcacggatgagacaatcagcacagggaggtgggctggctcgctgacacaggctcaggcagttggtgggatgcttggaatgaaatccctatccctatgtttaaattctagctccaaaatctgggctcctgaccacaatgttagaggtgccttccaagggcttttcactaattgaggatttcaaacaagcctgagatgagagatcccacattcagccttgagcaactgagggttgacggttgtgtgtgctgacatctgtctgtctacctgttgattatgtaaagtagtcgtccacagtttcctaaatcgttaaatatccacaaatctgtttacacacattaacggtagttactgctttagcaatcaacttcaaatttgaataccattaaaacacagaaaataaactaaaaaccacattgggaagatgcatatttctgtttttttgtgaaactggtgct

SEQ ID NO: 213494 - DNA, 420 bp, Homo sapiens
ttatatttacgactacagttaaacatataacattgattgaaaaattgaaatgctttaataagggaatgatggaagcccttcctgggaactgaggggccaagtcctcagaaacctgccttactgttctctgaaagtgggtttcagggagttcaggtctctgagatgcaacatagagtgttggttttgatcagagctgctttggaagatgcaggcagctggcacatcacaacacagcacatgtttaaaaccctgaaggctgagggcggtggcttgagcttataatgccagcactttgggaggccaaggtgggaagatcccttgagtccaggagttcgagaccaggcaacatggtgagacctcatctctacgaaaaaatattttttttttcttttcaaaccctgcatgtggcatgtgatgcaa

SEQ ID NO: 213495 - DNA, 461 bp, Homo sapiens
gccttcagaatcacagcagattcagagagactacagtgatgcctagtggtcagaacaaatttatagacaaaaaagggaagtgacatacagaaatcggaagtaaggcataaaaacagctgggttggttacagctgggcgtttgccttttttgaacacagtttgaacactcagctgtatatgagtggttgaagtatgactgctgggattggccaagactcagctattgttacaggtgcatactcctaaattaggtttttaatcttgtccacctatcaagttaggttgcagttcatccacaaggactcaaatattgaagtacagactccttctcaggccatgtttagttcactttaatacatcataactggtaattgcagctctaggtcaggttgagaggttggagacttccagaatggtgaagtaataaccttccaaaaatccactcttaagaatacgtggcc

SEQ ID NO: 213496 - DNA, 461 bp, Homo sapiens
cagattgaatgaggtgaatattaaactgctttaaatgtactcttcataaagtactaattacacactcccaagagagaacagccaaggaatactaaacagtagagaagtcaacagagggttctttttatagtatgttgctgggctctgtgtttttctgtctccttctttctcgctctctctctttctctctttttttttacagtaaaatcacagcacgctaaagaatacacatttatagcacaatgcttctcatctaattatatggcaatcattagttttaagctggatgcattatattttctttgatatattatgcctaaggcataactctgcatttattgttgctactggcagattttagctcccccacaagcccccttttccaaaccccaactactttctaacccccaccttttaacaaattatttaacccctatgttagtttgcttattgtgccagaa

SEQ ID NO: 213497 - DNA, 499 bp, Homo sapiens
ccttgttcagaaagctgtgggaggcaagagtagttaagttaggaacagctgtctggagctttacctcttgctttttatctcagccgaaagtaggtggtgattttttatatgtctaatgcatatggtataaactagcatctgataactccaaggtcttctaatatgagcagctggtttctctttagttagccctaagaggcctccgaaataagtcctaaaagtcccccaaataagaacattcctctcctgaaaaaaaaactttgttgaaacgaaagtattatatacttccagcactgatgaatgtttcaattaatatacttttaaaaataaattttagactttctttgttatagaggctgcttctcttaaaagccttctcttggccaggtatggtggctcatgcctgtaatctcatcactttgggaggctgaggcgggcagatcatgaggtcaggagatcggggccatcatggctaacatggtgaaaccccgtctctact

SEQ ID NO: 213498 - DNA, 469 bp, Homo sapiens
tgttattaaacaaaaatcctactggtgggggttcctgtgagtctcatttattctttacccatctaaagaatgactttttctttgtcattggcattagttgcaattatgtagtcatgcctgggtttgtagagcctcctatcctcagctctaatgtgagggagaagtccctctctagagttaaaagtgtagtgtgattccctccagagcttctcctgtgtgtttactcctatacctgcacatctagaaataaacccttctgttgtgtagcatttttgacataataatagctttagtaatagattattaggcctttagtcttttacatttaggttgttttcagcttttgatgacatcattatgaacaacggcttggaaatccttgtatgaacttcactgtttactgttttgaacatttttctaggatacatatcaagtggaattactaggttgaatggtatgcatatttaat

SEQ ID NO: 213499 - DNA, 696 bp, Homo sapiens
aggtgctttttgtccactctttaattaccagaataaggtgggatgcttactctttcttgtctataactggatgcccctcactttgattttgaaagcttcattgaatatggaatctattctttcagaactttaaaaaggatgtttccatcttcataggtctgtttttttttctgctaagaagttagcagttattcttattggcccatttataatgtatttctttctgtggctttcaagatttgcttgttatttttggttttgtaaggatggctgtcttttgtttattgtgctttgggttcgtagagctgcttttatctgtgggttgatatttgtcttcaaattggaaaggttttgtatgatttcatcaatttgtttcatgccttaatctctcttatttctctgagttccaaatacatgcatgttagaatactttacctttttcataggcagctaaataactatttttttaaatcagtcttttatgttgctgtacctcaggttgggtggtggtgtttttttgttcaatgttggcttgccccaccacgatgaagacacttccagttttccttcctttctggtgctgggaaagcatcccgctgcaatatcttggagctgacccacatcaccattgcgataagagaaagaagggcgtttttgataagcatcaacaccctgggggctcggtcctggtacacc

SEQ ID NO: 213500 - DNA, 399 bp, Homo sapiens
atgtggagactcctgtctctacaaaaaggaaaaaaaaaattagctgggcattgcagtgtgtgcctgtggtcccagctactcaggaagatgagatgggaggatcgcttgagcccagcaggccaaggccaaggctgcaatgagccatgatagtaccaagaccctgtctcggaaaaaaacaaaaacaaaaacaaacaaaaaatatatatatatgaatgacagaaagaaagaaaaaaaaagactaaacagcaaaataatgtacctacagaaacccatgcacatcagaaagacccagtcataaaataaatgaagactgtaacccaatatttaataagctaaaagaaattaagaaaatgacagaactataaaagtcagacttggaataacttagaaacaaggcga

SEQ ID NO: 213501 - DNA, 288 bp, Homo sapiens
ttgaaacagccttgggtcaagccacaaactgagtcacagacatgccaaagaacataccacagaacacgcgcccaggcaaatgcaactcagtgtgaaactcaccacaaaatggtgcttagatgccattagctacttggaaactacataataaatgactaagtggcaactgtatttattatgagtcagaatttataggatgcagcccaagcagtatgtaaagataaaatgttatttatttagagatacggtcttgctctagcactcaggccggagtgctgtttcaaacca

SEQ ID NO: 213502 - DNA, 407 bp, Homo sapiens
cggctccggggctgtcagctgcccgcctggctcctccaaggcctggagctcggacgcgggctctgggggcttctggggcgcggaagcgggctcgcggggagcagtggccgcccccggccgccgcggtggctgtgctcagaagccggccctggcgtcaggaggccgggcgcgcggcgcggggcgcgagttcccctgcccgcctgtgcgccccgcaacgggcctttcctgggccctaacgacagctcgcccgtgcttcgccctcgcagctctcctgtgtccccaaaatgcctttcccgcgtcccccgcccttcagcggtgactgcccaggggactctgtaacgcgacactcagactgccgagcctgccaggcacttcgcggagggcgctaggggccgggacgcggccgc

SEQ ID NO: 213503 - DNA, 462 bp, Homo sapiens
gtcagggattatccaggaatgttaggggctagcaggtgaggcacagccctccagaagtcctcacccaaagatacagcccaggcagaggtgggtggtctgagttacttgttgggtcatgacccaggcttgaaacggattattgttcaaaaaatatgacaggcagatggcattatctctcagtgccccttgaggtgtgctgaacccagggcagactctgtgcaatggcttatgaaggattggcaggcagtactgtcttgccagagcattgtagtgctggacaggagtgtcttgacagggaccaatgagcaggtggagctaactagccatcgtaacacttcaaagcttggtaaacaactcttcttctccgacagcatagctaaatgattcttattctttcctccattttctctgtttactttcatttcatcttcttaattcagtctgtattcccctctacctttc

SEQ ID NO: 213504 - DNA, 402 bp, Homo sapiens
atgatggtctcctctgagacacattttttacaatgtactatacctaaaaaagaaggcattgcctgtgctcttcgaaccatgaagacatagcattatgctcaacctctagttagcaagaagtgcaatcaaacctgtcatgacaatacatttttgtctatgaaagaagcacaagtttaaaaactgtgaaaatgatcaatgatactggctcatgaaggtcctgtaacccagcattgctatactgttggtaaatgtacagtcatggcctttttggaaaacagtctggcaacttttattattagccttaaaacatttacactgtcttactctgaatctagcctcaagatatgaggaaaaaaagaataaacattaagtatcacgtttttgataatatttaaaaaaact

SEQ ID NO: 213505 - DNA, 644 bp, Homo sapiens
ttttaaaaaacaaacattaatggccaggcacggtggctcacacctgtaatcccagcactttgggaggccgaggctagtggatcacctgaggtcaggagttcgagacaagcctggccaacatggtgaaaccccaactcttttaaaaatacaaaaattagccgggcgttagcatgcacctatagtcccagctactcggaaggctggagtgggaaaatcgcttgaatccaggaggcggaggttgcagtgagctgagattgcaccactgcactccagcctgggtgacagagcaagactccctctcaaaaaacaaacaaacaaacaagcaaacaaacattagttagtacacactagttactcttctagttacttcattaacatcctgacatttaattttcacacaaaccaatgaggtatattatccccattttgagcaccttatccaaggttacctagctagtaaggcagatttaaataaagaaacctcaggtaatctcattttcctcctgcttttgtcaagaatccacaagtcagtagttagactgcgaatagcacttaaacatacagatttcactcatttactgagcacctgctatgtccagcatggtgccaggcactggggataggaaaaaaagagacctagccca

SEQ ID NO: 213506 - DNA, 408 bp, Homo sapiens
aaatatcaaaaggttttaaagcaagaatgtctaaaacagtgatgatgatgtaagaataggtgtgttacccagataccagaagagacttctctgtctgttggagatttaagtatacattttctggccaggcccagtggctcacgcttgtaatcccagcactttgggaggccaaggaggtcagatcacttgagatcaggagttcaagaccagcctggccaacatggtaaaaccccatctctactaaaaatagagaaattagctgggtgtggtggtgcacgcctgtagtctcagctactcgggaggctaaggcagaagagtcacttgaccccaggtggcaggggttgcagtgagatgagattgtgccactgcactccagactgggcgacagtgagactgtctcaaaaaaaa

SEQ ID NO: 213507 - DNA, 531 bp, Homo sapiens
tatcggctgttgtgtattttctttggagaaatatctcttcaacttctttgtcaattttttgttgggttatttttctttttattattgagttgtaagaattctttatataatttgtgaaagtcaccaatgctgtggtagagtcacttacatccgacccaaacaaagtggaaccgggaggtcatgacgaaggtctcacgcttgtatgtctgagataagaactatcacaaggatcttctaaaaactcataagaggctgggcgcagtggctcatgcctgtaatcccagcactttgggaggccaaggcgggtggatcatgaggtcaggagttccagaccagcctggccaagatggtgaaatctcgtctctgctaaaaatacaaaatttagctgggtgcagtggcgggcgcccataatctcagctactcaggaggctgaggcaggagaatctcttgaacctgggaggcaggttgcagtgagccaagtttgcgccactgcactctagcctgggtgatggagcaagactatgtctcatt

SEQ ID NO: 213508 - DNA, 358 bp, Homo sapiens
cagggaatgatgcaaataaatatgaacaggttatcgtacattgtctaaatgtattcacatttaaaatgtaagtaaaaaacaatatgtagcggattgtaatttttcaagagatgaccttaggatgggtgaaattgtcaggggctggcctggtttcccagaataatcctttaaattaagaattctctcattgggggcagtgtatccagaggtggaggaactgaatcaaggatagttttaaaaactggatcatctgatggctgtgtattaaataggtttaattcttttgattgtatttcctgtctgcatctgaggccgtatccactgcagaataataaaatggaggtactggcaactattt

SEQ ID NO: 213509 - DNA, 523 bp, Homo sapiens
cttttgttaggctgtatcccaaagagtagggaaagatctttacttcatgtcagtgggtgataccactattaaaggtaacttgtgtttttaaaacaaaatacttttatcacccagaattacaatttcttaaaaatattgttatgctgaatccctcaaacaaaaatggtttatcaatttctttggacataggtagcagggaagaaaaaccactttaggtaaaaaaatttaaatatacttatggagataaataacccaagatgaggatttcttgaaatataggaaatttattaattgaattaatcttgaaagttaaattatgaatgtgataaattcacattttaaagaattttctctgttaattagctcatatgttcaaatgatatttgttaaataatctcttggaatttctgaatctttagtttatataagattcaaattattggctggttcttggtattgcacattcttgttcataaataatgcagtggttcttagaattgaggcacattgagaataaaatcag

SEQ ID NO: 213510 - DNA, 367 bp, Homo sapiens
atgcatagctcttcccagcatccgcccagcactgtgccccccacggtgttcaggccctggacacacagactagaaagcaggtcagcctccggaaatctccaagctccctgtgactgtgggctggggactgcccttccccttcatcgggccctcaggctgaagctcagaaccctcctgtaaggaaggcttcctggggtgcccgaatctgatgctcgctctgtccccaggcgcttgccttcctgaggccccctgtcccttccccttccaccaaagagcctctgtgggctgttctctctatccaggaagtgggtcccatccttcacctctttcatttctcactcgggagctacttcctctccagtgagcc

SEQ ID NO: 213511 - DNA, 434 bp, Homo sapiens
  misc_feature (426)..(426): n is a, c, g, or t
ctccacagataattacgaaagaacagaaaacaaactctacattgtgtttatgtagatgtatagcaaaatatatacacaaatttaaaaaacaaaatgctgagctaaactctaccaggcaaattcaagaaaagcagggctttgaatgtcaagagagggagtttgatcttggtcctttaggtcatagggagccccagtcaattttaaaatcagaagagccaaatttattttattttatttttatttatttatttatttttagacggagtttcgctcttgttgggagcttaagctcccaacaagataagctttctagagacttttataatttcttacatttttttcccaatctctttctttcctcaactttctatatccattcagttttgtttggtttttttttccctgagagggagtttcgctctggtngggagctt

SEQ ID NO: 213512 - DNA, 353 bp, Homo sapiens
tcgagacctggcagaactgggggagctagtcaagcaggtgtctggggagagggcattacatatagagggaagagcaggtatagaggccctgaggcaggagcgtgccctgagtatctgaggaatagtaaggtgaccagtgtgactgaagcagagagaatcaagggaagagtaggaggcgatgaggctggagaggaaaccagcggaccactctccttacaggttgtattagtccgttctcacactgctatgaagaaatacctgagactgggtaatttataaaggaaagaggtttaattgactcacagttccacattgctggggaggcctcaggaaacttacaatcatggcagaag

SEQ ID NO: 213513 - DNA, 402 bp, Homo sapiens
atggcgctggatattccagactctcttttaaaatattcacatttcagagggttgccctagtattaaatgtccatgaattgagcctgcaagaggagagtttcacacaatttgttaccctccttgcaagcatgtgaagcctctccagaagtgttggcatgagtagattgtctccgtttcattagttccttatgaaatctgtaaaaatagaatgaaattctcagtagcctatccaactgaagagtaatcctgttgaagtacaataaattgctctttggtgaaaatggttcagcttttctgcaactagaagagttaatgggagtctgccaccccctctagagagtggttcacacttttctagccagagagattgtattttaccacgctttttgtccatggatggtg

SEQ ID NO: 213514 - DNA, 232 bp, Homo sapiens
catctgcatccttccttgctctatttttcttcctttttctctttccctctcttctgttcttctacctttctccattagctattatcataatatagaactgagatgtttttatttatgaaatatcttgcaccttaaataaagtggaaaccatgataatactaactacgttgggttcttgtgaggattaaataatatacataaaatgcttagaacaatgccaaggagagatgaa

SEQ ID NO: 213515 - DNA, 567 bp, Homo sapiens
cctgtggccacccagggggaatgtgaccagggccacagggaagaacgtcactgagccagacctcctcacccaaagtcccgtggcaagaactgcccccaggcaggcaagtggctctgcagagataaagtgacggggaagaaggaaggcatgacaaagccacactgaagtcctagcaggaacagggcaccatgaggggaaagttcccaaggactccagattcttggaacaagagcttctcggaacaagagcttctcagttaccctagccaagaagaggcaggggtgtgcagggaaataactgcaccaatgagctcaaaaactgcctttagtcctaaaagcccattctcctcagatgtgccagagtgtctttcagatttgcaaatagtcataaatgcctcctatgtgccaggcaccagccagaaccaggtagacttggtttaaaccttcactcctgtcctcgcaaggtctgtgatgttaaagtccccaagcctcagtgattattccccctcagtatgatgaaaataatatcgtcttgcaggccggacgcagtggctcacacctgtaatcc

SEQ ID NO: 213516 - DNA, 203 bp, Homo sapiens
accagttaggagcaatatagtacctgcatcccctcagtgctcctagggaatgctattggcttctttgttagacctttgaatgtcactgggcctcagtctcccaagtagttagagacacttccattgcctctgtccacagctgagaactgtcacaaatagaaaagactgaatctccaatgccttaaattaagtgaaaacaactg

SEQ ID NO: 213517 - DNA, 439 bp, Homo sapiens
ttccgtcaattaatgctgaaaccattctaggagatattccatattcccagtttcactgagaagggaactgagtctcaggaaagttaaactaattgctcaaggtcacatagctcatatgctgctgagtagaaatattgaacccagatttttctcccaaggccaaagattcttttatgagagaggctccctgctagcattcatccaactaggaaatgaaagatgcatgaattgttatttcacacacatcccaccactgtctatgcttctacttcctccattcaacaggcaaagccaatttggtgcacatctgatgccttgcttgaatttcttttggaaggcataaacgatgacgttagtaccaactgttttgagcagctgcagaaaatcattaacccaaattgctcattacacctttatagacaccaagcaaatctgcctg

SEQ ID NO: 213518 - DNA, 396 bp, Homo sapiens
ttgagcctgggaggtcgaggctgcagagagctgagatggtgccactgcactccagccagggtgacaaagggagaccttgtctaaacaaaaaaaagaaagaaagaaagaaaaagaactagaaatgcaaactcaagcccctcctatccccccagacctacagaatcagaattactgagagtagagctcaggaatttgtgtctaaccagctctccaggtggaggtcaaaggaaacggtggaaaaaggaagctaaagtttgagggaaaactgatctaaccaattttatttacagatatttggatatttatataatttaaagatctttgagcagaattattccattgctttaactcactcaacaacccttccctacatgaaacaaatctcattattggtta

SEQ ID NO: 213519 - DNA, 924 bp, Homo sapiens
agatgccctctccttgtctgtttactgaatgtgtttccagcttgcagagtgttactttcaattctgcaaagaggaggtggggagggcagcatgcactaagatgttcctccccgcatcccactaaccccaggaaacagatggtaaaatgcttaagacactgctgcttccctcagcacccttggtgccccaccccccagccccagacttggctccttctctcctaaggctgaaatgcaatcagcccagatgggctctggcagtcaactctatccttctaactctgggcaccaagcagggtgggatgaaagtctgtatttagtcagctattttccttcttcttcccgcaaacttcccagccttcctcaatcctcttaaacttgtgttcacattccttttttaatactccaagtgccatttctcaggctgtagcttaactcattctacatcagtctgacagcaacacattcctcctgtgtgcagggttctggaccaggcagggagtgattgggctggcgggggaggtcatatgctggttaacaatatatgaatcccaccctggtactcacagttgatgggaggaaacagacttgcccgtctataagcccagtgtagggagaagccccatgtggctggagaaccaagtcagggctggggaagcaggtggcttttatggcagggcagctaatgggtctcaggcattctcctttctgagaaggtgaaaggcactcaaggaggaaatgcagaagcaaaggcaccatcagaaagagccaggcatgtataggcaggaaccagtagatacagagcctgggagataaacctgtgaaggcaggtgggggctgttcgtggaagctcttgaatgtcaagtggagactgatctgaatccagtgagcaatagggagccattgaagatctatgagctggggg

SEQ ID NO: 213520 - DNA, 666 bp, Homo sapiens
accacagtaagacctggcaaagtgatcaaacatgaacacaaattgttataggatcaaaactgggggaacaactctttttttcttggatggggttatggtcaaggaaaattcaggaaggaagaggtgtttaattaggtgtttgggggatgagtagaggttcatgaaagggaaaaagggcattagaacttttgtggtgacaaggacaaacttagagctctcctcctataaccccaaatctcaggaaagccttgggttgcggcttactttgatttaggtcttgaatcacaccatttttgttgggtttgtctttctacatgtctttttgcctttgaagtgatccagacaagcttagcagtggggtttgtaaaaacagtgtaataaacattgcccatttgccaggactgtcctctgtgtagctctcttgggagtctgtagaggccgtaggtggctggttaaaggctggggatttgggattatcaccaaatggcctccttgaagatacagcacacaaggacaatccagaaagagggaacagcataatcccacaatattttgtttgccaaatggaaatctctttagtgacaaacatttaacttagcaccaggtgtgaccttcagttatgcaatagaattgtggatcagctaggatgaaatttcttatttccct

SEQ ID NO: 213521 - DNA, 521 bp, Homo sapiens
tgagatgaagattagtgggtaggagatttggattgccacctgtggaaagaaaggaaactccactgggtggaggaagaatatggactatgatgcaatctcaaaggtggccttagctgacactaaggggaactctgaagctaggatggtctttcagattgttctaatatggggcaatgggactagtctttgcatgcagcctggcccaagaaggaagtgtgacttcagatgaggtggctcttttcacttaagagggcaattctactgacagctgagggccgttgggtgcacactgccagagcgagaaaacaaaatcctctgtagggaaggggactgtgtggcatatcacagcacaccccgagaacaagggagcggctcttcatcaaataacacaatatgggcccacatattcccagaggctgctatagtgctgggcacattagtgctcaataacttattgaattagtattatcatattgtgctattgccatcctcatcttttaaagtcacttatcacttaatgg

SEQ ID NO: 213522 - DNA, 463 bp, Homo sapiens
ctgagatgtggatctgacccaagccaggtcaatgagacagtctggccctttgctaggatgacgaggaaagacaggctctcttcccattagaattgttaacactggtggccatgttgccttcaaaagggaagagaccacccaagatttcagtttacagaaaggaaagaaaatatgacagagggagaaaaaaactgtgataacattgagcaccacacttggagccagtgctacccctggactcataagttcctggagagggggactttgcttaatatttttcaaatctgaatcccttatgcctagaacagtgcctgacacgaaggaagcaatcaataaatatctgttgaataattgagctgataaattccttttttgtttttcttttttgtatatgtaactggtttgttggaagtctcaattcattggggagtataaataaaaagtaactttatttttcccagta

SEQ ID NO: 213523 - DNA, 278 bp, Homo sapiens
agttattcagggcctggaaaaaaaagtcaatagcgctcaaactggtagcttcaaacagctcacagtcaaggaagctgtgttgaatgtttcagaggtcactggggtgtggatgtggttttatgtcacagagatcataggtgagtgtggcatcactggctacaatgtttgaagatccatctttaacatttgatttatatttgatttatgatttgactgttcttagaccatatgtgatcagactactatctgaataaaatgtgtcaaaaattttaaattta

SEQ ID NO: 213524 - DNA, 521 bp, Homo sapiens
caaactctggaccttgtaatctgcctgccttgggctcccaaagtgctgggattacaggagtgagccaaagcacccagcctagccaccacttcttatgcaaatgcctgaagctggcacatccctcacccagatccccccacctcacccccaggaacagcatgactcagtgagcctgggccctacccaggcgtctccagggagcgtgggccaaaaagcgtggatgccaaaggcccatgtcggagaggctgcaaggccagaaggttcctccaaaactctgccggtcaggtacctcacagtgacagaattttagctggggaggtgcgactccccagagggtttgcctccccttgcgacaccccaagtggcccaagcctcctttccctccaaggagtctagaccccgcggcccgagctgggaggaggccagctggtgaacaagtgtcctttgtgcttgcagcaaggaccccacctcctctccgcacaccccagccagggcagccccactctgtccatccctgaggt

SEQ ID NO: 213525 - DNA, 570 bp, Homo sapiens
ttgtaagacagtacatgtcttttggttttaaattttatttgcatggtgaagccttggagaattttctgagggtatcagagaagaaactgttggaaaatccattcaaatttaaaatgatctaaaaattaatcaaaatcattacattcaagtttcaatatatttccaaaattttcattttattacacatgtcagtcatctatacagataatggaaaccaaattggggggaagaaggttttcttttttcaataccaatcattattttgttcttgaaacaatgaatgacatgaatttcagtaactgatttttccaaggatttttggactcaagtttcatatagtctagagatactggtgagtagcaggtggtttgtatagagaaaaatggaaagaaaatgaaacataagtaactgcaatgtaggtggagagacatctttaaatggtgggtactcaatagagtgaatgtaccttcataggttactttgtaaactaatcatgttcaaaataaaagggacgcttgctaaataccaaattatgaatctttttaaaaaaacaaaaaattctttcctaaa

SEQ ID NO: 213526 - DNA, 177 bp, Homo sapiens
gcgccccgtctgcatctctgtcttcatctgcctgtgtctgtctttactcctgtccctctgtctctccatctgactctctgtgtgctgcgtctcccctcaactccttctccttctctgcccctccttcccttcctgtccccatgccacctctggctctctgagcgtgtctgcccccag

SEQ ID NO: 213527 - DNA, 447 bp, Homo sapiens
atgctacatcacaaacacacgcaccgcacacatcacacacacaggccaaactcctgacctcacacacacaccatcacacacatcccaatcacatctcatagcccaatattgtaagagtggtatcctagatcctgaatttcaaatgccatgagattagtatgaaaacagaatctgattttcttattttctatttatttgttttttgagacagcatctcactctgttgcccaggctgcagtgcaatggcacagtcacagctcactgcagcctcgacctcccaggctcaagcagtcctcccacttcagcctcccaagtagctggactacaggcatgcaccaccacaccctactaatcttttttaattttttttttggtagagatagggtgccactgtgttgctcaagttggtctcaaactcctgggctcaagcaatcttcctgcctcagc

SEQ ID NO: 213528 - DNA, 629 bp, Homo sapiens
gtgttttgatggaaactaatccatgatttagggtaaatggagttattgtgcatgaccatgtggaatatgttatcaatatgagtcaatcagaatcactaaggtggtattaaactgcttatatgtcttgtttataattagttgtgttattgtctttgttacttgacttccatattacttaactgttgatgtggttaatcagaacatgagctttttgagggtgaattctatgcccatatctctcaaaggcctaaataggaatgtttgcacacaatacttaaaatagtttttccactaataaagatttctgatacagattcaacatactataaaactgatttcaaccgggtgcagtggctcatgcctgtaattctagcactttgggaggccagggcgggcagagtgctttgagctcaggagttcaaggccagcccggacaacatggagaaaccccatctgtacaaaaagtacaaaaaaatgagtcaggtatggtggcttgtgcctgtggtcccagctactcgggaggctgacgctggaggattgcttgaattgggaagtggaggttgcagtgagccaagattgcgccactgcactccagcctgggcgtcagagccaaaccctctctgtcttta

SEQ ID NO: 213529 - DNA, 190 bp, Homo sapiens
acgaacacgtttagcacacatggaaccaccataggccctgctgacatgtttctttgttttggacaatctcataagaactttaggtcttacagcacgaacccctcgaagtcggcctgggtacacaccacatgcagattttggtgctttcccaaccttcttggtataaaggtgaacaattctattaccaggg

SEQ ID NO: 213530 - DNA, 370 bp, Homo sapiens
ctgtgccgaggcctcccaactccagctgcctcacagccctacacatccaaggcttgctttaaatctcctaagtcctgaagaaaatgaagacagaaagaacagcacctactttcaaggaaaaggaggccacgcccctcagcggcttcaggagcccagacctttgggggcccaccttccgcagctttccattggccccacggtggaagcccgtaggttcaggccctccgaacacagctcgctttccacaccagcggggccgtaccagagcaagaccatgtctcacaaaataataataatacttaaaaaatggtaaattttatgttatgtatattttccacactataaataaatatttgtgcatgtatatata

SEQ ID NO: 213531 - DNA, 462 bp, Homo sapiens
tggaatgtcaatgcccaataaaacaaaattgtataggtttacgtcaatgtcagggcatcagctttcctcttgtatgagccctacaaacattttcacaaaaagacatcctaacaaggaagtattcctctgcagctacaatctgatatttactatactataccttgttcaacagattactaggcatcatgagttctgaaacaaaacataaacactttaaaaagttatattgaatacccttttagaatgttatattttcaccttaagaatattgtggtggaaccagaatagtctcaaagaccagttaaagcaggggaccccaacccctgggcaatagaccagtactggtccgtggcctgttaggaaccaagctacacagcaggaggtgagcggcaggcaagtgagggaagcttcaactttatttacagctgctccccaaccctcgcattgccacttgagctccac

SEQ ID NO: 213532 - DNA, 426 bp, Homo sapiens
gggctgctcagcaataaaaaagaatgcactgccagttcagcaacatgggtaattctcaaatgcattatgccagttgacagaggtcagactcaaaatactatgtacagtgtgattctacttatatgacactgaaaaaagcagaactataaggacagaaaacaggttagcggttgccaaggagtgggagaagcagccagggagaactttgaggagatgaaaatgtgccaggccttggtcggtggtggtacgtaactgtgcatttgtcaagactcagtgctatatgctgaaaagggcaggttttactataagtaagttgtacctcaataaacatgatttttaaatgattctttggtttttgtttgttgtggttcagttttaaggtttcccattctattggttttagattctaagttgtatataagcttc

SEQ ID NO: 213533 - DNA, 227 bp, Homo sapiens
tgagactccatctcaaaaaaaaaaaaaaaagccttctttaaaatctaaccttaaaatggtcaaattcgtcaataggttagacctaggcaaaaggcaggtttttttctttcttatatatggggaattagccccatcatgcgaagggggttcagttcctctttccgttggagagaacctctttctgaaagtgagaccgcatagcggagcagttcaggtgtactttactt

SEQ ID NO: 213534 - DNA, 395 bp, Homo sapiens
caacgcatctttctgaatgctaagcacattgcgatagcatcacccctgagtagtactcagtggaaaaaggtgagcacgtattggagaacattccttgtcagacaacatcgaggcagttccagagttggggtgggtggggcactccccatgcagggagaaggcaagaatctgtccacacaaaggctcttaaaggcctccagtcaagaaaagttactcagccccagtgtgccactgtgggagcatcctcattctctctgtagaagccggcccacagtctggcacacctgttttctgttcatggtgcttttacaaaaatagtagtcagtgggttttttttctgacttgaaaaggcatctatgctcattaataattattcaggaaagcaataacaacaa

SEQ ID NO: 213535 - DNA, 420 bp, Homo sapiens
aacacagttgacactcctgctccaaggcaaatattgtctcttgtttgagagatacatttaagtctgtccaaaatatgataaaaagttccagaagtgcagtcagtttgaatatttcaccattaagtagaaaaagcttaaaaccatcaacataaatgacagagagaagaaaacagcaagagaaggagtttctgccataagtcaggtggaagtgtttttgtttctttattcaacactgacttttgatgtcttaaagtgagtctgatttgacaaggaagataccagagaatagaacggagacatgtggaggaggcgagggtaacatttttctgtgcactgcctttcttggcatgacctttgtgagggaaagagggaggaaaaatgtgtgagacagttcggtggcaagtgaaattactgtgttta

SEQ ID NO: 213536 - DNA, 517 bp, Homo sapiens
agatgtccttgtccttggaaaagtatgccaagtggcaggactgactgttgaactaaagtctgttttcatttgaagagtttgtgttgatccactgctggagatagtctcagaatttgaagaaatgtgtttgctgtttgtagttagaaatacataattggctccagtgaattatgtgtgtgacctaattaaaactaggatcacctgtgtgttttccagaaaataaattccttttaagtgtgctgacaattaagtgccttaagtagctttaatgctgtgaggcataattccatgttataagatggtaattcatgtcacttataattaatactcaacttgaaattgccctgaggattttatttctttatcatgaagaaaacaaataggcatgcttactttaatttgtcttgagtggaaaaaatacgaatctacttgaatttaaaatccaattacatttataatatattgcattaaatctttccctgttatccattactatgtagaagaccctaagattcaa

SEQ ID NO: 213537 - DNA, 533 bp, Homo sapiens
caggccttgcagcttcctactgtggtgagtgacttggacgaggcatctgggtaaggacccctggtggccactgtgaggataaatttgtggccacttggaggcctgcaatatattttctttcagtctctaaaagaattaagctatagttctgtccaaagtaaatttctttactatcttttgttattgttgttattaataaaagtgcacatggggacaatgtggaaaataaatacatttcttggtacatctactctttagcatacatggcccccattaaaaaaaactcagaataaatcaagagttttagaaaaaggaacaaatggactgttctttataaaacaagatacctttattgttgagaatttagaaattacagattgaacaaaaaagtatcatgattaatgccaccacttagatataagtatcgtaaacgggctgggtgcggtggcttatgcttgtcatcttggcctcccaaagtgctgggattataggtgtgaaccaccgcacctggcccaaactcgctttttcttttg

SEQ ID NO: 213538 - DNA, 1089 bp, Homo sapiens
tagctaatgggatgaggcatttcaaggttgaacttcagcaagagcaagtgggataaagggcaaaaagcagcacattcctttcaaaatgtccccattttaaactgcaggctagagtagacaatggaaatatatgacatataaagaaactggtgagattattaagcagagggccttctggggagcattaaagagtgagcaagaaaaatttctcagacatggtgattctagaattgaaaaatcatagactctttctcttctctctcctttgagagtttccagatgaattcttggatctggctactgagcaaatatatgaataataacctaggatcagctgggtataagaggtttccaccagaagtccatgaaaaccaatgtttttaagcatctattgggcaactaccataaacaatcagcaagatgtttaaacagttgattctgccggcggcccaaccagtttttaactgtatcacgaaaactggcctgggggtacagtctgagattattccagccctgcttttacaccgccagaaattccctttctgttacaaatttctaccccagagaggtttgcatattcttggcattttcactgtgcatcagtgaatcagctagcctacgggccaaggagaggggaaaaaaatcccaaataaaactcaacccagttaggatgtcttcatctatttttcagtgggaaaaaatacagctggactcagtgacttcagtcaaaagcaaacattactagttgcttcatttttctaatttttatttttgactctcaagttttggagggcataataaagacatagcctcagcaaagtcacttagaagattgagttcgttattttgcaaagcttgggtagtgacacttctgcaaaatgcacaagcacatgagcagagagatgtgtgaattcaggaaagcagccaaatgcacatcagagctgaggaatgtcacagcgaaatgaagaaaacttgtaaacacctatctgtatttttaggtagagaatgttctaacatattgccaatgggtgctgcctgtgtgttccttcccctaagctttaaactcaactgatattaaaggtgatttga

SEQ ID NO: 213539 - DNA, 634 bp, Homo sapiens
caggctggtctcaaattcctgggctcaatcaatccgcctgcctcagctcccaaagtgctgggatcgctggcgtgaggcagtgcgcctggcctgtagttttattctcgtgtatttacatagttattgcatgccatgtccacgtaagtgaaactacaatccccagtgttcctgcactaagagtaggtgactgaggagacgaatccacagccacagcctgtctctgcccagagggaacagccactccagctctgctgtattagggaagaaaatctgtgtgagcacttacgtgcaaggctctccctatacaagggagaccctctattttccaaacaaacttcaccttctattcagtgataagccacacattttacaagatgtggctgaggctgggcgcggtggctcacgcctgtaatcccagcactttgggaggttgaggcaggcggatcacgaggtcaggagtttgagaccagcctgaccacacggtaaaaccctgtctctactaaaaatacaaaaattagctgggtgtggtggcgcgtgcctgtaagcccagctactcaggaggctgaggcaggagaactgcttgaacccgagaggcagaggttacagtgagccgagatcgtgccactgcactcca

SEQ ID NO: 213540 - DNA, 106 bp, Homo sapiens
cagactgcgtgtgtgataagctcatggaggctttttggggagcagtatcaattgctgccaagggtttttgctataacctataaagccattttgcatctttcttacc

SEQ ID NO: 213541 - DNA, 417 bp, Homo sapiens
agtatgctgccttaaaattgtttttaattaaattcttttttaaaaattacaaaagtaatatgtattcacttgcaactagtgaagtagtacaaagttatataaagatagtgttaataatccccctgtttctccaagatagtgttagcagccgagggtgtattcttctatacatttatacacatatagacataaatattcatatataagatatataaggggttttgtatgtggcttttttttaatttaaaaaatggcattatattgtacatattactgtgtagcttatggacacccctccaagtagttacagatcaaacattgtatatagctttgtttttttgttttcttgttttctttttgagatggaatcccgctctgcactctagcctgggcaacagagtgagactccaaaaaaaa

SEQ ID NO: 213542 - DNA, 353 bp, Homo sapiens
ttttgagatagtctcgctctgtcgcccaggctggagtgatctcggctcactgcaacctctgcctctcaggttcaagctattctcctgcctcggcctcccgagtagctggggttacaggctcctagcaccacgcctggctttttttttttttcttttgtatttttagtagaggtggcttttcacctgttagccaggctggtctcgaactcctgacctcaggtgatccacccgccttggcctcccaaagtgctgggattacaggcgtgagccaccgtgctaaaccgccttctattaattctatctgcagccacaagtccttatataatccagacattcccttctgtcgtcttctc

SEQ ID NO: 213543 - DNA, 773 bp, Homo sapiens
tgtagtggcaggcacctgtaattccagctgctccggaggctgagacaggagaatcacttgaacccgggaggcagaggttgcagtgagccaagatcgtgccattgcactccagcctgggcaacaagagcaaaactctgtctcaaaaatatatatatataagattttaaaggacaaaatctgtacaagtggacagttactctttacctcagttactcttgcctgacattatctgccaaggcatcataaaaacagtatgtgcccttcaaataggtttaataatactaggcttacaaaaaacttccatactgtgcttacttaaaattatgctcaatgtatgccaaatgcttaatcaataaaagaaaaactatgccatacaaggagggaagagggagttattaagcaagggagttacttagcgggggagttccagtttagcctcatagcagtttagtctaaacaaattttttaagttattttttaataggcttagcttgaaaacccaaaaactgtcagctggcttacagtttaaatattaaaccatgttatgtttattactgaatctattattcaaaaattatgtactatcctagcaccaaaaatcaaggaaactgggcacttctcatatgaatgaaactaaataaactgaagtcaagagaccacaaacaagaatatagttaactccaagaaaataaaaatttctgcctttaagacagttattggccgggcacagtgctcacgcctataatcccagcactttgggaggccaaggcggt

SEQ ID NO: 213544 - DNA, 560 bp, Homo sapiens
ttggtgtaaaacttgagacctttagagaaggagccctttgagattcctcttagaaccacactgccatcatcctctgcctcccttgtgctaatctcttctgactccatgactcctaaatattcttctggggaaaagcaatattttgaactgagcgacggtatgagtttcagatcccagcgtaaatcctgacttgggtagatgaaggtacgggatgtgttatactcagtctcatggaatgtcaactctgagtgttagagaaagtaattcttccatagcaaagtttctgaaaataataggactcaagaaaactcattgagtccaaaatgttgatttcagcaggaacaaagcaagtacaacctgaccccaaaggggaatcaattttaacaaacgtgtggaaacagtctcagaacggaacacatctgagttacttgtaattaattgactttaaaagtcatgattaaaacctatccagtggcccttaaaaaactgactcagtaactttgaaaataatctctgtattgacatggttcaggtaacggaccctcaaaatggaagtgtta

SEQ ID NO: 213545 - DNA, 346 bp, Homo sapiens
cgcacccggtctccccctctttgacgcttcttggcagctgtagtctcccccagtcctggccaccagctgcccccacccgtgagcacctgcccctcaccatgtttggtgctgccaggctttgtggagtgcctttgtgcacaggagtttggccttttgacttcttccctgggagcttaaaccatcgatcagggccacgaggtaggcgctgggaccttcttggacactgagttgcctcttagaactgccctgcccctccagccacaccccaaccagcgccggctgttcgtttatttttagagatcattttatgttctgaaaagactagaaagtggtaagtcctttcttc

SEQ ID NO: 213546 - DNA, 364 bp, Homo sapiens
ttggaaaaatgctgaagtgtggacaaactggtggtagatatggcaatgttcagggaacctgtcaaaatcaaggtattgatcaggcacagtggctcacacctgtaatcccagcactttgggaggcagaagtgggtggatcacaaggtcagaagatcaagaccagcctgaccaacacggtaaaaccccgtctctactaaaaatacaaaaatgagttgggtgtggtggcacatgcctgtaatcccagctactcgggaggctgaggcacgagaatcacttgaacccaggaggcgaaggttgcagtaagctgagattgcaccactgcactccagcctggtgacagagtgagactcagtctcaaaaaaaa

SEQ ID NO: 213547 - DNA, 534 bp, Homo sapiens
ccaacacacagaggactaaagcagagacgatgaacccaagttgatgctcaaccctgctacctttggcaccctggttggaaagctctgagggcatgctgcttctgtattctcaggcatgctgtatgggcactgccagccagcttcagagatgggtccaggtccttttagacatgttagttgatgcccaacctctagggacacaatttctttctgcagtggattcatgacctaacctgggcaaatgagccttgagaggacatatgctagaagctcatggaaaagaaactttcttgcttttctgaaaaagctactgagagagcccctttactctttctacaggatctggaggaggaagcaggcaggccctgggtctactggcaaccatcttgtgatcatgagttgagactatattaccaggaaatgatccctacagaaggcagagtgcagagaggaagaaaacaatctgaggacattattgagtgctgtattaagcgcagcaaattacatgggccaataaataccttttctttctta

SEQ ID NO: 213548 - DNA, 224 bp, Homo sapiens
gcctgggtgagagagtggaccctgtctcaaaacaaaacaaaacaaaaggcaaaatgctggacaaagtggctcccaaaagaagatatgtgaagcacatgggacagaaggaattttaatctttctaaaaatatatatttttcctttttttttttcattgtcataattccccaaagaactttaatcctggacttctctcttcctaggtgttctggcttgcgggctcc

SEQ ID NO: 213549 - DNA, 712 bp, Homo sapiens
gctggtgggattgtaaaatgttgcagtgactttggaatatagtttaatagctcctcagaatgttaaacttacccaacaattctacccctagttatatactcaagataaatgaaaacatatgtccactcaaaaattcatacacaaatgttcagggcagcattatttataatagccaaaaagtggaaacaatccaaatgttcatttaccaatgaatgtataaataaaatatggtatgcccatacaagaaatattaattagcagtataaaggagtgaggtactggcacaggctacaacatagaacttcaaaaacattgtgccttgggaaggaaatcacaaaagaccacatattgtatgattcaatatttaggaaatgagaataagcatatccgtagagatagtgtgttaatggttgccaagggctggagaagtagagctaaaggttgtggggcagactctgtgaccgtgcctgcggtctcaactactcgggagtctgaggcaggtggctcacttgagtccaggagttcgggctgtagtgtgctatgctgattgggtgttcactcgtgccgaattcgggacgagcacaggtgtaagctcgctaacaggttcatcagtagctgactagcatagttgagatcccctcctaatgtcggccaacgtgggcagggggtggttcccaccctgggcccaggaaggtgttgccggacggcaggg

SEQ ID NO: 213550 - DNA, 474 bp, Homo sapiens
tgctgccttgaacttcctacttacttcattagcagattgtcaggggagatgtgtcagctatcctgggaccccttggcggggcggggggggcgggggcagccccctccccagctctgtactctggggccctcacccctgaatcctgggaaagcttagcacctaagagtaatcctgccggcttaagaccctcccctgctggggtttctttttaaggacccgtgtgacaaggtgctgatgaatcaacgttatcacctctgtcaggaataataagtaaattttttgagagtttatgaaatgctgggaactaagttagcatttgcttgcatgatctcattatatctgtaagacagcatttctgaaactacttgctacaacccatagtaaaaactatatggtacgccatgacccaggacacacatgtataaacatcccataaaactgaagcaaaagttcccagaactcatacaaaacctt

SEQ ID NO: 213551 - DNA, 463 bp, Homo sapiens
acagaataagatgaagtataaataaataaattctattaaaaatataaacatataataaataacataaatattcaacagtaggaggataagtgaataaataatagaaagtccatttttgtagagacagtgttttgatagaagatgctcatgatacaatgttaaattaaaaaggtaaaaagcaagaagtgatcctactttggttttcaaccagcaggctgtgcggcttaatatatttactgctgttcttagtgcacaaaaggtacttacttacttttaagaattttttaaagtacatcaaaatgtgcatgtatacacgtacatctgaatctgtatcttcatatgagttttgaataatgctttgacctgagacctgagacctgtagactagtataaattgagctttaaatccttacagcgacctcagggagattttattaccaacttgaggtcataattgtcttag

SEQ ID NO: 213552 - DNA, 213 bp, Homo sapiens
gggccctggccttgtcctcccactgcctattgtgggccacccgaggcctccacactccccgtcacatgacagcgcccaccttgcagcaatgtacatgaagggcccagggccccctttcctcctgtgaggcccagcatgctgccagacacatgcgaggtccttggtcagcacctcggggtcacaggacctgaggcctctctctggattctgacc

SEQ ID NO: 213553 - DNA, 153 bp, Homo sapiens
tgtactatattaaatttggtcttactagattttgactatttggggttggacagcatggtcccatatagccataaaattggaaactgaaggccatttcttacttcaatggtgtattgaagccatttgaagactccccgccccccattctttttt

SEQ ID NO: 213554 - DNA, 501 bp, Homo sapiens
tccctgactcaagaagcatcccatctggtcaagcatggggggacatagctgatagcctagcttcctcggggataagaagcaggatgacctggatgaccctccccaggcaaacgtgtctccagagaagtgaagagacactgaaagtgagggggagagctgacagcagcagaggtcccttctaggtggggactgtgcttcaccaggactgctgtctaccttcagccttgtggactccccttggtggatctctgcacagcctctgttgtcctccatttaaaataatgaggctatttaatacttcatgctggaatccccaaattattccaacatacaaaaaatctttgaagtccctaggaagagattgtatacagcctcaattttaatggaaaagggggctaatatatatatacagtgttttggttttgtataaaaaataagtcaaagattgtccaacagtgagggtagctttttttattctgcactatggagtgttgagttcat

SEQ ID NO: 213555 - DNA, 271 bp, Homo sapiens
ttttttgaaaaagtaatttcaacttttagattcagggggtacatgtgcaggtttgttacatggtatattacgtgacactgaggtttggggtacaaatgaccccatcagcacaccatggaatactgcacagatataaaaaaggacagtggtggccaggtgcggtggctcacgcctgtaatcccagcactttgggaggccaaggtgggcagatcacttgaggtcaggaatttgagactagcctggcagacatggtgaaacccagtctccacta

SEQ ID NO: 213556 - DNA, 173 bp, Homo sapiens
agggcaggccccaccctcaaaccaatggtttgtctatgggcaggaggggtgattctcacttcaatgtcctgtccattcaccaccctacatcctggacatctcccctggatgccgctcgggtgccccaactctactctgatccctcaaactttccccgtcactgcacagggcca

SEQ ID NO: 213557 - DNA, 453 bp, Homo sapiens
tccggtttctccccatttgtatctctcctcccatttcagagtccttccctcccttggcttatgtactagggacttgatggccccttaaagtgtgctgatgatattcagagggcaagattttgcctgcacctttgttctcttttgctcctgcaaggctacttgtggatcagagcccttgatcccactcagaaaggaccccatcaatgagaagcttttcagtggtgtgtcctttcacccggacgtcactcatatctctttgtcacttgttgtgtatgtcaccacgcagtgatacacccctgaactagatctttcaggacagctttggtgacacgaagctgccacttgttgttgttctttttctcctctttctttcttcttcttcttcctttttcctttcactttcagctctctgcgggacaaatgttctatcgagactgcttcttctgctcattg

SEQ ID NO: 213558 - DNA, 438 bp, Homo sapiens
cacacatttaaaaatcatcatagaaatccccaagaacatcagcatctaacctaggaagctacgggaggactgaaggctgatgaactgactagatggggctcagggccctgcagcgatcctgctggcctgccagccactgaaccgtctcaggcagcaaaggaatgggtatgagtgctacgctagattctgtatcatctcaatcacacgtgtgtttagtttcaattaagcatttgcgccaatggcactgggatgactaaaggaacacgcaatgattctgaggaaggcgtggacctacccaggtaagaggtcttgggctgggagtgggggagggaaatccctttcagtactaggctggccaagaaccacagacctcaccaaacaagccatggggccaaaatgctggacctgctctctctgcttctaaactacacatgggtt

SEQ ID NO: 213559 - DNA, 477 bp, Homo sapiens
cactccttcaacccaaaggcaggccagagtcatgtagtgccaaggcactgtatttgtttcccagtacctagaaatggcctgcacagaactggcactgagtgaatgctttggtgatgcttttaagagatgtttggtggggtttcaggaaattggactttaacatggctgaccacattccttctatctgctcactacatatattgtatatgtgctgaaaatgtatctgatttctttccttcctctgttgtttagcaaaacagacaaaagtgcaaacttagagttggagggtaacctccaagagaaaaacaggctggtcagtgtcaaatacaagattttaaaatattttcttaaacattaaacaaatacttcaaccattgagaatcattctaaagaaattgtctgaaatgtaaaatgtatcaagatattaattatattgttgatacaagataaaagaaaaattaaatgtcccaaaataag

SEQ ID NO: 213560 - DNA, 454 bp, Homo sapiens
cttattcctttttttttcagctatagttcctttattaaaagaacgagatgaaaaaatagactttgagaaatttttttacctcaattttacaaatactgtatcacaaatgttttgcaatacaaatttaaatatagcagctttccactttcttaaaagattcttggccgggcgcggtggctcacgcctgtaatcccagcactttgggaggccgaggcgggtggatcatgaggtcaggagatcgagaccatcctggctaacaaggtgaaaccccgtctctactaaaaatacaaaaaattagccgggcgcggtggcgggcgcctgtagtcccagctactcgggaggctgaggcaggagaatggcgtgaacccgggaagcggagcttgcagtgagccgagattgcgccactgcagtccgcagtccggcctgggcgacagagcgagactccgtctcaaaa

SEQ ID NO: 213561 - DNA, 525 bp, Homo sapiens
accagtctgttttccacctcaaaggggccatgcttgttcctttcacccgttatcccccatctctacgtccccagaatcactcactctagaatccttccagtgaaaaccgcaggctccaccttgcctctcgtttgaccattcttgggttttcagggtgaatctcttcccttcaatagctcccacccttcatttgcacagtacgcagtatttaacttttctccacaggttccaaaggctgatttcttgcaagcaaaggccacctgatgtgtctttttttacaaatctctgctgaacaggtaacaggtgcccaataaaactttgtgagttggcagtctaagggcatctaccctcaaaacagctaacgtagcattttatgggagtggaaacggagtcgtgtggaaagacgaccaggcactttcgtttttgagatggagtctagctctgtcccccaggatggagtacagtgctgcgatctcagctcactgtgggcatgcaccacaaagcctggctaatttttgtattttt

SEQ ID NO: 213562 - DNA, 432 bp, Homo sapiens
tgtgtgtgaggtgaccagggtgatttaggagcaccattagaaaacctgacatcactgcttgtggttctgctgaccgtttcagccactggcttgaatggagtcattttggcttcttcactggcacctctctgaatttctaggaatgtgcctttacctttaccgagggcccctcttcagccaacattctcacgatgtggaataattgcttggaagtgtagaagggcttctcattttgagaagctgatcatccttccaggttgagccacaaataagtcctcctcctctactccctggggacattagttctggtccctcatctctaaaacattgatgtgcctaagagtaatacacattttggtcttcctctgaactttaatatagcttgcaaacaaatatggattcaatctgatttttaaagttttatttctaaaa

SEQ ID NO: 213563 - DNA, 448 bp, Homo sapiens
acacattaatctgtcaatattcttttaaggattggtaaaatggcttggaaaagaagctgtttctgttacctgcattgtactcctaattatcacagctctctgaagcttcaacttcagaaatgtgtagaaggaaaatatttcccttggtaaatgaacccttgctttattcaattggtggaagtttagagtagagcaaaatatttaaagctttgctatactggtctgagagcaaactattttttttccaagtgatattgaattaaaaactccatccattttctgcccatgcaaggcagtgcaattccctggaaattgattttttttttttttttcagggcttgcagtggctttccccaagctttagctatatggaaaagaacacctttattaaatccacttagtgaataaagttggcagttaatttttaagcatctggaccagtgtgtag

SEQ ID NO: 213564 - DNA, 463 bp, Homo sapiens
tcgcttgacaccaggagtttgagtccagtctgggcaacatagggagaccctgtatctaaaaaaaattaaaactaatcttccagattaaaggacactaaagagatagatacgactttttaatttttatgtgatcctggtcttgaaggaggaaatgctataaagatattgagtcagttggaatgtggatggtgaattagggaaaagtatcatatattgtcagatttcctaaaactgataactgtgctccagttataagaaaatgtttttattccaaggaaatgcacattgaattattttgtgatacgtaactttcaaattattcagaaaatctatgtgtttagagaagaaaaatatggggcaaaatattagtaattgttgtgtttgagtagagtacacaggacttcattgtattattcttctaactttcctgaaagttcaaagttacttccaaatagagagctta

SEQ ID NO: 213565 - DNA, 365 bp, Homo sapiens
gcggccagcggcattctttgcgtgtttcctgagcacggatcccagcttcgtggtcagctcctcccccacccagcctgcttcccggcctgactcctggtagctcagagcagtcccctctcctgtcctgcccagggtcctcccccagttcccgtctctaccgtggacagatctggacagagaagggaaactcccaggagcttggccactgggccttcggtgggggttgggggacaagtggaggttcaactccatcccagctccagctgactttggtgggtttcgccgagcctctgttgatatgttctcatctgtaaagatggggaaaataaccaccccttggggctatcaggcagattcaatgtctc

SEQ ID NO: 213566 - DNA, 193 bp, Homo sapiens
cagggtgaaggagctgagcttgagtcctgggtgctgggccagagtttcctgtctactggtttattataaagaatattacagcgtttttttatttttgagacagtctcactctgtctcccaagttagtttgcagtgagccgagatcgcaccactgcactccagcctgggtgacagagtgagactctgtctcaaa

SEQ ID NO: 213567 - DNA, 410 bp, Homo sapiens
gcatttcacgtgtaaaaaagggaggttcataaagcatttcacgtgtaaaataaaacttgtctgtcttggcaggcatgggtgtcaccagcctgcctgcctgcttttccgctcatgaaacccacagaatgttctgagtgttgacatgtctttcattccaggaagaagccttttgggatcatgtatttcacagtgcagatgaaacaatatgaattacccatacaaatcaatgtcatttttcacttagaaaagtaactaggattatcagatccaagaatcatcaatcagatatttagggaaaaactgtatttagaagaatgaaaagggcaaccgataccagaagattcatgtacaattcagggattaccagaaacttttaaaaaggtgtctaattaataccctcagcagaattt

SEQ ID NO: 213568 - DNA, 579 bp, Homo sapiens
ccatttttatatattgttgatggctttggaaatagtaccacctttatggaacttacttaccaacatgctttattccattggatctaagataccatcatgtgtaagaaacatcgttattttatgtgtcaccaaagaaaaaaaatgctgccagttatcattgtaaaatgctgtcctaatttcagtgaattaaagttagaaaaagagcgagtcttaaaattgatgagatgtgatatgtcattaaccataaaaataacattagccttttgcacaacaatttggaatgtatcctatggacatcatctaatagtggggaagctttattcatggaagatgttagctgtagcaatagaaacaccagttaaaatggaacatttgaaaaatttgaagaattacttcaattttcaaacactagctcataaccacagaagtaacgttgtatactatctccagtttgtgttttatagaaagaacattgttgccatatgacactcttttacaaaggagttctgaggtcactgaccagcctgcagagcagcactcttaggttctggtgcccagccatggtccagtcatctgtgg

SEQ ID NO: 213569 - DNA, 617 bp, Homo sapiens
tagagaggtctgagtgcagttaacagataaacgtcaggtttaatgagatgagaattgcaaaagccttaagttgtggtctgtgtgcagacactgctgctaacacatagaagtagctagcataggagagaataggaggtgcttgggctggaagtgtgaaagtggaagggaggctgaggtcctagcagaagaaataactggtcactaatcctttgggtatagtcagagtgtgaagagtgttgtctgagaggctgtcagacaaaaggcaaggtctttgcagtttagacttactctaaggtcaggagacgatgtaggaagacagtgtttgtgtctccccgaaccccagatagtctagtttctaaagatgtcttctgcaataatgttctctggagcataacttttggagagattgttctgcattatcatgcttacatgataaatgaaatgaggccatgttatatatgttatatttacatggaataaaatcttctaaacagcttttggccagtcacggtggttcacacctataatcccagcactttgggaggccaaggcaggtggattgcatgagctcaggagttcaagaccagactggccaacatggcaaaacccccgtctct

SEQ ID NO: 213570 - DNA, 198 bp, Homo sapiens
gcccctcaggtgtgtccccgtggttgccagatgctggctgtgggctgggctggcacagcaggcttcttggaggaggtgggcacagcgtcgtgaccagaacaacgcacgatgccaggccccaggtctgactcatgcagtctaaagagaaaggattctgctgtcagactgagggcggctcttcagatggggcactctccg

SEQ ID NO: 213571 - DNA, 564 bp, Homo sapiens
gtcaggtttaatggcaagacagattagggaagaggaaaggaagaagcttacctcctgtgtagctaaggagaccttgttatgtagatgaaggctccctcatagagaataggtgggaaatgctgcttttcagacttttatttagacttttaagtaatagggacaggattatgctatgttgcccaggctgttatctaattctttttctcaagcaatcctcccagctcagtctccgaaagtgctaggattacaagcatgagccgccatacccagacagggtttgttcccttgtaaagaattatttgttgctggacacagtggctcacagaggccaaggaaggaggatcacttgagcccaggagctcaagacctgccatggcaacatgacaaaacctcttctctacaaaaaatacaaaaaattagctggatatggtggcacgtacctgtactcccagctatccaggaggctgaggcagaaggataacctgagcctgggagattgatgctgcagtgaactgtgattgcagcactgcactccggcctgggccacagagtgagagcccttct

SEQ ID NO: 213572 - DNA, 653 bp, Homo sapiens
gctggtctcaaactcctgacgtcaagtgatctgcccgccttggcctcccaaagtgctgggatcacaggcatgagccactgcgcccggcccagaggaggtctttttgtcaaaatcatgtctactgcctctgcctcatcaccaaaggctgctttggactactcttgccttgacaagaggctgccctctttctccaaaaccgggaggtacagctccaggagctgcccggacagaccacttcctctgtgaagcacctgctggagcgcgtcctgcgaacctggatggtggcacagccttggcttagttcctgagccagatctgaacacagaatatgaatgagcacgggacagtcttcctctgataggaggatggcactggatggagccttgttcagctgcctggccacattcttctgcttcaaccatgccccgctatagttcatccacatcaaaggatgcctggaaacccaagccatatctccatcagaattgtcctatgccctcgtctcgttattggtcaatgccatactcttagtattggaaggcagacacaggaagtaatcctcatcaccgtggtgccagcctctgcaggaccagggtgatcagtggcagggacttgtcaatggccaggctgtcacaggccttgctgctcaggtc

SEQ ID NO: 213573 - DNA, 648 bp, Homo sapiens
tttctcaatacattaagtttacgtaagcaattatgccattttatataagagacttgaactctgcagattttagtatctgtgggggtcccggaacaaatgtcctgtggatacttgaaagacccccgtggatatgttttttaaaatcattttattcatcaacttaaaagaaaaaagccacgtaagaaacaaatcctaccacaacttgatataacttttcttggagtttctgctatatggaaaaaaaatatgatttgctagttgtgtgacttgctttctttagtaacaacatttaggtgtgttaaaataatatagatgtaatgatcatattcatttaattcattacttttctcactaaatatagcagatctccaatgtgccagaaaccataccaaatgctagacataaaaacaagaaaaatactctaagacatgtacatgaaacataaattataaagttgttttaataaatacaatttattaagtgttttaatagatgcataaacaaaatgctgtcaaagcacaaaggatttcgctgtggtgataggaccaaaaaaatgatacccaatcacaaatcaacaacaagacacaactttaattttaccacatttaaagtaacttagatttctgaaggagacaaaatcataaggat

SEQ ID NO: 213574 - DNA, 206 bp, Homo sapiens
tttgaactgtcaacttattttggacactgaatggaaaggtttgatatggttcagattcccttatctacaacttttataaaatttgatcctaagaggaattatgccttgcaaactcctttttactagactaatgaagaaccaagtacaaacgctgccaataggaacttcatctttgcttttaaaatgtgtttgcccatatcatttga

SEQ ID NO: 213575 - DNA, 461 bp, Homo sapiens
tggatgtttgtaagcctaaatatccagtcaagcagaatattctttaacttttttattctttttaaaaacagggaagattttcagaagaaattgcctattgtcgtcttctttttttttgagatggagtctcgctctgttgcccaggctggagtgcagcggcaccatctcggctcactgcaacctccagctcctgggttccagcgattctcctgcctcaacccctggagtagctgggactacaggcatgcatgagtacgcctgctaattattgtatttttagtagagacagggtttcaccatattggccaggctggtcttgaactcctgacctcaggtgatctgctcgcctcggcctcccaaagtgctgggattacaggggtgagccaccatgcccagccaactgatgttagttttatagcaaaattctttcttaagctgtttaagacttaagacaggttctt

SEQ ID NO: 213576 - DNA, 350 bp, Homo sapiens
aatataagtgcttaggtacttcttaacttgatgggtccctctatcacgagtctacacttttatcagtagactagactatatttctactaccagtttgggcacatgaagttagagtatccacttctaaattataattatccatatgaataggagtttattttttattttcttataaaataaatcaatgataatcatttgattctgtgctggataaaaattattcttcatggagactgtctgacatggggaagagtgagaattctagaggcaaatcaaattgaatcctgcttccaaccataacaaaaccataaccttgggtacagtaacctctcagagactccctcatttgt

SEQ ID NO: 213577 - DNA, 598 bp, Homo sapiens
tctaacctgcaacactatctcaatctgtatctggttaaatgaattaaaaagttgaaaataaactaatttgtttaaatgcgcttgagggaaacatgttcattcttgtgagtggctttaggccttgaacagtccatagattcagagatcctgggagttagaagggtctttaagatcctctttccaactgcttctctgtgaaatctgtatatttgaatccccagggcaggtaaaaaacaagcaaaaacaccaatgcccatacccaagcccagatctgagaggtctgaatttagttgctctgggagggagcctggagatcatcatttgtcaaaagaggtttctagcatataaccaggtttgaagactattgaactagggtaatattttcatttgagtaaatgagagacagagattaagtgacttatccaaggtaatactaaacaccagggacagatcaatagtaattattgaagtccatagttatgagagagtggtggatcagaaaatagtttgcataatctgtccctcctttcccttctagatacctgtgatcagaactggcatcctgtccactttgattgagactgctgtccccatcaaa

SEQ ID NO: 213578 - DNA, 156 bp, Homo sapiens
caattgagactgaagcagggagcagggaacccctaagatgtggctaggctctatctcagaaaaaagccagtgccaaagaaagcagaacaagaaaaatgaaacaagaaagaagaaatcgaaatgacatagtttgagcacctggatccagctgcacct

SEQ ID NO: 213579 - DNA, 263 bp, Homo sapiens
ttaatacatacgtaactttcatacacttccacttactatatcttgtttaatccttatgacattctattgacaaatgcagtataatttgtatttaaagtaaagtattagaagagtaatctaagcttttttctttgaaggagtatagttgagtattatggagctggagttggagaatattgtgtctgctgggttggtgtgtgccatgcctaaattataaaactcttggctctgaacttctataagcaagcaaggatattacttct

SEQ ID NO: 213580 - DNA, 480 bp, Homo sapiens
tcacctcaaggaaaaaggatcaaccctggatagtgatgccccttacatatgtattcacagagacgaggaaagcaatcacgggcatgccccagaggccaggacattttagagctctttctctgcaatctctgcttttgggaaatctctgcttaatcaaagtatctgtttttttgccgcctaaagagtgctttcatttgtaagatccattgtgtatctgtttttgtgctttaaaagtaaatatcagaagaaatttcctgttgctgtgcagtaatcttagtcaaatctcagcttccaataccaccaaccatcaccatcagcatttcagtattttttttttttttgctttttaatgtaatttctggtgaccatttgtgtggattagtcttcacatttgtggactgagactcgcaggaatgagtttcctaacatatgtaggggtaaagggaattttccctacccttcaaatgtttgaattagcta

SEQ ID NO: 213581 - DNA, 794 bp, Homo sapiens
cgcggtggctgatgcctgtaagcccagcactttgggaggctgaggcaggtagatcacgaggtcaagaaatcaagaccatcctggccaacatgatgaagccccatctctactaaaaatacaaaaattagctgggcatagtggcgcatgcctgtagtctcagctacttgggaggctgaggcaggagaattgcttcaacccaggaggcagaggttgcagtgagccgagatcatgccactgtactccagcctggcgacagagtgagactccatctcaaaaaaaaaaaaaacatcttgagaattcaggtcactgtatgaatgacactaaaaaaatcaagtccctaaatcaggtgaagaagaagtctcttgctgtctctgcaatatcttggtgaagtcgtgcccccaaactgtcacagactaagatgtaagtttaaaatatttggttgtcctccttaaatgaaaagggatacaggtcactgaacaggaaagagcactgccaattcttcactgggggcctggactccagtcacatccatctgtcatcatgggccccatgggtgtgtatgctgtctggttcagtccaggtttgcagaactgatttaagaactccggccaggtgcagtggctcatgcctgtaatcccagcactttgggaggctgaggcgggtggatcacctgaggtcgggagttcgagaccagcctgaccaacatggagaaaccctgtctctactaaaaatacaaaaaattagccgagcatggtggtgcatgcctgtaatcccagctacccgggaggttgagg

SEQ ID NO: 213582 - DNA, 528 bp, Homo sapiens
agggaagctgtgttttccaccatcttgagaattcaggtcactgtatgaatgacactaaaaaaatcaagtccctaaatcaggtgaagaagaagtctcttgctgtctctgcaatatcttggtgaagtcgtgcccccaaactgtcacagactaagatgtaagtttaaaatatttggttgtcctccttaaatgaaaagggatacaggtcactgaacaggaaagagcactgccaattcttcactgggggcctggactccagtcacatccatctgtcatcatgggccccatgggtgtgtatgctgtctggttcagtccaggtttgcagaactgatttaagaactccggccaggtgcagtggctcatgcctgtaatcccagcactttgggaggctgaggcgggtggatcacctgaggtcgggagttcgagaccagcctgaccaacatggagaaaccctgtctctactaaaaatacaaaaaattagccgagcatggtggtgcatgcctgtaatcccagctacccgggaggttgagg

SEQ ID NO: 213583 - DNA, 238 bp, Homo sapiens
ttccccccagtggaaaaggcagatagttggtgctatggtttgactgtgtcctccaaaaagcatgtgtttgaaatgtaacctccagtggaactttgttgggcggtggggcctaatgggaggtgtttagttcacgagggctccacccttatgagtggaatagtgccattatgaaagggcttgatgctgcaagttccatctcttgctctctttgtgttcttttgcccttctgccttctgcc

SEQ ID NO: 213584 - DNA, 639 bp, Homo sapiens
tccagtgggagtagggtggggtgcaggagtctcaaataatgtgccaacaaattggcacaaaatcccttaataagcagctggcactggctgcgttccactgcaggattgtggtcttgcaaaccaagcccatgagaggattcaagagacagccctaaaaacctgccgggaagagtcttctccaatgtaaatacaaacctacacgaaccaggaccatggccaacaatggcaagcccttccaagggtaacagcagaatgttaagaaattagagaggtcatttaaaacaagggaggaaggtagctacaattccattacagcaaatcccttactggcatttacattcccagccctaattcctaacactgtgttcaatgtcaatagcaaaatgaagctcttaaaaagaattaagctttcaaagatcataaggaagttagccccctgttttaaaaagcactgcttagaaaggtccatcaaataacatttcaagggttgatgggaaaccaaatataattcaataaatatacatgggtaatactcagacatcctcatttgtctatgtaatgactcagatttgacactctgatccttgactgaacacaaagactatattccagaagaattgtgcagagtacaaagggaga

SEQ ID NO: 213585 - DNA, 389 bp, Homo sapiens
atccctttccctgagtcagcgagagcccttcccccaagtcctctcagctcctccctcctgagccccaacagtctccccggccctgcttggcagatggtcccacctgtcaggagcttggcatcgccgagtccgctcctcaagcaggcccaggggccgtcaggtgaggataattagcagagacaggctggggagggggcagagaattgccatctgggcaacgggtaagatcttgcccacccccgccattcaggcttggaacagggttggatcgatcatcaacttagtcttcctgtcccagccatagaagctctatcaaatgccagcgcttgagtccttcattccagtcccgtccccattccgggatgatggaagccatagccatgcggccg

SEQ ID NO: 213586 - DNA, 514 bp, Homo sapiens
cagacttactgtatgtcacccctccaccactattccctggctttgctaatttacctgttcctgccacagatttacctaaagaaagaacttgttcagtttatatcttttcaaccccctctggctttgcccttcacattgtgtcatcaatcctttaagtctgttctttagagccctagggaatcattttttattggagccaggaaagtgacaccacataatataagatctttcaagatgtcacagcatataatacaagttactaagtaatgaacaattatctacaaagtcagaacttagttaatatctttggattataggtcttgttcactacaaaaacagataaaaaagcagtcattgtatactgtaagagcctgaaacttgtagagtaagcagcaaaatgatacttaactttaaaaaaaagacaacagtattatattttgcaatttttaaatttatttattatttttgagacagggtcccactttgtcacccaggctgggatgcagtgatgcaa

SEQ ID NO: 213587 - DNA, 364 bp, Homo sapiens
atcaaagaaggcttcttcagggtaagagctagctaattaaatctttagagggcacaggggttagccaggtctaggactgagaaggaagggcatggtttctgcatgggtctataagtgattttgttgtgttaggaaataagatatgagcagagaatgacaaagatgactgactggtttccttgcgagctgagtactagactattagattctctagattttcacaaggccccagggcaagtagtaataggaggattctataggaatgtttatcttgctttcctcaccacatcatggtggtgtttgcagcattttacaggtattatcagttagctcatcctttgcttttatctgtagtgatagcaaa

SEQ ID NO: 213588 - DNA, 478 bp, Homo sapiens
tttttatttatttatttgttttttgagacagggtctcactctgttacccaggctggagtgcagtgatgcaatcacagcttgctgcagtcttgacctcccgagctcaagtgaccctccaacctcagcttcccaaatagctgggactacagccatgtgccattatacctggctaatttaaaaatgaagttctgggttcaagccatcctcccgcctcagcctcccaaactgctgggattacaggcgtaagccaccacacctggccaataatgtacctttctgtgctaactcaatgttccactgatacagctggctgcacaaccgcctctgagaccatgtgacacttgggcttcagctgccactgtgtttccacacttgtggcaccccaggtcccctggctctgacccctgaccacatgtagcttgctactgacatctactcctcagacacacatggaaagtgtttgggcctgcccctgctc

SEQ ID NO: 213589 - DNA, 561 bp, Homo sapiens
aagaccagcccaggtctgttaaatagcaaactgtaggtccaaatctcaattttttagaattttaagttatgaagtgcaggttgtttcctgcacttcccggatttaaaaaagagtcacacgaaggatcttggaatcagaatgacattgtatttcttaacagcaacacgtgaagttagaaaacagactgaacatagacttctttgaaaataattttccctcagaattttgaaggtgttcctccactaattattaattaaggatagaataaagatgtttgggccgggcgtggtggctcatgcctgtaatcccagcactttgggagtctaaggcaggtggatcacttgaggtcaggagttcaagaccagcctggccaacacggtgaaacctcgtctctactgaaaatactttcacatgtcacttctaggaaacttatggagaatatgtcccaccaaagtgagggagtaaaccaagaaagggggaggtttgggatcttggaaacagaaagaggcagaaggaattctcaaacaaaggtgttttcagggcagtggctcttgtagtaca

SEQ ID NO: 213590 - DNA, 413 bp, Homo sapiens
  misc_feature (180)..(180): n is a, c, g, or t
gccggtaccgcatttctcccatcagaaggtaagcagtatgaagttagggaactgttttacttaatgtgtatccacagcatctagaatagcacacgtcagagtagacactggttgaatgaaagaatgaataaactggccaggtgcggtggctcaagcctgtaatcctagcactttgggagnccaaggtggtaggatcatctgagcctaggaattcaagaccagcctgggcaacaggagaccctatctttacaaaaagcaaactgggaaaacgtaactaccacacatatcacaaagggttactatactttatacaaagggattgctcgcactgcacagtgcagtgcatggtactgtacaccgcctcacaagtatggctttattcagtggtccttcacagctggtggggcctgagg

SEQ ID NO: 213591 - DNA, 440 bp, Homo sapiens
atacaagtaagatggaagtgccatggttgtcttgtgtttcagattatgctttttatgtaagagtattggagtacgatagaatttattcctgaatgtttttgtcttcagtgtgttccctggatattgtttaaattgagtgttgtgcatcagcatattttgaatgtatgaagcatgcatgtttttctgtttcttgagacaggatctcattatgttgcccaggttggagtgcaggggcatgccacaatcacagctcactgcagcctcagcctttcctgggcttaagccaagcttgtccaacccgctgcttgcaggccacatgcggcccaagaatgcttttaatgcagtgcaacacaaattcttaaacttatgaggttgcagtgagttgagatcatgccactgcaatctagcctgggtgacagagcaaaactttgtctcaaaac

SEQ ID NO: 213592 - DNA, 167 bp, Homo sapiens
cagcagagacaatagcgcagagcagtagaaatgcctcaggcttggaatgtggggcctcggttccaaatgcagctccaccacctgactgtgtggccttgaagaaagcacagcctctctacctacctgcacaaagagcacgaagccctgcccagctcccctcagtgtgc

SEQ ID NO: 213593 - DNA, 528 bp, Homo sapiens
aacatcccatcagtaggtgcagttaagaataccacactacatgaaaacacatgatttggtaaaactgactttaaaatacacaaataattttgggaaaacacagcagctccacttgcaaaagggcaaaggaatcacagctaacagatgctaacatcaacatacagcactaacaagggatcactggaagaagtcttaaactctgctgggaggagtgttacttgagatatttctcaaaataaatttagcaattaaaaaaagccttgaggccaggcgcggtggctcacgcctgtaatcccagctgctcaggagcctggcaacaagagcaaaactccagctcaaaaaaaaaaagaaagaaaagaaagctggagctggtggcttaggccatcacccttccctgggctggaactacgggacagaccctttggagatgtgcctgtggtgctgatgggagaagatgcgcatctggctcccatcagggtaaaagtttggctactgcatctcaccggaatactgatgggagcaagatgg

SEQ ID NO: 213594 - DNA, 248 bp, Homo sapiens
gggaggctgaagtgagaggatttcttgggcccaggagttcaagtctgcagtgagctatgagagcaccactgcactccagcttaggcaacagagtgagacctcaactttaaaaaacaaatttttttgaaaggaaatgaatattaaaaccacttgtaatttggaaggttactttaaaggaactaattctaaatcttttattatagcaatatttgtacaatgcatagtgcaactaataaatagcttcagag

SEQ ID NO: 213595 - DNA, 638 bp, Homo sapiens
gaggatccacgcagtcttgatcccatgcaggagggaacagcttccgcgaatgaagccagctcagaggaaagccaagctcagatatttttttttgagatggagtcttgctctgttgcccaggctggagtgcagtggcgctgtctcattgcaacatccgcctcccaggttcaagcgattctcctcccaagtagctgggattataggcacccgctaccacacctggctaatttttgtatttttagtagagacgggggtttcaccatgttggccaggctggtctccaactcctgacctcaggtgatccacctgcctcagccttggcctctcaaagtgttgggattacaggcgtgacccactgtgccccgcacatttgtacttttgactggtcttgccaaattgcctttgagacggaaccatgtccttggtcaggtcctttctcatctctaagcgtcccctggaaagttggggagataatttctatttctcagggccattaggaagtggaaacgagatcgagtttgtcaatcgcttagttttgggagtgggcgcaaagttacggctccaccggtaaagcacagtagaagggccccaagcagtgtttgttctcttcccccatgcctctctgctgagtgccactg

SEQ ID NO: 213596 - DNA, 347 bp, Homo sapiens
gctcttggatattcttccttaacttccccctgcccaggatacttaataggtttaattaagtaattgcagctgacaaaacaagtaggacctgatttcatcagctactgcattctctcctgcaggaatttttgggacatgaaaatctaaaatgcctggtttacctatttggaatcagaaaaaaaaacaatgggatcaaaccacaagttaaaacctcaaaaaaagttatcctgccattttctttgcttgtaaattcgtttcagccaagagaatgtacttcccatttcaatgtcccccactgagaggacggaccctaggtctctgtccagagttggacaactctcattcac

SEQ ID NO: 213597 - DNA, 429 bp, Homo sapiens
taatgtcttctcctcctattttctttggcttgtcatgagctttgaaagtttgatctgagatccctcacttttaataatctgtaactctgatttggtaatctcctacatatgaataaaatgtctgtgttcatttatttctaatgaataaatgaacatgcctgctgagccaagccttaaatgtgattaaggagactgacttgggttcagatcctggctctgccttgagtaagtttctaacattcctctgcttgtatttccttatctgtaaaatgggagtgatttctttgaatgaaattatattacatttatcaagcattttatcacagtttcaacaataaggtgtaattattattaattcagactatatgattctgtgcccttggataaagtttaccattatataataaactacttttctcacttaatgca

SEQ ID NO: 213598 - DNA, 454 bp, Homo sapiens
atgacagaatagaaattaactaggaaacaaggaggtggtgctggttcaaggttgctggagagagtcaaagaaaggcaggttccttggggttctttttgtaatgtctttgatgtgcgttctcccgtgtggtactagaacagagtatcatttctctggaagcaactttatcctatttaaaagcaatctaaatgcccatcagggatccttgtgctatattcatgcaatgtaatgttatatagcagtgaaaatgaatgaactagagctattaatatatgaccaatgcttaaaatttcatgaacagtatattaagccaaaaataaagttgctgaaggccacgtagtacataccattatatgaagttagaaacatgtgaaatcgtactctgtactgcttaagaatatatatgtagttagagaataagtgaagacatgcaggggagtgatagaaaattcag

SEQ ID NO: 213599 - DNA, 523 bp, Homo sapiens
cattttcctgggtaatgctttttcatttttgcttaatttagttatgtaaccttagtttggctgcttaggtatgtcactggagagctacttccctattggagatgtaattctcagttctgctaagagaggagatcgtacacattagttagggttgtcataaaaggagttgaaagcatcagctgtgagcaaatcactttccttatgtgattgttttgaatttgaacaacaaatccatctgttttgccttaaacaaaaggtaagatgtgcataaagacaaatatttgtaacctagtatgagggaattcttaccctacaaaattattttaggagcaggctaattatatttacacctaggcagtgaacagccagtctttgaagagagtaaagtatcaggtaacttaccattttaaaagtctattgatggatttgtttccaggaagagagaatttaataacttattaatttaagggagcaagtgtttttgtagaaaagattatcaagattgtaatcaggccttaatggg

SEQ ID NO: 213600 - DNA, 616 bp, Homo sapiens
gctaggggcttattgagcttttttgatctgtggatttatatttttcatcaaatttgaaatttttcagccattatttctcagatatattttccccccttctctcttctttttcctcaactccattgtttgcataataggctgcttgaagttgtcccacagatgattgatggtctctcattttctttgaaccttttctttctgcttccttttgggtagtttctgttgctgtgtcatcacattcactgatgttttcttctgcagcgcctaatttgctgttaatcccatccagtgtatttttcatctcagacattgccatttttacctttttttttttttttttttgagacagggtcttgctctgttatccaggctgggctgcagtagcacaaccacggcacatttcagcctcgacctttcaggctcgatccatccttgtacctcagcctcctgagaagctgggactacaggcgcaagccaccatgcctggctaattttaaaatttttgtcaagacgaagtctcgctgttttgctggggctggtcttaaactcctggcctcaagcgatcctcccaccttagcctctcaaagtgttggaattacaggcgtgagccactgtg

SEQ ID NO: 213601 - DNA, 651 bp, Homo sapiens
ttgggagcacttattccactgtcttcttcctaggactgattttcgggtctcaagggtaactgtaggaggtccttccctggttactcctgctgcgcctgcccctcctaaccatggctggactgtccctgtcccaggctaagccagctgcagttggctgtgattaatggcctctattaacagcaagttgtaaactgataaagtacacagtgcccatgaaaatctcacctctgctaaattccacaccagtgagtacttactccttaacccccgaaacctcctgccttgcctcgtttgagagacatagtgacagagagtacacctttaaccagaggaattcaaaatgccttggaagcaggaaacaactccatgaattctttgggggaaaagcccaaatcctaaaacctggtttcacatggagtggagcctaggcgagatgaaattaaagtccaggtcaaggaaggtagtttcaatcagcctcaaagaaatcccagagccaactggccaacagctgcgtgcccttgggtaagtcactttctcctatctgggcctcggtttcattatttgttaaatgagaggtttggttcaaaatgattcctagtctcctactctactcggcagacttaagagcggttctgaatacaggaatcttta

SEQ ID NO: 213602 - DNA, 484 bp, Homo sapiens
gcacccctgcagcggcggtcacataaccccacctcttccaggagtgcagctttcccggccccccaggccagagacaggctcagaggacgcagggcaattccttaccttggcgtcgagatcatgtggggactctcggccgtgtgccacaggctgcagagccgtggagcagtggggtgcgtgacctggaggtcagcaggggccgggaggacaccgggccgcggatgggggcgcggagatttgggttctcggtgtcactgctctcgccactggcccgggatcatgagcctgctgctccgaaaactcgccgtcggacagcgactgagtatccgcttccctcccctggccctcccctgcgccaggaaggcctggccttcggcaaccgtgcctgcagcaggcgctcctgaccttttccagggactcctttgaaggtcaaaagttcgaaggcgttcgaagccgagcaggctccctccaggggctggaaggt

SEQ ID NO: 213603 - DNA, 535 bp, Homo sapiens
ttagaaagacatctctcaaagacgatctcgggcaaatctcctacttgggatggactcatatgagctgctgacatgagtggagtgcttaccatggtgcttactaacaacgcattactcttgttttgcaaatgagaaagtggcacagacaagtcagtgactggcccaaggagctggtaagtggagcccttttacccaggggcatccagactctaaaagccacctcctcactagatggaattaagtcagtcacactggaagactgtcctcatgtctcagagggatcctcgggcacctgaagcccctgaggtgaccatacccccccacctccctgtctaggcctgcaacctgatcctggctctcacatctcccgctttaaggtcccagaggtctgcccagcaacagccctgggctgccatgtggccacgaggtccatttttccagatgcattggaaatccaatttttttattttttattgaaacggagtcttgctctgtcacccaggctggagtgcagtggcgcaatctcagctcactg

SEQ ID NO: 213604 - DNA, 742 bp, Homo sapiens
ggtatagtgaaactccatatcaatatcacttttatttctgtttttggaaaaacttagagcagaaccagtatgagttttctgtcctgggaagtgttcacacggggtcactagactatctgttagaaaaaggtaggacttggatatttcagtatttaagatgctattaatttaaaaaaaaaaggtctaggattctggaaaaaaaaaaaaaaaaaaaaaaaaaaaaaaaaaaaaaaaaaaaaaaaaaaaaaaaaaaaaaaaaaaaaattaaaaaaaataaaaacaaaaaaaaatataaaaaaaaaaaaacaaaaaaaattgttgtgtctttcgggctcacttggccttttacccctaaagggattttttttccccccaaatgctctttttttttcaccatttcccctttggaaacccttttataaacccaatgtgagcgttttaaaaaacattgccttttgaaaacctggggttttaccaataagtccctttttggaaaaaccttctcttattagtggtgtggttttatttgcgaaatggcctttctcaagggtttctttctaaataaaatcccccctttaaattgctaagaaaatatgctatgtttttaatttttgggcataaaatcgggttttttttttaaaccactcattttttttaccctaaaggggctcaaattgtggaaacttttttttaataagagactaatttttctacgtggggctttcagtttttttcgtttctg

SEQ ID NO: 213605 - DNA, 223 bp, Homo sapiens
aacacttgtgaaattctagatacccacttatcttcatatcatgctgctggaatattccatggaaggaaataatcacattcttggttaaagaatagattctttacagaaaagtaatgtagtaatcctcactctctaaccctgcctcatcctggaacagggtggcctatggacctttaatcttcctctggctttggtaacccccatgagcccagagacacctgtg

SEQ ID NO: 213606 - DNA, 357 bp, Homo sapiens
ttttgtacccattaaccaactgttcttcattccccatccttcctttccttccaggcctctagtaaccaccattctactttcaaccaacatgagatccacctttttagctcccacgtgtgaaaggaaacatgtgatgtttgtctttctgtgctgtgcttatttcacttaacacagtgacctccagttccatctacattgctgcaaacgacaagattttatcctttgttatagcccattaaggttccattgtgggccgggcgcggtggctcacgccaggccgaggcaggcagattatcaggtcaggagatcaagaccatcctgtctaacacgatgaaaccccgtctctactaaaaatac

SEQ ID NO: 213607 - DNA, 906 bp, Homo sapiens
catacttacctggcaggggagataccatgatcacgaatgtggttttcccagggcgaggcttatccattgcactccggatgtgctgacccctgcgatttccccaaatgtgggaaactcgactgcataatttgtggtagtgggggactgcgttcgcgctttcccctgattttttgtagtttaaagaatagtctacacagcaagggttacttgttttttttactggcttgtgttttagtcttaatcgttactctcacagtcgaaggctgagaaatagtagtaatatgtcgctttctccccgccccgggagaaataagaatcgtcgacctttacacaagctagctagcgcgaaggccgcacagctcttcctttatctaggcggggctgctttttgcagagatttgtctgtccatggtctgcagtctcttgggttctcagggtctgtgaaaatctacgtgtttttccctagcccccagtcacatttcacacagcctctgcttctagctgcagccccctcaggagtctgtaggatttctgtgctagcggggaatgtgttctcacctcatagagccgggtacaaactatgcaggcgggggctgttctttgggatgaaagcagggcctttagggctcttagcgcgtccccgttgggttgtagacataacacgcttactttgcggagtggaacggctctcccggagcccaggtgtcctaacgcaattcatcgaggcccgcaggtcaaaaccgcagtctcacctgtcttggccgaaatgcgctgcgatcctccctgaaatataaggcgggaagttttatgaggagacgggtccagtttccctactatctcctgccgtttacatatctagtctttcttcagactttatttaagcgacagcttcttgtttgatgtctc

SEQ ID NO: 213608 - DNA, 579 bp, Homo sapiens
actcttgatgatcccattcaattgcttgttgagccatcaattcctcctgcccaaatcctacatatctgtaagattactgtgtgaaatttatgcttcttccactaagcactccttgatgcccataatcacaaatgatcatatcctcctcctccctcttctataatttccttctttttacttaaatcttttgcctcctggaaacttcattcacattgagcatcacttatatgcaaagcaccattctaggttctacagaaggtagcaaagagcaagatatgataattgcaaaggagcttagaaaccaggagggcagattgagcagttatacaaaaaatcagaattcaaattatagaagagggaggaggaggatatgatcatttgtgatcatgggcatcaaggagtgcttagtggaagaagctaaatttcaccgtaatcttacaggatgtgtaggatttgggcaggaggaattgggatgggcaatcgcattttagctaagggatatattagtaaaaatattggagtaagacatttgagtaatgatgaatcaagtaatccggaatcttgttatatatgtgggtg

SEQ ID NO: 213609 - DNA, 609 bp, Homo sapiens
attcataattctcttaaaatgtggtgtttctctaccgaaatcaaaatacttacatgggaataactattttcaaagtgttatgagactaaaattatgagagttttattctaccccctaaatgagaggtaaaataatctagtgaaaccaccaccttctttggaatcagaaatgtacatttaaactactgaacaaatatttattaactatattaacttatgaaagttagcttgtgaacctcgatcacttacctataaaatgagggcacaatctcttatgtcacattgtaagagtaaaaaacatcataatagaaaactctaccatagtgcttatgtgtcaaagtaggttctaagttctttacatatattaacttatgtctatagtatacatatatatgatttctaggatagagttcagtacatagactcaatcagggtaaatcctattagtctaataatgaaagtttatgacattttgagcatgcaaataccatgagaggaaaaaaaaatcaacgctgtttgaaataccaaaggtaatagttctattttttttaatacaaggaaggtgcataacatgtacttcttgttattcataatccttaggtaacatgaa

SEQ ID NO: 213610 - DNA, 334 bp, Homo sapiens
gaacctgggaggtggaggttgcagtgagtcgagatcgcgccactgcactccagcctgggtgacagagtgagactccatctcagaaaaaacaaaacaaaacgagaacataagagcaagatgctattgtattatggaaaaacaataaacagattttataaagaacttaaagtaacttggaaatgagaaatataatcattgaaattaaatactaagtggataggttaaacacattagtcatagctaaaaagagaattagtgaactgaaaaggaaatccaaagaaattacagagtaaagcacaaaaacacaggcaaaagagaagttgaaaatgagaac

SEQ ID NO: 213611 - DNA, 635 bp, Homo sapiens
tgtctaagtgtttaaaggctgagacataatcttacaatattataattcttttttggtctttaaaaaaatcataaatttttctcctcttgggtggctttttttttcttcatcttctaggcaagagagaaagactagagcaatctggagtggcacaaatgccttgacccacctggaataatcctctaacaaagtacgttgccctgaaacacaaggatttgtcatggagagtgtgctcagtgtaattcaaaagagctattcttccctaccaactgccggaaccatgaggggatccttctttgatattcaccacaaggacctcgtgagatgtctagaggtaaatcccataaaagctttggggtcctctaagactacagcccccgggtacccagaaagtttatattctcgcgctagtgtacactaaacaaatttaagttagcagtgcattattggaatagatatgtgtattgatgatttttactttcctctacttatcaaaaattatcttcttttcttcgtttaaatttataaataacaaatcttcaataaagacataaggactcttaaactcaactgtttctcatacacagttacaacatatgatatattctgcttgttttttaaaaccatagttgcac

SEQ ID NO: 213612 - DNA, 698 bp, Homo sapiens
ttgtccagcatttttaagcagtaatttgttggactatgaaaaatcagttttttagtatgtggcttcttgaaaagatttcctttaaaaactttaaggtacagagacgtggtcctgttggtatcctatctcctttttgccccactcttctgttttcagttctactgaacattgtacttatatgtgagtacttatttatacagcagtcctagaaagagatatctcagtttttttccttacctacactaaaaactagactaaacacaagtcatttctgagaactgggtatacagtcagttacgacaggtgctgaatccagtgaagacctctttggaagtcataatttaagactgatggaatccggggtacctattatcagaaaataggacacgtgaaaaatagaggaataagacgaaaacacttgaccaggctcagcggctcatacctgtaatcccagcactctgggaggctgaggcgggtggatcactcgagcccagagttcaagactagcctgggaacatagtgaaaccccatttctataaaaaatacaaaaatcagccaggcgtgatggcatgtacctgcagccccagctgctcgagaggctaaagcagaaagatcgcttgagcccaggaggttgaggctgcaatgagccatgacttcagcctgcacttcagcctgggtgacagagccagaacctgtct

SEQ ID NO: 213613 - DNA, 494 bp, Homo sapiens
ttcgtcttgctcaccaagcagtcagggcaccatgccaggaactgacctttttttgtataaaaggaaacagagaaaagttctcaacagaatgtagtcagatttttatattacgggagcccaaggccattctgccatctaactgggtctgcaaaaatgtcagggtttaggaggctatgcctttatatctgttttttctcttgacccacaaccgactttctgcccttgtccaataatccctaagatggggtctatcttcctttatgtctggcccagactgtctttcccttcagaggccgtccatgctcatgggcttccacttgaacaccgataactaactttaaacatgtcctaagtttttcaggagaaagataaaagctttcttttctttttaaagtattttttatcctgcattataaagacatatatgcttactatggaaaatttgaaaagagaaaaagaagaaccattaaaatgatctataactctaccatcca

SEQ ID NO: 213614 - DNA, 477 bp, Homo sapiens
tccacggggagcggcagcgctccagcagggcaggcctcactctccccacctcgcccctcagccggcccagcctgccgggtctgatggtgtctacgggagcccaaggccattctgccatctaactgggtctgcaaaaatgtcagggtttaggaggctatgcctttatatctgttttttctcttgacccacaaccgactttctgcccttgtccaataatccctaagatggggtctatcttcctttatgtctggcccagactgtctttcccttcagaggccgtccatgctcatgggcttccacttgaacaccgataactaactttaaacatgtcctaagtttttcaggagaaagataaaagctttcttttctttttaaagtattttttatcctgcattataaagacatatatgcttactatggaaaatttgaaaagagaaaaagaagaaccattaaaatgatctataactctaccatcca

SEQ ID NO: 213615 - DNA, 352 bp, Homo sapiens
actctgctctaggtggcacgctctcttgcctcatcaccacagagggcagcagggctgagctactcgaacagtaagaaccgccaccctcgccaccacctgcaaggctctgctggaagccaggcgtgtgcctgcagctgctcaatcctcatgaaccccatgatggaagaatggctcaaaccacaccccgagaaacacatcggattattatcccgggcaagcccaggacaaccctttggctcagagacagaaggcacctgccagaggtcatacagcacaggtgacagagctgggttctgtacccggagcgtctgtgggggacaggcatgctttgacctctccgtgggctggagag

SEQ ID NO: 213616 - DNA, 607 bp, Homo sapiens
accttagttgatctgcccacctcggcctcccaaagtgctgggattacaggcatgagccactgtgcccaaccaagaatgtttttttacacctctttgtttaactgtatggctatactcacacactcgcgtgttctgaaaacaagtgcacacgtcgcgtgtgttacctttgggtggaaggtgagaaggcaagcacgtcctccattcctggatagttcagtggatgaaggagcctttcccaggtagtgggacaccgacctgcataacatgactgacgtccgtgtatccgtttttgttatgagtaaacatagccttggcagctgtgctgtggcctgtgcaatggtgagctctctggtgtcagtcttatgttttgtgggcattttacgtgacagcgacgagagtctgtaggcacaaagtgacctttttgcgcactacttgaaccacacatacaccataaacttgcttttacggttttgttttggttttggttaactgtagcgtttgtttaggcctgacacggtggctcttgcctgtaatcccagcattttgggagaccaaggcaggaggatcacttgagcccaggagttcgagatgagcctgggcaacatag

SEQ ID NO: 213617 - DNA, 543 bp, Homo sapiens
ccatgatgttacctggcactgtatctggttgtgatataagaacatgatggtttctgagtaaggttctgtgtgtgcatgtatgttctgtaaatatctgtttattgatatgtttcttctactggactgcaaactcacttatagcaatcatggtgcttatttatttttatatctccatcacccagaatatggcctgacatgtaaaaggcatgcaaaaaaaatgtttttgggaggaaggaagccaggaaggaaggaagggtgggaaggagggaaagagggagggctacacaatttgcctcaaatgaaggttctatttaaaagattcaaccaaaaagtgaaagtaaaataaatctgtggctacttgagaaaagtagaaaaactttcttatttgcctgaggagtagaagtcctctgcattcccttctcttttgttccccctttccttccttgtttcaacttactagtttcaaatgatttttaaaaatgaataatgctacatagagaaaagactggagaaaagataacgaaatgctgtaataatagaagt

SEQ ID NO: 213618 - DNA, 1425 bp, Homo sapiens
ccgtccatgtgtcctgacacccagtctggtactttcattatgccacaggcctcaattgaaaaatcacagtagggaatttaggccaaggaaagccatcaagttgcaattatttcctaaattttctttggaaaatttcatttcaaataccaaaaccatcctataaaaagaaaacttaccttcttaggtcaaatctctaatatttgactaggttcaaaaagtttatttctggccaggcacagtagcttactcctgaaatcccagcactttgggagaccaaggtgggaggatcacttgaggccaggaattcaagaccagcccgggcgacatagcaagaccccatttctacaaaaaatttaaaaattgtcatggtggtgcacgcctgtggtcccagctactcaggaggctgaggcaggtggatcacatgagcctgagaggtcgaggctacagtaagctgtgtgatttcatcattgcactctagcctgggtgatagagtgagactttgtctcaaaaaaaaaaaaaaaaaaaaaaaaaaaaaaaaaggtcttagagaccagaagtctctgtaatctctaataatctctaggccctagagcagtggtttgtaaatggaggtgatttgctcccctccccccagaggacattggacaatgtctggagacatttttgattgtcctaaccggcaggaatcgggtgctactggcatctggtgagtagaggcccaggatgatgctgtgatcctcaggtgtgatcctgttgagaatgaaacactgtagactttatgaaaacatacaagaccctcatcatttttcctttgcctgagctccctccccagaggttacctctgttcatggttttgtgcatccgtctagtccccctattacgcgtttacaggaatatggtttgcaacagtgttttcatctaaatagaattatacaaaatagcgatttctgatttctcttgcatattgcacattcttcttatacttcctccctacctttatctgacacagaaatgctgtatgtccagaacttctatcagaggcacctatggaagtctaagggaagaccacatcgcttttaaaaaccctaaaattttgtagtcactagatgaaaatattcagccagtgacccaaaaaattgctaccaatgagactctccattttgccatgtagccagaacttactttgatctatgtgcctggggtagtgaccaagtaggtgggtaggagtaatctcagggaaacttgaggccccagcctcatggctagggtcataatttgaacccaggtctgtctgacatcagaatccatgatgttaaccccaattctaaggggttcaactaccctttctaaatggaatcctgctatattaggcactatttattcattttatataaactagaaacattttatgtagtaagtagttga

SEQ ID NO: 213619 - DNA, 509 bp, Homo sapiens
tttttgaaggacgatcccttctgatgatcacttctgtgatctcttctctacacaccagacctcacagtggaaactgcagccactccactagaaaacctgaatgcaataggagtaattggatcccagggtggcaggagacaaggggaggaccctactgctagaggcatggtgggcagagttggtgtgatgaatagcagagtcaaacgagcaaccagaactgtctgactgaaacagacctatggcattgttgagttaattatggcatttctggaaatgaaacaggaaacctactgaattcttacttgatctgtatataagcagaaaagctttaggtcaaatgaacaaaggtctaacttgaatcaaaaatggagaatcatggctcctcaattaactctcagacttgagccaatttacagacctagaacccccggatgaagacgaaggcacatccccttaaagaagtaacctagtaacatgccgaaaatttatactgctgatctttctcccag

SEQ ID NO: 213620 - DNA, 208 bp, Homo sapiens
ccgcaggatgttcgcagcatctcaaacttttaccctctaaatgccagtagcatcccctgccttgcccaggttatacaaccagaaatgtctctagacactgccaaaagtcccctaggacaaatacaagttaaaacattttaagtaatgtcaacataatatgatacaatttcataattaattatatatctctctctaaagatggcggtaa

SEQ ID NO: 213621 - DNA, 304 bp, Homo sapiens
agctcggacgatagtgccgcgtcttacaacgatactgatggctggtgaacacccatggacgccacttggaatgtgcaccagcagaggccgttctttggactcatcccattttctgggcttcatattttaaatgctagttaatttttcccacatttgttgccacaagataataaattattaatgtatttactgagattttactcgtttaggtactgtgttagggatacaacagtgaacagggtagacatatttctgacctccgagtgataaaacttttgtgttggagtgaggatgataatttgat

SEQ ID NO: 213622 - DNA, 658 bp, Homo sapiens
gcgcccggccccttcttttcttttttgtggtggagtttctctcttattgcccaggccagagtgcaacggcatgatcttggctcactgcaaactctgcctccgggattcaattgattctcctgcctcagcctcccaagtagctgggactacaggatgtgccaccatgccctgctaattttgtatttttagtagtgacagagtttcactatgttggtcaggctggtgtagaactcctgacctcaggtgatccacccacctcggcctcccaaagtgctgggattacaggcatgagctatggtgcccggcccttttttcttttccttcctttctttcctttttttcctttccttccttcctttccttttttcttttctttcttcctttccctttctttccttcctttcttccttgagatggtccccctatgtcaccaggcatgatctgcactggcgtgatcatagctcactgcagcctacaactcttgggttcaagcgatcctcctgcctcaacctcctgagtagctgggactacagacacgtgctatcatgcccagctaatttttaattttggttgaggtttcattatgttgcctaggctgatcttgaactcctggcttcaagtgatcctcctaccttggcctcccagaatgctgggattc

SEQ ID NO: 213623 - DNA, 501 bp, Homo sapiens
aaaaaaaaaaagaatacaaatgtcttacagtttcctttcctcctatatacataaatggtaagtttgagtgattttgctggattcttcaaacacaggatattttcttacttaaaaataagtgaaactgggcatgagctatggtgcccggcccttttttcttttccttcctttctttcctttttttcctttccttccttcctttccttttttcttttctttcttcctttccctttctttccttcctttcttccttgagatggtccccctatgtcaccaggcatgatctgcactggcgtgatcatagctcactgcagcctacaactcttgggttcaagcgatcctcctgcctcaacctcctgagtagctgggactacagacacgtgctatcatgcccagctaatttttaattttggttgaggtttcattatgttgcctaggctgatcttgaactcctggcttcaagtgatcctcctaccttggcctcccagaatgctgggattc

SEQ ID NO: 213624 - DNA, 1209 bp, Homo sapiens
acctggttcaagcctagtgtccaggtaggaacccaggctctgtgggaaggctgacacctgtccgcagccctgaccccaaggctcttctctgcccacctagaagagggtgtggccccttcactgggcccccgaccccctctctgggcctggcagtctgagaggaagaaggctccatgttggcagctgtagcgggagagggcatctgcccacgtgcctgggagcccagggcgaggggctgaggacaaagctggagagaatgggggcccagaggtgccaccagcttcctttctccacaagcagagggagctctggaccgcagggcagagaaactggacccctgaggcatatggagaggatggggtgggggcctcctcaacacagcccaagggtcttcttagaaacccgagcctcgcagagcacctgccccagggcctcctccaagactaaggggctgtagagtctatttccacggcctgcaatgtcggggtccctgggccaggatgccctcggcagcctcaaatctggcagtgaccccgggaaaatgacccctcccaggtcaaaggaggcagccttccctgcgctcctgctctaagtcttgaggttgtgctcttgtgggtgtccaagttctgaggcctgaaagcttctgcagacgggcatagaacagggctcagaggaggggtccctgcttccctaaacttgggtagccagagttcgggatcctctcacaatcaggaccagggatcaaagcccagccctaggcaggctgatgtggggcagctcccccagcatgtagccctgtctcaggccccacattcccctcaggtgggaaggctgcagaagacagacccggaagtcccaggctggcctcaccctgggtcctggcaaccatgggctaggccgagggaagggggctcttcagggcactgtaagctttgttttccatgtgccctaaaagaacagactcccacctgtgcggaaccatttgagaggaagtggggcctggataagaggccaccaagagcagtgtggggacagggcccccggcatcagccactctgggctagggtccgcaaagtacgaagccatcaggtccgagggaagggaaagccccgttgggcccacaaacgcccttggaagggccacgcaggaacgcgaaccactctacaacagagacccaagcacgaaaccccgggaacgagagcgcgccgc

SEQ ID NO: 213625 - DNA, 497 bp, Homo sapiens
agccaatgttcgttatccttccagagatagtttatatcatggagtaatataaaaatttatgatttatatgtactgtataatagagcaattatattcttacctacccccaacatgctttaactcgaatgatagtgtagtacacttctgagtttgtctgggcttgtagctcttgtctgtcattagattctgaaagatacctattaacaataccctaaaaagatcaggagcctttaggccaagtctcaaacgtttcagatgagaaaaactcagggatggtgacttgacggaagttgcattaactaacaacgctcacatgctattctccggacttggaatgtccaagcaccctgggcttgctgacacccactcacttttcaaacatcaattcttgggaagcttttcccttccttaatgtcccccagataggtgatgtccccttgttacaggttttagaccattatgtacatctccttcctagcacatacatatattaaaat

SEQ ID NO: 213626 - DNA, 414 bp, Homo sapiens
acaagaggacacaaatgcatccagctattctctgtgctgcttggtgtaatagattaaacttcaatgcaccttgggctcttttcatgggctttgcctgtcacctttacacccttcagagttctataaggaattatcagcactacgactctttggcagtcttagtgggaaaccctgggaggtcaggaatatgggcctgtgaaatgacatcttcctgcctcgtccaaagatagcattcatcatcatttaggcagatgtatgatgctgctaggcaaaacgccagccatggatcacattggtgtcccattacagagcctacgctgtcccagtgtctacacagagtgggaatctcaaggctggatactgagagccttcctggaacttcagggaaaataaatgtactaaatcagttggtta

SEQ ID NO: 213627 - DNA, 468 bp, Homo sapiens
tgggtttaagcgattttcctgtctcagcctccccggtagctggaattagaggtgtgtgccaccatgatcagattatttttgtgtttttagtaaagatggggtttcaccatgttggccaggctggtctcgaactcctgacttcaggtgatccacccgcctcggcctctcaaagtgctgggattacaggtgtgagccaccacgcctggccttaatttttaaatactgtaaggcttataaagaaaagaatattccccttctgtttctttcctctcacgtagcaaccttcacccctagtttggtttcatatacagtgttttaactctttttgctatttttttctcttactttctactatatttccaaatacaatgcttctataatgattccttttttttttctatcagtttttgataatcattgactccttatggtcaaagaagacttaattcccttctgtcactcttcata

SEQ ID NO: 213628 - DNA, 472 bp, Homo sapiens
gaaagagaaacttctgtttgacatagtcagcttgcagtctaagcttttgaattttcactccagttttagtaaagatggggagtgcctgggaaggattgcatgatcattatcagtatttaagcgtgtcaggcactgttcaaaacagttagtgtgaattacctgatttaatccccacaatgaggtgggagctgtttatacttcctattttacttatgaggatgcggatgttcaaggcactcaggaagtctttcccacccagctaagattttaatcctgccagtccaggttgtggggataaggctctgtgctcctaatcactatgcatgctgcctcttgccatagtacgacatctgcaacttagatttctgtaggtcagtgctacagatcatttgctttaggtgagctttcttgaccctccagtgcagaaaccagatctcattagagtacaataggcttgtagcaagaagtaaaa

SEQ ID NO: 213629 - DNA, 303 bp, Homo sapiens
tgctcccaccaaaaagctaaggcagttttctactgaaggacgcatacatcgttaagtaagctagaaacaaaaagttagaacctcgggaaaacaagtatccagactatcctaatggtataggagctaatgcatatttggtgcctatcatataccaggcactgttcttgtgctttatgtatgttaaattgtttaaacatcccacagcaaccctacaaggtgggcactgttactcccattttatacatgaggaaacaggcatagagagattatatgggaagttgttggtgatcttgttgggtggtt

SEQ ID NO: 213630 - DNA, 480 bp, Homo sapiens
gtcttgaactcctgacctcagttgattcccctgcctccgcctcttaaagtgctgggattgcaggtgtgagccaccgtgcctggcctgatttaacaattttaatacagggattcttagcaaataaaatatctcatcaaattgtgaagacacagagctgatagctgaaaaatgattcctggttaaaatctgatactttagaaaatacttggaatgctgcctccaatttggtgtaatttccaatatcaaaaacaaatgaatcttatgtatttgagtctgaacttttttttggataatatgaatatgagtctctactaaagaaaaatacaaaaaattagccgggcgtggtggcggatgcctgtagtcccagctactcgggaggctgaggcaggagaatggcgtgaaccctggaggccaagcttgcagtgagctgagatagcgccactgcactccagcctgggtgacagagcgagactccatctc

SEQ ID NO: 213631 - DNA, 286 bp, Homo sapiens
tttcttccacctcatagattcaagtcctagttaaaaagacaccaagaaaaccaagaaactaattctaatatccttattaggattactatatcaccttaatatatgtgagggtgtaacagcggtatctaaaacagaattatcgacaaaccactgttagaggagaacatagagatttctttttgggaaatgaagtttataaagtcaaggtagaatgggtgagcttgggacaggtggatgttcaggagagagaatttcagaatgtaattgagtagacccacgtagctgt

SEQ ID NO: 213632 - DNA, 595 bp, Homo sapiens
acacccaggatctttccctcaagctataaaactggatgccacttttgaaatattctcttctccctttccatatagcccaaccattaaaatctccattcttcttcagtttctctgtgtctagaattaatttaagggtatgctgaagccaattcataccaacttgcaagagccaattgttaagttttcaggaattttgtgagccagttgatcttacaccagtagcctgaattcagccattgttatttacatcccagaaggggccaaattctcaaatcacggctttttcccccaccgaaagccaattgctaagtatttatcagtacaccattggataaattcacttttttcatgaatggtttaattcattgacacccagattttcagagtaatttctcagctgctttcttgccttttctgccatctcatagcaattcgcccaaatcaaatcaatgttttaagatttaaattagttcctactatcaagatgctcaaatataaatgtgtagtcagctaatatgttattgatgatattaaaaaaataaatcacataagataattcgtggaatgcacttaacacattgctttgagccataga

SEQ ID NO: 213633 - DNA, 226 bp, Homo sapiens
agtcgttcctcagacctgttcctgagcatttgtgagtcttcctggtgcccgaagaaaccctgggggcggcttgacatgaaacaagagcaggaagggggcaagagcctgtgacactgtcagggtgaccctgtggcttcttcaggggagggtgggtggtgcagaagcttgggttttggaatcacacggactggagagtgtcctagttgagtcttatgctgactggctg

SEQ ID NO: 213634 - DNA, 444 bp, Homo sapiens
ggaaaagaaatgagaagaaccacaaagtatgggaataggaaccggaggcaaaaaataagaataagccaaagcagatataaatatacttgaaacgaagtcttaaaaacaaattaaggaagtttaaggaaactaaaacagagggattgcaaccacacccctgcttctttctattattaaaaaagtaagccaagatatgtaaaagagagggctgcctgtaggcgctttggcatgaagttatcatgtgcaaaggtaaaattatgtaaccccaaggactaaaaagagtgtttgatgaatactcagtcatgccaaagttacccaaaacattttccgtctcaagcatcctaattacacaacgcttctggaactacagtgggacccacaggaccagagttaataacttagtatcaaaaacccaggagagttttcaacaactgttaaagaaac

SEQ ID NO: 213635 - DNA, 527 bp, Homo sapiens
agacagacagacaggcaggcagagaaagagagtaagacagaagaccgacacagtgagagagaaaggcagagagagagagagacagacggggagagaaagagagtaagacagaagacagacacagtgagacaggcagagagggagagagagagacaaagacagagacagagacagagagaaagaaagagacagacagacagagaaagagacacagagagaaagacagagacgaacagagagaaacagacagagagaaggccctagcccagtagcaatacagtgccttttctttcattttctctttcttttcttttctttttttctttcttgtatatctgtatgtatgtatgtatgtatgtatgtatgtgtgtgtgtatgtatgtatgtatgtatgtatttatttatgtacgtatttatctggagaccgggtctcactctgtcgccaaggctgtagtgcagtggtgcgatcttgggtcactgcaacctccgcctgccaggttcaagcaattcttccgccccagcctcct

SEQ ID NO: 213636 - DNA, 892 bp, Homo sapiens
ggcggtggctcatgcctgtaatcccagcactttgggaggctgaggcaggcggatcacaaggtcaggagatcaagaccatcctggctaacacagtgaaaccccgtctccactaaaattacaaaaaattagccggccgtggtagcgggcgcctgtagtcccagctacttagggggctgacgcaggagaatggcgtgaacccgggaggcggagcttgcagtgagcagagatcgtgccactgcactctggcctgggtgcaagagcgagactcggtatcaaaaaacaaaacaaaacaaaacaaaacaaaacaaaacaaaacaaaacctgtatctggagcagtagtagagcttcagattcttccccagttccattcccctaaaggtaggatatttattctctggcaaataaatctttcctaggtaacactcttgtgtccctaccaccccccatctcccacacacgacatgcaataatctccgcaggagtttaggcatggggtcagtataaggaataaaagaaaatttatatactcagtattgagacccacagactcttttgtggtcatgtttctacaatgctgtcaggagactaagggattctactcttggatcaccaaacacccgtgataagatttctgaatgtcatctgaaatgtttccactttaaaggttagccttccactagaccattctatcctacaacaaaggctgctagtcaccaggagtttctcatcagaatttttaatgcttccctctaactgacaaacatcaaggactaccatgtaatcaaggaaggcctccaatatgaaagaaggaccaaagtaaacaacaataaaaacaaaactttaagatgttgcagggagaggaaaatttgggggaaaggggcttatttctatc

SEQ ID NO: 213637 - DNA, 554 bp, Homo sapiens
tcaagtgagcagttttgtggaaggcatccattttggagctgagctcaaatactactggagctcagtattgtagaacagcctgattcaccaccaggtctgcagtagagtccaggtatggcattaccctttgatttacctaatctgggaagaagccaattggcctatggaacacctgaaagtaaaacactgcccaccagagatgagaaactttgcctgcctataaactctgataagatgcccttgataactgaaaaccacaggaatgccaacaataagtctcagttattgagaagtttgctgtccagtgggaaaggcaggtaataacaatcctcaaaaataatacattaagtgctatactaagggtatatccagggtgctgtcagaatgcagaagaggcagtacctaatccagcctgacagtgagggtcagggaaggctgccactatatctagatttaagaaattcagagcacagttgacatagcttgtcttaaggatgacacttggccttctaaataaatcaaacttttcccagaaccatttcaaaaaaaaaaaa

SEQ ID NO: 213638 - DNA, 510 bp, Homo sapiens
ctgacctaagataaacttcttactctcctacctctaaaccttccctcacaacatgtctctacttgttttgctacagcccaaaatggatattctaggaaaccaatgaaactgaagcttaggggcccctcacttcacaggaccctccttagaaaggtgtatgtgctcttacaattttgtaaaattcggaaagggatatttaaaaattctttttattttttctctgttgcccaggctggagtgcagttgcaggatcatggctcactgtaacctcaacattctgggctcaagctatcctcccgcctcagcctcctgggtaggtaggactgcaggcggacaccaccacgccctgctaattttttttttttttttttagtacaaacgaagtctagttatgttgcccaggctagtctcaaacgcctgggctcaagtgatcctcttgcctctgcctcttaaagtgctgggattataggcgtgagccactgcacctggccttaaaattctttttcttga

SEQ ID NO: 213639 - DNA, 461 bp, Homo sapiens
cggcccacgggccgcgcggagccccagctgcgtccttatcagcgccgggcagaagggcgtcgcggcgcgagggtggggcgccggtgcgcgctgagatcgacgcccacacgcgccgcgccagctctgcggcggggagagaagccgcggcctgcggggcggggactgcggggcgggcgcccagcgcgggcgttgcacgaccctcggccttccgcagcgccgaccgctctcccgtccggcggctgcagctgctgggtcggccgccgcacccgctcgcccattcccggcccctccagttggagggggtctcggccccgcccccctccccgaggggcccacgctggaaagcccacgctccccacgccacgccccccagggcgccagcccctctgcgggggtttagcacgctgcgcccagaagttgggtgggagacggctaactaggggaggtgtccgtgtgaatga

SEQ ID NO: 213640 - DNA, 829 bp, Homo sapiens
cgcgaagcgccaggcggccgggccagcgagctcgggggccgaaggggaccccgggaccctcggggcgggacccgggccgaccagcggcgggggcggcgcggcgctgcaggcggacacccggcggggggcaccgcgcggggccgggcagaggcgcgggggccgctatgggccgccgccgcctgctcgtctggctgtgcgccgtcgcggcgctgctctcgggggcgcaggccaggggcaccccgctcctggcgcggcctgcgccgcccggtgcctcccgctacagtctctacacgacgggatggcgcccgcggctgcgcccggggccgcacaaggccctctgtgcctatgtggtgcacaggaatgtgacctgcatcctacaggagggagcggagagctacgtaaaggctgaataccggcagtgtagatgggggcccaagtgccccgggacagtcacgtaccgcacagtactcagacccaaatacaaggttggctacaagacagtgacagacctcgcctggcgttgctgtcccggcttcactgggaaacgctgccctgagcacctcacggaccatggggctgcctcaccccagctggagcctgagcctcagattccttcagggcagctggacccaggccccaggcccccttcctacagcagagcagcccccagccctcatggaaggaaaggcccagggctgtttggtgagcggctggaacgcctggagggtgatgtccagcgcctggctcaaacatatggtaccctcagtggcctggtggctagccacgaggatcccaacaggatgactggtggccccagggctcctgctgt

SEQ ID NO: 213641 - DNA, 590 bp, Homo sapiens
agtcagaagctgggaaatcacttgagcctaggagttcgaggttgcagtgagctatgattgcaccactgcactccagcctgggccatagggcaagaccctgtccctaagaaaaagaaaaaatcaaataaatatatccccaaatgacacttctagcagtacaaaaatacgtatacaaaatattattcactgtagcattatttataatgtaaacattggaaacaaacctaactgcccataaccaggagaacgattcaataaactgtttcaatcatgccataaagtactacataactcttaaaacaaataaggatcatatggagtgatctcaaagatattttaagtgaaaaatgtcaagtgtgggactatctgtagtatgctgtattttgtataagaaggataaataacttttgaaatatttgtactaaatacaatttggttaacgacaaaaaaagaacagtaagtaaataactaaactctacatactagggtttttaccacagggtaagtaaatctttttttttttgttttttgagacagagtttcactctgtcacccaggctggagggcaagattccataaaaaaaaaaaaa

SEQ ID NO: 213642 - DNA, 340 bp, Homo sapiens
gaaaatatcattaagtcaaaaatgcagtgaatacacctaacttactgaacatatagcttagcctagtccatctgaaacatgctcagagcatgtatattggtctacagtcgggcagaatcatctgcatcacagtccacaggagagtatcggtgtttaccctcatgatggtgtggctgactgcaagctgtggctcgctgctgctgcccccataccacttatcactggcccaggaaaagatcaaaattcaaaaatcgaagtactgtttctactgaatgtgtgttgctttcataccatcgtgatgttgaaaaacagtaagtcgaaccctcattaagtaggggac

SEQ ID NO: 213643 - DNA, 680 bp, Homo sapiens
  misc_feature (632)..(632): n is a, c, g, or t
  misc_feature (663)..(663): n is a, c, g, or t
  misc_feature (680)..(680): n is a, c, g, or t
agtggcaggagcgggaggcggggacccacctggaagcgccgcggcgccgctatcgagcttcctgcagcggtggccacccgagcaagtgccgtggcgggggcggagagcggccacggcggcggcgcctccccaagtggcccgttgcgtccgaccccgcgtgaaagatatcaagttattctagtacaaccatataaataaataatacctgaagtctcagtgtaacatggacaattaacagtgatgacagataaatacagacgcatggggatcaaatactaggcaaaacgctttttaaaagtgtatcaggcttttaagaaacactgcaggatcctgtctatcttaatgctgatagagctcagctaaaaatttaggaggttctagtattcttcatggctgaagctgagagagtctgaaaccctgatgcttaagctccattctagatcatagctccaactccttcaggatataaggaaaagagattatatttccacaatgatagatctttggttgtacagttatcagagactattacagacgattgctgtactcgaggctcagcgttctcaagcagtccaagaccttgaaagtttaggcaggcaccagagagaagcactgaaaaatcccattggatntgtggaaaaactccagaagaaggctgatatngggcttccatatccacn

SEQ ID NO: 213644 - DNA, 578 bp, Homo sapiens
cgattctcgcgggacctcgttggcagagcagttgtcctggatggcggagccttgggttccgggggcctgggacctgcaactctttctacaaggctggagtgcagtggcaccatctcggctcactgcagcctctaccccccgggttcaagcaattctcctgcctcagcctcctgagtagctgggactacagatgcacaccaccacgcccggctaatttttgtatttttgtagagatggggtttcaccatgttagtcaggctggtctggaactcctgacctgaggtgatccacttacctcggcctcccaaagtgctggattacaggggtgagccacggtgcctggcccaaacatcttgatataattttgttctgctgattttatgaaattcctcccttttcagaactgtaataaacaatattggtttaattctgtttgtttagttttttttctaagttagatttaaataaatttaagtttttacctcatctggcattggtgtgaaatgagaatctaaatgttttcctccaaattggtaattttctcaactctgttaaataatgctttatttaatttttta

SEQ ID NO: 213645 - DNA, 719 bp, Homo sapiens
cgattctcgcgggacctcgttggcagagcagttgtcctggatggcggagccttgggttccgggggcctgggacctgcaactctttctacaagatatcaagttattctagtacaaccatataaataaataatacctgaagtctcagtgtaacatggacaattaacagtgatgacagataaatacagacgcatggggatcaaatactaggcaaaacgctttttaaaagtgtatcaggcttttaagaaacactgcaggatcctgtctatcttaatgctgatagagctcagctgtaagtatcagttctgtgaaaataacagttgcagatgttcttgcctgctaaatatcgtagtggataatcttcctatagtgaactctattcaaatagagtagttatgtggttgattagaacttgatagagtgctactagggcacattccagtatgctcagagatatactttaagttgtagatgttctttgcttttgatgattgctactaccatcacacactgtaaaacgtaatgttttgccatgtttgtgaaaggcttcagtgtttggtacaaaggagttgtcacttggagtctgttataagaagagtgggttttcaagtcaagggttactttatgtaggatcatgttttcgctgagcttctccccatgttaacttagaacatttcttaatgtactgtagtattaaatggttattagacaattttcctacc

SEQ ID NO: 213646 - DNA, 368 bp, Homo sapiens
ctaatagtattttcttatttgttcacttgatttggttattgttctgttggttgtaacttgttttacaggactcacttgtgtccacacatctgtgatccctttgaaccttaagaatcaaaccattgtctgggagcggtggctcacgcctgtaatcctagcactttgggaggctgaggcgggccaatcacgaggtcaagagagtgagaccatcctggccaacatggtgaaaccccacctctactaaaaatacaaaaattagctgggcgtggtggtgtgcgcctgtaatcccagatactcgggaggctgaggcgggagaatcacttgaacccgggacgcagaggtttcagtgagtcgagatcatgccacta

SEQ ID NO: 213647 - DNA, 591 bp, Homo sapiens
atcggggaaaaaaagaatcaagttttgaaaagtatttcttagctcccacaaacaacaaaatctgccaataaagtatgattatgatcaccaagtgctccaactgcaattactcttctgtgtgtgtgttggggctggtgagggagcagaatacaaacaaaagcaaaaactacaaaataaggcatgagatctaactcaacaatagcatttgtagaaggcaaatagaaggtgaaaacttaagcactttagtaaacggttaagttaaaggaaatgaaagtgtgaaatggctgggggggaaacataaattataaacatgcaataaaacagaaaactgagaactagacaggaaagagtgctgctctcctatgcagtagagtgttagtgctttcagttctaggttccacctttataaatgcataaacaaactcaaacagattcttagaaaatgaccaagatggtaaatggatatcattattagatggttttctagggattctcagcctagagaactgaaatgtcagagagaacttggtaagtcttcaaataattgaaaagttatcacaaggaaaaaggattacatttgtccaatatatc

SEQ ID NO: 213648 - DNA, 1600 bp, Homo sapiens
gaaagtttaggaaccactgacctcaccaataccactttttccacagcaaataggttagaggaggcagaatccaaatccaggatgctatgaatcaaaaggtcaaccctttctcttctgccacggtgcacccccttccctcccccggccaaggccccagcggggtctgcaccctgcctcaggcccattctcttcttctgtgccccactccaccccacccaggatgacttgttcgcggacctggccaacctgagccacctcttcctccacgggaaccgcctgcggctgctcacagagcacgtgtttcgcggcctgggcagcctggaccggctgctgctgcacgggaaccggctgcagggcgtgcaccgcgcggccttccgcggcctcagccgcctcaccatcctctacctgttcaacaacagcctggcctcgctgcccggcgaggcgctcgccgacctgccctcgctcgagttcctgcggctcaacgctaacccctgggcgtgcgactgccgcgcgcggccgctctgggcctggttccagcgcgcgcgcgtgtccagctccgacgtgacctgcgccacccccccggagcgccagggccgagacctgcgcgcgctccgcgaggccgacttccaggcgtgtccgcccgcggcacccacgcggccgggcagccgcgcccgcggcaacagctcctccaaccacctgtacggggtggccgaggccggggcgcccccagccgatccctccaccctctaccgagatctgcctgccgaagactcgcgggggcgccagggcggggacgcgcctactgaggacgactactgggggggctacgggggtgaggaccagcgaggggagcagatgtgccccggcgctgcctgccaggcgcccccggactcccgaggccctgcgctctcggccgggctccccagccctctgctttgcctcctgctcctggtgccccaccacctctgactgcggtgctgagatcgaagaggccagtgtccgatccccgcttcccgtccacccggggctgcggctccggccccagtcgccccaccttccctggccttgctgcctccctttcccctcccagctcctctcctccccggggagcaggccgcctctccttgcctgccccctgggctgtcctgacttgtggcagccccaagagggcgtgtgtggtggctcagccctgccctccccagttctggccattaactcttccccatcccaaggctggggtggggccccccaggcagccgctgacccgcactcctaagggcccacagcggacaccagaggggcttttgtctgcagagcgtcttccaccagcagagcctttggaagctcccccagggagccccacccaggaccctttgggggatgcctcagtcagggccaggctgaccctgacccctgcttaccctagtcccctcaacctcctgacactggaggaatacttttctcctaagtctaccctggacactttttagggcacctggagagaactttcctctccactgtggcccctgcgtggtgaagatcaaaagaagttgtttgggaaaaaaaatttattaaaaaattctattattttatctactgt

SEQ ID NO: 213649 - DNA, 2253 bp, Homo sapiens
aagagcttcctcgctgtccccactctccctcggctagcagcctgggcacacggacagacggactgacggactctcgagcggacagcgcagctagcggggcgcgggcgctgggcgtcgacggccagccccagccttccccgccccgtcgcgccccgccccgtcccgtcggggccgatggctcctcccgaggcccgcagcccgggcggcgcagggtagagcgccgcggcccggccacgcagcccggggactcccgggccctcccggagccccgcggggtccccgccgtgcatccggcgggctcagggagcgagtgggagcgccctccccccgctgccccctcccccgagcatcgagacaagatgctgcccgggctcaggcgcctgctgcaagctcccgcctcggcctgcctcctgctgatgctcctggccctgcccctggcggcccccagctgccccatgctctgcacctgctactcatccccgcccaccgtgagctgccaggccaacaacttctcctctgtgccgctgtccctgccacccagcactcagcgactcttcctgcagaacaacctcatccgcacgctgcggccaggcacctttgggtccaacctgctcaccctgtggctcttctccaacaacctctccaccatctacccgggcactttccgccacttgcaagccctggaggagctggacctcggtgacaaccggcacctgcgctcgctggagcccgacaccttccagggcctggagcggctgcagtcgctgcatttgtaccgctgccagctcagcagcctgcccggcaacatcttccgaggcctggtcagcctgcagtacctctacctccaggagaacagcctgctccacctacaggatgacttgttcgcggacctggccaacctgagccacctcttcctccacgggaaccgcctgcggctgctcacagagcacgtgtttcgcggcctgggcagcctggaccggctgctgctgcacgggaaccggctgcagggcgtgcaccgcgcggccttccgcggcctcagccgcctcaccatcctctacctgttcaacaacagcctggcctcgctgcccggcgaggcgctcgccgacctgccctcgctcgagttcctgcggctcaacgctaacccctgggcgtgcgactgccgcgcgcggccgctctgggcctggttccagcgcgcgcgcgtgtccagctccgacgtgacctgcgccacccccccggagcgccagggccgagacctgcgcgcgctccgcgaggccgacttccaggcgtgtccgcccgcggcacccacgcggccgggcagccgcgcccgcggcaacagctcctccaaccacctgtacggggtggccgaggccggggcgcccccagccgatccctccaccctctaccgagatctgcctgccgaagactcgcgggggcgccagggcggggacgcgcctactgaggacgactactgggggggctacgggggtgaggaccagcgaggggagcagatgtgccccggcgctgcctgccaggcgcccccggactcccgaggccctgcgctctcggccgggctccccagccctctgctttgcctcctgctcctggtgccccaccacctctgactgcggtgctgagatcgaagaggccagtgtccgatccccgcttcccgtccacccggggctgcggctccggccccagtcgccccaccttccctggccttgctgcctccctttcccctcccagctcctctcctccccggggagcaggccgcctctccttgcctgccccctgggctgtcctgacttgtggcagccccaagagggcgtgtgtggtggctcagccctgccctccccagttctggccattaactcttccccatcccaaggctggggtggggccccccaggcagccgctgacccgcactcctaagggcccacagcggacaccagaggggcttttgtctgcagagcgtcttccaccagcagagcctttggaagctcccccagggagccccacccaggaccctttgggggatgcctcagtcagggccaggctgaccctgacccctgcttaccctagtcccctcaacctcctgacactggaggaatacttttctcctaagtctaccctggacactttttagggcacctggagagaactttcctctccactgtggcccctgcgtggtgaagatcaaaagaagttgtttgggaaaaaaaatttattaaaaaattctattattttatctactgt

SEQ ID NO: 213650 - DNA, 855 bp, Homo sapiens
gaacaccttcaacacttggaaactgaacagcacacttataaataatctatgggtcaaagaagaggtctcgagggaaatccaaaaacatactgaactgaatgaaaatgaggataaaatatcaaaaattgtgagacatggctttatccactgctttaatacagccgcactgagaggaaattttgggcaagaagaaaattctgaaatgaatagtttatgctcttacctccataacctagaaaaaggagaacaaactagacccaaggcaagcagaaggaaggagataataaaaatctaagcagaaatttaaaaagatacagagaagtaatagagaaaataaatgaaagaagtggttctttgaaaagatcaataaaattgacaaacctctagcaagactaacaaaaaaatggaggacatagattactattgttaggaaggaaacaggcaccatcactaaagaccctgcagacaccaaaagaataatgaaggaatacacaaactactctacatgcatagtttttaaaacttaggttaaatagaccagttccttaatgagcatgaactgtcacaactcacccaataggaaatagactacttgaataccctgtaactataaggaaattgacctagtaatttataatctcccaaaaaagaaatcttcaggtttcactggataattctaccaaacatgtaaagaagaattaacactgattctacgcaataccttccagaaaacagaagaggggggatcatgtcctaattcattttgtgaagctagtattaccctgataccaaaaccaggcaaaaagaacagaaaaagaaaactacagaccaatatccctcgcagattcagataca

SEQ ID NO: 213651 - DNA, 482 bp, Homo sapiens
ggacagtggagcccctgcaagtcatgaaaactgatggggcagggaggggagctccagccagaaatgggaagtgtctcaaaccttagtgaagtgatcttgaatctgatttacagggctgattttgacacattattctcaagaaaacagtggtttaggtcatggtctcaagctctatctagattgaaattctgtcaggcatgttagctcacatttgtaatccaagcactttgggaggcaaaggtgggaggatcgcttgagctcagaagtttgagaccagtctgagcaacatagtgagataccatctctacaaaaaattcaaaaattagctgggcatggtggcacacacctgtaattccagctactgaggaggctgaggcagaaggatcacttgatcccaggaggttgaggttgtgatgagctgtgatcatgccacagcactccagcctgggcaacagagcaagaccctgcctcaaaaaaaaaaa

SEQ ID NO: 213652 - DNA, 335 bp, Homo sapiens
ttacatccaaccaccttatacatttgaacacttcacgatagaaagccatgagacacagctgcttttattcaaaggccattgaataaagtagtagagaaagggttcaaataaccaaatgtaaaataactgtacagtttcatttaacttctactttattcataactatgcagatgtctgtgtgtaagcacaggccaaactcctaccttgcaaatctatcataatcttctggaattacactaatttttcatggagaagctcagcaagcattgctttgcaagaaatgaagagaagctttaaataatttacagagcctatctgttaggcctaagtctgat

SEQ ID NO: 213653 - DNA, 531 bp, Homo sapiens
cttgttgcacattgcatcttcagataggttcatgtacataattacgatttgtacctcttgacctacaccttcccattttctcctcctcacactgataactacttttctactatctccacttctatgtatttaacattttttagattccatgtataaataaagtcatgcagtatttttctttctgtgtttggtttatttcactttgcataatgtcttccaggttcatctatactgtcacaaatggaagcatcctcttatcttttaagtctgaataatattcctttgcaccacaatttcttttttattgtttatatctagaatgtatgtgaatatatatatatatacacccgtatatatacatatgtgtgtatattatatgtaatatataggttatataatgtaatatataagtttcaggaccctcaaacttccctgggagggtggaagaaatcatttctctagtgcttgatgctcaccagttattaactccatgtatacacaaggcgtgtgagttcatattaaaatctattt

SEQ ID NO: 213654 - DNA, 226 bp, Homo sapiens
cctgcctgcgggaggactaggttcctcaatccttctcctgaggtcaggctgggactagagtgaggcaagcaaggtgcctagggcaaaattttaaggaggcttgccctcccaggtgcacctgaatggccctgagggccagtgcccccttaaattgtgggcccttaggtgcctccttgctttacccaccatgcccccagccagccctgaccctgctgggtgttctggc

SEQ ID NO: 213655 - DNA, 203 bp, Homo sapiens
ggaatggaatggaatggaacaacccgaatggaatcgaatgtaatggagagtaagggagttgaatagaatcaatccgaatgtagtggaatggaatggaacggaatggaatggaatggaatggaatggaatggaatcgaatggaatggaatgcaatggaatggaatcaaccgagtgcaatcgaatggaatcgaatggaatggaat

SEQ ID NO: 213656 - DNA, 681 bp, Homo sapiens
agtaattcaaatatttaagctggtggatctctatcttgaagcaatgcaatcatggggttgagtcacatgacacacagctttcacatagccagctggaactctcctttccctgattacagattcgccttctttcttacctatagtgttttgtaaaatgttgtaaatgactgaagggaaacaggaaagaccctttccctcttcactttttttttattaatttaataattttttcacaattttatactgcctcaggactatttttctgtgtctatattttaggaaaaagttggaaagaccagaacattgaatatgagtaccaaaaccccaggagaaacttcaggtaatttgtacttacaagacaaagcagtgtctctctagacaatcttagaatatgacaatatattaaaaataagtaaaagaactaagtccaggatcaaatacatttatttttagaatatttgatcaaaaaacatatatataaatgtgacctaggctgtgggctcactcctgtaatcccaatcctttgagaagtggagataggaggatagcttgaggccagcagttcaagaacagcctgggcaacataacgagaccacatatcaacaacagcaaaaaattagctgggcattgtggtctgtagtcccagctactcaggaggctgaggcaggaggatcacttgag

SEQ ID NO: 213657 - DNA, 819 bp, Homo sapiens
tgttcctccagacactgagggggtcgcattccttacctcacctttgtccctgcgcgggctgcggctgggatccggtctttccagccccgagagggacctggttcctctgcccaggcttctgtcactctgtcacctacgctatgccctgctgtagtcacaggaggtgtagagaggaccccgggacatctgaaagccaggaaatggacccagtggcctttgatgatgttgctgtgaacttcacccaggaggagtgggctttgctggatatttcccagaggaaactctacaaggaagtgatgctggaaactttcaggaacctgacctctgtaggaaaaagttggaaagaccagaacattgaatatgagtaccaaaaccccaggagaaacttcaggagtctcatagaaaagaaagtcaatgaaattaaagatgacagtcattgtggagaaacttttacccaggttccagatgacaggctgaacttccaggagaagaaagcttctcctgaaataaaatcatgtgacagctttgtgtgtggagaagttggcctaggtaactcatcttttaatatgaacatcagaggtgacattggacacaaggcctatgagtatcaggaatatggaccgaagccatgtaagtgtcaacaacctaaaaaagccttcagatatcacccctcctttagaacaccacaaagggatcacactggagagaaaccctatgcttgtaaagaatgtggaaaaacttttatttcccattcaagcattcaaagacacgtggtaatgcacagtggggatggaccttataaatgtaaattttgtggga

SEQ ID NO: 213658 - DNA, 707 bp, Homo sapiens
tgttcctccagacactgagggggtcgcattccttacctcacctttgtccctgcgcgggctgcggctgggatccggtctttccagccccgagagggacctggttcctctgcccaggcttctgtcactctgtcacctacgctatgccctgctgtagtcacaggaggtgtagagaggaccccgggacatctgaaagccaggaaatggacccagtggcctttgatgatgttgctgtgaacttcacccaggaggagtgggctttgctggatatttcccagaggaaactctacaaggaagtgatgctggaaactttcaggaacctgacctctgtaggaaaaagttggaaagaccagaacattgaatatgagtaccaaaaccccaggagaaacttcaggagtctcatagaaaagaaagtcaatgaaattaaagatgacagtcattgtggagaaacttttacccaggttccagatgacaggctgaacttccaggagaagaaagcttctcctgaaataaaatcatgtgacagctttgtgtgtggagaagttggcctaggtaactcatcttttaatatgaacatcagaggtgacattggacacaaggcctatgagtatcaggaatatggaccgaagccatacaccaatctcactctgtcacccaggctggagtgcagtgggcgtgatctcaggtcgctgcaacctcttgctccaggg

SEQ ID NO: 213659 - DNA, 453 bp, Homo sapiens
ttgctttgtagaaccctctagaaagaagacaaaatgctcttagataagctttgtaatacaatctgtattaaaaagtagatggtaggttttttagagcacacaatgttggtccattttcctcagtacgttgaatacatgtctgtgggaagacatctcatattcattctcccagtgttgatttgaggagatttttttttaggctggggagaaaagaggggcctgtaggctagcttttgccaagaccttgttccacaagtgaggctgtcttgaagagtataggacctgtgcaattgcatagggcaccgtgcttaggggagccctgagcttgggtcattgtcttaaaattgttaaaaatttgtcaggaaggaacgccacattttcatttttcactgaaccctgcaaattagccggtcctgtcaactagagtgttactcttaatgccactcatgaggc

SEQ ID NO: 213660 - DNA, 756 bp, Homo sapiens
aaagaccctgacattgatcaagaatacaagagagaagacacaaatgatcagttctatgaatgaaaacaggcattaagaggataaagagaggatattatggactattttgtataacaaaaatttagataatatggacaaaatcctagaaaaataaaacccaaagtgaagaaatagaaaactgaaatagtcctaatgtgactaaagatattgattcaattttaaacttccctacagagagaactccaggtccagatatcctcactggcaaattctatcaaacatttaagaaagaattccaatgttagctgaactatatggaaaaataaaagaagaatatacattctaactcatattatgaagccagaatacccttgataccaaggcctgaatggagtgagtattaaaaatttataggtcaagctcgtgaacaaaagtgcaaaaatcctaaacaaaacattaggaaaacgaaccagtaatacataaaaggacaatatatcacaaattaaattgggcttattctaggaatgctatattaacagcttaatggagaaatatcatacacctcaatagatgcagaccaagtgtttgataaaattcaacatatattcatggtgagcatggtaagtactcttagaaaactaagaattttttgaaaagtccttaatctaatacaggttgagtataccatccctgaaatgctgtttcagattttggaatacttgcatcatacttactggttaaacatccataatctga

SEQ ID NO: 213661 - DNA, 313 bp, Homo sapiens
gttctccttaactgcctcaattctgtgtgacatccagatgttggtacacagggaataaacttaaggatcttcatcagatgtcactgaccagcaaggctgtgaaaacaatactatgtgatgatatgattttgttcagtgatgagaggaagcagtgagttgcctgtactactgatttcatccatgaaaattaagagtagccccaaaattataagaccaactgaccctgccctctcttttaattacacaatatgtttggccaggtttgttgttgttgctgttgttgttgtgacagggtctcacttcgtcacccagg

SEQ ID NO: 213662 - DNA, 487 bp, Homo sapiens
agactgttgtcattaaaccccactcctgtttaggaaaccccagggccagaccccactgccggaacaggaccctctcgtgcctgcagatggcaaagctcctgagggcctgatggaccctccaatgtcccacggccacagtttccaccttgacgccgaagccctgggatggcccctctgcaacgcccagtgctccatcatgacctggccccaggacgctgactgagggagcggaggggatcgggaccagggggaagcagccccccagtaaatccgaagcacaggcacggcacagccccaagggagaccttgtaggcgcctggccagcagggctgaggagaaagtctccactgcagggcgcctcctgggcccacgccgtgtggtcctggccccaagctgcccactgggcattcagcctggacagctctcggcgctggagacccagaggacaaggggacagcaacatcaaagaccacagcgacccgaagcc

SEQ ID NO: 213663 - DNA, 301 bp, Homo sapiens
taggctaaattatgatgtttggtaggttaggtgtgttaatttttgacttaatgatattttcaacttatgataggtttatcagaatgcaaccccaccacaagctgaggagcatccgcatttaagcacaaagtcaaaaaggcagattctgtttgctttctcaattttatctcctcctccctttactactaaatgcacctaaaacctttcttcccaagaccaccaatagcctcccagttgctaaaccccactggacatctggcatcttggttgcaccctgaaactggtgactactctacatctt

SEQ ID NO: 213664 - DNA, 450 bp, Homo sapiens
caacagaaatacattccggatggtcaatgccttgaaaacatatcctaggcggcacaattaaagaggctgtgaatgtttactctggacgagaggatgtttggaggcagatattttcacatatctgcagggctgccatgcagatgaaaggaaggtagtggacacgactgtgtgccaggggtttccatgcactgtatacccttctcctccgcagggacatagccctgtcttcctttttttttttaaatcaagggtagttaacttgctcagaatcacagccagacacaggagcaccaggtctttattacactcagttgctcccctggaagtaaacctgttctgattggctttggggggcaaagtagggtcattgggtggatgttgaagggatatgaaatttaagctcagtacaaagtaccgtcttaacaaagtcattaaaagttagaatgcgtt

SEQ ID NO: 213665 - DNA, 237 bp, Homo sapiens
attatggctaatattatatttttggatgattagaaaaatataaaaatgagtaaaagaattttcaataatttggatcaaaatccctggaattagccagtaacagtggatcatgcctgtaatcccagcattttgggaggccagagtgggtggatcacttgagctcagcagttccagaccagcctgggtaacttagtgaatccccatctctatagagaaattaaaattttaaaatatttt

SEQ ID NO: 213666 - DNA, 508 bp, Homo sapiens
agatggaccatcccaactagtaggacctggaaaagagggaatattctttctgaatggtgcctcaggtatgatatgtttaggaaattgatgaccaaatatatgctatcagatattcattttgcctgggagaattttctcctttagtagccatgttacttttcaatcactgagaagcattttcttggctatcatatttagcctgctaaaaacagtgcattaaatggaataggcatcttgaataataagacaaaaattcatatttgccatttgaaagtatatttctttcataaatgcagtcctataataaaacgaaatcattttgtaatattgattttacttgttttagatttgcttcaaaatatagagaagtgggagagtggatgggattgaggttgaggcaggaatggtcatggtgagtcattgttggggccaggtgatggatagatggtgattcattatactatatgccccccctttgtatatttgaaataaaccaataaaatgttga

SEQ ID NO: 213667 - DNA, 145 bp, Homo sapiens
gaccacaatggtcactggaccaaaggagaacacagggcttgggcactagtcctgagtctgcctgtatttgggtgtgtgcctttggtcaagtgaccattgtggtccttagcttcttccaggtttcaaactttatccaagtataatt

SEQ ID NO: 213668 - DNA, 404 bp, Homo sapiens
aaagaaagtgtcttcttattcttccatcagtctttgcagagtaaaaggaaatggtatctgtttggtgctagcggtatcccttaaaatgttgatagagaaaagtatattttacttgccaagatatctttaagatgaaaaggaaaatgtttgatgttcaacagatgtctagtgactgaacttattacttatatcaaatcaatttgagagatttgaaaaactaaggggattggatcatgatagaagtaccatatgcatggtgtcatctctcattcgaagtacgtaagacagaaagggaatgcctttatatgtatacgaattggactgcaaggataagcaacaaaataaaatttaagtaacaggatttcaaaaatcgatgtagtcctttataaaattgatttaaccac

SEQ ID NO: 213669 - DNA, 457 bp, Homo sapiens
ggtgggagaattctgtttttcgctaaagggagctgtcagttctcaaaacacttagttcctgaccccctaccttcaaggccccgagaaagccaaacagagaatctgacagccagaaaaatttgtacataaggcattaaagaatactcaatatactttaatttctagccctgctaatccatcctgttgtcaacagcaaaacaatcaaatacagccagttgtctgcaccgaggtaactgggctgtagtatggggttaggtttgccacataacctaaggtaatgcatggcagagggcactttaaggggcaacggctctttggaactcagtggggggtgccctttcgttagaacagggaaagaaaggcaggtccttttgcatgggaaaaaaaaaatcacaataacctaatccctttagagagccatcagacccgtaaagattaaaaaacaaacaaacaaaca

SEQ ID NO: 213670 - DNA, 406 bp, Homo sapiens
tgtattagttatctattgctgtgcaacaaattaccttataatttggcagcttaaaacagttaacattttattatctcacaaagttgggatttgggaagtggcttagctggcaggctgtggtgcaggatctctcactaggctgtgctcaaaatgttgacgggggccaggcacagtggctcatgcctgtaatctcagcactttgggaggccaaggagggtggatcactttaagacaggagttcgagaccagcctggccaacatgatgaaacatgttgaaacatgttctgtatttttagaacatgtttaaatacatgaacttaaacaggtatttaaacagaaatacagaaattagccaggcatggtgacacatgcctgtaatcccagctactcgggaggctgaaacagg

SEQ ID NO: 213671 - DNA, 996 bp, Homo sapiens
tgctgggattacagacatgagccaccacacctggccgcaaggtgacttttgaactgaaacctaaaccataggaaagaaccagccacatggagatgtgggctattccaggcagagagaaaaatcccaagagcaagggccttgatgtgggaacaatcttagcagtatgacagaagcacagcgagcagggttgggaccacatcacgtagggcctcataggccatagtaagaattgtattctaagtatagcacgaggctactggagcattttaagcaaaggaaaaattattatcaactttatttcttgaaatcacactgagattcctttttttgaggaaatagagtcaatgagggaaaaagtcgaagcagagagggagaccagttatgaaattattacaccaatctaaggagatggtggtagcttagggtggtagcagtgaagatagctgaagtgatgaaatttgggactgatcggatcaactgacttgcagatgattgaataaaaggattaagggaagaaacaatggaggagacactgggttttatctgaataattgggatggtaatgggatcatgagtcaagatggggaaaactggagaatagcaagtttgtagagtagaggttgaggggttgggaacagcagaattcagagttctattttagatttattatgttggatagaccaatctgacatccgggcaggtaattgtacaaaagagtttggaatctgagggagagagagagccagagagagaaagttgagaattaccaactttgtataaataatatttaagttcaaaggactggaatccctcatcctaggaaagaatgtagatagagatatgaagaccaagccctgggacatatcaacctcatgaggagatggacccagcaaaggctacttaaaagaaacagtgagttggggacaaggagagaaactcagtagggtgtggaggtgtggaagtcaagaaaagaaagtgtttaaggaggcaatagtg

SEQ ID NO: 213672 - DNA, 245 bp, Homo sapiens
ggagaaacgaacaccctttgtaagcatgtgaaaagtttctggagtagagagatgatgaagcaggatattggagtcaacagccgaagtttttatcttattttttattttgtattatactttaagttttagggtacatgtgcacaacgtgcaggtttgttacatatgtatacatgtgccatgttggtgtgctgtacccattaactcgtcatttaacattaggtatgtctcttaatgctatccctccc

SEQ ID NO: 213673 - DNA, 405 bp, Homo sapiens
gaactctcccccattgccctcatagtatctctggcagtgatgactacaaagacacctgggggatagttaccaaaccatagctttgggaccatacaggagttctgggtggccaggtttacaatggaagcagtaaatatcttacgcaagtgggccagatacctctggctgctccacacctgcttggacaatgagcaccttcaccacaactgcaatggactgagatggtcccccaggttttccggattgggtaagccctggggtttttgcatccccacaaagtctctgaaattagatgttccacaaacctggcaggtgggggtgaagctaaatttaattggatttgaattagacagataaaagtttgatttgattcagaaataaataaataaatataatgttcttcta

SEQ ID NO: 213674 - DNA, 459 bp, Homo sapiens
cagggaaacaatgatttaaatgactagaatttctcatctgcaatcatgaaggccagaaaacagtgaacacctttaaactacagtaagaaaataactgtcaacccagaattatatatacatcataaacatttttcagatatgaaggcaaaataaagttattttaagatgagggaaaactaagagacttcttcactagcagatttactctacaaaaaatgctaaagaaaattttcaagttgaagagaaataatgtcagagagaaatctggaaacagaaatgttttgttaagagtaacaaaagtggcaaatagctgggcacacctaaaactcaatttttacctctttatattatacttacattatctattacatctacatacattgcaacctcacaaggtaatgttatgattttgattttaaagaggcatacatattttaaaaaacataagagggaaaagtt

SEQ ID NO: 213675 - DNA, 165 bp, Homo sapiens
tgcatgtagctccactgataaagaataacaatgttttatgaacctttgtcaggtcttttaaaatgtatagtgaaggataaaaatcactgactggtaaaggaagttaaaatgaatgttcatagtgctttctcctttggaaaagatactttctaagaaatgcattat

SEQ ID NO: 213676 - DNA, 657 bp, Homo sapiens
gaaggggccctgcacttcggtgagtagatctcagatttggaaggatcttagatgtcgagtttgaagctttggtttaacagagattgggctgcagagaagtgagctctaccccccaccccagaccccacagctcctggtgggaagcagagctgagattggggtgaaggggcctttccaggtcctactggcccatagtgtcaggaccctggctgtttgggctgtgggctctcatgggacctggagcagggggtgtgacaggacaggaatcccgggggcctgcaccagaacatggcagtaccttggagagaaccaccctgaatctttctggtccccatgtcctctgtttccttcctcagtttttagtcctgtccctctttctcaaggtctgtgtgtccatcccatctgtttctctgccaacttgaagctcagggcaactctcctcttccctggactcatagtggctgctgcgacccctccccccagcttcacttccttccatccagagataagatcctgggcccaaagaggggtcctgatgagcttggggggccattgatcccgagaatcggacacagctctgtgtgtgagtgcatattccaggaaaggggtctgtagctttcagtagacgcttcaagatctatgcagtcttgtctgttg

SEQ ID NO: 213677 - DNA, 552 bp, Homo sapiens
atcatttaatatccaggctgattaattcagctgggaagcagtctatagaagctagtatggattccattccttggtgagtcaaatcacttatttcttagaagaaatggcattagagcttaactgtttttctagctcttgcaaagcatgtaattgatgcaaaattagctaggtcccaagcaataagatccaagaaagatctgctagctggacaattttttctaatccacattaaaataaagacatatataactgttaaaataaaaatgtatttatacacatgcatcttacaatcccacatttgactggtgatgcatgggccatgcttggggaaacactgcaagagatgtgattagcctgggctttggggaggaactgagttcaaattttgcctccataactaacttggtaaccgagaacttaaccttcttagccttcattttctcatctcagggtggacttactagtagttcctacttcatatggcatttttcagaattacttaagctagtgtctataaaggataatgtgtagtacctacaaaatgttagtaaa

SEQ ID NO: 213678 - DNA, 428 bp, Homo sapiens
cagcttacgtaggtctttaggtatttgtggcagggagtgtttaccttaatgtcgggattaacgttaatgggaaaatgtctagaactatgctgtccaatacaggagcttctagtcaaacatgtgactatcgagcatttgaaatgtggctagtctgaactgagatgtgtgcacgtgggaaatacacaccagagtttgaagaattagtacaaaaaaactcattaatgatttttatgttgattgcatgtggaaatgctaatattttagatatattgggatgtattattagcttttcacctgtctttttttgccttttaaattgtgactattagaaaatgttaaataatcttaaattatatatatggctcacatttgtactttgcattatttttctttcagacagcactggtctagcgtgataggagaggagg

SEQ ID NO: 213679 - DNA, 103 bp, Homo sapiens
ctgctttatattacttctcctatgcctttcagcttttgtctaaggaaaatggtttttgtagacatcaaacacttggcatgcctcatcccttctgtgggattac

SEQ ID NO: 213680 - DNA, 438 bp, Homo sapiens
tagggaagaaagagagagagagagaaagagagagagacaagtaaaataaagcaccacctccttgacctgactcagggcgtttggggtcttctggggaaatgttctgaaacaatggagtattttggtctgttctttcttgtgtctttttttttttttttaagacggactctcgctcagccacccaggctggaatgcagtggtgcactgggttcactgcagcaaatatctcccgggttgaagcgattctccagtctcatcctcctgagtggccgggattacagtcacgcgccataatgccctgctaatttttgaacattagtagagaaggggtattgccatgcttgcgacgctggacttgaaggcaaaatgaaaatgaaaatgaaacgcaacaaaataattaaaaagtgagtttctggggaaaaagaagaaaagaaaaaa

SEQ ID NO: 213681 - DNA, 308 bp, Homo sapiens
tgcacgtgtaccctagaacttaaagtataataaaaaaataatgtttatatttagagcagatttagggtcacagaaaaatggaacagaaaccatcaagttcccacagagcccctgcccatccacacatacacacggcctccctcactatgtacatttattacatttgataaacctacattgagacatcataattatccagtacatagctaacattcacttgtgtgtgtgtgtgtgtgagagagagagagaaagagagagagagagagattgacagggtctcactatgtcccacagggctggagtgcagt

SEQ ID NO: 213682 - DNA, 290 bp, Homo sapiens
gtgtggtgggctcaggatggttatacccattttatagataggaaactgggtactagagaggtctaataaatgtcccagaatgacccagcaggaagtagctgactacgactccagcccagggcttggggctctgtgtctggtgctccttcctaggctggcgggatgaggccatgcttgccaaagtcacccgggctgcctctggcccaaagtgacggagcagttggtcagctagtcctccaccccgaggcctctgagaagagaggaaacaccggtctgcgggggattcctcc

SEQ ID NO: 213683 - DNA, 738 bp, Homo sapiens
gctacatgaaagtacagtgagttaaacggagagatagaaagcaggaagttggaaagggaattctgatagtgatccgttccttgattccaatttttccagagtcctaacttgagacttcttatccccttggactttgactcagcaagatgctttggtgcgttgttaatatctttgcttccttcttcagctaagtttacttggcctatttaaggacagtcacaaaagagagttaatggataccaaagtttggaagagacagcactatctcactgtaacttggaactgaaccagatggggtctcgttgtgctgcccaggttgctcttaaactactgatctcaagcaatcctcccacctctggctctcaagtagctgggattacaggcaaataatgatggaaatctggggattcttgatgggccgttgagattctaatgggatctggtataaacacattttagcagagacttacttcctctctgaagttttcctgacgttgaaatataccacaacaaactcagtactgtcaaaagtactggttcttaaatacagagcacatatatcactccagtggaagagttcatcagatagtgagaatctcacctataaatctcaagcatgcctgccaaggagtctcaagtcaggaacagaggagaaaatagccatcaaatagggcgtcttgtcagtattattcaaatgtaatagaaaatcaaattataataaaacatttaacataccaa

SEQ ID NO: 213684 - DNA, 682 bp, Homo sapiens
atcaatggaacagaacagaaattcttatattctattctgaaagagagtcacactagtagggccaaatgacttttgacagaattacaaaaccataaaattaattcaatggaggaggtagggccttttcaacaaatcatgttggaacatttgagcattaggaggaaaattttaaaaacccttccaaagctaaatactcaaaaacctttaaactaaacctcaaaccttgtacgaaagttaaattgtgaagactatagatctaaacataaaatgtataaaagtttaaggaaatataagagagaatctttgtgaattattagtttttttaggatgagtatgagtacatatataatggatacaaatctctccttttccatcattttttatagagacttacttcctctctgaagttttcctgacgttgaaatataccacaacaaactcagtactgtcaaaagtactggttcttaaatacagagcacatgtgggtattgtttccatggaggttccatattttctatggtaacatctctgttttaatgtctgctgactgtattcatgaacgggactggtgttctgtgtgtgtgtgtgtgtgtgtgtatgtacaagtgtgtatgttgtgtagtgatgttgggcagataaaataaaaaccagaagactgagtgaataaccaagagaagaaatt

SEQ ID NO: 213685 - DNA, 649 bp, Homo sapiens
gctacatgaaagtacagtgagttaaacggagagatagaaagcaggaagttggaaagggaattctgatagtgatccgttccttgattccaatttttccagagtcctaacttgagacttcttatccccttggactttgactcagcaagatgctttggtgcgttgttaatatctttgcttccttcttcagctaagtttacttggcctatttaaggacagtcacaaaagagagttaatggataccaaagtttggaagagacagcactatctcactgtaacttggaactgaaccgtaagtggaaattaatattctataggtaatgaaaattcttcaggaatatgcaaagcttttccccctaagcctcggaagtacaaaatgacatattaagtttaattcacttaatagaaaaaattaaatgacctctataattattaatattgttaatagttcctttaggatgtttggcagctttctttattacaacttttgttctttttctttagtcaaggatttgttttattatgtttaaagaaatgagcaaaatatatacattccataaaataattaaaaataactacccttgagatttcagaccccagatattggcttcaaatgttccagattacaaattgattcaccaaatctgagatg

SEQ ID NO: 213686 - DNA, 672 bp, Homo sapiens
cagattcaaccaacagctaaaaattatttactcacatgcttagtttaaaacattctggtatcataccacaccacactgaaaaacatcacgacgtactgtatgtagtggaaccaaataaatacgctaaagagtattttccagtattcgctgttacaaaatcataacatcctatgatacaaacaacgagattgtataacgtccccacatcgttttttcagaactaacaaaaaaaaaaaaaaaaagtggagaaactcagcaaaaaaaagtggcgagaaaagtcgggggaggggcggtagaagagaaggggcggagaaacacgacactgaggcggtgatatcacccacagccaacggcatggaattcagaaagttaagtgtcacccagcaatctcggtgcggactcgcggcgcgcctgcacagcgtggcggctgcatcccagccaagcaggaagggggagggggaggcctgactgagttcgctcgggggcagctgaggggagggctgcccgcctcccggacggcgcacgttcgagtcccgggtcgggagacttgtccgtcgcccgacaatgatttcatcttttcggaagagctgccgcctgggccgcggctgccacgtgcctggtctggccccgtgcgctgcgccgggggacctacccggacggggccgcggccgc

SEQ ID NO: 213687 - DNA, 1219 bp, Homo sapiens
gtgacgctttcattcttcacagctgctatctgatctcatgctaatcagtgtttttctgacaacaaagtcaaggtttctcagaagagactgccagatgaaagaatgggacaaaagacagaagcccgtttctgtacccagctggacaggtgaagtcatttaggtgcaggatgatctggccattccaaatatgcacggctttccaattttgttaaaatgaaacccagcctttgaaaaggcccggacttcctacaatgcacagtatttatagcgtggagggcactgtagagacgtcatcagtgtattcacaacagcaagatccacggaggctctgccatgtgccaggcatgagacaactgtttacagaaaacatctcatttcatcctacacagagtatacagactgcttcacagaacactaccaaagaggaccatcaaatgatccccaggaagtaatgagtgccttaaaataaagaaatatgaagggccagtaacgccccactgaagaacgctctcctggtggttatactctgtagtatggagcacaacactgccccatgctgcgcgaggctactattctatactacactactatgatcggtttgttctattctatactattccattctctacgatacaatattatactgtttcattctacactatataatactgtactatctgttctattctatactattttcttctatactgaaaggagttagccagcttgctttaggcagacagtaagcgaagggtcccagacagcctccagcccatgttttgtgcagataggggaacttgctcagggggcttgcctaaacatgctcacagtagactgagggtccccatacacatgggggaatggggtggagccaccagaaattcgctccttatgcaaacagggagcccagccccatcagcttctatgtaaaagcccttgtagtcaactgggaagggggcaaccagcaacctgctctcaggacccctctttttgctgagacctttccttttcgcttaataaattctactgcactcagtcttcgatgtccatgtgtctgtttcttcctggttgtgagacaagaacccggacccagctgagctaaagagcaaaaatcctgcagcagtgctacagaacactgtcctctctgttctgtgctatgcgactctactattccacactacgctatgtaatagtcactgccatctctgttctgtgctat

SEQ ID NO: 213688 - DNA, 993 bp, Homo sapiens
ttctcctgcctcagcctcccgagtagctgggattacaggtgtgcaccaccacgcctggctaatttttgtatttttagtagagacgggttcgctctgttggccaggctggtctcaaactcctgacctcaagtgatctgcctgcttctgcctcccaaagtgctgggattataggcgtgagccaccgcacctggcccaaattgacagttgatcagatgtgctagtgctgtttagatggagttacttaaaaggcagagcgtgtccctgcatcagctccttttggctgtgatttcctctcacacttggttcggtttctgttggttttccaagtagagctgcactcacgcttgcccaggtggggctataaagagaacgtggtgtggcagcaaatgcttctccccacagacacagatctcagcacattgctgttcaaagactttgggggtttgcttttgtttttttgttgttgttgtttttgttttgttttgtttctgcttttaatcattggcaaggtttggatttactggaaattattttagaatttctggctcattttatacaattaactgtagccagaatgaagtaaaatgtctcaccacatcgaaaggaatctaggccacatgagaatttgcatttttaaattggcattgatgtgggaggtgagatagtgaagttggtcacatgcgtagatggttgccaggcatttcactgtgcccatttccagaatccaccccgagatcatagacaacccactacaaatgggtcagaatgaaggtgttgggtcagattctctttttatttgattttgaaaattatttccttgtgtccttcctactttcaagtaggaaattagcccttgcctgcctctacattgtgggttcatttgatcagctcaagtccatttaaagctgattttccaagcagtagctgcacattcgggctctagaacctagtaggggttctggatgctaggggccgtgtttcaagattctcaca

SEQ ID NO: 213689 - DNA, 596 bp, Homo sapiens
cgcgccctccctccccatcccacccccctccttcccctcgatccagccctcatgaccctgaccctggccgcggctgcaggcggctcgccaggcgcgcaccctcggtcccacctccctctggctcgggcctgagcattccgcagcctcggccggcccgggcctcttctccgctgctctgctcccccaaggactttctgtgccccactcctacccaggcagggctgccctgtcttgggtcctttacgggggaccattccccagcgtccctgagacactcatcctgggatttcttcccctaaatacagacattctcaaaccaaatgagacctcgaggtccctacacctgatcctgcctcccactccctgagccacactgagaaggaaggtctctcctttagggaggactctggcgcctgcaaccttgatcgacagcaaagatgtccagtgtgtatcctgcatctgcctttcctgaccattctcgtgccccattctccgtgggatagattctatggggagtgggggagcttcggtgtggagaacgcatgatggaattcataaggtgagcagaaactcaaggaaaactgtccaaataccgg

SEQ ID NO: 213690 - DNA, 526 bp, Homo sapiens
tgggggcctggtagcaagcttcactgacagccacagacagcccttgctaggagcacagattgggacctcacagtccaggccctctcatcctccccccaaagtcacatcattcccctgtcctcacctcctagaggaacccagtggggaggcccccagctgtgggtagcattaatacccccacatatatccatccccctggggaaatgagagcacccagaagacttaactgcagcgggaaagaaattatccttaaaacagatgagcttggtcagaatggaaactcatttccccaccggaggaaaacaaggaagagaaacagacaaggaggaagaaagaaggcaggaacaaggcctggagctcttgtcgtcatgaaggtgatgaaagtgtttacttgcaaagtatagccatttcttccctagaaacaccctctttgctgaggcagcgggaaagggtcggcctggtctgttattccaggggctgaactggttggtgttattaaacttttgttagttatcatatcataata

SEQ ID NO: 213691 - DNA, 295 bp, Homo sapiens
aattaggttaatggttaaaagcacaggttttggaattgaaaataattgtttcaacccttaccttcccctttcgtgctgagctaagtagtaataccatcatattttgggttgttgtaggaataaatgcagtaacacttgtaaatcacttaactgagtgcatatcttcaaaaatactgtgtaaatgttttataaaagcataattatttttattttttatttgtatattttatttgtatatttagaagtttccaatagttgctaatttgaataaagagtaatagaatgaaataataga

SEQ ID NO: 213692 - DNA, 820 bp, Homo sapiens
gatatatatatatatatatatcatccatatatatatatcatccatatatatatataaaatccatatatatatatatatctccatggagatatatatatatatgtgtatgaatgaagcacttagtaggagcttttgtgacccattattaagcaaaatgaataaagttcattaaaatgaaactgtatttgattgctttagagctttgattttttttttttttcttgaacaaattctgcagaaaagctaagtggaattatttaccacttgggttggatttttggttatccttcctatttaaggccacacccagcaatcctaatagagttgaatggctgtgtttttaaatacgcagtgattctattggactcatgccaagcagcatcctggattttctgtgcatcagtgtctatgtgtggattagcactgacatattacataccagccaatgtcctctgctctcttcatgtatgctggtttgcaaaaaaaaaaaaaaaaaaaaaaaaagtagaaaaattaaaaatgctgaatcccgcagaaagtttccactccccagaccaaactgtgtgcatagcggggagaagggaccagatggccagtgggttgaaatcagtggaaaaccagctgggatgcatgagagggcatttcctcttccacttccctggaagcctggtcggggcaagtcctggaggtctgagcaggacaagaggtgtcaatgtcatggcctctgtctggctttctggatccttagatgaattgcagttggattggaatttggcacaaaaatctgaggataagctgttagttttctgctttctggaaa

SEQ ID NO: 213693 - DNA, 397 bp, Homo sapiens
aatggcttttccctgatgtcggagttgttatgtcagttctgggagaccaataagaccttgtccttcctttggatccatcagaaaaagcccctgggtgggtaagatggatggcagggctctcctactctatgtcttttctcacacctagtgggtataagagaggggaccacaaacagagggggctctggtaccacttatccagggtctggaaacattttctgtaaagggccagataataaatgtttcaggtacaactactcaaccttgcatcatttcagaaaagcagtcagataatacataaatgaatgggtgtggctggacttgtcctgcggtcccctgtcttatatcattgtattatatcattttttcttacatacaaatttagaagcaatactta

SEQ ID NO: 213694 - DNA, 385 bp, Homo sapiens
atttattattattattagtttaatgtttgcatgatggcttgcatatttttgaaacaagttatttagtataaacattaggcagtttatatttactgtatttactgtttgctttatcaacaggtagaaggtcttgagttcgctgacgttactctcaaaatactttcaggtaattgttgtcaaacaagagttgacaatttgcattttcttgattactaatggtgagtattttttctttttattttattttatttatttatttatttatttttatttttaattttttttgagatggcgtctccctctgtcacctaggctgggttaggttatttgccagacaaacaataatgacaaataaccttggaaaagaaagtatgttaatatctct

SEQ ID NO: 213695 - DNA, 991 bp, Homo sapiens
accgttttcaagtgaccaggatgaagacactccagtttttcttccttttctgttgctggaaagcaatctgctgcaatagctgtgagctgaccaacatcaccattgcaatagagaaagaagaatgtcgtttctgcataagcatcaacaccacttggtgtgctggctactgctacaccagggatctggtgtataaggacccagccaggcccaaaatccagaaaacatgtaccttcaaggaactggtatatgaaacagtgagagtgcccggctgtgctcaccatgcagattccttgtatacatacccagtggccacccagtgtcactgtggcaagtgtgacagcgacagcactgattgtactgtgcgaggcctggggcccagctactgctcctttggtgaaatgaaagaataaagatcagtggacatttcaggccacatacccttgtcctgaaggaccaagatattcagtctgtgtgtgtgcaatgtgcccaggggacaaaccactggatcaggggattcagactctactgatccctggtctactggcagagggaactctgggaattgagagtgctgggggccaggactccatcatgattcagctctatattcctaggtctgatttcataaggtttattcagtcttaactcacagacttgtgcctggtttcttctttaaaaatcttagaaatcttctcaggcaatgcctctctcttagggggaaacataagcctagaaggaggaagcagtaatgggagtgagtgaaagaactaactgcagcagtcttctggtagactcttgggccctctagagcaaggtcagcatcttcagcattgtagcgtcaatgcctagcactctgcctggaacttagaaacacaacaatgacttctttagatcagaaaggtcaagggtagaaaatactggaagacgatgtttgaggtaagctgatgaggctgcccgcagccacaccagtcccatgaaagttagtggcatc

SEQ ID NO: 213696 - DNA, 984 bp, Homo sapiens
ggaaactcaatttggaaaataatttcgaaaatgattgtgagcctgaatacccagcatgccaaatgttttgtcacatagcattttaaaattttatttatttgtttgttttttgagacaagtctcactctgttgcccatgctggagtgcaggggtatgatctcagctcactgcagcctttgcctcctaggttcaagtgattctcctcccttagcctcctgagtagctgggactacaggtgtatgccaccatgcctggctaattattgtatttttttttttagtagagatggcgtttcaccatgttggccaggctgatctcaaactcctgacctcaagtgatccacctacctcagcctcccaaagtgctgggactataagtgtgagccaccgcacctgccatttggattggcaatctgcaagattttattacttaaatgcaacagatgttctcattcattgttctgaagcttggagttccaatgaaaaatttaggtggagaactgagtttagaaaatccatataatgtttagtaaaactagtatttcataaatgctgaatgacagagattggtctttaaattaaaacaacagtgtgatgttgggtattttttttctttcaaaatactaaggattagatcagtggtcagcaaactacagctgatagcctgtttttgtaaataaagttttactggaaaacagccactcttactcatttgcagattgtgtatggctgctttcatgctatgatggcagagttgaatagttgtaacagagattgtataacccacaaaatccgatatgtttacgaactggctcttcatggaaaaagtttcctgacctctcatctagatcaatggggttgtacgttaccatttaaaaatatttaggttgtaatctatcctcttattacttgtatttatgggtaactattttgtaagtaaggctgtttcgtatagaattaacgtggtttaggtaagcattcagaa

SEQ ID NO: 213697 - DNA, 930 bp, Homo sapiens
ggaaactcaatttggaaaataatttcgaaaatgattgtgagcctgaatacccagcatgccaaatgttttgtcacatagcattttaaaattttatttatttgtttgttttttgagacaagtctcactctgttgcccatgctggagtgcaggggtatgatctcagctcactgcagcctttgcctcctaggttcaagtgattctcctcccttagcctcctgagtagctgggactacaggtgtatgccaccatgcctggctaattattgtatttttttttttagtagagatggcgtttcaccatgttggccaggctgatctcaaactcctgacctcaagtgatccacctacctcagcctcccaaagtgctgggactataagtgtgagccaccgcacctgccatttggattggcaatctgcaagattttattacttaaatgcaacagatgttctcattcattgttctgaagcttggagttccaatgaaaaatttaggtggagaactgagtttagaaaatccatataatgtttagtaaaactagtatttcataaatgctgaatgacagagattggtctttaaattaaaacaacagtgtgatgttgggtattttttttctttcaaaatactaaggattagatcagtggtcagcaaactacagctgatagcctgtttttgtaaataaagttttactggatggcagagttgaatagttgtaacagagattgtataacccacaaaatccgatatgtttacgaactggctcttcatggaaaaagtttcctgacctctcatctagatcaatggggttgtacgttaccatttaaaaatatttaggttgtaatctatcctcttattacttgtatttatgggtaactattttgtaagtaaggctgtttcgtatagaattaacgtggtttaggtaagcattcagaa

SEQ ID NO: 213698 - DNA, 524 bp, Homo sapiens
cagcaatgccagcgtcatccttgagggcgaggacctgcgcttctcctgcagcgtccgcatggcaggaaggctgcagggtcgcttctctgtcatctggcagcttgtggacaggcagaaccgccgcagcgatatcatgtggctagaccgggatggcaccgtgcagccaggctcgtcctactgggagcgcagcagctttgggagcgtccagatggagcaggtgcagcccaactcattcagcctgggcatcttcaacagcaggaaggaggacgagggccagtatgaatgccatgtgactgaatgggtgcgggtggtggatggcgagtggcagattgttggggagcgccgggccagcactcccatctccatcatagctcttggtgagtgagcggtgggactggcagtgggtctggcatggagacagcttcagtgtcaaacaccttatcctgacttttgtctgtcagagttctagcaggaaactatggccagtcttttacctatagagtttgaagtactttcctttaaaa

SEQ ID NO: 213699 - DNA, 428 bp, Homo sapiens
agtaaaatgggttatcaaaggcttagtttgactagaaggttaaaaggagctaaaatctagaacttgctgttagtcgtataccaaatgctaagcactcctttgcaaatgcagggaccaggtagtaaccatagtttccattgtaaagcctggacatagactgacagcatcaaaacttatcatttgtatcatctgtgaagacagcaccatcacaaaactaaaccacatgggtttcaaattacttcagcaaggcacatggtagtagtggattgtgtatcttaaactatctctgagatttactttacacatacatgtaaaggaccttggcctattaaataagactatttcttaaaatagagtgacagtcccaattctcttcaaatttctgagtactcaaatacaagaagacaaaaatacactcatgctttaag

SEQ ID NO: 213700 - DNA, 456 bp, Homo sapiens
aaaatttgcatatgaatgttcacagaagcactattcataacatccaaaaggtggaaacaatccaaatgtctatcacctgatgaatggatacataaaaagtggtatatccacacaacggcgtagtattcagtcataaaaagtagtgaagtactaacatatgctataacatgatgaaccttagaaacatacacgaagtgaaaaacgcccgtcacaaaaggccaaacgttgtgtgattccatatatgaaatgtccagaataggcaaatccataaaaacaaaaaacagattactagttaccagggactggcagtggggggaaaggagaggatggggggtgactgctaatgggtatggagcttctctttggtgtgatgaaaatattctaaaattaattacgattatgattgtacaactccatgaacatgctaaattaaatcactgaattgtatacttaaaa

SEQ ID NO: 213701 - DNA, 270 bp, Homo sapiens
  misc_feature (232)..(232): n is a, c, g, or t
  misc_feature (255)..(255): n is a, c, g, or t
cagaaaaagtttgatctagaaagatacacaacaaactatgaatcagcagttacctctggggtggaagttgagatggaaatagggagatttttcacttttatttgatagacctttatgttgtatttatgtatgtatgtatgtatgtatgtatgtatgtatgtatgtatgtatttgagactgtgtctcactctgtggcccaggctggaggttgcagtgagccgagattacaccnctgcactccagcctgggagacanagagagactctgtca

SEQ ID NO: 213702 - DNA, 448 bp, Homo sapiens
tcttgttcttcgatgtagttttgccatgtcgcccaggctggagtgcagtggcgcaatctccactcacggcaacttctgcctcccgggttcaagcgattcgtctacctcagccttccgagtagctgggattataggcacccgccactatgcccagctaattttcgtattttagtagagacggggtttcactatgttgttggccaggctggtctcgacttgccttggtctcccaaaatgctgggattacaggtgtgagccaatatgcctggcttcttctttttaaattttatttatttatttattttaaaaagaaaaaggttttaacctgtcttggtcagcatgcctccaagaactccgactttctttctttctttctttctttctttctttctttctttctttctttctttctttctttctttctttctttctttctttcctttctttc

SEQ ID NO: 213703 - DNA, 606 bp, Homo sapiens
gggcatgagagtattcagtcttatacacatcaggatacactggatttctgcatttgtatcagtagtgttttttcaactctgctgtgattatctcatggaaggaaggattgaagcaaacatgtagtcagagtcctctttgagcttatgtagaacttggggtaaatcctacagttacttcttcattatccttcctctttactcactagaattttgaataggataaaatcaggttaatagaatgctgaggccagcctcaagggaagaaagctacacatggtaagaggatagctgggagcttggatgctatttggtgaaacgggcagatttgccttagtgctggtcattgggatgatagtggttatagatagccctctacacatttggaaagatgtacattcaacatgttacttcatcctcacaactgtaggaggtgtgaaacaggtatttttattcctgttccgagtggggggatcctgttccgagggcaatggtttgattcacagggggagctgggtcttctaccttattcaggtccctcttattatctgcccccgggaaggtaatcacgtctgcaccttaacgatcacactgctgggattagagttt

SEQ ID NO: 213704 - DNA, 537 bp, Homo sapiens
gagccaccacccacagccatgttttgtttttgtttttggagacagaatcttgctcgtagtcccagctggagtgcaatggcacaatcttggctcattgctacctccacctcttggtctcaagtgatcttcccacctcagcctcccaagtagctgggaccacaggtgtgtactgccatgcccagcaaatttttaaatatttttttgttgagagacgagccttcactctgttgcccagtctggtcttgaactcctcggctcaagtgttcatcccaactcagcttcccaaagtgctgggattacaggcatgagccaccatgcctgcccagctatgggtttctcataataccctttatcatgttgagaaattttgtttccattcttagttttctgagcttttctttcttaaatcatggaaggtattagattttgtcaaatactttttctgtgtaaattgagataattatgtggatttttttcccttaattctattaatgtggtgtattacattgattgattttctcatgttgaaccatcctt

SEQ ID NO: 213705 - DNA, 429 bp, Homo sapiens
tctgtcttgcatgagattgagtgtgattctggggatgcaaatcaggatgtctctgggaagaattgcattgtgtaggttatttcaatttaagaagtagctgcaagaagattccaaacacattttgcctcaagtcacctcaagtttctaatcttcctgctggagctgcctttgcagtgaaaataagaactggcctaatgatgtgaagacaaaaccaacagaaatactgatgtcattgggacatattagcagaatggccttttaatttgtaaaattctccaaagctatgtctatttgactggatgtaaatatagacatgaagtagtttggagaatttgttgggggaaggatatgaagaaaatattctcattgggcagtcaatggtgtttttaaaaaatatcaaaaaaattaaaatccccatcattgctgttg

SEQ ID NO: 213706 - DNA, 476 bp, Homo sapiens
attttttttttccacatttatcatggttattttacgtctctatctgataattccaattctatgtgtgggtctgcttctatggaccactctcaagaatattctgttgatcttgggccacactttttttccctcatgtcttataattttttattgagtgccagatggtttctgtaaaagagcagtagaaatttacagaaataatagtcatccccagaaaagggcacaccacttctcttattaggctgctaattaggagactgagtggattaagtctacagttaagcagagtctgggttgtgccgctgctttagttagattcggttcttcattgccttcaaatgtgtcgagagcagaaccttctcttcagcaggacttgggacttgagtcccagaaagactctagaatctctttacttattgttaatccagtaaccaactttctgaaccaagggatatctcttgctgctttacaggcca

SEQ ID NO: 213707 - DNA, 205 bp, Homo sapiens
tatgtcccttgaagagacagcacaagggagagctgcttaagtcttgtaaaaaaaaattctggaaaactttagctccctaaaactgaagaattgtatcaaaactgaagaactgtatcagttctagcaggtttctactgactttcctattttaaacaattatctttgtttctgaaaactgattcaataaactagtttttaaaagaga

SEQ ID NO: 213708 - DNA, 501 bp, Homo sapiens
attgtggcacatgtctccagtcctagctacttgggaggctgaggcaggagaatggattgagcccagaaggcagagattgcagtgagctatgatcgcgccactaactccagcctgggtgacggagcaagaccctgtctcaaaaaaaaaaaaaaaaaaaaaaaaaaaaaaaatcatcatttgacacgtattttgattttaaaattttagtataaatgttctcaaaaagtctattgactcagtattgaatcttggctttccaattctgccataagtttttcttttttgtggagattctcaggaatcatcttgtgataggatattttaaattctagttgctcggtggatacacagaaaactgttaaatttgtttacattagggaacctcgaacacaaataccatataagttagtatttgttctttcatatgaaatattttaaatgctttttaaggatatcttgtgcaatctactgatttagtaccatcagaactttgatttaaca

SEQ ID NO: 213709 - DNA, 421 bp, Homo sapiens
ctatttcctggaaaagaagcataaagccaaagggcctgagggcagccgcaggtctttttgaagcgatgaggtgtgcagaggcagatcagggggtatatgtgcaggggttgtgggaagcaggcctaaaagagggaagaggaaggtcaggtcaaggatgaggccaggtgcggtggctcacgcctgtaatctcagcactttgggaggctgaggtgagtggaaaacttgatgctaggagttcgagaccagcctgaccaacatgacaaaaccccaactctacaaaaattagccgggtatggtggcacgcctttgtagtcccagctgcttgggaggctgaagcaggaaaatcgcttgaacctgggaggcagaggttgcagtgagctgagacgctccaacctgggcgacagagtgagactccttctca

SEQ ID NO: 213710 - DNA, 527 bp, Homo sapiens
aataaaaacaagtaagatagaccgggcatggtggctcatgtctgtaatcccagcactttgggaagctgaggcgagtagatcacttagggccaggagttcaagaccaacctggccaacatggtgaaaccctgtctaccaaaaatacaaaaattagccatgtgtggtggcacacacgtgcaattccagctacataggaggctgaggcaggagaatccttgaacctgggagacggaggttgtagtgagccaagatagtgccactatactccagcctgggtgacagagcgagactctgcctcaaaacgaacaaacaaaaaaacaagtaagatagtgatttaccttcttatttctgttcaaggacttgggtggcccagagcctatcccagcagctcagggtaccaggtggccaccaagccctgaacagggcaccatcccatcgctgcacctttcacacacacccacacacactcacactgggactgtgtaggcatgccagttaacctcatgtgcacatttttgggattctgc

SEQ ID NO: 213711 - DNA, 183 bp, Homo sapiens
acctagagtagcttctgtttcctgatcagatgcagactgctaagattgcatctttcgcctactttaacaagggacaaaagccatgggataatacagcaagaaggcctacaccagaagccaacatcacacttttggacttctcagccccagaactgtgagccaaaataaataacttttctttat

SEQ ID NO: 213712 - DNA, 788 bp, Homo sapiens
  misc_feature (593)..(593): n is a, c, g, or t
  misc_feature (634)..(634): n is a, c, g, or t
  misc_feature (676)..(677): n is a, c, g, or t
  misc_feature (681)..(681): n is a, c, g, or t
  misc_feature (706)..(706): n is a, c, g, or t
  misc_feature (718)..(718): n is a, c, g, or t
  misc_feature (750)..(750): n is a, c, g, or t
  misc_feature (754)..(754): n is a, c, g, or t
  misc_feature (787)..(788): n is a, c, g, or t
ctaactgatatgtttttatagctattgctggtttgggcaactttgacacttatgtcagcttcctattgtgatgatagatgaggatttagtttccttacactgtcaccataccatgcctttactgctttcctcccatcttcccagtgtagttttagcacaacttctgattaaattgttactcagtgttcacattactgtaattatgtaaacattgttccctgcccattcaagtgatgtactctgattttatttcctttcttgtacatgtttttttctttttttttttgagacagagtcttgctctgtcgcccaggctggagtgcagtggcatgatcttggctcactgcagcctccgcctctcgggttcaagcaattctcctgcctcagcctcctgagtagctggaattacaggcgcccgccaccatgcccagctaatttttgtatttttagtagagatggggtttcaccatgttggtcaggctggtctcgaacccctgacctcgtgatccacccgccttggcctcccaaagtgctgggattacaggcgtgagccaccacgcccggctttttttttttttttcccctggaggtanaatagtttcttatctttttatatgcttatttttaatggggngggctaatgggcttaaaattcccccccctttttttttcccanncaanggcttttttgggtccaaaacccaanaattcctttttntccccttttttttttccctgggcaattttccnaccnttaactgggggcccctttttttttttcaacttnn

SEQ ID NO: 213713 - DNA, 915 bp, Homo sapiens
acgcagaggaagccaggagaaaacagtcaatggctagtcatcactgattcgtggtcacaggcgttagaacaggaaggatctgcacagatcagcctctcccacccctcactttcctgataaaggaactaaagtccggaaagtacttgctcagagtcctactgccagtgggtgtgaaagccagaaccaccaccctcattgccttctgtatacatagctttaacagtttgcaaacactcttatatgctttaatttcatctgatcctggactgagagcaaatatttgtatttcaaccaaaaggccaaatgctcagtttcctcatctgagaggataataagagtacttttctaatggaattctttttttcttttaatttttggtagagacagggtctcactatgttgcccaggatggtcttgaactcctggcctcaagagatcctcccaactgcacctctcaagtgctaggattacaggcatgagccattgctccctgtcctctaatggaatttttgttaggattaaatgagttaatagtttggagatttgagagactataatagaggaaacctctcttcccttcccaagttctgagtaattaagagctgggcaaggagaaataaaaacaaatgggattggccaggagcagtggctctctcctgtaatcccagcactttaggaggccaaggcaagcagatcacttgaggtcaggaattcaagaccagcctggccaacatggagaaaccctgtctctactgaaaatacaaaaattatctgggtgtggtagtacacacctgtaatcccagctactcggaaggctgaggcagtagaatcacttgaacccaggaagtggaggttgcagtgagccgagatcaccccactgcattccagcctgggtgacagaacgagacttcatct

SEQ ID NO: 213714 - DNA, 537 bp, Homo sapiens
taaattttgaaatggagtttcactctttcacccaggctggagtgcagtggcacaatctcagctcactgcagcctctgcctcctgggttcaagcaattctcctgcctcagtctcccgagtagctgagactacaggcacatgccaccatgcctggctaattgttgtatttttagtagagacagggtgttgccatgttggccaggctgatctcgaactcctgacctcaggtgatctgcccgcctcagcctcccaaagtgctgtgattacaggcgtgagccaccgcacccagccgcctctttattcaagaagttttcacaagtagaggaaaatacgtgcctttttgcttatgtggcacattgtacttccttctttatagtaactgtctactcattcttctctacttctttagcctggaggatccttggagatggagactataccttcttcacagtttttaccctagtacttagcatagtaaatatttgttaattgaatgaaggaatacatttttgaaggaattgggaaagactttatgctg

SEQ ID NO: 213715 - DNA, 351 bp, Homo sapiens
attgctgagcaggagtatttgtggaagggaggagacgttagggaagcaagtctgggaagaacagactgtgatagcctttgaagatgtaataatcagtttggactctgtccccagggacaaagggagggggtctgtcagtggcagatggacacaaacagatgtttttcaggaagactgctggtagagggctgagggtgggctggatgggagaggaagatgcccatggagggccatcaggaggctgcaacactggtcaggtgaggccatcggaggccagatgaactgtgaagatggtggtatccccactctcgtatgttgttcactcaaaataaaaattattcacaaaacaca

SEQ ID NO: 213716 - DNA, 539 bp, Homo sapiens
catagtgccaaacccattcttagccaaaagggactttactgagaggggcctctaacttcctaaatcttagaagggattctaaccctcctaaatttgccttcaaatccagggtcggtcaagtttccttgctttttaataagaggggcttttaacccactttgacttaaggagagaccctaactcccctaagttgacctctaacccaatgccatccttcagccgagtacccaaccactcacccaaggtcggccaaccagtgctgtcatctctttcctttggtttggggctgagggctttcttcagtatcgtcccttcggggcttgccagaaagatgttaccagaccccaacacttacccaatattagcctttgagtcgggggttttctcactattgtcccttccatggttgccagaaggatgttacaggaaaggggtcccaatccagaccccaagggaaggttcttggatcaggcgcagaaaataattcagggtgagtccacagagtaaagtgaaagcaatttattaggaaagtaaaagaa

SEQ ID NO: 213717 - DNA, 166 bp, Homo sapiens
cgaggttccccggggcccaggcccgcgcgcaacgccccccaggctcccagtggggcctggaggacagtgtttactagagccaccccctgtattgggggtgggagcggagagaggtgagagaccgcccccgccccgtcaatagcagctaaagcctggtctacggttt

SEQ ID NO: 213718 - DNA, 465 bp, Homo sapiens
ctctccggtctcacccacctgagtagctgagtagctgggattacaggcgcacaccaccacacctggataattttcgtatttttagaagagacggggtatcaccatgttggttaggctggtctcagactcctgatcttgtgatccgcctgccttggcctcccaaagtgctgggattaaaggtgtgggccacttcacccggccaaaaacacctttgtggcttcttgataatagttttcactcatgtgttggagctaaaatgttaatcttatgaaggtaatgaatagaatgttgattaccagaggctgggaagagtactgggaaggggaaataatgcaggttgattactgtgaacaaaaataaacaaaaccaaagacaaaaaccacataattatctcaatagatgcagaaaaggcctttgacaaaattcaacaacccttcatgctaaaaactctcaatgaattaggta

SEQ ID NO: 213719 - DNA, 426 bp, Homo sapiens
tttctagcttgtaatcccagcactttgggaggctgaggcgggcagatcacttgagctcagaagttcgagaccagcttggacaacgtggagaaaccccatctctaccaaaaatacaaaaattagctgggtgtggtggtgcgtgcttgtaatcctagctacctgtgaggctgaggcacaagaatcacttgaacccaggaggcggaggttgcagtgagccgagattgcgccactgcagtccagcctggacgacagagtgacactatctaaaacaaaacaaaacaaaaaaattctatattacaaagattcccaagcattaagtgagagttgacttactaaagccctacagtactagacgtaacaggatttcagtataataaaggattttggataagattttgaaattcattaacattaaatctgccagca

SEQ ID NO: 213720 - DNA, 2428 bp, Homo sapiens
  misc_feature (2426)..(2426): n is a, c, g, or t
tggttaatctcactaatggtctattaattttgtttatcttttcaaagaatcagctttttgttacatttattttttggttttttttgttgttgttgttgtttggttttgcttcaattccatttatttctactctgatctttgttatttatcttcctctgctgggtttaggtttggtttgttcttgtttctctagttccttgaggtatgatcttagatggtctatttgtacttcaggctttttgatgtaggcatttaatgttatgacctttcctcttaaaactgcttttgctgtatcccagaggttttggtaaattttgtcactattatcattcaattcaaagaaattttaatttccatcttgatttcattgttggcccaaagatcactcaagagcagattatttaatttctatgtatttgcatagtttttatagttccttttggagttaacttctagttttattccactgttgtgtgaaagaacacatgatataattttgattttctgaaatttattgagacttgttttcgtgacctattatatgatctatcttgaagaatgttccatgtgctgatgaaaataatgtatattctgcagttgttgggtggaaagttctgtaaatatatgttaaatccatttgttctaggatacagtgtaagcccattgtttctttgtggactttctgtcttgatgacctgtctaatgctgtcagtggtgcattaaagtcgcccactattaatattgtgcagtatatctcatttctgaggtctagtagtaattgttttataaatttgggagctccagccataaatattctagagaataacatccataaaaactcttgtagacattggcttaggcaaagagtttatgaccaagaacccaaaagcatatgcaacaaaaacaaaaataaatagagtggcataattaaactaaaaagctcctgcgcagcaaaataaacaatcagcagaataaacagacaacccacaaagtggaagaaaatcttctcaaactatgtgatatggtttggctttgtgtccccacccaaatctcaccttgaattgtaataatccctacatgtcaagggcaggatgaagtggagataattaaatcatgggggtggtttctcccatactgttctcatgatagtgagtgacttctcacaagatctgatggttttacaaggggctcccaccttcactctgctctcattctctctcctgctgccctgtgaagaggtgccttctgccgtgattataagtttcttgaggcctccccagcgatgtggaactgtaagtcaattaaaccttttttaaaaaataaattacccagtctctggtatctctttacagcagtgtgagagtagactaatacactatgtatctgacaagaactaatatccagaatctacaaaaaactcaaaaaaatcagcaacaaaaaaaacaactaattccatcaaaaagcaggcaaaggacatgaatagacaattctcaaaagaagatattcaaatggccaacagacatatgaaaacaatgttcaatatcacttattatcagggaagtgcaaagtaaaaccacatgagataacactttactgctgcaagaatcaccataatttaaaaatcaaaaaagtaatagatattggcatggatgtggtgaaaagggaacatttacattgctggtggtaatataaactactaaaatcaccatggaaaacagtatggagagttcttaaagaactaaaagtagaactaccattgattcagcaatatcacttctgggtatctacccagaagaaaaggtgtcattatatgaaaaagacaccacacatgcatgtttatagcagcacaatttgcaattgcaaaaaatataaaaccagcctaaatgcccatcagtcaacagtgaataaagaaaatgtggtgtgtgtgtacgtgtgtgtgtttgtgtgtgtgtatgagtatgtgtatgcacacatgatggaatactactcagccataaaaaggaatgaaataatggcatttgcagtaacccggatggggttgaagaccattattctaactgaagtaactcaagaatagaaaaccaaatatcatacgctctcacttagaagtgggagctaagctatgagggcacaaagacataagaatgatataatggacgttggggactccagggaaagggtgggaggggagtgagggataaaatgatacacaatgggcaccttgtacactgcttgggtgacgagtgcaccaaaatctcagaaatcactattgaaaaacttttccatgtgaccaaaaaccacgtgttccccaaaaactattgaaatacataaaataaaatagtggagcatacttttaagaaatattcagagtagattttaaatagtctcaccacaaagaaatgataagtatatgagatgtgtgtgtntg

SEQ ID NO: 213721 - DNA, 411 bp, Homo sapiens
gttgcagtgagctgagatcgcgccactgcactccaacctgggtgacgagtgagactctgtctcaaaaacataaataaataataataatctcaaagtggattagacttaaacctaggacccaaaactataaaactactgacataaaacatagaggaaatactccaggacattggcctaggcaaaaattttatggctaaaacctcacaaaccaaacacaaaactgtgaacaaaccaaaacacaaaattgaaaaataggactatattaaattaaaaagcttctgcacatcaaagaaacagtcaacatagtgaagagacaacctgtagaatgggagaaggtatttgcaagtattcgtttaataaaggactaatatccagaatatataagaaactcaactcagtagcaaacaaaca

SEQ ID NO: 213722 - DNA, 269 bp, Homo sapiens
aggattccattcaccttgcttctgcgggcccagtgccacgggtactgtcctgagtggtttggaaggtgggtagccgctgatacagggacaggcagatgtgcagacacttaccaccctgtctaaaacaaaaaaaaaaaaaattgagagtgggctaggcatggtggctcacacctgtaataatcccagtgctttgggaggctgaggcaggaggatcacttgaggccaggagtttgagaccagcctgggcaacagagataacctgtctctac

SEQ ID NO: 213723 - DNA, 1029 bp, Homo sapiens
tggctatgtaagtttgtcacattaatatcttgagggagccttgttaaaaatagaaagtacccttgagcctgttattttatttcacaatctcattttggtgagacagcttttttcaaaactagtacaagttgagagaaaattgttgagaagcttcaaaacctgctttgcatttttattttatgggcttccctaaacccagtagattgagtgccaattaggaatgcctcgaacatctataagccttgtaggcttatacttgccttatataggctttgtagactatcacagtagtagatcatctattgttcattaaatctgctgcttttagaattcccagcatcagaattctgtgctttaaaagctgataccacatttttggaacattctaagactgtgggtcagtgacttcctatttgttttgatccccgccccgccttttatggaatctgatttggatttcataattcctatactcccatataacatctatgccgtgaaagatttataagaccatagtacattttttcctccatttactttctgtattgtggaagaaaagcagattttctggtgactggatgacatttattattacatgttgggagaacaggaagaagtagccaaagcgttcttttgactctgcttatgccaaaaatgcaggatggggcttgcacttcaagctcaaggatagccatgctagcatttcaaacgcattctgaaagctaataagatgatcattgctctctgctattatttaattttcaggctatttatttgaaaaaaaaattagcttgatggaggaggttatttttgaagaaataagaggatgtattaatttttttaaagacttcttcaacccgagaaaactggtatgagccttagccctggctaagactgaggtgggagatttgcttaaggccaggagttcgaggctgcagtgagctgtgatcacacctgtgagtagccactgtgctcctgcctggcaatgtagtgagtcctcatctctaaaaaataaaaattgaaaattag

SEQ ID NO: 213724 - DNA, 695 bp, Homo sapiens
tttggggtacatgtggtttctggttacatggatgaattgtgttgtggtggagtctgagattttggtgcccctatcacccaagcaccttacgtttatttttaaaaagtcttgggattttgataggaattacgttaaactggtatatcagtttggagagaattgactttgttgagtgttcaattcataaatatcatctctccatttatttgtattttctttgattttctttcagtcagcattttgtagttttcagcatatacgtcctgtatgtattttgttagatttacgagtaagtatttttattttgctcaatttaaacccataccaattaagttcagttttctaattagtgttgtcttcataattgctttatttataaatggcctttaaaaaagcattgatcagtatcaatagtagtgttactttattagatatggctcatataaagtcatgcagcatgaaatcaccatttaacatttaacaacagaatttaattctgaatggatactagaaagctagtgaatttctaaaacatacaaactagacaggttagtagtacttctccagtatttggaggctgtcagtttctgctgtttattgttacctctattaaggtactgaaaatgaaatgaagttttagtctgccagatttatgagtttttagaaactgaaaaaagattatataaggggaaaat

SEQ ID NO: 213725 - DNA, 382 bp, Homo sapiens
tgtcttccacagcagctgcaccattttgcactcccaccaccggtgcacaagggttccaatttctccacatccttaccaacatttgttattttctggttttttgatagtaaccatcataatgggtgagggctgtatctcaatgtagctttgacttgcatttgtctaatgattagtgatattgagtatctttttatgtgcttatcagccatttgtatatcttcagagaaatatctattcaagtcctttacctgtttttaatcgggttttttttttgttgttgttgttattgagttttaggagttctctgtatattccagatattactcccttcacagctatgtgatttcagaatattttctcccattaaaatgtgtttgtttta

SEQ ID NO: 213726 - DNA, 273 bp, Homo sapiens
tgttggggcgggatctgggcatcttggaatagcatttaggcggagctgggagaaagcgggagtgctctgggaataaggacaaaacttgggaaaaaaattggggatgaacagcagagggcaaggtccgagaatccccaagtgaagccttaatagaggattggggtgggacaggaaggggtgaggtctgtgtatgggatactgggaccaccccccaaccaggggtgcgtcatgagaggagccggccagggtcctagagacacggcggggaagggg

SEQ ID NO: 213727 - DNA, 209 bp, Homo sapiens
aacaagtctggaagttccactaatcttatttagggtaccctatttatagaacacctgagtgacatttatattaaaaggtacaggtaggccaggtgcaatggctcacacctgtaatcccagcactttggaaggcagaggtgcgcagatcacttgaggtcaggagtttgaaaccaccctggccaacatgatgaaattccgttatccactaa

SEQ ID NO: 213728 - DNA, 373 bp, Homo sapiens
tagagtagtagagtgtttaggaaaaggggttttgaagttgtgggcacatgctgtaatacagggaggctgcagaaaagtttctgtaagcctgcctccggttgaccatgtggtaccccactgagcagactggtgaacttacctattgagaggccctgtcccacattcctagcaaattttcagacctccttccatactggtaaaaggataaattctgtggtgatgaaaagcctattatagttacataccctttgttttcatgattccttgaagagctaagacatagagaaatagatcattaaaatgaagtttgtgttctgcaatattttatttgatgataggttggttagttttaaaattttgaccaaaataaaaa

SEQ ID NO: 213729 - DNA, 574 bp, Homo sapiens
ggcgtggtggtgtgcacctgtagtcccaagctgctcaggagactgaggtgggagaaccacttgggcccaagaggttgaggctgcagtgagctgtgaccgcactactgcactccagactgggcaacagagcgagacctatctcaaaaaaaaaaaagacttttctaaaacgaaaacctaacagaagttgttcctatgctaacagacataccttacaagaaatactaaagaaagttgttcaggctagaagcaagtgttctcaaacagcaagtaaagtccacatgaaaaaacatacaagagtacctgtaacagcaattgttaattataaaggacactataaatgtgtattttttctttcttctcttaattgatttaaaaagcaactgtataaaactatatatatatattataggccaggcatggtgactcacgcctgtaatgccagcactttgggaggccgaggcgggcagatcacgaggtcaggagttcgagaccagcctgaccaacatagcgaaaccccgtctctactaaagatacaaaaactagccaggtgtggtggcaggcgcctgtaatccca

SEQ ID NO: 213730 - DNA, 1026 bp, Homo sapiens
  misc_feature (916)..(916): n is a, c, g, or t
  misc_feature (1025)..(1026): n is a, c, g, or t
aagacagcacctttgaagggctctccttggacctcagtcccacagccagaaatttgacatcatgtttgagactcaaggatgacttggagtccattcctatcccacctgggagagagtctctgaagtcattggtcattcctctccaccctaaggaggcaaggtcgtgagcagggcacttcatctctctctcttcacatcacttctgggaaatgagtcaccagcaactattggaattccatagtggccaacttataggtctatacttaataccaaatcaaactgtttacaactttacatttctgtttgtgtgtatttataaatatatggatgttctcgaatcaacaggtaaaagaaaaatgggttaaattgttttgctaagacacccagtctttgtatatatgtctgcacacaaagacaaatgtgactgttagtctaccctttctgttctcttgttccgtcatcaaagtttctcttggctattgtcaagtgtttgaattttatcatgagtataaaattagatcccactgagatcccaccgctgctgtcccttgcttggtataaacggagtggttaactctcttgtggttgcaaagtgtttctctgtttaatggtgatgtgttcattcattcattcaacaaatatttaatgagcttctactatgtgccaggcactgttctaggagctggaaatttagcagcaaacaacagtatttgctaccggacgagagtgtccatattctgaaaactgttcaaatgtccacacaaatgccctcccggggccatttaaaacgctgccaggagtactactaggcggagcccgccgtaagtgaagtctcctaaccggcgcgctgcctagacggacacatgtggtctcagcggggcggcgaggccctctacttaactactgcgcatttttnttttagcgcacgcgacacggcgcagagcacaaggccgcgcgagcacaagagacctacagcacacccgcacgcggcaacaccccacgccgacccacggacagagcgtttnn

SEQ ID NO: 213731 - DNA, 536 bp, Homo sapiens
ttttgagcatgtaagaacatttagtataggagaactgtacagttaatatacatttttctttttgattcacttttcttctctaaagggagatttgggcatgtactttatagactgagtcaaaggtaattgactgcaaaaaaaaaattgatacagagttgccacttttaagaatgatttgatactgactagtagctctctgtcttttgtaaattccctcttattatagttagttgcctgatgattgttacaaatttactaatttggaagtaataaaaactttcgaatattcttccttttctcattgaagttctttaccttttctctttgaagttacttacatatccctagaggcactagtttatggtagaagttgttaagggctatgtttgtccatcatgaatgatggtgtaacatctgcatggtgttacttcttagatctttgttgattagaagtgataatcagctactctgactctgaatcaggtagtgtttatcaagcccatgacatctgttgttctgggtgctttgttcctagc

SEQ ID NO: 213732 - DNA, 812 bp, Homo sapiens
tattatgtggaatttcaataaataaagggaagatgagagttcccacatttatgtattgcctaactccatactataattatttgcctataactaagagaccatttttatctagtgttttgccttctgagtagaaaaactgctgaatttcagaaaagtcaaataagaatgaagtttcatcctgcagaaattttgtactttgtacataggtatcttttgatgttttgatttcaaatatatggaatgtgtagtttcaaagacacggcttttagaggtcagacctgaagaccagtcagcacttaactcactttccccagattgtttcctcaggcctcacgtgatcattttataagaaaagaatccgaatttatcaacaatgtctagtactgttcttttagtgaaaaaaaaaaaggtagtataataaattctcacttaacaatgttgataggttcatggaaactgtgacttttaagcgaagtgacatataacaaaaccatttttaccataggctaatataaacaagagttaagttcctctggcatatttctagtcacaaaaatatcacccagcttctaaatcaaaacccaaaacacttataatattaagcattgaaataaatgtcagccatatgcacatttttttaaattaataaaaacaagataattgcccaatttttggccaattactgagtaacagcagttgtggtggtgggttaaatcagggaataaatatttgcaaagataaaactgtaaggagcccctcctcccaccatacagctcaaaacaatcacaaatatggtgggctcattgagcact

SEQ ID NO: 213733 - DNA, 467 bp, Homo sapiens
cttaaggaaactagatgattttaagaccatagactagaccataaaaaaaaccataaaaaatgaggccgaattagagatactccccaaataccttgcattacacaaagaaaagctattagataaatattccaattcctggttctctctgtctctctgaatgttacagagaacaatctctgtaacattagatctctgtaacactcttcacactttctttcagagattggaggtgattctcccaggctttattattcttcatgaaagtcttctcttttgcagagtactcaaaaatttaaatagccatctaaaaacatctcaggtaaaaaatctgtcctctgcatttgaaaccaaaattattttttctcactaaaacacattttatttaatagtgaggtgaaattacattagccctcttcacatttatttgattcaaaccttttttaaaaaacttagattcttttaaaaaa

SEQ ID NO: 213734 - DNA, 559 bp, Homo sapiens
ggaaatagggtctctacagatgctcaagttaagatgaggtcattagagtaccccctaatatgaccggtaggttcccttataaagaggggaaatttagacatggagacagacacatacagaaggaagacaacgtgaagtcacacagagaccaccacctacaagccaaggaatgcctgaggtaccagaagctgagagatgcacagaacagagtctccctcccagctcgcggaaggaagcagtgctgcccacactgattttggacttccagcctccacaactgtgagacaagcctgttgtttgaaactgcccagtttgtggtagtttgctacagcagcctcagcaaactgatacaacacccagtcacctctgcaatcaacaagtcgttgccttgttcagggatctttcctggcatccctttttccttgctcctctgctcagcctctctaactcgtcacagtcagcacaggaggggtgacaacggatgagttcatactctgtgcccattcctatcttcttgtctgagcttaccgtgctcccctttctgggaacgtcttcaaat

SEQ ID NO: 213735 - DNA, 319 bp, Homo sapiens
ggaaatagggtctctacagatgctcaagttaagatgaggtcattagagtaccccctaatatgaccggtaggttcccttataaagaggggaaatttagacatggagacagacacatacagaaggaagacaacgtgaagtcacacagagaccaccacctacaagccaaggaatgcctgaggtaccagaagctgagagatgcacagaacagagtctccctcccagctcgcggaaggaagcagtgctgcccacactgattttggatcctgacctcaggtgatctgccctcctcagcctcccaaagtgctgggattacaggcgt

SEQ ID NO: 213736 - DNA, 503 bp, Homo sapiens
gcctcccaaagtgctgggattacaggtgtgagccaccgcgcccagcccaagcctgatgtatttgtttagggacagtgcttctgcgaggctcctgttgttcactgctcagtttgcacgattgcagtttactgtggtgaactggtatcagccatggagttgcacttgggctatacctggcaactcaagttttgtttctaaaccagttaaactttcggataacagaacaaagttccacagaaatcaagatgccttagaacttgggctgtcatttcttcacttgtttatgttgaagaaacaagctgcgttttggcatgttttataatgagagcagcagaacacatgagagctgtgcccgtcaacaccaggagtacacagggcccacagggtgtgtcgggagctgctccaaataacatcaacaaaaaacagcagagtggacatgtttgtgacagctcactgtgactcactaatcgcatagtctgacatacttcttttatcttccttat

SEQ ID NO: 213737 - DNA, 497 bp, Homo sapiens
tttgctgtctgcagaaccctgagttgattgccacatcctccagcctgcaaattggtccagcagtctacgctaccttattgttgagtcaactcattctgctattgtaggcctatgacaatccactgggtttcaattcagtatccaaactgcataaaaactcaaggcacctttgtaaaattaagccttcttctttctgaccatgctgtgctacatttctgtgaatgaatcctaaagttgatgcatggcataatccatttggatgtcaaaagactaatattacctcagtcttatatttttggaaaaaattctaacttcctccagacaaatgaatgcctccgacagactaaggagaagccgtaataatggcatttttatctacatcctcatcttcaattttgttgtctgatgagttcaaagcttgtgctctcttcacttcacctccaggaccttggtctggaaaggtccttgaggtctggaagattagcaggagagagaca

SEQ ID NO: 213738 - DNA, 279 bp, Homo sapiens
atttcctttttctcatactagattccaaattgtattccatgattgtggctgcttatactgctctaattccaaacctttgctcaatttgtatacagaatgtcctttcttctttccctctaaacacctacatctcccttggcttcccacactaccacctagaactaaaatccatctatcctctaagaagtctccttccctttacccagaaattcttcttcagcagaacttctatggcacttaatctgtatcttttctgacaatgattgctttgtatctttt

SEQ ID NO: 213739 - DNA, 393 bp, Homo sapiens
aaaaaaagtgaagcacagaattactccataacccagcaattccactaatagatatatacccctaaaaggatgaaaacagataaatacctgtacatgaatgtacataacagcacggttcacaataatcaaaaggtaacaacaagctaaatgtccatcaacaaatgaatgagccaggtgtagtggctcatgcctataagctcagcattttgggaggctgaggcaggaggagtgcttgaggtcaggagaatcgcttgaacccgggaggtggaggctgcagtgagctgagatcgtgcccactgcacactagcctgggcaacagagcgagactctgtctcaagaaaaaccacaaagttacaaaaattagccagggtgtggcggtgcaacacgaattag

SEQ ID NO: 213740 - DNA, 209 bp, Homo sapiens
ggcaagaacgtgctgcacattctggggactgggacaggataagcacacgagtagatctaagtcactggaaatacctggttttgctgttggaggggggcttgcaggtgctcgttatattattacgctgttgtagtaaaacgatgttagttacagtattaaattgcaaatgtcagtatccatcaccgccaaaacagcgtgcataccactag

SEQ ID NO: 213741 - DNA, 600 bp, Homo sapiens
ttatttctttccttagaaacaaatttctctagggaagcttatcagtagcagaagtgcagactgggaaatggcctatgtcaccctcccatctagaaatgcccagtgcacatccagatcccacacccccaagagcgttgtgcaatatctgttaatttatgagagctgtttcccatagatgatgctgcaggcattagtaaggagggcaaagttcaagtgatgacaccatctctactccacctggctggtttccaggtgccatctcctgatccctctccccacccccactgccctctcaccatccttcccccaaaccccacactccccaccaatctgggtcagtgataaacacagagtattccacatgcctctgatatgatgtaacattcgacacactaaagataatactgcctttaaggctcctgtccccctggctagacttaaactgtgtagaggaggagaactgtgactttattccccttgcatcctggacacccacacatggtaggtgttcagtgaatatgtgatgagttggtgaatacccactgaatgtgctatttgcattgctacttccttgtgcttccttccactgtttctatcgcc

SEQ ID NO: 213742 - DNA, 318 bp, Homo sapiens
actcccttgtctggcctgggagacttagcaccctcatctctgagaagcagatgggccagcggggaaaggggcgggggggggatccccaggagaaaggctcaggctgggagactcagccaagcagtgcagacagggtgggtgcagaggcacaggccctgccggaggagacgccgctcacaggtgcttgccagagcacagtgaggccgactcgactcagagccgtctcgataggcgcagggaccatgcagcggagacctacccacccgtggggagaggtcaggcccaactcgaatgcagcacgggcaagtggatttctag

SEQ ID NO: 213743 - DNA, 523 bp, Homo sapiens
gactgcctatttgttgcagggggaaatatacagtgaagacacagaacaatacttcaaccaagtgatcaaaattaacatcaacaagttaatcatcagaaagtctcagacaaacccaaactggaaaacattctaccaaaaaccacacacacaaacacaaattaatgactatttttgttatggacaactgatcttcatggcaaataaacatttcctgaaggcagagatcatctatcacactatctgataattttaagagttggtggtttaaatggataatccctgcctagaccataagatgctaagtctcagacagtgtctttattcctctatgtttcccaactctggttccaaagaatagtgaagacacaaagcataatagttagaagaataatgaatttttaaactaggtaaacagaaatgtttataagttatgtaatattccatagtctcatctcaaccaaatttttccaaaagtaaacattttttcaaaactttttaatgtatataaaactaaaaaaacaga

SEQ ID NO: 213744 - DNA, 202 bp, Homo sapiens
gtctttctctctttctctctctctttcttttctttctttctttctctttctttgtttcctttctttctttccttccttccttcgttccttccttccttcctttctttcttctttctctttctttctttttcttctttctttcttctctttcattctttctctttccctcccttccttctctccttccttctgtctctctctc

SEQ ID NO: 213745 - DNA, 577 bp, Homo sapiens
atcgtctgcagattgtttccaactacttcagttaaaaccttaatagtttttgatagcttctttgctatcttgtataacaagatgcacctggcccattttgtacaattcctgcgtcaaacctggaatgaaccatttgtttaagcagcactagtttcttttagtgagaaatggtatttctcattaaagactatagtctggatgctagggatgcttattgctactggattgttcattgtctctaggcctaaaattaaagtacataataacacaggttgggtgtggtggctcatgcctgtaatgtcagcactttgaaaggccaaggcaggagggttgcatgagctcaggaatttgagaccagcctgggcgatatagctcactataaataattctaaaaattagaaaaaaaatacataacacaaaagcaggagaggggtattagaatttaacatgtttaaggttctagcattgtcagggaaatggtaaaagcattttaacaactataggtagccctttttcccacagaaagtattctggttctcaaggtcacctgggatatcacattgtaactcattgcttt

SEQ ID NO: 213746 - DNA, 366 bp, Homo sapiens
aattcacaggtccgggaacaaacagatttcttaaagagaaatcagaatggatgcctgtccctgttatacctaatgtccactgacaaaatgtttgtttctatcattctggcttttggctatgttgttttggatatttcagcactcaagagatcagggtacacaaccatagttagtttaatgaggggttgaaaaaagcaactggcatttttttttcaccaaacagtgggcataaaagtcaattatttcattagctgaagtgaatggttcagattattataggggagggggttgctgttaaacaaccaatggggtcctctgaggcacctcctgtactgtcagatccaggaataaaagatgatggaaaac

SEQ ID NO: 213747 - DNA, 654 bp, Homo sapiens
ccttcctgcctgctccccctgggcctgggcatcctggccaccacccaactccagacttgctttgatccttgaaaggatcaaatagatgccaagtaatttcactgcatcccagaacaaatcccagaaacaaggaattccaaaaacctactcaacaaagtaaaattcacaatgtccagcatccaatcaaataactaaaaggtgaaaaatattaatgaaatcagaggaattaagagtatattagaacagtatgtgtttacctcaaaagaagtcattaagggaggaaatgagaaacaaaaaagacataagacatagaaaactaatagcaaggccgggtggggtggctcacgcctataatcccagcacttgggaggccaaggtggcagatcacctgaggtcaggagaattgcttgaacccaagaggtggaggttgcagtgagccaagattgcgccactgcactccagcctgggtgacaagagccaaactctgtcaaaagaaaaaaaaaaaaaggacatgtaaatccaaccatattaataattacactaaatgcgaatagtttaaacactccaattaaaaggtggagattgtcaaactgaattcaaaaagcaagctacagaaacccactttacatacaaagataggttaaaagtgatagg

SEQ ID NO: 213748 - DNA, 520 bp, Homo sapiens
gaaacaatggactttggggacttgagggaaaagggtgggaagggggtgaggaataaaacagtctgtcacaagggtggagctgcccaaggctgtgggaacccaccttttgcatcagcatgacctggatgtgagacatggagtcaaaggagatcattttggagctttaaatatttggctgtctcactgcatttcagacttgtgtgagacctgtagcccctttgttttggccaatttctcccgtttggaatggctgtatttacccaatgcctgtacacccattgtatctaggaagtaactaacttgcttttgattttacaggctcataggcagaaggaacttgttttgtctaggatgagactttggactgtagacttttgagttaatgctgagatgagttaagactttggaggactgttgggaaagcatgattggttgtgaaatgtgaggatatgagattttggaggggccaggggcagaatgatatggcttggctgtgtccccacccaaatctcatcttgaa

SEQ ID NO: 213749 - DNA, 248 bp, Homo sapiens
tgctgatattactctccacagtattatatctgatcctgcaaagtagttcagataccagagaatactcttaaacattttgactcacgcaattaattatgtttaaaatttatgtaacaagacattaaatgagaaagaatggaatgaaaaatgggttaaaagaatgcaaaatcgcaaaaagaatgctttgaatttaaatatttccaaaaatttgattttctgagaaaatatattaaaaatcatacgtaatt

SEQ ID NO: 213750 - DNA, 514 bp, Homo sapiens
cagggagttcccctgagatagtgctgtgtagatagtcaccgacgactccacagctttgtgtctgcccctcaccacacagtaggcttcattctcaccatgaaccactgttgtcatttggggacaagttgaaagagtctatttcccttcttgcattaaaggagaaactgtcagcgggattgctgttaaccactgtggtggtcaccacgacctgagtctcgtgctagtgtttgagagactaagctctgacttttctagaaggtattattccagatcctgacccagggaagaggcatggtggaccagaaatctgcattttcccagagcaaagctacagactggaaaatggattgcaaccttgcacaggcttgactgttgttgacagaagctctactttctcctgctctgttctcttattattaaagggatggatatatcagaacaagtgtgtgtttgttgttttaaagtttgttttttttttgtcttcagttaagttaggctgcagggttgagagaag

SEQ ID NO: 213751 - DNA, 546 bp, Homo sapiens
gtcttgtcatttttttcaaggctttagactatttcacaatatggctgcaaccacaatttgtttacttatttgcctagtcacatttagttttatgtatatgaaattgcgaaatacttgccaaactgtattccacagaggttataccaattatctctccagcaagtatgaggactcctgtttccctacgtactcactactacagcaaagatatcaaacattgatacccaccaatctctggatggaaaaacaaatctcagggtaggtttatttgcattttcttactatgggggtaacgttgggcattttttccatttacaaagccatgtgtcattctttctctgtgaactctgaacattctatgcccattttttgctggactgttcatctttttcttatcagtatgtaaaatctctttgaaaattagatatagccccctacaagtgacaggaactgtacaatccccacatttgtacagtctgattttgtttatgctaatatttgccaggcataatttttctttttctttttttttttttgagacggagt

SEQ ID NO: 213752 - DNA, 524 bp, Homo sapiens
ctgcaagagttttttttaattttttatttaatttaatttgatttttttcgtaccccagtggtgcctggaatcccagcaagacagaacttttcactcccctggaaagggggctgaagccagggaaccaagtggtctcactcagtgggccctaatcccacagagcccagcaagctaagaaccactggcttgaaattcttgctcccagcacagcagtctgaagtcaacctgggaaaatggagcttggtggaggcaggggcttttgccattactgaagcttgagtaagcgattttcccctcacagtgctaaggaggctggtaaattaggactgagcagatcttaccacagtgcagcaaagcggctgtggcaagactacctctctagattcctcctcagtgggcagggcatttctgaaagaaaggcagcagccccagtcaggggcttatagataaaacttcagagcacctgggggaaggagcagttgtgggcacagcttcagtggacttaaatgttcctgattgccagc

SEQ ID NO: 213753 - DNA, 865 bp, Homo sapiens
aggaaagaaagtcaagacagaacactagggaataccaatatttatggagctggacatgaaggcagatcccacagagaagtctgtggaggagcactggagaaggtaagagaacagggcagaacagtgtcatggaagtcaatgatggagaggattccaagaagaaggagagaacacttaatagtctgggaccaaaaaaaaaaaaaaagataaatgaacttgaaggcatagcaatagaacctatccaaaatgaagcttacacacagagataaaaaagaccaagaaaaataagagagacctggaggcaataacatgttgactgacatatgtaaatgggaggcttcagaagagaagagagtaaaagagaacagagataatatttaaagaaataatgaccaaacatctttcatattttatgaaaggtataaactcacagagctaagaaactcggaacatgaagcaagatacctactagggaaaccacaccaagaacttcattatcaaattacagcaagttactaattctgacaaaaatcttaaaattagagaaaaaagggcacattccatacagggaacaacataaaaataattacaacagagttttcagaaactatgcatgtcagaagacaatggagtaacatctttaaaatgctggaacaaattttgtcaatctaaaattctagacccagagaaaacacctttcaaacatgaaacatgtctttccttagacaaagaaaagttgtgagagttggccagcacacctgcagtacaaggcttgttaaaggaagttcttcaggcagaaggaaaatgatacctgatgataatgtggatctacacaaaagaataaagagctctgaaagtgataaaa

SEQ ID NO: 213754 - DNA, 541 bp, Homo sapiens
cttctgctatgattagcctttgaccatgacttcccaatgcctagaattcttctatccttgtcttgcctgtggaaatgctgttcattcatctggccactacaggtggcgcatgcctgtagtcccagctactcaggaggctgaggcagaagaatcgcttgaactgggaggtggaagttgcagtgagccgagattgcaccactgaactccagtctggcaagacagtgagacttcgtctcaaaaaacaaacaaacaaacaaacccttcctttgtattagcacatcaatattgccttaaaaagacagcatatggcagagagggaaatgactcacaattcatgtacagcccagctgtgtgtgtgtgatttgtcttcataagggattaaaaataaattactgatcaaattaaactttatagaaaaatatatctgtgtcctagatgcatacaatgtctattttttgaacatgtccatatatatttttcttggtaggaaaagaatttgaagactaagttaataatgagataggaggaatgactttaattt

SEQ ID NO: 213755 - DNA, 280 bp, Homo sapiens
ttgtctcatactacttttgataatgggaccctttggtagggtccatcagttaatgacagggatatgttctgagaaatgcatcgttaggtgaattcaatattgtgtgaccatcacagaatgtacttacacaaaccttgatgatacagcctagtacacacctatatagtatagcctattcctcctgtgctacaaacctgtgcagcacgtgactgtactaaatactgtaggcaattgtaacacaatggtaagtatttgtgtatataagtgtatctaaacacag

SEQ ID NO: 213756 - DNA, 564 bp, Homo sapiens
  misc_feature (563)..(563): n is a, c, g, or t
gccgatcgctcggtcctgcaaacgcgcgccgggcgctttccccggagctcggcggtgcgtgcgagcgcccttttgctgcagccgcggcggcggtggtccgagggggcggagaggagggggctgcggccggccggccagggggcggcgtcccccctcaaaaccgcctgcgaagtgctccgggtggcagaagcaggccgccggctccgcggagcaagccgctcgccccggggctgagcaagcgcgcggggctgccgggcagcaccacggttgcttgcgggcgccggtgccctcggcgcggggctggagctcaccatgcccctgcggggccgggccaccgggcacgagcggatccccggcttgcccccgcctcgacgcgctcggattagctgcagctggcgcccagggatttgaatctggaccccgggagggagtgcgcctaggccgacctcggagcggcggccccgtggccaacatgcttcgcaaagggtgctgtgtggaattgctgctgctgttggtagctgcggactgcccctgggtggtggctgcccacgggactgtgtgtnc

SEQ ID NO: 213757 - DNA, 431 bp, Homo sapiens
aataagaccctgaccacaaggagccctcaacctcttgaagaagacagacccaagcagatgacttcaacataatgtggtatgatggagagggatggagggtatctctcctctaagagtgaaagggctgtcaactgaaaaacggatgcctattttgtgaacttttttttttttgagatggagtctccctgtcacccaggctggagtccagtggtacaatcttggctcactgcaacctttgcctcccggattcaagcgattcttctgcctcaacctcaacctcccatgtagctgggatcacagatgcacaccaccacacccagctactttttgtgtttttagtagagatggggtttcaccatgttggccaggctgatctcgaattcctgacctcaggtgatctgcctgtttcggcctcccaaagtgctgggatt

SEQ ID NO: 213758 - DNA, 220 bp, Homo sapiens
acatttagtatagagggggtaggaagaaaacaaatggtgactgagcattgctttgtgatagtcattgtgccacatgctcaatttatcttctttatctaatatttataaaaatggtgttagaggcagtattatcctcattttattggtgaaaagaccaaggctcagagaagttgacttgtaaaaggttacataataaactagggtatttgatttgaaccca

SEQ ID NO: 213759 - DNA, 364 bp, Homo sapiens
gggaggatgtgcctgctttcatgggctgggaagtagattccagcagggtttctggctggtcgaagagtcatgcatcagccaggtgctgatttagcattcgccccccaccttctgtgtaaggaaaacctacttcatcacaggtactagtcccattgtaagtatctctcttcccactgctgggtgggatgagatataaataaattaccttgataaaattggggtgtgtgtgttgggtagaggtgaccaggggatgctcccaccactaacccagatgttccggaggctggggtccctgtctttttgtcctgtgtccctcctatccctgagccttatttcccttccagtcactacactgggtggagtg

SEQ ID NO: 213760 - DNA, 366 bp, Homo sapiens
tgtagtgaataaaatactaatagacatatatgcaactaaacggagaatgggctcgctactaaacttggacaagccaaaagcggtagttggcctggagaatatgaggaaaaatgatctagacagggaagtctagtacttgaaaaataatgtatttgcaatttgtaatttagttattacatgcttaacaatagaaattttcttgggtgggaggacggagaggattgggaaaaacaactaatgggtactgggcttaatacttgggtgatgcaataatctgtacaacaaacccccatgacacaaatttacctgtataacaaacctgtgcatgtacccctgaacttaaaatgaaagttaaattttaaaaaa

SEQ ID NO: 213761 - DNA, 477 bp, Homo sapiens
tttacaggcattgtgggctttgccatttttaggatgtggtatagaagaaagcatggtggactaattaggaaccagatctggcttcaagatacagtctgaaagcttgagaatagtgtgaccttcagcaaattacttaccttttctgaactgtaatttcctcacatgtaaaatggaaataattatcactgtcaaaacagcccccaaagcagaatgaggttcaagtatgtgaaagtcttttgtaagtgctaacatgcactatagatatgaacaataatcatgcatccacttgacttataagacttggcattcctagcttctagggcacagcttacatatggtcagtaaatgttaattgaattaattgcttagatatttggtaggcttactgtcatgtttcaggttgttgctggaatcttacatgaataactattgctgagaatttgtcaaaaccaaacagtgaaatggatgctgctccat

SEQ ID NO: 213762 - DNA, 443 bp, Homo sapiens
ttagcgttctagactgctacatttaatatggataccttgaaaagcgatgatggaataatttattgacagctttgttgtattttaaaagtaataaaggaggcatccaaccaaacaagttcattgaatttttgatggggccatgagacctgtagatcagaaggacacaggcagtgtgatttcctcaaagtgtttgacttgacaaaggagggaggaattaaagtgtaaggagacgttgatagttgattaaacaacagcgacctaaagggtgctgagaagtccactgctgttaacctggaggaaagtcccctgagtcccagctgttggggacagctcatctgccaggcaacagaatccatgttcaagatgatttcaaggcccaaaggaagagacaaaaacaaatacaaacaattcattagaaataaaagttttttaaaatgtgaaat

SEQ ID NO: 213763 - DNA, 264 bp, Homo sapiens
aagtgctgggattacaggcgtgagccaccgtgcccagccttaataaacatttttctaagcacctagcagtgctggcagtaacacacagtcctctctgggttagggaagtaggtgatcaaatcgtgaaacaatgtgaacttgccgtactggtgataggtagaaggtgacacgcacagacaggaagtacctggcccagcagggatatcaggacaggtttccaggaggtggtgaccctcaggtagttttgctttaaatcagagactg

SEQ ID NO: 213764 - DNA, 468 bp, Homo sapiens
cgcagcgtctaagctctgctgcgacgttatgggaacctggtgacccgcggcacactctgggacgccagggtagtggatagggacagtggagggcatcacgctgcagggcacgggatcagagggggatgcaaggggaggggacgccattctggccgccaagggggaaacgcggtgaagggaacgccccgactttcgagtccctaggactgagtccccaggactccaacccagcagagaggcgccggggccttagctctgagggctgtggtctagaaagggaagcagcaggcctggggctggggcgcgcgccgaccccgcagtgagaccaagggaagaagggacaggaccccgcgaagggcctaccgccccagagcgtaaacagcggtccgctccgcggaatagctgaagacctcgctggcctgcggctcagtggcctccccggcgattcgagaacagctctgggggtcc

SEQ ID NO: 213765 - DNA, 546 bp, Homo sapiens
ccctagaacattctctgatttgaaccacccactccttctaaaaagtctgcctccccaagagactcacagcagcttgccctggacaagaccaaaaaagacaatggatgtggtccgccttgggagtccccaagggctgtgcaacaaagtcaagtcaccgtccacccttcagctctgagctagaatctcagcagacacatctgggccaggtccacaaggacaaggactgtggctggcttcactaaccacggtagtgcaagcaccacacctgggcagcaggaagccccgcaccaagatttgttgagtgaatgaatgaggtagtgaatgaagcaggaggccataaacgctgagggtgtacacctgcctccctcccgcatctcctacccaccctatgaggagggaggggaggcagcaggagagctgggctacctggggtagagtccaggttctgctacttactaggtaacctgtgcctctgcgtcctccgctgtaaaacggggtctgtggggttgtcctgagaattaaatgagttaacatttgtaaagtacc

SEQ ID NO: 213766 - DNA, 504 bp, Homo sapiens
cttttctttctttctttctttttttttttttttattatgtagagacagggtctctcgctatgttgcccaggctggtcctgaactcctgggctcaagcagttctcctgccttggcctcccaaagtgctgggattacaggcaagagccattgcacccagtcccttctctcctttctttcttcatcacctgccatattccaggcactaggaataaatcatcaagtaaataaacggccttaccctccctggcaattataatggggaaagttagctaaaaacaaacaaaaattactgttccatttaaccatcgctgaataacaaaataccccagaacgtagtggtgtgaaacaacaaccttttaattttatgattctgtgagtcaggaattggagcaggattggtgtgtatctgcttcatgatgaactggagccaaaaatgaactagctggaacagctggagatggaggggaggggcatcaagggccatatatctaaggctggtggttg

SEQ ID NO: 213767 - DNA, 388 bp, Homo sapiens
caccatgttggccaggctggtctcgaactcctgacctcaggtgatctacccaccttggcctcccaaagtgctaagatgacaggcgtgggccaccgcgcccggcctcatttggattttaaaatctaacttcagtgtttgttatttttattttttttttttttgagactgagtcttgctctgtcacccaggctggagtgcagtggtgagatctcggctcactgaaagctccgcctcctgggttcacgccattctcctgcctcagcctcccgagtagctgggactacaggcgcctgtcaccatgcctggctaattttttgtatttttagtagagacagggttttgctatgttggccaggctagtcttgaactcctggcctcaagtgatcca

SEQ ID NO: 213768 - DNA, 725 bp, Homo sapiens
gaacatctcctctaacattacataaagacttcagcacctggctttatttccctcttctccattccctgcatcatcctatgacttttccaagactctggtctcatgatttcttaaaaacatctactttgccatccatattagcaacttcttttgatacatcttcatttttctttcctctgtctctttttgtaatggtcattcaacacttatatctcctttcctaacttcattcttttcttgatctgcctattcccacacaaccactaaacccacttttgacctttatggtgaccccctttctattctcccttgacttgactttaccatagagtcaagcttaggctcaagcttaggcttgagccaacactctgctcatttgctactattcctttaatgttacacaattccagacttagataaatccagtcttacattctgtctatgctttcatctgggcttgacagttatccacttttagctgaatttccagtccatttttgagagtttccccaaatctagtagagtcttatgtctactttcctactttcaacttgttaaacaagtgccttataatttttagatcagaattcaatcaaatctttcaaccaacttcaaaatcctcacttctttcatctgttcttctttctcccttgcttcataaagacatataatggtgacaggaaagaataatgactgtaacactgatgatttcggttctgcttcca

SEQ ID NO: 213769 - DNA, 493 bp, Homo sapiens
gaacatctcctctaacattacataaagacttcagcacctggctttatttccctcttctccattccctgcatcatcctatgacttttccaagactctggtctcatgatttcttaaaaacatctactttgccatccatattagcaacttcttttgatacatcttcatttttctttcctctgtctctttttgtaatggtcattcaacacttatatctcctttcctaacttcattcttttcttgatctgcctattcccacacaaccactaaacccacttttgacctttatggtgaccccctttctattctcccttgacttgactttaccatagagtcaagcttaggctcaagcttaggcttgagccaacactctgctcatttgctactattcctttaatgttacacaattccagacttagataaatccagtcttacattctgtctatgctttcatctgggcttgacaaatactagagtgaaaacacacacaccccac

SEQ ID NO: 213770 - DNA, 535 bp, Homo sapiens
aggtacagttctaaatatttttacatgtcttaaataatttagttttttctataactctaaaagaactattttgacccctacccacacacattttacagctaactttcaacagcttgtccagttactcagtcaatgctagaaccaagatcacagcccaggcagtctggcttcagagcttctgctattaaccactataacatactctagagttgcaatgtcacttgtggctattgagcacttgaaatgaggtcagtcagaattgagatgcactgacagtgtaaagtacatactggatttcaaagatgtggtacagaaaaaaaaaaagaatgtagatatctcattaatacgtctgtatattaattgtatggtaaaatggaaatatttggggtgtataagcttgcataaaatataccgttaaacttaatttcatctgtttctatactttttaaatgtgtctaccagaaatcttcaaatgtcgtaaacggctcacattataggtctgttggacagggctcctctagaggcacaatggggt

SEQ ID NO: 213771 - DNA, 537 bp, Homo sapiens
acgcctggccagtggtcagcttctcatgcacttcttctttatatttgagtattgaagacacaaatacattgaataaccacattggtaggtctcagaaagattttgtgtctagcctacacaaatacaagtaaactaaaggtccttcctgaaaatcttagatctctataccaggtttttcagtaagaaaatatttggaagtagtttgaaaaggtgaaagtgtcaaacaaaagtaaaggcattgttctcatttctcaacagcacatagggcaggtttctttttgtctattttttcctttcctggagggctcggttttggtgatggtaatgatgattttttgttaataaagagtttatataaacagttctcatatcttagcaactcagcttcttttctcaatcagaagaggtacacttgaatatgttaagtttgaagcaataacaaattcaagttttaaattaaatgtctcatgctttgatttccaattaatttctgttttctcttcccaaagtagaacctgtgcatttgtaaatctcctg

SEQ ID NO: 213772 - DNA, 361 bp, Homo sapiens
cggatatccactaaacctgggatctcatctggagacctgactggggaataacgtgcttacgagcttactcatgtaattgttggcagactcagttcattgggggctgttgggctgagggctctatttcctcactgactgttgcccagagaccaccctcaattccttgccatgtgggcctctccaacatgccagcttgctttatcacagccagctagggtgagagtctgctagtaagatgaatgtcacaatgtcttttgatgaattatggaaataaattcccctcaatgttgccatgtcctataagttagaagcaagttacttaaggggagggaaataccaagttgtgaatactagggaggca

SEQ ID NO: 213773 - DNA, 940 bp, Homo sapiens
agataggcctcccaggttaactaatttcagagcaatttttcagatttagaaaattggagtcaggcgcagtggctcacgcctgtaatcccagcactttgggaggccgaggcgggcagatcacctgaggtcaggagttcaagaccagcctggccaaaatgagtttttctctgtcacctagattgaagtgcaatactgtgatcatggcttactacagcctcagcttcccaaacgatccttctaatctcagcctcctgagtagctgggaccacaggaatgtgccatcttgcttgtctaactaaaaaaaaattttttattttagacatggagtctcactattttgcccaggctggtgtcaaactcctgggcccaaggaatttacttgttttggcctcctaaatccccttggattataggtatgagccactgtgcccagtctaagtagaattttaaaaatctccttttctaaagaaaattgaatttgttgatagtaaagttttaaaattgggaagttatattgaaatgtgtctggtgcaaccagtggagtttaaattatttttgaccaaaatggattctgaagaaatggtatggatagaaaacaaagaatatttgattaagtgaaacaaagccccagctgctggagcagaggttccactcgggttccacagacacccacagcccaaatccctggaggcctaaggcaatagctaattgagactatgcatcactattaaggcatcttcactaaagggcgctgtggaaacgctgcctgagatgcagacacctgtcagaagggggctaaatttcaaacaaggaacgtggtgttgcatcacaataaagtagattctagtattaccttcctttttcagaagaggagaccaatggggagcattggaatgatttggttgcaagcatactacactacttgtaaactgcagacaca

SEQ ID NO: 213774 - DNA, 514 bp, Homo sapiens
tacaagaatggaagtgtttattcttcagacaaaggcagagccccctcctcttcggagtgacagagtcagagcctcagtgcagtgggatctggcctgtatgctttctttgtttacacccacatccagcggatgctccctggagaggttagaatattcaaaaaaattggtaatgtacttcctatatgggtttgaggacatcgaattattttgcttgaagagaaaagggttgagtattggaaagattcactgatttccattgcaggacagcatatgattaaacaagcttagaggcaagcacgggggatttaaaatggagcacctcccccaggagactgtgaggccagggggcccttgggactttgttcaaagttctgcggtccttgggcctgacgggtgctcagcccagagcagatgcgtgggagcgcatgttgactgagtggctgaccacgtggccacataccaggaagagcttccaacagcacaggactgtcatcacaggacatttatgagaaga

SEQ ID NO: 213775 - DNA, 907 bp, Homo sapiens
ctgacactaagaacccaaaggccaaagggtttctggagtacagaagaaatcagtctttggttttctcaggctttctcaggcttcaagcacctacccatgcagaacatgaatcctctttttagagagctttagaaagtctggtagccctttccccacagaaccagacaagacactgagcagcctacagggtgctctctgccagtgtaccctaggacccaggtggtctaaggcctgcagaagagagagcagaggagctgggtgagggagctgtggcagtggtagaagaggaggtggttgtgattctgtactttgcaggcccaaatgtggactgcagactcagtctgtaatagggtggaggtgagccaatgaagtgtctgtttttgcagcgtgtgtggtaataagagccaaaccttgtaggcttagcctcactgcctctgttattcaggctggacaagcacaagccccatggcagtgacaggtgaggttgttaaagaggacatctagacatgcacagaatctccccagaccagtgacagaatctcaggtttggaagggaccttgacagtcattaagccccaattctgaccaaagcttcagtcctcttaacaatgtccctattcatgcctttgttgaatggccacagttacaagacaggaagctccactgccattgcaaccattgcaacgtgctttctgcctgtgtgggtcctctcatctactggcacctgctgggtatccccatgggtaaggtcctgaatgctacatctttttaaacctcttctccatcaaaacctacttgacctgcgtctcatcagggtaccatttcctgtggtagctcttctccaaaagtagctccaacaagccatgccttttgacactcatggcttcgtgtagtttcctcccacaat

SEQ ID NO: 213776 - DNA, 607 bp, Homo sapiens
ttaagtgtaaatttgataaaatatatgcaagacctgtacactgaattctacgaaacagtgctgagaaagtaaacttgagagataccatgttcacggattagaaggctcaatattgttcagcatcagtttcccccacattgatctgtagattcggcaaaatcccaataagaattttagtaggtttttttggtagaacttgttaagctgctactaaaatttggaaatatataaaggacctagaataaccaaagcaactttgggaaaataaaacagcatagtagaggtctagaaattacagcactgtaatttctagacttgttacaaagctattaagataatgcaaaagtgcataaacgtcacatagatcagtgtagcacaataaagttcagaaatacacccacacatttatagtcaactgattttgacaaacgtgtaaagctaattcaaaacctaaaacgtgaaaggtaatcctttccagaaaaaggatgaactttccaaaacactgtgctggaacacacatgcaaaaacaaaaaccctgatgcatacttcacaccatctacaaaaataaactcaaagtggatcatagatagacctaaatgtaaaactt

SEQ ID NO: 213777 - DNA, 451 bp, Homo sapiens
ctggagctgcgggtcacgcacggtgccagaggtttaggttgacaacaatgatggaggctttcctgcgataaacggctcaatcttccctggaatctgcactctctcagctttatggctgcccatgctggagctttgcagactgaaccatgtcagaggtcactctgggcagagctgtggacggatccctccctatcagatgtccccagtggccccagcaggacggagtcagtgggaccatctctgacctcacatgcagacacggaggtccagccggctgcctgggcttggtagggctgttggcagattacttcctgggcctccatctcttcatccataaaagggacaatcatttctgccgggggggttggggtggggcagccacgatgtgagaaagcaagttaaagtattaggtaaaaacataatgtgccaaatacaaacagttgagagctta

SEQ ID NO: 213778 - DNA, 942 bp, Homo sapiens
ttttttcattttatttttttctgccctcaatccttgttgatactgtaggtgtagttcatttatttacacagctgtatagtgttccagtgaatgaatatatacaatttatcatttcttctattgatgagcatttaaattgttttcattttttatctattataaacattgcctcatgaatattcttgtagctcctgaagcaacatgccatagtttctccaggtcatatacctgactgtcaaattgctgggtcctaggatataaatatttttccctttataagatatttataggatattgcaaacaatttctgttttttcatatccttgccagcagttagggttatcaaattctttgatttcttactgatttgtaagtttttttgtttgtttttaggtattttcaggatagttacaaatgttaggaaaacttatttttatttggcttttgaagtttccagatttcttgaacagtgaccaatatggacccaagttactgtaattttgtcctatagtatatattgttgatagtgagctttccaatgtactttctccaagtatgtttagttatgctccttttctgagaccatgaggaagtgtttcagtgtttcagaattcaatgtgataactattatatacgtagttattttttattaaatatatatctgaagcaaaaatgaaaaatgttaatgctttatatatgagtatgtgagtgtatactacatttttcggtaattttatttttaaaacttttcaaaaataaaaatgtctcgtacaaaacaatataacaacaaaaagaatttaataattttttttttttttttttttagagacaggatgttgctctgtcacccaggttggagcgcggtgatgtgatcatggctcactgcaacctcaaccccttgggctcaaatgatcctcctaccacagcctcccgagtagctgg

SEQ ID NO: 213779 - DNA, 433 bp, Homo sapiens
ttgtggtccttgagtaagggaatcgagatgtcagctcaatagctggggtatctgggtccttttggaaaagaagagatcagggcaggaggcagctttgtgaaatgccggcacagggtaactcatgtgcaagtcataagaggatacgggcttgcctgagggagagtgataagggcctgagatacagccccaaggaggtagagcggacatactggtagggaccaaaggaggacaggcccctctgaaccaaggacagagaaatttgaggagagggatgtggttgataatgccagatgctgctgtgagcgtttgtaggagtgggcctgaaaatgcaggatgtttggaatataaaaacatagaggccaccctggcaaaaacagtatttagtggggcaggggacagattctggattggaaagaaaaaaaaaatacttaag

SEQ ID NO: 213780 - DNA, 2041 bp, Homo sapiens
  misc_feature (2)..(4): n is a, c, g, or t
  misc_feature (2039)..(2039): n is a, c, g, or t
  misc_feature (2041)..(2041): n is a, c, g, or t
gnnntccgggcggagcgggcagcggccaagtcagggccgtccgggggcgcggccggcgatgcccgcagcccccgccgcgccccgccgggcctgctgagccgcccccgggccggggtcgcgccgggccgggccgcgcccggggcggggcggcgctgcctgcatgaccctccggcggcgcggggagaaggcgaccatcagcatccaggagcatatggccatcgacgtgtgccccggccccatccgtcccatcaagcagatctccgactacttcccccgcttcccgcggggcctgcccccggacgccgggccccgagccgctgcacccccggacgcccccgcgcgcccggctgtggccggtgccggccgccgcagcccctccgacggcgcccgcgaggacgacgaggatgtggaccagctcttcggagcctacggctccagcccgggccccagcccgggtcccagccccgcgcggccgccagccaagccgccggaggacgagccggacgccgacggctacgagtcggacgactgcactgccctgggcacgctggacttcagcctgctgtatgaccaggagaacaacgccctccactgcaccatcaccaaggccaagggcctgaagccaatggaccacaatgggctggcagacccctacgtcaagctgcacctgctgccaggagccagtaaggcaaataagctcagaacaaaaactctccgtaacactctgaaccccacatggaacgagaccctcacttactacgggatcacagatgaagacatgatccgcaagaccctgcggatctctgtgtgtgacgaggacaaattccggcacaatgagttcatcggggagacacgtgtgcccctgaagaagctgaaacccaaccacaccaagaccttcaacatctgcctggagaagcagctgccggtggacaagactgaagacaagtccctggaggagcggggccgcatcctcatctccctcaagtacagctcacagaagcaaggcctgctggtaggcatcgtgcggtgcgcccacctggccgccatggacgccaacggctactcggacccctacgtgaaaacatacctgaggccagatgtggacaagaaatccaaacataagacagcggtgaagaaaaaaaccctgaacccggagtttaatgaggagttctgttacgagatcaagcatggggacctggccaagaagtccctggaggtcaccgtttgggattacgacattggaaaatccaacgatttcattggtggtgtggttctgggcatccacgccaagggggagcgcctgaagcactggtttgactgcctgaagaacaaggacaagcgcatcgagcgctggcacacgctcaccagcgagctcccaggggctgtgctcagcgactgacgcccacccgccactgctacccctgccgccacctgcgcccagcacggccggccccgggcttccccagcagccaccaaggcctgtggcccccacactgggggagatccagaacccctgcttggacacagagccactgcagtccccgctcggaggatgtggagggctcagccactctgggacggggagggcaaggagctggggtggggggctctcagctctctggggcccaagaggccggtggtggaaagagacctcagcacctgcccaggggaaggggacacgcccatctgggagcaaagacccttctagagggccagccccggctgagaggacaggagtgtgggggcgccttggcggacagtgggaacagaggagggaggtggtgagcagacagacaggtggaggatgggaccttgaagactggctgctccagcccaagaaagcctaactgcatccctcatctccttcgctgctggacagatggaagaagcgggcctgccggccgaaagtctgccagagttcccggaggctcctgatgatgggtaaattggcacatgcttcactcaatgattccacaagccctgggggtgaatgagacacagggcctgccctcagggagttcccatctagtcagccgaancn

SEQ ID NO: 213781 - DNA, 464 bp, Homo sapiens
tgggactgggaggatgggtgaggggctggcatagagcaggtgcttggttggtggcagccgccatggaacggtggcacctgcccaggccaggctcatctggtctcacaggggcaggcgaagcctctccaagatgcggccagggtgggacctgtgccctcctctgtccgcagctgccctgggcacgctggacttcagcctgctgtatgaccaggagaacaacgccctccactgcaccatcaccaaggccaaggtaggccccgccagcctgcccccaaattccctgccccggggtcctcaagagggcctaggtcagggaggccagaccacaccactccccaggttcctgtccaggcttttggatgtctgtgctgtgtggggtgcggggccaggaaggaattcttctttaaaccttcttgaatacccaaccccaagaaatgccttggacagtcaggcattgcggggag

SEQ ID NO: 213782 - DNA, 886 bp, Homo sapiens
  misc_feature (2)..(4): n is a, c, g, or t
gnnntccgggcggagcgggcagcggccaagtcagggccgtccgggggcgcggccggcgatgcccgcagcccccgccgcgccccgccgggcctgctgagccgcccccgggccggggtcgcgccgggccgggccgcgcccggggcggggcggcgctgcctgcatgaccctccggcggcgcggggagaaggcgaccatcagcatccaggagcatatggccatcgacgtgtgccccggccccatccgtcccatcaagcagatctccgactacttcccccgcttcccgcggggcctgcccccggacgccgggccccgagccgctgcacccccggacgcccccgcgcgcccggctgtggccggtgccggccgccgcagcccctccgacggcgcccgcgaggacgacgaggatgtggaccagctcttcggagcctacggctccagcccgggccccagcccgggtcccagccccgcgcggccgccagccaagccgccggaggacgagccggacgccgacggctacgagtcggacgactgcactgccctgggcacgctggacttcagcctgctgtatgaccaggagaacaacgccctccactgcaccatcaccaaggccaagggcctgaagccaatggaccacaatgggctggcagacccctacgtcaagctgcacctgctgccaggagccagtaaggacttctcagagcatctaacgtgttgatgggctgttccctgactctccgcaagggggatgaagtgggcagaatctgcccctcattcctacgccggatgacccaagcgtccgaccacacatgtgctcagggcaccagcacaacaggtgcatctcggacaggagagagaaaaattgctgttaaataaaagcatcaaggtg

SEQ ID NO: 213783 - DNA, 569 bp, Homo sapiens
tctctctccagggacagaaagctctttgaatacctgctggcttgatctataccccatagcatgtccccatcctctgcctgtccgttggatgtaattccagatacctgaggccagatgtggacaagaaatccaaacataagacagcggtgaagaaaaaaaccctgaacccggagtttaatgaggtatgaggggctggtgaagcttcatgaaggccattcctctgccccacagcagtgggggtgtggctgggttttcaaaaggtcatggcgggatggggagggtggtcagagacggtggggaggggccgcaccaagccacagacacaggggagctgggggacccctggaaagctcttggcaggacttgtcggatgtagggctggggggagggaagtgttgaggggagtcctgggttcctcatggaggcaacagggcaaagagggggtgaggaagatggggagaaactctgtgtggggcaaggggactcgagacaccctggggccccaggaagtcttccgcccaaggcggcaagtacagctggaaatgcggattccccccaaggaacaagaa

SEQ ID NO: 213784 - DNA, 741 bp, Homo sapiens
gaggcaggtgccagcggacagtgggtgggggtgccggcgccaggccaggctcggggaggccccgcgctacctctgcctctaggagtccaggcgcacagacaagctccccggagccgctcctgcttcgccaactccccactcgcgccgcccgtgccagccgccggactggcgtctccgccgcccgcaggaggagtcgcgggagcactagcagccgccgccgagcgacagcatcctcaggagagacgccccgggctttgcagccggcggcctccgtccgccctccgcggtcgccccccgccccgtcgcccgtccgcccgcggtggcagccggcgccggcgccccggggcccttcacctgccgcgagcgtccgggcgggcgggcgcacgggagaaaaggcgcaagaagcgggcaccccgggaaccccattccctcggctcactcggcgcggagaagcgacgcccgctgactccgagagccccggtgctccgtgcacctggtccccaagttgaggagcgacacccctccacaggggactagcccgcgcggggagcattccggtctcactgaccccggcccacccgcgggactccaggcacctcttctgcccgcaccccgcgacccctcccgggaccccggagacagccggcctgcccccggcgtcccccttggccagcacgccatgccggggctgcgccgggaccgcctactgactctgctactgctgggcgcgctgctctccgc

SEQ ID NO: 213785 - DNA, 419 bp, Homo sapiens
aatacattaagtattgatagacaagacctaaactaaagctctttgggtgcgggttcttattgattttaagatataaagacatcctaaaggccaggcctggtggctcatgcctgtaatttcagcactttgggaggtgggcggatcacccaaggtcaggagttcaagaccagcctggccaacatggtgaaaccctgtctctactaaagatacaaaaaaaaaaaaaaaaaaaaaaaaaaaaaaaaaaaaaaaaaaaaaaaaaaaaaaaaaaaaaaaaaaaaaaaaaaaaaaacttttgggccgctttggccaatctaattttaaattcgaccaattttttgaatgcggccgaaattcgggttaattgggccaattccccctatagggagtcgtttaattttggccgtgttttacgtcgggtt

SEQ ID NO: 213786 - DNA, 862 bp, Homo sapiens
tagattccaaatgaatccaagattaaaatataaaacacctaatccataaatataactgatgaaaacataatcattttagctcactgagcttgcttgaaagataaaaaacataaaaatgaagataatgattttgatcacctaagattgtaaagcttttaacaatgttaaaaaacaaggaaaaatactcataacctataacaatttattttcctaatatacaaaaagttcatttgttgagtgtttgttatgtgttaagcactacatacaatatcccatttaattctcacaacaatcctgacaggaaagtactaattaacatcgtaattttacagatgaaataactcagagcttaagtaaggccttcccagttttgccacagcatactagtatggtagaaagggttataagtgtgccaagatgttgatcctttttaaccctttagcctcaagtagtctcttgtataaatagttaacagtttgtgtgccaccatgtgaaagaagtttagcaagctgatagatacgtaataaaatatccttgtttttagaaaatattcaccaaagtattaaaagatataaactataaaaggcatcaggtatgtaacccactctcaaatggttcagaaaaaaatgtgtgtgtgcgcctgtgtgaatatacacagaaagagaaatgcagatgtggcaaaatgctaaaaactggtggttctgagtaaagtatacagaagttctctaatattcttgctacatttctggaagtgaaattattttaaagtaatattattttttaaaagtcagtaaaccagctaaagtatctcactgaagtctctcatctaattggtgtgaagctagaattcaaacctagattg

SEQ ID NO: 213787 - DNA, 281 bp, Homo sapiens
cagctcccatcagcagatccgaaagctaatcaaagatgggctgatcatcggcaagcctgtgatggtccattcccaggctccatgccagaaaaacaccttggcctcccggaagggcaggcacacgggcataggtaagcggaagggtacagccaacgtccgaatgccagaggtcacgtggataaggagaatgaggattctgtgctggctactcagaagataccgtgaatctaagaagattgatcgccacatgtatcacagcctgtacctgatgggtgaagggg

SEQ ID NO: 213788 - DNA, 705 bp, Homo sapiens
caagttctcgccatcaattggtgaccccctttttgagaaatatgaaaatgtttttactctagaaggccaataaagcctgtctcacctataatggaaaatagagtaccttgcaaaggtatgacaggaagaaaaacttgcggagttgttgctttggttacagagtttctgattcagatctttgtatttgcattaatgtctgagtttggaataggttgtgaaccaataaattatttcatttttaaagagtaaaagttttggaaaaaagcaataggttaatcacagattaggctaggaaaaaaaagccatcacacatagttctttgaaagtaaggtattatgagcatgtaaaatggtacagctactctggaaaagagtttggcagttttttacataactaaacatgtacttaccatgatacccagcagtcacactcttgagcatttatcctagataaatgaaaacttacatgcccacaaaaacctgtatatggaagttcctagcatccttattatacatactatttatatatactattattatgtatatactgtttatactattagtgtttatgtatgtacacacacactatacatatgcagtttataatagtaagatactggaaacaaccaaaatgtccttcagcaggtgaacagttaaacaaactggtatatctgtacaatggaatgccaccagcagtaaaaaaaaa

SEQ ID NO: 213789 - DNA, 263 bp, Homo sapiens
gcagccggtggaaaggaattgaaatcctttgggaaaggatctcagcatgttcctgtgttcattgcagcattattcacagtagccacaagatggaaaccacttactgacatgttcgtcaacagatgaatggttaaaatttggtatattatgcagcctttgaaaagaaggaactcctggcacatactaacaacacagataaaccaccttgagggacattgtgttcagtgcaattagccagtcatagaaggacagatactgcacga

SEQ ID NO: 213790 - DNA, 613 bp, Homo sapiens
gcaaactgttttccataaggactgtaccatttcacattcccaccagcaatgaagggagggttccaatttctccatatccctgccaatatttgtggttgttttgttttttacacagccatcctaatgggtatgaagtggtatctcattgtagtttttatttgcattccatactttttctaatttagtcactaaagataggtatggcttttcctctgaaattccagtagtttctcttgttcaaccaaacaatgtgtgtatgaagcctatttcttcacagatttcagagctgctcagcagggatttcaccttgtcactgtcataccacacagcacagactgattggaattgaaggaaggcaaacagctgaatcaagaaaggcactttgcactctctctggggcaggatgaagggtttctttctttttctttcttcctttctttttttttaatacaacagcatcagagaactgccatttagtgcaaagcaggcaattcacccatcaagcctgtgaaggtagttgaagtagctgctctaatggctgaatggctggacaaaagcggccattgtggggctcactgcttttgaggacaacgatgattgctctgatctgata

SEQ ID NO: 213791 - DNA, 445 bp, Homo sapiens
catggcaagcctagaaatccccattttcttttcaatgttttccttctgttctctctcaccacaaccccttaagcaatcacgtggagatggtggcagcagagagtgatacgcgcccacaggtgcagggcagtcatcctctccgacctgcagacctggtgttccaggaggcgaggctgcacctcacacatcctcccctgggtgcttctgagctgcatgaccatggacgaagggatgactgcagaagtgctccacagaacagggtaactcacatcccaaatttccagccagaggaacttgggaaaggctgtttgcagactcccgggctcacggttcccctgtacacacaaagctgtgcacacatgggtgttgcctcatggagcatttcaaacgtcatgaaggttaaactgacggagcactcacagaccgagtcctaggttggcctctg

SEQ ID NO: 213792 - DNA, 506 bp, Homo sapiens
caggcataaatagggttattgctgatcaaagaaacacattcagggcacatgctcttctctcagaggatctgcttgctgggctctgacctcatagcagctagaggagaatgccatacatggaagcacatctctctcccttgactcctcacctaattctagctttcctgggtgaattgatttttttgtctttttcccgaacaaaatggggtgaatccagggatctgaaacggcatctctcaagtctgaagcaagaaaaaaaaggcaaaaaattctagccctccttgcagccacactaaaatgtaaataatttctgcctcttacctggctgcagaatagtagatgtgtatgtatctcactgactctccattactgagacagccactccatttaccagagcaaagagtaatacacatgtatctcattaactccattactaaaacatgtagatgaggaagacagaatgcttgatcatcattccaaaattctagagtagaatgttatcaaaa

SEQ ID NO: 213793 - DNA, 225 bp, Homo sapiens
cagttcctcagtttccccagcctaaggtgtagttacatcagatgaccatcaggccctttctgttctaagttgtgaatgttccagaagccattttgataggacgataatggaacctagcacatttaccccatggctattaactgtaacgctgctgtaagtatacaacacataattgtttcttacaattatttatttttaaaaatcacttgaaatctattatgagta

SEQ ID NO: 213794 - DNA, 370 bp, Homo sapiens
aaatttttgcaaaaaggtttcactttggttgcccaggctgggccacagtctttgtaatctaaccttggaagtgacatctcatcatttctgccacattttattagaattaaattagtaagtctggcctgcattcaaggaagctgatataagggtatgaataccaggaggtaggggtcattcagggctaccttagaggctgctaccataggctattatgagcaaagctgctgtgaatgtttatatataaatctttgtgtagacaaatgttttcattttatttcaatgaataaatacctaaaagtaggatctctgacttttacgatgtgtttaaataaataataaactgagaaattgttttccaaaatggctg

SEQ ID NO: 213795 - DNA, 419 bp, Homo sapiens
ccttgactcataaggtaaaggtcaggcttatataactcatctaaatttgaagaagaaaaattcacagccacagactttatctgtaattctggtttataatcgctcacctgggctactcttcacaggaggagtcaactgagcaactaagatgcagtcaggcagtgcctcccactagtgaggtgtgttccactcagggcttgtgaatagaacagaataaccttaagtttgtgtgataagaaagtagagtattttatttttaaaaagagactataccctcatgtcccaaaataaactatacatggatttaaataatcaaatattcaacaaagaagaagctagcagattaaaaggaattttatcaatgttagaaataagtgaagctttctcagatttgaagtaacaggatatattagaaagga

SEQ ID NO: 213796 - DNA, 638 bp, Homo sapiens
tcacgcaaattgggagataggggtactacatttcttgatgactgtagttcaaagaaatagttcctgagtcctggaaaaacacatccctactttgtaaagctcacaagatgcttacttagctttttaaaatatttacaggtgtctcagatgggtagaggaagaatatatacaattactgattttctaaaacaagcactctaagaaatgaggggagagtctctttcactcttttttaatctgagaatattaaaatatatttttcttgttcaatatatatttgtccttacatgagggttaagttatcgtaagtgcatgtctttcatataatattttacataatactttgttgaattataccttcttgattctaaactaaaagatacttgacttacatttgtaaatatatttgctataaattcagtaatgctttaatctacttccaatgcatcatttgttgtctaaatgtagctttataattagccctcttttagaaatgtgtttgtgtgtctctgtgtataaaggaaaaaagtaatctgcatctctttccccctaacacagtcatggcccatctagtggctgggtacctgacacaggaaatccttccacttttagggtggtcttgattgatggatattata

SEQ ID NO: 213797 - DNA, 517 bp, Homo sapiens
gattttttttctttcttcttcgtttttctcaatatcttaaaatcatcttactagaaagcctattttgcagtcacttttggaaacattcccactgtaccaataacctagaattgctatcttcagctttttaatacaaaataaataaataaaagacaggcaagagaagagtctaggcacacacacaaataacttctgctgtatctccattattgttgtattgttatgagataggcactgtggaccagccttactgggttaaatcttggctctgcaattcgtaggcaagttatttatcagtcctcctatgccccacttcagttttctgagctataaatgggtctaatagtattacctaccttaaatgggggctgtatagattaaatgcatactctgtgttaactgcttagaatggtgcctgcctggtgcacagtccatgctcaatcaaagatagctatttttttctgtctttactatatatgattttacatatatgattttatgctgcataaaatttttc

SEQ ID NO: 213798 - DNA, 551 bp, Homo sapiens
agtcataatgtcttttataatctggtcacacatagtcacttcctccatattctgttccttagaaacgtgttgctaagtgtaacccataattaagaggggattaattagactctacctttgaaaagaggagcatcataaaattcgtggatatatttataaccaacacagaatgggacagtaatttattattctcccttggacctgaccaaaataggttattttctctctctgcaaaatacttttgtccaaatggaaataaattcagccctccatatctacaggttccacatccatggatgcaaccaaccatggacagaaaatatttgggaaaagatgttgcaaaaaataataataaagaattttatatttgaaaatacagtataacaaaaatttacataggatttacattgtgttgggtattataagtaatctagaaatgatttgcaggtgtgtccaatctttgggcttccctgggccacactgggagaagaagaattgtcttgggccacatatacaatataccagcactaacgatggctgatgagctaaaa

SEQ ID NO: 213799 - DNA, 377 bp, Homo sapiens
taaatacaggagcataatacaacatgaggatccagcaatacctacactttaatttggtagaaagttgttttttataaaaaagaaaaataggtagaacaagttatagaataaaactagttccagaggtgacaacctgtgatatacaacatcagtaatactgttgttcagacacattaccctgaaagttcagcaaatgagctgatgcgcaaatctatgagatgaaccaagggctaatattgactgggcagtacagagttgctgcacagttgaaggcaatttaaaaaacaaaaacaaaaataacccacgtctgactaagctcacaatttagtccagtgcaacgatgcctttaatgtgattctcatgacaaccagatacac

SEQ ID NO: 213800 - DNA, 421 bp, Homo sapiens
tgatatgagcagctatatgcaaataagttcaacattggacaaatggacaaatttcttgaaagataaattatgaaatttcattctgaaagaactacatgaccttaattgtcttacatctattaaataagtggaaattgtagtttagaaactttcccacaaagaaaactctaggcccagatggcatcaaaataatattcagatgaatgaaatggagaaaggatagccttttcaacaaatggtggtggaacaattggatttccatatgcaaaaaaatagagatggacgcagaggtgtgtgcttaggaggctgaggtgagacgattgtttgaggccagcctgggcaacatagcaagaccccatttcaaaaacaaaaataaagaacttgtagccttaccttgtgccatattatgaaaatgtatcat

SEQ ID NO: 213801 - DNA, 336 bp, Homo sapiens
tggaaagaaacacattttgcatcacaacccagtacataacatacctcttcacttgatcttagccaaatggccgggaagcagaatatacctctttacatgtcatgtatgtatgcatgtataaaataaaaagtttcacaaaacaatatatgcccctactatttgcaacgtattgttttaattttctattctgttcctttcttttctaacacttataatccactaaattgtttttacaaattattaataaatcacaacctgcagtttggaaaagattcaatctgcagtaaggaagagattcaggaaatgaatatttggggtatatccttcctgaatttt

SEQ ID NO: 213802 - DNA, 466 bp, Homo sapiens
caagggacgaaaagcaaatgtccagatggcgattagtggaggccttgggggtggaagatctcagggctcacccctgtggttatcatcttagtgagggggctagtgtggacttcaggcccaaggaagaataatattttattctttacaaaatagtgcatgaaagattagctctgagtctttataatcttatcattggcttcaaatttcaatcccatattatactttccaagtatattttgttaaaatttccttaattcataatattctaatcagcaatgagtttctatccacatgtctatgagcacatatattaatttaaaaatctgcattgctcttgtatgaatgaaatataaaggaactgaacttctaacgaatgaaagacgctggatgaaaagataatattttatctgagtttcagttcagtcatatgtctgagaatgagtttatctagcccataagccttctg

SEQ ID NO: 213803 - DNA, 792 bp, Homo sapiens
cccttacccaacatatattttgctttcttcccgtttgcactgtacagctctgatccatattgctctgagactgacagcaatcaggactttaaaaaaaatcatcctctcaagctgttttttgtctcctctaggatcttatttctagatagattcgaactaagtcaactgtactttactgaaagcaaaaagataaagtcattttggggcatgcaaagttaagattatgaaaaatcttcaacaaaagccctcaaaatagaacttatgattaagatctgaactttaattccagacataaaaacaaactcgatattctcactagagtactcgtctcccttttaaagaattactgtcctctttttgtgcactagagtaatttagtgtattatgtagaggtcagctgacttctaccttgtaacatttaaatgccactgtcccaaatatttatgagaaatcaaggttatacttttaatacttatgttacttggctctaagtttcaagtcacctataatttcttaactcctttaaaaaaatcatattggtcagggttgttgctgctgcttgttacataagctatcattccaggggtcccttccttaggtaattcagcatggtttggttaagagtgttttaattcaagcagaagtgttaaaaaacaacaacaacaacaacaaaaaaaaaacctcatccaaaaatgttgtccctttcaaccatgaaacaacgaacttttttcttttttaatcaaaaacatacacggccagtcacataatgcactccttttcttgaatgttaac

SEQ ID NO: 213804 - DNA, 386 bp, Homo sapiens
tggtagaacatgccctattatatggcagtataaattaatctgcttttatattgtctggaaaaaaatcctagagagatttgatttgtatcttatcactgaagattccatagaatatattgatttaggttcatttttaaattttagaaatgtaatacatagattgccttttgtatatgaataattgatctatcgtctaacttttaattctgtgttattcagtgttttgttatttaataataactttccttcttcaaggagacaaaacaactagagattaaaagtggggtatggaaaaataatacattggtatattataattcataattaggagatagcttgaaaacctaatgtttctgcattatagagatttgatatatggaggctat

SEQ ID NO: 213805 - DNA, 495 bp, Homo sapiens
ctccagcctgggtcatagagtaagatccagtctttaaaaaaaaaaaaaaaggatatggcatttcagtcagaggttggaaggacctaattagagattaagaaaattaaagaacttgttttttagtctggttcctactttattcacaaaaagagctattgagggtatactgtcgttttgtttcaagcgggttagggctcaggtggcccagctcacagtggggctgtcttgtggaggctcagatgagggcttgttcacagtaatgagtcacatttcctttgggatcttttcctcagtatagggacctccaaaagaagtagtaaaccagagatgccttgctgaagcgtggaagagcccattggctttagtatatcgatccatattcccagagaccatttagctgaaactgcaaggaccatgccaatgagttcccctgaaaggagtatgcaaaataaggccaaaaggcacaaaggctgttttgagaaaacactgtagatt

SEQ ID NO: 213806 - DNA, 731 bp, Homo sapiens
gctgcctttaggtccttaatgaaggccatggtttccctttgtcctcctaggattctgcaaatttttttattgagccatctggaaggggacatggagacagatgagcccagccctaacagctattcaaggtgtcagacatgtaagtgagtgatcatgagtgttccagcctaatcaagctcctagataagtccatctaacatccaacgtcaagtggagcagaagaactgcccaacaagcaagtcaaccccacagtatcttgagagataataaaacatcttttttaatccactaggttttggagtggtttgttatacagcaataaataacttacttatcaagtgaaagttgaatattttggaagtcagactgaatgtaatacatacattaaaaggtaaactacaaactatgtgcccatacaagtggttaatatcttgaaaataaaaagagctcattataaaacctaaacaaaatccccaagtcttcaaacaaaaaaatggacaaaggacatgatctgtctactcatagcagggaaaaccaaaatgactaatgagcaaaaaaaagtgttaatcattatttaaaagaccattaatactcaaatactgttggtaagaatgtaaagtggtacagtctttctggagagcaatttgttagcatgccatttctgtaaatacattaggagataatcacagatccacagatctaaataaataagcaaaagtgttaatttcaaa

SEQ ID NO: 213807 - DNA, 469 bp, Homo sapiens
agtggcaagaattcccattttttaatttgttggaaggaatgaaggaagatcccaatatagtttacattactaaatatggtaaatgtcaaatattttcatatgggattcccactgatatttatcgaaaccagcatgccatgtacccactcagtccgaataaaaatatcagagtgggaagggaccttagagacaatctggcctaatactcttattttgcccatgaggaaactgagcttcataggggtcaagtaacttgcgaaaagtcacacagctaggtagtggcagatctgcaactaaaattcaggcctttgattttagtccattcaatgtacaatattcataggttatgtcctctatacagagcactggactagcactagaaataatgagattatttagatagggttcttgctttgagaaggctcacggttttgtaagaaagacacatgactaaacaatacaaaaaaat

SEQ ID NO: 213808 - DNA, 354 bp, Homo sapiens
aacacagtctcttctcagatcgttcttcttgcattcaacatccagcaacaggaacagaagcccacccagaagtgacagcagaactcaacagacgatgataaagtttacaccaactataccataaactgttggcaccaccaatttgatcacagataaaggtcccacacagaaagaagagaaaaactattaaaactccatgaacatataagcacaacactgtatactttatacatttaatttatttgtatgtttatttattcacttatttgtattttgtcttgctccatatggcatttgaagtaaattcagttttcagaatgcattactcatatggtgggtgtgaaacagtttaag

SEQ ID NO: 213809 - DNA, 488 bp, Homo sapiens
gagggcatcagtcaatttatttagggcctgagtggcataaaaagacaggggcaggtcaaatttgctctctggctgactgagctggcacattgattttctcctgccctcagcactcctggttctcagatcttcagacttggagtatagcttataacagatgtatattttaactctttcctaacatctcttgaaatgacaaaaatgacaaaaaatattatatctataaagaaataatttgtgtcgggaagacataaaatagttggaattatattcaaggacaaaccagagaacaagtacgtgtagactagacatatacaagaaaaaggcttcagaagaagtctgagtttctgagaggatctctttcatactcatccaacatgaagtatgacttaacctgctacacacgttgccacatgctcaaagcttgatgtccaccttttcattgaagaaaaaggccaatcagggaagtagacctttaaaatggcaaa

SEQ ID NO: 213810 - DNA, 436 bp, Homo sapiens
ttgaccaggctagtctcgaactcgtgacctcagtgatctgcctgactcagcctctcaaagttctcggattataggcgtgagccaccatgcccggccctacctcttggttattgtgaataatgctgttatgaagatgggtttgcaaatatcgttttgatttcctgcattcatatcttttggttatataccccaaagtggaactgctggatcatggtaattctatgtgtcatattttgaggaactgccatactgttttccacagtgaatgcatcattttacattcccgccagcaatggacaagggttccaatttctccacatcctgtcaacacttgttgttttccaacttttttgataatagccatcctaatggatatgcatttttatgcttttatgtattttcagaatctccttcgggaagcatgtggtatgtttat

SEQ ID NO: 213811 - DNA, 457 bp, Homo sapiens
gcggcacgctggggagctttggaagtctgccatgccagcctcccacttggagctgcaggtaatgctggggagttggaaaggctgtgcgcgcctgtctgtcgagtcacccacacagagagcaatgcaggaggcggaaagaagtctgggagaggagcgtgggctggccacccccaacggaaccataaggggagtaaacagtctgtttgcaaacacaactaggacccctcttcccatcaaggcagagctggatccaaatcctgattctatccatgtgaggactgtgatattcagcaggtcagggcttcagcttcagtcagcttgtctatacaggtgatccaggggtgatccaggaagtcaaaagagcttgtgtttgttgtagagcttgacacattgcaggtatcagttgtaggctagtgaccacctctttggctttctctctccctccatcctctcactc

SEQ ID NO: 213812 - DNA, 151 bp, Homo sapiens
aagcatcttaaacattaaccctgtggcattttctcatcaatagtaagttgatcaaatgagtgacccagtctcagcaatttaacatatcatccctttcagctttaaatgtatatttaatcaccttagcccatttttcaatccacaaaagtaa

SEQ ID NO: 213813 - DNA, 560 bp, Homo sapiens
gactccaagtttctggcaatgtgggaacattatagactacaattttaatgcaaacacaatgagcttcatgtgatgcctctggatcaaactgaaaatgagtacttgaaaatatgggtctggaactcaggtgaaggcagcctattgaacagtagcttttggctactagtaatgatacaacagagaacattgttttcacaataaagagaattattattatagaacacaatgtcctaaggtggagtacctaccttaattcagtaccatatctttctataactccactttgcaatttgactttattagtgggaaatcttcttgagtgtcctcaaagagtcagtgtcatctcattggaatgcctaggatacatacccctacctaaacccatttatagaaggagaatgaaacaactatgaccagtctgctttatgctgcatcagtgaggttggaatgaagtccacttttctcaccatttagcttcttgggtgagtgccaacaccctaatcaatctttgctttgatagcaaagaggaagtgtgggagggtggggggatagtcaggaat

SEQ ID NO: 213814 - DNA, 288 bp, Homo sapiens
gtgtttccaaaaacggagccaaaacagcagaagaaggaggaggaggagaaaggggagctaagtccagacaaggaggttctgacaaaagagaaagaggaactgaagggcgaggagaaattttggcagtctttttccgttcagaaattattttagacaattttttgtttttctcttgcaaagaaatgactttatcagagccttttttagaagcttctaagtaccattgaaaatagctctccctttggcctgaagtacaaaaataaataaataaataagaaaaaaaacaca

SEQ ID NO: 213815 - DNA, 496 bp, Homo sapiens
tgcaccccacctttaccccactccactcgagtcacagattgaagaataagatgtttgtttgtttgtttgtgagatagagtctcgctctgtcgcccaggctggagtgcagtggtgcgacctgggctcaccgcaacctccgcctcccaggttcaagtgattcttctgcttcagcctctccagtagctgggattacaggcgcgcaccaccatgccctgctaatttttgtatttttagtagagtcggggttttaccatgttggccaggctggtctcaaactcctgacctcaggtgatctgcccaaagtgctgagattacaggcatgagccaccgggcctggtcaagaataaggtcatttattgttgtataggcaataagtgtgaatcaaggatacttttaaaaactcataggtgagcccgggcatggtggctgagatcagcctgcacaacccgtagtgagacaccatctctacaaattaaaattaaaactttagccacac

SEQ ID NO: 213816 - DNA, 859 bp, Homo sapiens
ccctcacacagacaccctgaagacacaaattctttctcgtaagtccagctcaattttccctacagcattgataatttgctgggttttttttagcctaaccatcaaatgaactagttaatttgaatatgaaatcttgctgtaccaaaatacctatctttgatctctagaatatgctctcagcttggtgaaatgctcacatctgaaaccaataccagactcattctcctgttcaactcagtggaataatgggccgagttgcccattacttattttatctctttcccaggtccaagttgttgcatccacctaaattaattacaactccttgtcaggctgatgagctgttacaactatcacttagtaaggagatgtcaaggaccatggcgtgactagcctgactacactctctgctaagcagtaaagttagacaggtaggtttggtgcagcatggacttttttttttcttaaaagagtctttaaaaaaaaaaggccttttgaccaggctggagtgcagtggtgcaatcatgtcgaacttctgggctcaagcaatcctcccacctcagtctcttgaatagctggtactacaggcatgcaccaccatacctggctaatttttaaaaaatttttttgtagagacagggtctcactatgttgctcaaggtagtctcgagcttgtggtcttcagtgatcctcccacctcagccttccaaactgctggaagtttgcaagcgctaccatacccagccgggctcaatttctaataaggaagaaaccttaatattccttaagtgaactgaacacgtaaaacctagagatgattaagtcagtaaggacagcattacagtaaaacaattgagat

SEQ ID NO: 213817 - DNA, 401 bp, Homo sapiens
ccttcagttcttcatatttgtttacctggagtctgctacatttctgaaacttctacatatacttttcgctgtgatttcttctcctattttttccaacaatttggtctcactgtttcctatctttcagaaatccattaaagtctcatcagctgaaagccacctttcttgatttaatacctttaaaaaaatatctaacatacttactaacatatccactcagaatcctttgtattcagagccctgctaaagcagacacaaatatccagcagacctacactcagctaacctctcttaaggctccctttagtgtgatcctaagagagtctttcagctctcataacttaggcaacagcacaaatcacatttctgtaaccagaaaaactgcaaccacctacacctcc

SEQ ID NO: 213818 - DNA, 449 bp, Homo sapiens
cagtcacaggtaaacttctaccacacctgcccaggtggaggcagccacacccccagctgagcccaaggctgggaggcactgccatgcccgcagagactggccagagcgctctatccagatgctgctgcccccacagactgcccatacttggtggcgggttgacaggtgtgtcagcagtgctccaacagcacctgcccctccatgccggagacattccagccagatacgaagctgaggggcacagctgcctctgaagatccagggactgtctgtcttgagctgggctgcacagctggagtgtggagcccctccctgctctcccagggtgggcactgagggcatctacaggagtgggagccctaagctggcctctcactgaccatgggtggtggcccattcctccagcctcttgtatgtgtctcataaacgggtctcccaaggtctccagc

SEQ ID NO: 213819 - DNA, 970 bp, Homo sapiens
ggccgggcgcagtggctgacacctgtaatcccagcactttgggaggccgaggcaggtggatcacctgaggttgggagtttgagaccagcctgaccaacatggagaaaccccatctctactaaaaatacaaaattagccgagtgtggtggcgcatgcctgtaatcccagctactcgggaagctgaggcaggagaatcgtttgtacctgggaggtggaggttgcagtgagtcaagatagtaccattgcactccagtctgggcaacaagagtgaaacttcatctcaaagaaaaaaaaaacaaaaaaagttaagaacatggaacaagttttgaaagatgttaatctctcctgttgcataccccacctcatcatttgctttggtcatgagaatgagtgaatgattaaggttttactgtacatgattatttgtcatcataattacttgacacaaaggtattctctttttttcctgtctgtttggcagccattctttattctgtgtatgttcaaatagcctgagagccttttagcttagtgctccagcatgtcagtgggcctaattgcctataagactgatttgccatttctgctttagagtttgtacagagctacaatgtcaccaacctctgcccccacactgcctccgtgttcttttaaagattcttgtctgatcctttgcgagtttgccttccaaaaacgttagactaatttatatttccagcattagctacctatgtggcaaatctattaatttggtttaaactacctgattttcagagtgccttttatatttgctgactataccaatttagggagagaaactgtagtgtgtatgtgtgcttgcattatttgggattcctttgactcagaaggtattttctttccaactttcttaacctaggcttatttaccttataggtgatttatctgagtatttaactttttgtgacccacgtgattgatgtctggtttt

SEQ ID NO: 213820 - DNA, 709 bp, Homo sapiens
  misc_feature (34)..(34): n is a, c, g, or t
  misc_feature (36)..(37): n is a, c, g, or t
  misc_feature (139)..(139): n is a, c, g, or t
  misc_feature (162)..(162): n is a, c, g, or t
tctgagcgttctagaggtatccccagttgcctgnanngtccatgaagattgaggagaaccagccagtgaagaaggaaggaggaaaagcaagagggaatttgccagtaaaggaggaggggatcaggtgaattcaatgggnagaattgctgttctcaaacgttngtgcacatcagtcaccaggaaggcttgttaaaacacagactgccaggccaggtgcagtggcttgcctgtaatcccaggactttgggattacaggcatgaaccaccacactcagtctgggaaggtaattctaaaatttacttggagaacaaagatctacaatagtcaaaacgattttggaaaaaaaatagcacagttggagaactcatacaatctgattttaaggtttactgtaataccttagtaatcaaagcagggaggtattggtgtaaaaaaaatagacatgttaactaatgatactgagtagagcccagaaacatattgtggacaactaattgtcaacgaagataccaaggcagcttaataagagaaggatagtcttattaacaaatagtgctagaacaactgaatatctaaatagaaaaaaatttaattttgatccttgcctcataccttatacagaaatttatgtgaaatagatatctaaacagaaaaagcaaaaactttaaaacacaggagaaaaatctttgcaatcttggccaggcgcgg

SEQ ID NO: 213821 - DNA, 424 bp, Homo sapiens
aataaaccaaggaaagcaaaatgtggaaaacttattaaagtggaaatcaactaattagaaagaacaaaattacagaatagagacatccaagcggtttggggaaaataaaaaaatacacaattaaaaaagtaggtaaactgttagctacctttatcaagaaaataagggagaaactttgggaggccgaggcaggcggatcacgaggttaggagatcgagaccatcctggctaatacggtgaaaccccgtctctactaaaaatacaaaaaaattagccgggcctggtggcgggcgcctgtagtcccagctacttacgacgttgatgcaggagaatggcatgaatctggaaggcagagcttgcagtgagcagagatcgtgccactgtactccagcctgggcgacagagcgacactccgtctcaaaaa

SEQ ID NO: 213822 - DNA, 390 bp, Homo sapiens
cacatgataaatgtgtgtgctttttttctgctaatctgtctattatcagtttgctttatagactcaaattatcaatgcttcagaaggaaggaaaggaaattatcttcccccttacagttagaaagttggagttacacaggatgaaaagggctaatgtgcagaatgattactattattaatgatactgtaatatatactgaaaatttgctaagacagtagattttaggttcttttgccatgagcatacaaaatggtaaccgtataaggaatgaaaatgttagttgctttactgcaataatcattacattaagtatatgtatattaaaacatcgtattttacactttaaatatgtacaataaaaaagatttttaaaatgccacctttggcca

SEQ ID NO: 213823 - DNA, 403 bp, Homo sapiens
tcctcctcaccctggctcacccccacctgccctgcctggccattcctcctgcctgggaggggccggccccagcttgctgcagcctctccctcactgtgccctggcatctgcgcagccacccggattgctgtgtgaaacatgttcccaatctccctgtcctgctctgccttccttacacccctgtgatagctgcatttgtctgtgtgtttgcattcttatttgcatgttggcattaaccctgacataaagttcctgaaggcagcgatgcggttccctgcctccagtgctcggaaggtgcaggccctatagctgtctgctggttacataaagaggtagatggtgatgcacccagatgcggctctgcctgggactccagtggctgtgcagtgttccaccgtggggc

SEQ ID NO: 213824 - DNA, 551 bp, Homo sapiens
cgcgcccggtcgttttatttaaactctggctttgcgtgtggaagttgttacctgcctggaatgggctgcgaacgggggcggcattactagaggaggctgactacagacatttatggaatgatgacctgacttgtagaccagtggaaccctcaggcgaatgatgccacttgggggaaaggtgtggaagaggttgggtggttgattccaggggacatagaaacccattgtctagaagaagagatgggtaataggctgtctggaatgacttagaaaaggacttggagggaatctgttgatgctgacctgactccacctgttgggggatggaggcggagcttggcgtgtttgattaaggttgggtgcactgggttttcttggaagtcggtctattgcctgagcgttctgtgctgttccaccgcgccctctgctgtcctaggagtgcctagcacccttctttttctctggattgtgcttggtgctaacagcacagaagtaaaaaattaccaaagcacttctttctgggaactaattgataaccatgtattgtgtat

SEQ ID NO: 213825 - DNA, 532 bp, Homo sapiens
ccgtttcgatttcgagctcggtacccccaatcaacatccatcctattcagggatttctagtaacagaatgggaaatataattatggcataaagttattatttgcagaggattttattatctaccaaaaccccaagagaaataatgaaaaactattagagcccaataaaagagtctaataaggtgactagttagggaataaatatacaaaaatgaaaaattttctaaataccaatcaccagttaggaaacataatataaaaggattcattctgtaaaagcaacaaatataagagcctgaggaattggcttaagagacaatttgcaggaactgtagaaggaatctataaagcaaaactgggaaaacaaataagtaaacggaggtatttcatttctggatgggaaggcttggtattttaaagctgtcaatttaaaatattgaatgcatattgcaatagaaatgtataagcaatgttataaaatgattttaaggtttatctggaaaaataaatgggcacagatcatcaagcaaatg

SEQ ID NO: 213826 - DNA, 846 bp, Homo sapiens
  misc_feature (507)..(507): n is a, c, g, or t
  misc_feature (806)..(806): n is a, c, g, or t
cacctcagcccagagctggcggcaggcccccagcccctcatgtcagagccccctgtgtactgtaacctggtggaccttcgccgctgtcctcggtccccacccccaggccctgcatgccccctgctgcagaggctggatgcctgggagcagcacctggaccccaactctggacgctgcttctacataaattcactgactggctgcaagtcctggaagcccccgcgccgcagtcgcagcgagacgaaccctggctccatggaggggacacagaccctgaagaggaacaatgatgtcctgcaacctcaggcaaagggcttcagatctgacacagggaccccagaaccgcttgacccacagggttcactcagcctcagccaacgcacctcgcagcttgaccctccagccttgcaggcccctcgacctctgccgcagctcctggacgacccccatgaggtggaaaagtcgggtctgctcaacatgaccaagattgcccaaggggggcgcaantcaggaagaactggggcccgtcttgggtggtgttaacgggtaacagcctggtgttctaccgagagccaccgccgacagcgccctcctcaggctggggaccagcgggtagccggcccgaaagtagcgtggacctgcgcggggcggccctggcgcacggccgccacctgtccagccgccgcaacgtcctgcacatccgcacgatccctggccacgagttcctgctgcagtcggaccacgagacagagctgcgagcctggcaccgcgcgctgcggactgtcatcgagcggctggatcggganaacccctggagctgcgtctgtcgggctctggacccgcgga

SEQ ID NO: 213827 - DNA, 2248 bp, Homo sapiens
ccgctgcgcccgccgcccccgacggcgcagatcccggagaggccccgacgcccccaagcagcgcccagcggagcccagggccacgcccctctgcgcactcgcacgccggctctctgcgccccggcctgagcgcgtcgtggggcgagcccggggggctgcgcgcggcgggcggcggcggcagcaccagcagcttcctgagttccccctccgagtcctcgggctacgccacgctgcactcggactcgctgggctccgcgtcctaggaccgccggcgcctccccacggacgccaggcaggccaggccgctctccggggccgcagcaccaaagacgcccgcctccgccccgcgcgcagacatgcgccacccctcccaggggtgagggggcgttggcctcagcgtttgtcttccggctcctcccagctggccttgtcccaggggcgacggctgccccggacgactgcgctgggcaccgcatgtcccgggccgagtgaggtcgggcctggggagctgagtgacatcccaagcttgggcttgggtagtgagtgacatgtgcacacgtccagctgcgccatcaccagccctgcgcaacaggacgtcgggagcagggaacctgagacagggccactgcgggatcggacaaagccccgctttggagaggctgagctggagccattggcctccccaggggctttccacccacactgcaccataaccgccacacccttcggggggggggagggtacagagggtctctaagcacaggggtgttcagagcccgaacaagctttgatcaggtttccctgcttccgacctgtcctgcctcagtttccccatctgtgatgagcaggtgaccacgttaactctcagggctgtttgaagtctcttggttgtaggccctcgccactgagtggcccaggtgtgagaggtagtctagagccctctgcggcctttgtggaggtccgttctcagcatgtggcctggtgtggctccctaggcctgaggcctcccactctcagtgccccctgcccccttgggaacccacactccaccccagctaagcacaacactgtggaccaccaccaatggcacctgagccaccttgaccaccattagtgtccccaccctcattactctgccgtcgttgcctgtccccaccacatcatctccctccatggctcccaccatgacgctggcaggtgcaagcggagagcacgagggcagcagggcctggccttccgtgtccctgcgtcatccccagcctcactccccacccgtgcaggcctggccaggaagggatcctggcaggggcttccaggttctcagctcaaggcctggtcccgggcaggcgtccaacccctgggagcaatgtatttctttgccttccatcctgggcagaccccttacaggcctgggcattgccatgggccctgggtcttcccaggctaaggagaaccaggaacagctataaccttgagctagtgaaatagggtagatgagaaggctgtctcctccagacccctacccctacacagtggccccacaatatgaagacctggggtaattccaaggtgagcatagagcctgcctgtgcccagttccttctggccctcaggtggccaagcccatctcttcatccttcagatagggtcccactcccagaagaagctgctggggtgggggtgggaggctgcctaagcctgtctgtgcttcagaggcccctccagtccctggctgtggggtaactgggggtatgagctgtggccacaggtgagcaaggcagggaactgcaatccagccctggccgcgggaggggccatctctggccaatgctgctgtgccttcaaggactgacaagttacgtaggggcagaggtcgccagctagccagtgtctcctccatctggggggcgtctgtccacttgtcaccttaggttttcactcatttgtcaccttggggttttgctctgtgtgtttcatatccaacggcaatacttgcagggggacagagtcctctaaatactccaatcctgcggtttttacaaacataaagggggagaccccaagtggaggaccctgggcctggagctccctcccaaactttgtccagcatccagcctgttccctgggctcactggggagggagttgtcttcatagcacacccagagccagggatccctttgtagttttttgacaacggagcatttctcttctgtacaggacccaataaaaacttccttatgatttgca

SEQ ID NO: 213828 - DNA, 2423 bp, Homo sapiens
ccgctgcgcccgccgcccccgacggcgcagatcccggagaggccccgacgcccccaagcagcgcccagcggagcccagggccacgcccctctgcgcactcgcacgccggctctctgcgccccggcctgagcgcgtcgtggggcgagcccggggggctgcgcgcggcgggcggcggcggcagcaccagcagcttcctgagttccccctccgagtcctcgggctacgccacgctgcactcggactcgctgggctccgcgtcctaggaccgccggcgcctccccacggacgccaggcaggccaggccgctctccggggccgcagcaccaaagacgcccgcctccgccccgcgcgcagacatgcgccacccctcccaggggtgagggggcgttggcctcagcgtttgtcttccggctcctcccagctggccttgtcccaggggcgacggctgccccggacgactgcgctgggcaccgcatgtcccgggccgagtgaggtcgggcctggggagctgagtgacatcccaagcttgggcttgggtagtgagtgacatgtgcacacgtccagctgcgccatcaccagccctgcgcaacaggacgtcgggagcagggaacctgagacagggccactgcgggatcggacaaagccccgctttggagaggctgagctggagccattggcctccccaggggctttccacccacactgcaccataaccgccacacccttcggggggggggagggtacagagggtctctaagcacaggggtgttcagagcccgaacaagctttgatcaggtttccctgcttccgacctgtcctgcctcagtttccccatctgtgatgagcaggtgaccacgttaactctcagggctgtttgaagtctcttggttgtaggccctcgccactgagtggcccaggtgtgagaggtagtctagagccctctgcggcctttgtggaggtccgttctcagcatgtggcctggtgtggctccctaggcctgaggcctcccactctcagtgccccctgcccccttgggaacccacactccaccccagctaagcacaacactgtggaccaccaccaatggcacctgagccaccttgaccaccattagtgtccccaccctcattactctgccgtcgttgcctgtccccaccacatcatctccctccatggctcccaccatgacgctggcaggtgcaagcggagagcacgagggcagcagggcctggccttccgtgtccctgcgtcatccccagcctcactccccacccgtgcaggcctggccaggaagggatcctggcaggggcttccaggttctcagctcaaggcctggtcccgggcaggcgtccaacccctgggagcaatgtatttctttgccttccatcctgggcagaccccttacaggcctgggcattgccatgggccctgggtcttcccaggctaaggagaaccaggaacagctataaccttgagctagtgaaatagggtagatgagaaggctgtctcctccagacccctacccctacacagtggccccacaatatgaagacctggggtaattccaaggtgagcatagagcctgcctgtgcccagttccttctggccctcaggtggccaagcccatctcttcatccttcagatagggtcccactcccagaagaagctgctggggtgggggtgggaggctgcctaagcctgtctgtgcttcagaggcccctccagtccctggctgtggggtaactgggggtatgagctgtggccacaggtgagcaaggcagggaactgcaatccagccctggccgcgggaggggccatctctggccaatgctgctgtgccttcaaggactgacaagttacgtaggggcagaggtcgccagctagccagtgtctcctccatctggggggcgtctgtccacttgtcaccttaggttttcactcatttgtcaccttggggttttgctctgtgtgtttcatatccaacggcaatacttgcagggggacagagtcctctaaatactccaatcctgcggtttttacaaacataaagggggagaccccaagtggaggaccctgggcctggagctccctcccaaactttgtccagcatccagcctgttccctgggctcactggggagggagttgtcttcatagcacacccagagccagggatccctttgtagttttttgacaacggagcatttctcttctgtacaggacccaataaaaacttccttatgatttgcaaaaaaaaaaaaaaacccacgctcttctcggtcccgaaaaagggtattgatgccctgcctccctttccgccccttcttccagggaaatccggtcccaaaggccaaatcgaccgcgccccccacaacaccccccccccccaccacccccccccccccccccccccccccccccccca

SEQ ID NO: 213829 - DNA, 2225 bp, Homo sapiens
ccgctgcgcccgccgcccccgacggcgcagatcccggagaggccccgacgcccccaagcagcgcccagcggagcccagggccacgcccctctgcgcactcgcacgccggctctctgcgccccggcctgagcgcgtcgtggggcgagcccggggggctgcgcgcggcgggcggcggcggcagcaccagcagcttcctgagttccccctccgagtcctcgggctacgccacgctgcactcggactcgctgggctccgcgtcctaggaccgccggcgcctccccacggacgccaggcaggccaggccgctctccggggccgcagcaccaaagacgcccgcctccgccccgcgcgcagacatgcgccacccctcccaggggtgagggggcgttggcctcagcgtttgtcttccggctcctcccagctggccttgtcccaggggcgacggctgccccggacgactgcgctgggcaccgcatgtcccgggccgagtgaggtcgggcctggggagctgagtgacatcccaagcttgggcttgggtagtgagtgacatgtgcacacgtccagctgcgccatcaccagccctgcgcaacaggacgtcgggagcagggaacctgagacagggccactgcgggatcggacaaagccccgctttggagaggctgagctggagccattggcctccccaggggctttccacccacactgcaccataaccgccacacccttcggggggggggagggtacagagggtctctaagcacaggggtgttcagagcccgaacaagctttgatcaggtttccctgcttccgacctgtcctgcctcagtttccccatctgtgatgagcaggtgaccacgttaactctcagggctgtttgaagtctcttggttgtaggccctcgccactgagtggcccaggtgtgagaggtagtctagagccctctgcggcctttgtggaggtccgttctcagcatgtggcctggtgtggctccctaggcctgaggcctcccactctcagtgccccctgcccccttgggaacccacactccaccccagctaagcacaacactgtggaccaccaccaatggcacctgagccaccttgaccaccattagtgtccccaccctcattactctgccgtcgttgcctgtccccaccacatcatctccctccatggctcccaccatgacgctggcaggtgcaagcggagagcacgagggcagcagggcctggccttccgtgtccctgcgtcatccccagcctcactccccacccgtgcaggcctggccaggaagggatcctggcaggggcttccaggttctcagctcaaggcctggtcccgggcaggcgtccaacccctgggagcaatgtatttctttgccttccatcctgggcagaccccttacaggcctgggcattgccatgggccctgggtcttcccaggctaaggagaaccaggaacagctataaccttgagctagtgaaatagggtagatgagaaggctgtctcctccagacccctacccctacacagtggccccacaatatgaagacctggggtaattccaaggtgagcatagagcctgcctgtgcccagttccttctggccctcaggtggccaagcccatctcttcatccttcagatagggtcccactcccagaagaagctgctggggtgggggtgggaggctgcctaagcctgtctgtgcttcagaggcccctccagtccctggctgtggggtaactgggggtatgagctgtggccacaggtgagcaaggcagggaactgcaatccagccctggccgcgggaggggccatctctggccaatgctgctgtgccttcaaggactgacaagttacgtaggggcagaggtcgccagctagccagtgtctcctccatcaccttaggttttcactcatttgtcaccttggggttttgctctgtgtgtttcatatccaacggcaatacttgcagggggacagagtcctctaaatactccaatcctgcggtttttacaaacataaagggggagaccccaagtggaggaccctgggcctggagctccctcccaaactttgtccagcatccagcctgttccctgggctcactggggagggagttgtcttcatagcacacccagagccagggatccctttgtagttttttgacaacggagcatttctcttctgtacaggacccaataaaaacttccttatgatttgca

SEQ ID NO: 213830 - DNA, 444 bp, Homo sapiens
actcacattttagaggttggttctcatggtttggaggctttaaaaccttgataattggttttgtaactatagtaggaagatgtctaatactgccttgtcttttacctctcctcaacagaagcatccagtctactatggaagcaatagtggaccgaaaaactaccaccaaaataatggcattacaaaaataccaacctgtcccccaggaagaatatgagcctacacaggaagagataaatgattgtggtgctctttattaatctacatttatggtgagcaccaaaggtgggggatgaagaaggaattcatgaattttacaagtataatcaaagaccaagaaattttcactttttccctcaaaagctaagtgtagtgtagcccccactccccgtcccgtagtccaagttagagaagaatactaactgcctgtttttccttctgcgc

SEQ ID NO: 213831 - DNA, 386 bp, Homo sapiens
tgcatctgactgacgggacccaggtgtgcatgggtgtttgtttgctcgctcccacacaaccttctgagtgtctgagctgcccatctcccatggggaggagggaggggtccccattctgcattcatttatttaggaaaagctgtcttgtctgctcagctgctaccatagccttaacttgggactcaggtgagttacactgcatgtccccttttgaagttactagcagaaaacaaagacccatggggctgggcatggtgacacatgcctgtagtcccagctactactaagaaggctgaggcaggaggatctgttgagcacaggacactgaggcaaaccttgattccgccactgcactccagcctgggtgacaagaaagccctatctca

SEQ ID NO: 213832 - DNA, 420 bp, Homo sapiens
cacctgtggtcccaggccctcaggaggctgagatgggaagaccacttgagcctggacataaaggctgcagtggcccgtgattgcaccactgcactccagcccaagtgacagagcaagaccccaagagcctgtttcaaaaaagaaaagaaaagaaaaaaagttgtgtcatggttagaagaatggctttggagccaggccacttgagtttgaatctcagctctgctaaattgtgtgaccttgagcaaatttctaaactgctccatgcctgtttcagataatgatacattccactgcattacattccaccttcccatcagataacaattcagtggaatagatagaacacattttaaagtaggattcatttgaatttgaaactgctgtaaatatatgagcactgctgcttatatttcaatctaa

SEQ ID NO: 213833 - DNA, 507 bp, Homo sapiens
agaatcagaaaggaagctaagagaaacaggcgcgtcctcagccgggcctcgcgtgtcctgacactgcagcaggcacgggatgtgggctgtcccctccagcacagtgcgggaaggtgctggggcatccaaacagcaaaagcaaacctgagaccccaaaacaactgcgtctggcccaggggagtgggcaaaaattccaacagggagagaccgtctctggcttatttacagacaggaagaaagctattagtgctccatgtaaacaagcacgcccaattcaagttggaactctttaaattctggaagacagcacatcacatccagccacgagggggcgcagccgagcagcaaggagcgcaaaagtctcattcttcactgcaatttctacctacagctctctcaaagtatacacattttcaagattgtttccaaattcaggtatccacaggacactgctaagcaagctgggagctttgccaaggccaaaataaattaaattatggtacggtt

SEQ ID NO: 213834 - DNA, 471 bp, Homo sapiens
tctctggcttatttacagacagggtaagtaaggatgcccaaagacaaggcggagtattagtaacagaactcatgaagttctatggatcgggatgctttaaaaaaaaaaaaaaaacaccaaagctcatccagaatgtctgaggtccctgcagtaacatccatgctaattggtaagtaagacaaagcctcccctaacaaatcagcaatgtaattataaagccagtcactagatcaagccagtctcctgtgctccagcgatattctgaacctgtaacccgataccactgtttgctgccggcgcctcctccgggctctcccgctgcgcaccggccgcgcgggggcccgcagggcaacgcagcctaggctgtttgtgcaagatgagaccctgcatttgacgaagacctgcaggagcaatcctcccggctttcttgacagtgaagaagaagaagaagaaaaaaaaagcctgacgata

SEQ ID NO: 213835 - DNA, 202 bp, Homo sapiens
gtctgtattggaaagcattgtaaaatacagttggggcacatagattcccattggtggcttgaaaactaaataacagaactcaaacctgctattagtggtgagaaaagcattttctttaaaaggcattcacaaacattttttaaaaaaacattgtaacacttgtatgatcatcataaggtttttttttttctggaaagtgtaa

SEQ ID NO: 213836 - DNA, 603 bp, Homo sapiens
tgaaaaagaataaagtcaacaggatggtttaatgtagtgatgggggaagtgggtgtcactggtcaagacaggcaaagagaaggaacttggtaatggaactgggattacaggtgcgcaccaccatgcctggctaattttttaatttttaatagagatgggttttcaccatgttggccaggctggtctggaactcttgacctcaggtgatctgcccgactgggcctcccaaagtgctgggattacaggcatcagccactgtgtccaagtaataaatcttttatgtgtgggagaaattaacatggagaggtttaaacaaccatattagcaaactcccaagcactattcatatgaatgtgtgtctgcatatgtgtaaaatgtgctctcttttaaaaaatcactatatatgttcctttaacttttctgaaagctaaggaaacaaacttcaagttccatgccacaataatgttactattgagaaatgagatgcacaactacagacaatcctactgttttcacatctgcagcttgaccacattacagtaaaggcataaaacttaacactcaagtatcttaaccgaaacagtacatttgccccagggaatg

SEQ ID NO: 213837 - DNA, 469 bp, Homo sapiens
cgagattaacatttgaactggtgaactcagtaaagtacatggccctttccaatgtgggtggttatcagccagtagatggagggcccacaaagagggagagaaagaaatttatttttcttgcattactgcgtgagctgagacatccatctcaccttctccagctcagaccgggatttacattattggctcccttgattctcagacccttggcctgggactggatttcatgaccagctttcctgggtctccagcttgcagagagtagctgcagggacttcccaaactccataatcatgggagccaattcccataataattttttttttttttttttttttgagacagagtcttgctcggtcgcccaggctggagtgcagtggtgtgatcttggctcactgcaacctctgcctcccaggttcaagtgattctcctgcctcagccccccaagtagctgggattacaggtgccc

SEQ ID NO: 213838 - DNA, 495 bp, Homo sapiens
cgtttgaatcatgctaacaggataggatacaagaagcagcaatactaaaagtaggagtctccagggggagtgaggctcttgtggttagaagaggctatatcggccgggcgcggtggctcatgtgtgtaatcccagcattttgggaggccaaggtgtgcggatcacaaggtcaggagatcgagaccatcctggctaacatggtgaaaccctgtctctactaaaaatacaaaaaaagtagctgggtgtggtggcaggtgcctgtagtcccagctgcttgggaggctgaggcaggagaatggggtgaactcgggaggcagagcttgcagtgagccaagatcgcgctactgcactccagcctgggtgacagagcgagactctgtctcaaaaaaaaaaaaaaaaagaataactagtgtcggtggaactagtgtggcccttcaggaagggcaggactcaggtctgtgtttcgcaaacattcagagccattagaccagtcag

SEQ ID NO: 213839 - DNA, 811 bp, Homo sapiens
ttgctgctgaatgtttgagatactagaaaagctcagcctttggtagcaaggagatcggcagttgcctggagttagaggcaggagagggttagctgcaaaggggtcagagaaactatggagggtgataaaaatattctatatctttatggtggtggtggtggttacatggagtatatatttgtcacaattcatcaaactgtatggttaatgaggctacattttatagaatgcaaattacactcagtaaagttgatttttgaaattgatcctgaccattaatagacatacaatcactcgtaaacattattaaagaatctaagtcacaatgtgggccacgttgatgtgggaccagccatgtctaagagcgaatgtgaggccctcgaagaggcttcagatggagacttaagaatcccgggttctgcatcagaagaaacagcagtgaggttatgattcaccataattaaagcttcatgtgacctgggagaagtcacatcacttgtccagttctcagtctcctcaccttaaaacctgagggtcatgccagatgttgcctgaggttttgaccagctcttatatgaacagttattctttattttcctaacgttccacaacttctaatataactaacactattgtcagagaaaaacaatcaccctcatatgtatgctagccaacttaaatgtatatgaagtagatctctaatatttaaagacctcaattgaacctgtcaccacggatttccttctgctctgtttctataatatgacataaaattaatagctgtgatgtgatccacttaataagtcaaaca

SEQ ID NO: 213840 - DNA, 2049 bp, Homo sapiens
cggccacaacgagggagccgatttagatcctctgggcctgttccttccttttctttaaacgtcccagtctagcttagaggaggacctgttttgttagataaatggcaagcaaaaaacgagaagtccagttacagacagtcatcaataatcaaagcctgtgggatgagatgttgcagaacaaaggcttaacagtgattgatgtttaccaagcctggtgtggaccttgcagagcaatgcaacctttattcagaaaattgaaaaatgaactgaacgaagacgaaattctgcattttgctgtcgcagaagctgacaacattgtgactttgcagccatttagagataaatgtgaacctgtttttctctttagtgttaatggcaaaattatcgaaaagattcagggtgcaaatgcaccgcttgttaataaaaaagttattaatttgatcgatgaggagagaaaaattgcagcaggtgaaatggctcgacctcagtatcctgaaattccattagtagactcagattcagaagttagtgaagaatcaccatgtgaaagtgttcaggaattatacagtattgctattatcaaaccggatgctgtgattagtaaaaaagttctagaaattaaaagaaaaattaccaaagctggatttattatagaagcagagcataagacagtgctcactgaagaacaagttgtcaacttctatagtcgaatagcagaccagtgtgacttcgaagagtttgtctcttttatgacaagtggcttaagctatattctagttgtatctcaaggaagtaaacacaatcctccctctgaagaaaccgaaccacagactgacaccgaacctaacgaacgatctgaggatcaacctgaggtcgaagcccaggttacacctggaatgatgaagaacaaacaagacagtttacaagaatatctggaaagacaacatttagctcagctctgtgacattgaagaggatgcagctaatgttgctaagttcatggatgctttcttccccgattttaaaaaaatgaaaagcatgaaattagaaaagacattggcattacttcgaccaaatctctttcatgaaaggaaagatgatgttttgcgtattattaaagatgaagacttcaaaatactggagcaaagacaagtagtattatcggaaaaagaagcacaagcactgtgcaaggaatatgaaaatgaagactattttaataaacttatagaaaacatgaccagtggtccatctctagcccttgttttattgagagacaatggcttgcaatactggaaacaattactgggaccaagaactgttgaagaagccattgaatattttccagagagtttatgtgcacagtttgcgatggacagtttgccggtcaaccagttgtatggcagcgattcattagaaaccgctgaaagggaaatacagcatttctttcctcttcaaagcactttaggcttgattaaacctcatgcaacaagtgaacaaagagagcagatcctgaagatagttaaggaggctggatttgatctgacacaggtgaagaaaatgttcctaactcctgagcaaatagagaaaatttatccaaaagtaacaggaaaagacttttataaagatttattggaaatgttatctgtgggtccatctatggtcatgattctgaccaagtggaatgctgttgcagaatggagacgattgatgggcccaacagacccagaagaagcaaaattactttcccctgactccatccgagcccagtttggaataagtaaattgaaaaacattgtccatggagcatctaacgcctatgaagcaaaagaggttgttaatagactctttgaggatcctgaggaaaactaaagtatatactgtgaaaactttgagaagataatacatatgttcacgtcaatatacaaccatttggcacagcttcctgggaggaataataagaaaaacatgctttggaggaaaactcaagatacaaaaatgaatggctatgcataataacaataaaaatgtattccccaaacaaatcttaatg

SEQ ID NO: 213841 - DNA, 457 bp, Homo sapiens
agtgtcaacagttttcagtaggctgggtcttctgaaagcaccgttctttgcaggggtccatctatggtcatgattctgaccaagtggaatgctgttgcagaatggagacgattgatgggcccaacagacccagaagaagcaaaattactttcccctgactccatccgagcccagtttggaataagtaaattgaaaaacattgtccatggagcatctaacgcctatgaagcaaaagaggttgttaatagactctttgaggatcctgaggaaaactaaagtatatactgtgaaaactttgagaagataatacatatgttcacgtcaatatacaaccatttggcacagcttcctgggaggaataataagaaaaacatgctttggaggaaaactcaagatacaaaaatgaatggctatgcataataacaataaaaatgtattccccaaacaaatcttaatg

SEQ ID NO: 213842 - DNA, 466 bp, Homo sapiens
agtgtatagcactgtcatttattttattaagtgcattctttcttttcctagaactttgagaagataatacatatgttcacgtcaatatacaaccatttggcacagcttcctgggaggaataataagaaaaacatgctttggaggaaaactcaagatacaaaaatgaatggctatgcataataacaataaaaatgtattccccaaacaaatcttaatgtttatttttaactgatcttccggaaaagatttaaggtatataaatgcacacaatctacaacaagataattgagggaggaacacggaatgtggggaagaagagagtaggagagatcaaataaagccaggagtggagttaaatacaaatgcatactgcctaatgtatattgaaaattggtcaaagttttgactctaaattttcttgcagaaaatgaggaaaaggatgacatgtagatttatatagtttgca

SEQ ID NO: 213843 - DNA, 167 bp, Homo sapiens
cctcccaaagtctcctttattcttaaagttttgctggaggtagatttcttgtcttacactttttatctttcatcatttcaaatatgtcatttcactgcctattgtcttccatggtttctggtgagaaattagcaattaattttaccgaggatcccttctgtgctcgc

SEQ ID NO: 213844 - DNA, 331 bp, Homo sapiens
tctatgaaaatggaatttctttccatttattaatatattctttaatttctttcagctgcattttataattttcagcttacaattttttcacctccttggttaagtatattcctaagaactttattctttttgatgataatgtgaatcaatttttttcttaatttcttttcagattgttcattgtaagtgcataggaatacaactgttttttggctggatgcaacggcttacacatgtaatcccagcactttgggaggctgaggtggtcagatcatttggggtcacaagttcgagaccagcctgaccaatatggtgaaaccctgtctctact

SEQ ID NO: 213845 - DNA, 318 bp, Homo sapiens
ctcacccagaggggtaatcaacacccctttccgtgtggctgtgttaccaaagctacttcttgaaattaagacaaaagagcacaaaactgcagtggtagggccctaggtacacccttcaggaaggcacatttacaatggcaattgcccaatgtatttgaaagttatgaaaaatatattttatgatagtctctaaaaagctaagcaaaaatgtaaaaaagaaagctatgaaaaatagcccaggtgtgctggctcacaccttgtaatcccggcactttgggaggccaaggcagaattgcttgagcccaggagttcaagacc

SEQ ID NO: 213846 - DNA, 436 bp, Homo sapiens
gaagggaagggtctcaggtttaccaagggaaaaagaagcatttagctcaaattgtggctgatgaaagaagggcagtcatgagcagctcggtgctctgagctgggtgagtctgagctgaagggcagatttggtgggcatgtatctgctcacatgggagggggagcagttgaggagctctggtagcagcgagcatggaaaaagtatgtgttttaatattgggtcatttataatggaagggctgatgtattaaggctgcttaaaatatagatattaaccattttacaggcaggaactgcagaatggctaaccagattaaaaaacagtgtttccatctggtactattccatggaatcctcatcttacaaagtgataatcatctcaatgtttgttatttttctctgaacttaaaatataaagaaaaaaataaattgaatga

SEQ ID NO: 213847 - DNA, 407 bp, Homo sapiens
caggtaaggactgaaggcaagcaaatatggataataaaccctttatattagtcggaatgaggattatctggattttagcactggcacggtcacaagcttgctccacaacaacatatcatatgacagcacatgatgccaaaggttttctcctacgctagaatgtattgactcaaatattcttgccaactctctaaaatatttgtaacagttaaaaataatctcatgcaagtaacagaatactcaactcaaactagcttaaacaatagggttttggcatttcctataacagaaaattcagtattagggtgggtgatgattggttgagtcagtaaatcaatgaaatcatcaggggctcaggttctttctaattataaagtctcatcccctcttagttacaagatggctgc

SEQ ID NO: 213848 - DNA, 556 bp, Homo sapiens
aagagataatttagggtttgccttaagagaccattagggagataaaaaaaggaaagcaaaacttctgtgtttagataatttccagaatacaagaaaaggtgatctagagtagtttaatgtgactctccctttagtatactattttccaataatttattctaatagttctctgtacgaatttctaggctggttggatcttctatgtcttaaggttttttctctaaatttatctatttttcaaataattgtgccttaatttacagatttttcttaatatttatcttacagtgctcaataaattgcattctcgaatatttaagaaatcagatttctttaaacaaagaagttttaagaattctttttgttttctggttgatttttttcttttatataattatattattggtttatccaggtaccatttatgctggttttactctagaaattacctagatcttctattttttattttttacttttttctgccttgaattaactatatatccctaagcattatctttaaaatttatcttggttttttacttagcttattttg

SEQ ID NO: 213849 - DNA, 420 bp, Homo sapiens
tagtgaggggtgagggggttaaaataaaggatttctctaataaaggacatgaaaagcaagaggagcaatatgcatgtcttttctggaaattggtggtgaacttccaccagtttcacaattgatggtgaatcgcagtgctgctttcctttttgtctttttatggcctcttccggtcattgtcatggtgattttcagctgtcatggtgctggtgggagtgccatatagtatgaaaatgagattataatgaagcccgaggtctttttgatgtcatttggttgcatatcttggttctaaccagtcttaactggtctggttgtaaagggaaccttttattgcagaagtcctgtttcttaaagataagcaaagttaggacagggtagaaattcagctgtcatgtaggcattacaccaggcaacaaa

SEQ ID NO: 213850 - DNA, 468 bp, Homo sapiens
gaaccctggtttgggtgtggagccaaggtggtgaggctcaaattttattgttgttgtttccaaaatctgttggatctaaaaaccaaacatactggagggagaaagccctgcctttagctagcaagtcatcttaaattccagatgctgtagaccgttggtccatttgccaggggttcttaatctcttttggaaagtggaactcaaatctgatgaggctgcattccttctctccagaaaaatatacctaaatataattttgtgaattaatagatctcaatgaaatccatttatggacccctcaggggttagttaatccaaagttaagaaccctcactgtagtcaaaatcacagagctcagtaaagaaaagtaaagaatgctagtgtttaagattttcagtgaaggtgtaagataatttctggatacacacttgttttataaactaatacattctgatttttttaaaaaaa

SEQ ID NO: 213851 - DNA, 485 bp, Homo sapiens
cataactgaagccaaaacatggctacagagagcaggtggatagcaaaacgttccagacacaggaacactatactttaccacagttaactgcagcagtgtgccactgtaatttttcccaggttaatagacaatagtcctgacctcgcttcgtgaataaccaattaatcactcaaatatgtttgggcacataccagacctaaaaaaatctcacaattgtggtcaaatataattttgaatttgaaatttcagcactggaaaccgctgaattaaacaaagttaaagtgatccttcctatgtactacaggaattctcagagcctttgagatgccaagtatgaattaggtacagttaaactgtgtgtggaatacacagaagtttttgtgctttttatcattgaggactttctcacgtatctatttttttcaaaagaatacagtttggtaaaatgttccatatattaaattattataaacacctgcattttt

SEQ ID NO: 213852 - DNA, 584 bp, Homo sapiens
atttatccagaaaatagaatccaaaaccgtggggctgaaatcttctctaattgcaccatgtgatcatgcttttctgaggattgtatttttggtgtgtgtaggtggtaggggagtcttattttgtggctggtgtttactgagagatccatcttttgctcagcacctcaagtggaacaaaatgaagtcagtggcaatcaacctgctttgtaaaaaagtttaaaagccaggtacaatcagaatatctgtctaaacagtgaggtttgtattcattcaatagctttggggacctgctacatgtaggacatcattgaaggtaaactaatgtgtgggaaagggcccctgtgtacaagaaggtggtaatggtggtttgcacttcacgggaacaaagggagtcaaaccttgacaagctttgtggaatttgctgggcaaaagcttgtttggggtgagatcctgtcgatatagctaagaatggagtttgggttctgggtataggtcagctttttgatgggtgaccaaacacactgaggtcttcattgtggctaactgctgatgccgtttcatctttcttttctggtcccgttcag

SEQ ID NO: 213853 - DNA, 409 bp, Homo sapiens
attacagctacctacagctcagatcttcaatcaagtaattgttaaagcctcactagaaggaggaataaatatgttctctggtgaactcacttaataattttaaccttattgtcaaaagaaaggagtcgtaattaagatagcacaatacatgaagcagggagcagcataattgaaccttcctggtgattaatgtgtatccctgaggtggtctcttcagtcgtggagcaaccaaaatgatgtcgccttctttccctgcataagaagttggggcctaatgacaaattatcaaccattgtcattcctgggtgatgctgagctgatagtagttgtgaaaggttatgttggttaatgtaagtgattcttagtaggcagaatacagcctacaaccacatgtgcaccatcgtgctga

SEQ ID NO: 213854 - DNA, 1059 bp, Homo sapiens
tcgaagtcaaagaatccacgcaccactgcaatcaaattattctatttcaaatacaaaagagccaacatgagatgaggaactctggcgtcaggaggaatgggcctcttcccaaccacagtcctcattgctcagggaagaaaccaccagaacagcagcaggctccaggctcttttctgagccctactcgcagatggccgattcatctttcctccaccatcacaccttccacctcactgtccccctacactatcatactgcctataaatactggtattccctaaacctgtcaaagcccaacacagtatcaggtctgcctgcagcctcaagtttaaatcactcttcctacatcttgcacctacagtcccagaacatctccccctgggagcactaaggatacggcaactatctcaatctctggagttgtccacaagttgaccagggaccaaaatcccactggaaacagatgatgcgaaaacccaaactgacaaaggactcaggcaacgtcttgctcaggtgactgtcatgccaacaatgtgaaccaaacactatacaaagacctgttagggggaccaacaccacaaaatacaagggaggaaacaccacagaaacactgcccacaaactcttacagcatggctcaagccttttagaggggtagccagagcctcagttctcacagcacagaaaattctcaaaatgaccgtttccaggaaccatttcctctccctatttaagggaggacgtcagaggaaacaaaggtcctgaaacgaccaagtatgtactgaaaaacagcacaaaagaatcgcagatcactaacatggcacccatcctcactagccaggataattttcagtagaaatgaacggcctggcacggtggctcatgcctgtaatcccagcactctgggtggccgaggtgggtggatcgcctgagctcaggagttcgagaccaacctgaccaacatgaagaaaccctgtctctcataaaaatacaaaattagccgggcgcgttctattttgttgttttcgaactgaggccatgaagagggagcagcagaaga

SEQ ID NO: 213855 - DNA, 496 bp, Homo sapiens
acagaaacactgcccacaaactcttacagcatggctcaagccttttagaggggtagccagagcctcagttctcacagcacagaaaattctcaaaatgaccgtttccaggaaccatttcctctccctatttaagggaggacgtcagaggaaacaaaggtcctgaaacgaccaagtatgtactgaaaaacagcacaaaagaatcgcagatcactaacatggcacccatcctcactagccaggataattttcagtagaaatgaacggcctggcacggtggctcatgcctgtaatcccagcactctgggtggccgaggtgggtggatcgcctgagctcaggagttcgagaccaacctgaccaacatgaagaaaccctgtctctcataaaaatacaaaattagccgggcgcggtggcacatgtctgtaatccccgctacttgggaggctaaggcaggagaatcacttgaacccgggaggtacaggttgcagtgagccgaga

SEQ ID NO: 213856 - DNA, 163 bp, Homo sapiens
ggtctcaaactcctgacaggtaatcctcctgccttggcttctgaaagtgctgggattccaggcgtgagccaccgcacctggccgattcatttattttaagtagtgaaattatatgattgtatttatctcagagcattcattctggagggtagtatatgtattg

SEQ ID NO: 213857 - DNA, 397 bp, Homo sapiens
ttgcagtgagccaaaattgtgccactgcactgcagcctgggtggcagagtgagtctccatctcaaaaaagcaaacaaacaaaaaataaaaaacaaaaggaatatcaaaagcgctttttttctcattgtgtaatagatttcctcttttttctttctggttcttctccatttctctcttttttcattttcagatgaagttgcgctcttgttgcccaggctggagtgcagtggcgtgatctcagctcactgcaacctttgcctcccgggttcaagcgattctcctgccttagccccctgagtagctgggattacaggtgcctgccaccatacccggctaatttttgtatatttagtagagatggggtttcaccatgttggccaggctggtcttgaaccca

SEQ ID NO: 213858 - DNA, 157 bp, Homo sapiens
taggagtccgttgtttccaaagatccagtggtaataaatttatatcctccctcttcagcatttaactgcaaatattttgtactgaccgaatgggttaaattatgaagcttgataagtacatatgcacactacccatccctagctttagaagaagggg

SEQ ID NO: 213859 - DNA, 422 bp, Homo sapiens
cggcaacggaggccaagaagccaccacaatcaatcaggtgacgagctccgcacgtgtggctttaggggacacgggaggagaacacaggccatggggaccaataagcaaagaaaagatggagatgaggtatgaaggaaggatgtgtggggtgaagaaaggttatctatgtgttaatttttcatagaggcaactcaagcctctcgctaacatgagcagaaccagcatgcagagtgaagactctggggagataaattaggtcccagaagactagagagagccaggtccccggaacaaatgtatccctgctgagaggccttctcctacagaggcaagatcctccagataaggaggagagaatggcaggtggtgtcgggcccagccagttttctctgtaaagatggaatgaggtgggtgctgggagg

SEQ ID NO: 213860 - DNA, 434 bp, Homo sapiens
taagtcgtgtaagaattgctaagtgacagatcagagtccagaagacaggaaaggagttaggaaattctgagatatttaaattctgaccatgtaataaatgattcccttgtggaagataaggggtaagtaccaaaaggaaggagtgtcacaatgtggcagttttctaatgaacttaggtcttaaaaggaagcacacacaagatagaaggctcacaatcaggagggactggcagtgatcttagctcatgttaatatactgtgtgtcaggcagtgttctaagcactcacatccttgtttgatctcatgataaccttatgaagtagatggtattattattgcccttttacagaggcgtaaacgggaggctttgggcgtttaggtatttgctgtcatttacatagctagttaagtaactgcgctgggatttaagttgag

SEQ ID NO: 213861 - DNA, 392 bp, Homo sapiens
cgcgtctataaatccccagccagagaccagcgcaggcagccctgggtgggacacctggctgcagctgccttccgttgctgtgtgattctaaggctcactggcggcctctgggcttccccttgtcctgtctatggaatgacgggaggtcggtttcgattcctccacgattctgtgaagggctgagctttcctggggaggtgaaaaggggcttccctgaggacccagcattactgtacctcctcacttaggaagcaggggtgaatctgggattttgggtggtcactgtgggaggacagggctggggtacagagcaagaggctgcctgggttcagatcagcctctttgcatctttttgttgttgttgttgtttgtttttgagacagtctcgctct

SEQ ID NO: 213862 - DNA, 108 bp, Homo sapiens
gttgtaagtgccacttcattaatctccctcatttattttttcgtgcttctcattgtacacatagctgcaagagtggtaagacatagataagatcatgacactccttta

SEQ ID NO: 213863 - DNA, 617 bp, Homo sapiens
cctctctccccatctttgagggtgactcacccctccagacttaggtcccttctccctcctgggagtgggtttccctgagcccacttctgtgacaccctgtagacctgatgcgggatcattacctatgggacccagaaagagtgagaaaccatggaaagaaggcctcgacctctctcatgcccatttgtcaggcaaactgaggtccagaagtgccaattatgaacatctttccttcccccctcccccctccccgcccagacggagtctcgctctgttgcccaggctggagtgcagtggcacgatctcgactcactgcaacctctgcctcccaggttccagtgattctcctgcctcagcctcccgagtagctgagattacaggcgcccgccaccatgcctagctaatttttatatttttagtagagacggagttttgccatgctggccaggctggtcttgaactccttacctcaggtgatccatctgtctggcctcccaaagtgctggattacaggcgtgagccaccatgcctggctgaaaatccttactttttattccgactaaaaaattttacatccagtcccacaagggacttcagcttcacacaccctttctgtc

SEQ ID NO: 213864 - DNA, 514 bp, Homo sapiens
cctccaactctacctctaacggctgcgtgggacaagtcactttgctctcagttcctctgtttcctcattttgcaaatgaggataattgaagtcctgtccttcaattgttgtgggtggggactttgggtggagcccctgaaataggacctggcccttcccgtgatcactgactggctgttgcattagatgatcactgggcgtttggctgttgcattagatgatcgctgggtgtttggctgttgcattagatgatcgctgggtgtttggctgttgcattagatgatcgctgggtgtttggctgttgcattagatgatcactgggtgtttggctgttgcattagatgatcgctgggtgtttggctgttgcattagatgatcgctgggtgtttggctgttgccttagataatcacttgtctgtttggctgttgcattagatgatcactgggtgtttggctgttgcattagatgatcactgggtgtttggctgttgcattagatgatcacttgtctgtt

SEQ ID NO: 213865 - DNA, 462 bp, Homo sapiens
cgccttgtgatttcttactctgaagtgggcttttccacttctggttagtttgggtgagcttgctctttcattctgctacgtttagctcctgagaaagtttggctttttttccccttctttccctcccttctccttcttctccttttttcatcattctgtcttgccctttgggtacagcctggtacaaacattcattcctacagccatgagctcactcagcagcagcctgtccgcccctgctctggtccaggcaccgtggggtagagatgagagcacagtggcgagaggagggacaggggcccttctcctaggggcttcagactggagcatccttggaggctggcagccagaagcagggtgaccggagcaacagaaatggtcacaaatctctgcccacatttcccagccaaattctaccagcctctgcatgctaactgtgatgttttggtgttagctttaaga

SEQ ID NO: 213866 - DNA, 418 bp, Homo sapiens
taattgctgaacaatcgatacaccttatgtcatttagtccccagaagaactcaactattgccatttccctttttacaaaggggaaaagacgttaaaatggttaatttatgtaagattgcacaactaatggcagaggagccttaaggccctcatacagaagtaggccaaagttgaagaattccaggcctaaagcatatcttaccttatttagtactcttgttgctggtgaggtttaccatgaaagtatagtgagaatttggaggagagcactattgtattaggtccctggaatgtaaactccatgcaagcagcaacatttttcttttggcttgggttgtgtgtgtgtgcccagctcctggaatgtaacacaagcttaatatgtattgaatgaattgctgattaaatagattaatgatca

SEQ ID NO: 213867 - DNA, 631 bp, Homo sapiens
ctcattttaatttttactgacctgcactttatacaaagcaacaagcctccaggacattaaaattcatgcaaagttatgctcatgttatattattttcttacttaaagaaggatttattagtggctgggcatggtggcgtgcacctgtaatcccaggtactcaggaggctgagacgggagaattgcttgaccccaggcggaggaggttacagtgagtcgagatcgtacctgagcgacagagcgagactccgtctcaaaaaaaaaaaaaaggagggtttattaatgagaagtttgtattaatatgtagcaaaggcttttccaatgggtgaataaaaacacattccattaagtcaagctgggagcagtggcatatacctatagtcccagctgcacaggaggctgagacaggaggattgcttgaagccaggaattggagatcagcctgggcaacacagcaagatcctatctcttaaaaaaagaaaaaaaaacctattaataataaaacagtataaacaaaagctaaataggtaaaatattttttctgaaataaaattattttttgagtctgatggaaatgtttaagtgcagtaggccagtgccagtgagaaaataaataacatcatacatgtttg

SEQ ID NO: 213868 - DNA, 529 bp, Homo sapiens
aggctacggacccagcccctgccgcagcttccgcaggcggccccctgagcccgctctggcacctcctgggcttcgggaggatttaatgcgtttctcacccccacggcttccgaccctcaattatggacccgggagaattcctcctgggcttgaaagggattacccagatcgcagaaacatggctaagtggaagtgggagaaacccgacaagtaacaagaacggaaactttcctcaaggcaaatttcccggattttacgggaaagcgcacttatcttcccagggacagcctctgttcacgtgtccgcgaggcaggttcgaagcgcgctacgggaggcagagcaatgccgtgtttgaagactggaagatacgtgggtgtgagatacctccaggcccaacgcctgcccagcagctgcccaagcagacgttgtgtactcggctcccccaagcacatcctttcgccgtacacgcgcgcgcgcgcacacacacacacacatccacacacacacgcagctgtggctctggggtccc

SEQ ID NO: 213869 - DNA, 513 bp, Homo sapiens
aacagtgtattccttcatacaattcacacatattatactatgctaagatactaagagtagacacatgcgaataaggtatagtcaccatctccaaggatcctccaggctacagaagtagagaagaatgagtagacagttactatacagaaggaagtaccatgtgccacataagcaaaaaggcacgtatttacctctactagtgaaaactatactatgaataaagaggcggctgggtgcaggtggctcacacctgtaatcccagcactttgggaggctgaggcaggcggatcacctgaggtcaggagttcgagaccagcctggccaacatggcgaaaccccatctctactaaaaatacgaaaattagctgggtgtggtggtgggcacctgtaatcccagctactcaggaggctgaggcaggagaattgcttgaacccaggaggcagaggttgcagtgagctgagatcgcaccactgcactccagcctgggtgacaggagtgagactccatctcaa

SEQ ID NO: 213870 - DNA, 458 bp, Homo sapiens
tgctgccacccgtccccccacaaggcatgggatgaaaacagtagcagaaaggactcagattggtggacaggaggaacttcccccttggcaaaattttaggaaaaggcaaaaccccatctgcctgaactattccagagatgcgagttcggtatcctgtggtggctgcagtcttggccccatacctggctttaagccaagatccaatggtcaagtcttctgcttctggacagggtgcctctgggagctacaaccacgtccgtgaagagatgctcatcaaggctggcggtggtgggggcggggggtgcaggcagtgtggcattgaggctcctcccaaaaacattccaacgtccagaaagctttcagtctgttaggctccacaatcccctcagcctgggtctctgtggagaattcaggccccaaatcctagccacttacattaaacagcattttacacagca

SEQ ID NO: 213871 - DNA, 778 bp, Homo sapiens
agtgctttgataaaagttatgaccttcttttccagaaaagacatatatgcatctacacatgttttcatataatttcaagaaattttttgttaagtcttctgaaactcttcaaagggggttctttgaccacatattcaggacctctgttctaaaagatgcacatgaacccaatctaaaactcggatcagaacaccgtgtttctgatttctgtattggtgtccctaaaggaattctctcccttgtgttcagattaatgccctcagttctccagtttcaccattcttacccaacatctgacctaactttatcttacctaatttctttgattatattaaaatgccgaggagaggattttttttaaagaaatagaaaaaaggacatacaaatttcaacccgtaattcacaaaataatttgcaattagttgattaaatggtatccactttttccagtagatggcactaggtttacattctttcatagcatgaatgattattgatattagcacataggtgcattgtgaaaacttaaacaaaagtatataaggaatagccagttaagaacatatggatttataatccacaaatttttctgcttatattatgttcaaacaatatttgtagagcacaaaacctttttccattttcaataagattctgactcccttatgcttggccatctcattgaaattgtctttcatgtgtagactttctataaactgaaacaagttttcataaattatcttgtatccaaatagctgatttaacagtcatttatagt

SEQ ID NO: 213872 - DNA, 936 bp, Homo sapiens
  misc_feature (3)..(4): n is a, c, g, or t
  misc_feature (12)..(13): n is a, c, g, or t
  misc_feature (96)..(96): n is a, c, g, or t
  misc_feature (98)..(98): n is a, c, g, or t
  misc_feature (515)..(515): n is a, c, g, or t
  misc_feature (538)..(538): n is a, c, g, or t
  misc_feature (643)..(643): n is a, c, g, or t
  misc_feature (651)..(651): n is a, c, g, or t
  misc_feature (681)..(681): n is a, c, g, or t
  misc_feature (687)..(687): n is a, c, g, or t
  misc_feature (697)..(697): n is a, c, g, or t
  misc_feature (703)..(703): n is a, c, g, or t
tcnnccgcctcnncccgaccccgcccgggcctcccggcctctccccgccggcccgcgggctcgtcgtccggcgcagggcaggactgtctacgagananaagctccccacgtggttccgtgtaaatacctaggagtgggcttttctagatcacatggtcggtaggctccacgacaaaagtcaacccttctgtaaatcacctgctgtggttatgatgctctgagttcaatacgtctgaacctttgctgtctatggatctgctctaaaccttatagcctgcttatgggggaaggtgacgccttctgggccccatctgtccttcctcacagcaccctcagcaccttaagccaccaccctcagccacaatttggcagaaggatggagtccaaggtctcagaaggtggcctgaatgtgaccctcaccatccgcctgctgatgcatggaaaggaagttggaagcatcatcgggaagaaaggagaaactgtgaagaagatgcgtgaggagagtggtgcaaggntcaacatctcagagggaaactgnccagagaggattgtgaccatcacaggccccacagacgccatcttcaaggcctttgccatgatcgcatacaagtttgaggaggatatcatcaactccatgagcaanagccctgncaccagcaagcccccagtgacgctgaggcnggtggngcctgccagncagtgngggtccctgatcggcaaaggaggctccaagatcaaggagatcagggagtccacaggtgcccaggtgcaggtggctggggacatgctgcccaactccacggagcgagcggaagaccagtctcggagaaccccagaaagaccaatcatccagtgcgataaaagcagatcatggagggaacaatgcagggagagccaacacaaaaccagggacagggatgccagacaagtaaaccg

SEQ ID NO: 213873 - DNA, 751 bp, Homo sapiens
actagtcatttcctatggccaaataacattggatctgctttcatacatactatcttatttaagctttaggatgtcctggaaggtaagtagaaggggtaactccatttttcataaccccatttttataggtaaagaataagagagtcaatgagattaattagcttgcttaatatcgctcagctgataagtgatggaacaaagattggaactcaggtcttgtgccaaaacctatgtttttattttgcattgtatctctgggaagaaaacattatttagggagaaaactggataaaagtaagatgacacaagggttgtttggataataagacccatttttgaagattgttgtttggatggtcaaactgagtaaaatgtgtgagagtggttgtcttagtccctagcccatagcaagtgttcagtctcggctgattgaatctgggctgcaagggagtattgatgccgaaggggaaaggaagcctccgaattactgccctgggaaaccactgttagcaaccatgatctagaacactctggaatgttgttaaaacccttttattcatttagtccattcatttagcatatatttattgatcatcccttatgtgcactctatttggtattggggatctaacagttaactggacaggtcaactgcactggtcctttcctatcataagggtagtgaagataagatagggatgtgctcatgggatgttgtgacttggagttggctggggctttggctagagca

SEQ ID NO: 213874 - DNA, 498 bp, Homo sapiens
gtgagatggcaaaataatatctttatgtaaatcctgcagtttgtatcagtagtatgaggaggaaaatatcttgttaggttggattgaaatgaaggaatgctatgcattcttgtaatactttgccatttatgaaatgcttttgtttaatcttactgaaagtttgtttctactggattcagtcagtacataaaaatactgtatgatattttgaatcagctaaggcctccatttaatgaaaaaaaatcttgatttctgagctttgtagtcattgtaatcagtatgaggattttcttctacttgcatttggctaaatctttatacttgtgacactgtgaaataggtagtatggtttaggtttaatgcctttagcatgtttgcacatccagttcaccaattgagtagcactggtgaattagaagtgggaaaagtgagaattgaagactgagagaccctgattccagctttgacgctttggcaatctcttaactggcttctttc

SEQ ID NO: 213875 - DNA, 409 bp, Homo sapiens
acttagcccaaagtgagcatcaacacatggtaacactccatgtacaataacaaccactgtatatcatagaattcatttatgtaataatgatacaccgatactattaatttcaagacttataaccacttctccccatctcttgaataggctccaaggctttctaaagtgcaactagtccagggaagttgtcagcgatgtcaacctcagagaaaatgaagggtttcaaccaggcttaactgaagggaagcgagggaagatcacagaggcagggtgttagagcagggagggcctttgggagcacagagtcttttttccctatcacctgatggatgaagaaactgggatgcagagagagctggtgagctgatctttcttctttaacgtttgtcccattctccaccaggagtga

SEQ ID NO: 213876 - DNA, 522 bp, Homo sapiens
cctttttcctacacaaccctaggactattttgcccaacctcatcttgatggttttttttacttttttgttatttatttatttattgcccttaaatagtctcctatccaatcgtcttgtatttcaacacaccactggaaacttctagctatctcaaggtacagtaattccatcagatttactgcagaatcaaacccagtatacctctcaatcccaacataatttactgaaggactttttccccaagctgctatgaaagcctcttcagttccataaaacactggtgcaaattcagaaagccatctaaacagctgggaaagatttctcttctgggacaacagagtagagagtaagttctcagcaatacttagctcgaagatggcacaaagcaaagacggcaaagtctaccgagaacatcagacctctcacacttaaggccttcaatttgcacagatccattcccaccagtcaaatgcaagtccgtcttttttttcctctctttttctcgctctgtcacccaggct

SEQ ID NO: 213877 - DNA, 248 bp, Homo sapiens
cagagctaactaaaagtctccttggagagaggccctttgactacctttcactgaagtgggagaaactgttttaaaagtcagacaagcagcacaatacctaattggctatttctccattccatatcttctcaattagcaaaaagctcaattcgcatgtgttttaaatgccaaagcccattaaaagtgaaatcattggagacgtgtctgagggatgagacacatgccagctgatatattcaaacaccgag

SEQ ID NO: 213878 - DNA, 549 bp, Homo sapiens
tttcatatttctatgtctttgtcactctatggtgctctagctaatttgtttcagctctttcaattcttcaactctctccttagctgtatacaatctgctgtttaacccattcacagagttttacatttcaacaattaaattctttaaagttctatcatcctgttctttttaaaattcatctggtcatttttgacacctcttgttgcttgctcattcttgtgagtctaccttttatttctatgtatataaaatgtactttaatatttatattccactagtgtatatattccatccatcagatgttacagtcaacatctgataatttcagtatcttatgtccttgaacatctaaattttgctagtctctaactgaagtggcgacaagtgcacttgcctctagtggagttccttctgttgaattttcttgctgctcactgctctagctctaggttcaactcatcagcttttgggggtgggacaggtggtgctgaaggagttactatgtttaaagatttctctggccaggagcggtggctcgctggctcacgt

SEQ ID NO: 213879 - DNA, 588 bp, Homo sapiens
gcattatatggatctttaagctttctccggtggacttagaaagtttgaaatgttgagtagttgtgaaacacgaatacacttagtatatatttacttccaagagtctgaacttgaacattatttttaggtgtctagtaaaataaaactaaaacgtcaagtcctattttttcattgacacctataatgaaatataaattctgaaactagctactccttttctgtaactatagcagggagaaaacttttctttctctagaaatttttaaacagattttatttgttacttagagtattgtgttcttactgtgtctgctactctaaattgtaaaatgatggcattcattgccatccatccttagaaagttcaggtgtgacactcctagaggctgaataattcttccacagtcaactccactccaggatgaattattaatagggttgaacattcctacttgggccaacagcatttttaatttaattatatctgtgccagactctggacactgaaaattttataattgcaagtctggaaaattcttttttagactttgatatttgcattaaatatattttaccttctataagagt

SEQ ID NO: 213880 - DNA, 695 bp, Homo sapiens
gacttttaaaaatcatttgtgtgggacttctgttctctgaaatgtgccagactggagaatctgaggcaggtcccaatccaaccacgtggaaatgctagagacaggacaccagcatgccaggcagccttgtatgttcatagctgagctcccacgtagccaagagaatcctcagggaccagcaatgaagagggagggacagatatgcccaggaagtatgcagcagccctgggggctttggtctcagagtctagggcttgatttttccatccagatgtggacaggaggtgaagccttgggtctgggaagcagggagttgggatgaagagaaatgaacagaaaacaaaatctgcctgtggcccaaaagggtgacaaggaagctggtgtgacccagcctggattctggaaataaaaatcttcctgggagttgtagccctgggcctgttcctcacatgaatatgggcttcaaattcagcctatctgctagtctagatgcccctacactaaaattgtcattaaaacaaaattggctctaggaaagagctctggtccaaagcaaatgtaaaactactctggtgggacatgacccccatccaagctgacaagaggcccagcatggtggctcacgcctgtaatctcagtactttgggaggccaaggtgggtgtattgcttgagcccaagagttcaagatcagtct

SEQ ID NO: 213881 - DNA, 435 bp, Homo sapiens
ccacctgggtggtgtggaggtgcaggtgggctgttaggttggtggctgtggttgtgaagccgatgtcactgtctttacccagcagcttattccagaaagggggcgtcagcctgcccttccagtgccgatagaagcactagcgggtgatttttccctgttttgctgtgtttgctctggagtcaccaggtgacttccaggcagtgtgcagaaggaaccgtcccattatttggcacgtgggccgtttcctccacccgaggtccagggctccgtcttcacagtctgtcctcagcacacagtaggcacctgtagatggcacacgtggcgtttcctccgcccgagggccagggctctgtcttcagcacacagtaggcacctgtaaatgtttgctcagttgcggcgaagacaagcagtcaggttcttttcattttaaggaac

SEQ ID NO: 213882 - DNA, 246 bp, Homo sapiens
cctcttccctccttccatttctttcgttcttccttctttcctgtctctcttccgccttcttttctttcttctttctttcatttccttctctcatttctttcccccaccttcccttaatttctccctcactcttttccttcctcccttcctctctccattttctttctcttctttcttcagcttccctcctttctcctctttctcctttccttacctctctggctttcctgtttgttcgttccattt

SEQ ID NO: 213883 - DNA, 317 bp, Homo sapiens
cctcttccctccttccatttctttcgttcttccttctttcctgtctctcttccgccttcttttctttcttctttctttcatttccttctctcatttctttcccccaccttcccttaatttctccctcactcttttccttcctcccttcctctctccattttctttctcttctttcttcagcttccctccttccattactttcgttcttccttctttcctgtctctcttcctgcctatcttttctttcttctttctttcatttccttctctcatttctttcccccaccttcccttaatttctttcttctttcgttcat

SEQ ID NO: 213884 - DNA, 401 bp, Homo sapiens
agatgctttttcatttgctaatactttactagaattctaattatctacatttgatattaagttaattgtgtttttcatatctgactcctctgtggttctgtttagagttccaaatatggataaaattcacctgatgagaattgctgaatcttgtattcttagtattaggttacatcattttgacatgggaatttgtcaaataggatttttaaaaccgaatcaatttaattctaagtaactcaatatctagatttaccttggctggatatgatggataaactggatcatgaaaaagaaaacaaatacaatctaggaaagagagtaaaggcagaaaagtcatgtgtacaatggagaaacctaattttgaaaattaaatgcaaagacctagaaatggctattca

SEQ ID NO: 213885 - DNA, 565 bp, Homo sapiens
ttaaaggcaaggtcttgctctgtctcccaggctggagtgcagtggtgtaattatggctcagttcaccctcaacctcctgaggtcaagtgattcttcctcctcagcctcctgagtagctgggactacaggtgcgtgccatcatgcctggataattttttttttttaatttattttctgtagagacagggtctcactatgtttccaggctagaggtagatgtttttaacttccattttacaaaagaggagtcttgagatttaggtaaaataatttgcccaaggttccaaagctaagctgtgattgtcatgtgtgtcaccgctgagatgtaaacataggcaagctgattctcatgcccccactttaaacaatatgttatagctccagatgaatgaatatgctcttacctctagttatattgtgactccagaagtgactgcgggtaacattttgcttcattttctactgtttcttatagcttgtgagcatctccatattttggagggagtgactgaaagacacaagaattagcaactttcttcatatttcttccccttctgaatgtgcc

SEQ ID NO: 213886 - DNA, 561 bp, Homo sapiens
aggaaacgataggcagtgcgaacaggtgtatgcacactcactgaggaagtgcagcctgtctgacccactctctctcacccagcctagggtcaggccatggcaggacactgtttccttaactatcagcagccatcttggggatttccccacagggccagggcaacagaatctgcttctcactgtgaccatggtctggaaggaccatgaggaattctccagtgctgtcggggtttccgatactgacacagacaatttagtaacagctttgacaccttttggtaataggacaaagttaacactcctgccactatcctgtgaaggccaaccttcctaggccccataggaaacttttggaatgtctttgttgggttgagaaactggggcaaagtagtacccaattttttcatgtcaatatcaaaatgtaatcatttcaggtacacagagttccgcactttcagattagtcttaaagaaaagaaaatcgccgggaacggtggctcgtgcctgaaatcccggcactttgggaggccgaggcggacggatcacctgaggtcaggagttc

SEQ ID NO: 213887 - DNA, 363 bp, Homo sapiens
attttttcatatcctcaagatttacatttgttggttccatgtacatttgcacatttgcaatcagactttctactttgtatgtagattctaaaggttgaatttgtggctcatttctgtaatcccagcactttgggaagctgaggtgagaggattgcttgagcccaggagtttgagaccagcctgggcaacacagtgagatcctgtctctacaaaaactacaaaaattatctgggtgtggtagcacatgcgtgtggtcccacctacttgagaggctgaggtgaggggattgcttgagtgtgggagttcgagtctgcagtaagctatgatcatgccactgcccttcaccctgggcaatggagtgag

SEQ ID NO: 213888 - DNA, 386 bp, Homo sapiens
gacgtggagcggaggcagagggggtgtcccgtgggtccctgccacaaaggggtagggggaagggaaaccccaccccgggaggggctgctggctggcggcggcccgggcgggctgcggcggtggccaggtgggcggtgccgtggggggcccgggaaggtccgggactggaacctggaggaaaagacgtcccgcggcctaggaagcggagccgccccccatggctgaagggggaggcccagggaggcagaggagaccccgcatcccggggtcacggcagcagggcagcggggcaccgggaagtgggcgcagggccgggaagaccggccggcgtggggaaggctgctgtgggttctacagtgcattgtcccgggtgaggtggcggccgc

SEQ ID NO: 213889 - DNA, 826 bp, Homo sapiens
ctctctctccttccctccctctctctctccttccctccctctccctctctctctccttccctctctccatggaaggatgttatgtatcttagcaacaaaggctttggattttcccctccagttactgacaagaaaccagaatgatttctggtgtcagaaaccttcctcgaacaaggagctttctctggagaacaggctccgagcagccacacgtcattcgacctctgttccccgttggggtgtcctcaggccaggacatcctggcaagtgggccgtcagcgggcagtggcatcgcagcctcagccgggagacccaagtcactcctctcagaagcgcggcacccgaaccacctctgttcatcacattttgtcccgtggagcagtgacaagacccagcaagatttcatggcgacagaacttgaaggtttcagggcgacggaacctgagagtgatacagacattttgattcctggtgcaacagggtatgaagaaaacacatacctaattttatcggaaaagatatactgagtgtctatgcatgctgtgatttgaaagaaaatcactcagtagagaagggcctcaggtcacaagccttttgtctaagtgagggggataaaaaggcttcacagtagagtgacaattactaatcctgcgacagtaatatatgcaacttttaaatttttttctaaacatttattttgtgactactctgtttcaatgctccctgggagtgaaaaacaagattctagccaggtgcggtggctcacgcctgtaatctcagcactgtgggaggctgaggcgggaggatggcttgaggccaaggagtt

SEQ ID NO: 213890 - DNA, 397 bp, Homo sapiens
tcttagttcactgtttcacacccgcactgacagtctgctgtccccccaaggccctgggacatctgccaggcagtgaaatcaaatgtgctctttaaatacagctcagctccacgtcatattctccttctccctcttctctccccacctcctctccttccttcccaggaatgcaacattgcccaggcaggggacgggccaggctgaactggacatttccaaaaagtgtttcttctggaaatttcacccaaaaggaaagggtctggtataatggactcccatgtatctgtcacttagctttagcaattctcaacattttgctgatcttgttgatatatatatatagatatatagttatttatataaagtttatataatatttataaaaaattataagata

SEQ ID NO: 213891 - DNA, 451 bp, Homo sapiens
tagattctgtggctgagaattaaactaatgtaagacagactaacagggcaaaaaagcatacaaattttattaaatatttttccatacacacaggagtcttcataaagaaaataaaaatccaaataagctgttaggccccaaagcttaaatagcttttttaaaaatgtgttaaacattgtgaggatgtgacaagacaggggaagtaaattgtggggcagtgactaggaaatatatgggggaaattaatggaggatgagttgttttagtagattggtttgtccagattcatctcagcttcaactcccagtcttcagtgataagaatgttcttttctttctgatatggggaaagcacctgtctcatgggaaattttatgatttgcatttagaagagggtcagggaaactttcctgcacctgctgtttctcaaataccttcagctataaataatc

SEQ ID NO: 213892 - DNA, 183 bp, Homo sapiens
ccattctggcaggtatgtaatggtgttgcattgtttaatttgcttttcccaaataactaattaagttgagcatcatttaacatactccttggacatatatggatttttttgtggcatgcttattcatgtattttgctttttttttttttttttgagatggagtctccctctgtcatcgggctg

SEQ ID NO: 213893 - DNA, 466 bp, Homo sapiens
gctgtgccctgtgtctgaggcagctctaccctggtcaaccccttacttggctttaggagagaaatttaggttcctgcctccctcaagggactcccttacccacccctatttttttggcagagggagctgctgggagttgttttagccaacagtgctagtggaaacagcttattcctcctcttcctgactccctccagctaacctgcttgttgatagttactccatggaatcatgggaggagagtgaggactgggaggaagagagaagccctggggttccctagggtgacttgtggagccagctatttagagattatggtgggctcacagtttgtgccagacacgaaatcaaatgcctgtgttggctctcgggagagggcctcaggtataggcatgttaagtgtcccattatatcctcaccagaggcctcaagatgaggggctgtattcaatatactaagattttcc

SEQ ID NO: 213894 - DNA, 382 bp, Homo sapiens
aaaatggcccatcaacattctcacagtaagttaacctgaactgggacaggaaccaaagggcagaggcttcccatctagtgcatgtttgttccaaatatgtctgcctaaggctacaatattgtaatatctcacttgcctatgtttcttaatacattttacttttaatagtgatttctatatgaatacttgacatcatttagaaacaatctaccatctatggtattggtgaagattaaatcatgcatttaatgtaattcttggccaacagaagaacacaataagaaattattattgggtttaagactagaactttagtaaatgtacacatttgattataataaattttcagacttgagtctgtgaagtcatccatattttcttt

SEQ ID NO: 213895 - DNA, 366 bp, Homo sapiens
gtctctacatgaaagaatgaagagtcctaaaaatcataagcatgtgactaatattaagtctttcctcattttaaaatttctttagtatataattatttaaagcaaaagtaataacaatacattgtgataattatgtctacaagaaatgaataacagcaacatcagaggagggggtaaatggaattatattattgtaagatttgtgccttttaactgaagtggtgcagtatgaattctaggtagactgtgataagttaaaattgcatattatggtgccaagaggattttaaaaaaaatgtaaataggtatgttgctttaaaaagtcaaaagaggaaattttaaaatacttttaaaatattcaatcca

SEQ ID NO: 213896 - DNA, 407 bp, Homo sapiens
catagtaggtagcttcaagagggtcatttagttcacgggagagtgaggtgtgactgctgtcacacacttacatttcagtgcctctctgggcctgataattaaaatgggtttgcactcctcacattaaaagtttttatttctcactatgaaataaggagggaagttcattttaaaaggagtggcagaataaggagaattggagaaccagtacagaagattcaaaacccagatagtagaagtcccagaaaggaatacaaaaggaaagaaattgccccaaaaaattttcaagaaaatttccaagaactgaaggaggaatttccagattgaaagggcccaccaaacacctattgctatgatatagtccatggccaagtatggtcctgaaatttcagaatcctagggacaaa

SEQ ID NO: 213897 - DNA, 514 bp, Homo sapiens
atgcattgtattcttgaaaattggtaaataagtagatcttgaatgttctcacagcaaaaaaagataaatatgtaaggttatggttatgtcccttagcttgatttaaatttgatttaatctttcatatgtatacatataccaaagcaccaccaaaaatatatggatttttagatttattaattgtcttaataaaagaaaaaaacatggatgtataaaaaataaagaatactaagagagtttaattcccaataagtactaggagctgttattaggaaaagcttgatacttgaacttataaaatcagagataaaataacagaaagtaaagattgaaattcatcattgctctctgagttcttagtatatcaagacttctcatttacagcagcatatttctcaaatttcaatctgttaaattttgtcaccctccatgaaacattttacattaaagtaatactagaccattttaagcagaagagaaattccttttatgttgcacctgaattgtgcctatg

SEQ ID NO: 213898 - DNA, 255 bp, Homo sapiens
ccaaagtgctaggttacacgcgtgagccaccatgccggccatttctgacattgtccactctacttatttgttgttgaaatgactttaatgaaataatagtgattaaaattaggttgttggtattttaatgttcttatttggtgaaattaaaagttagcattctgatactgatccctaacatttttgacagttgcaggtataatccaattctggggaaactgtcacattagaacaagtgagcctatctcatagttg

SEQ ID NO: 213899 - DNA, 485 bp, Homo sapiens
caactccctctatttgttcattgcacttttgttacattcattgggcccttcatttgtgctgcagagattcatatgtactgtattgttgggttttttttttttctgtttccccaacaggagtgtaaattattcaggcacaggttcttacttgtatctcaagaacctaagacacaatgggtgcttagttaaaaataattagtgatggtaaaatgtatcttgtaaggttagtacctgttcctgaaattgcaaaaggtagcgtaagtcctgactgccgtgatgaatgagttactgttttggcagagttacagataggagctatcccctttccttttactgtgcaccataaataaatttttagaggctctgtctcgagtagaaatgtttaatccctgtctatgcttgactttccccctaggtgccaggaaaagcaaacaaatgttaagctgtccttcctagtagttcagtctgtacattgctgattaaaa

SEQ ID NO: 213900 - DNA, 419 bp, Homo sapiens
aagattttattttagagtttagatacacaggtgtaatttgtaaagtacagaatttggagactctcagaaatgtacatttgattgaagctttaagggaataataggcttggatagaagggaattttttcttgaaatctatccagaagattttctcatttctgctgttaaaatgcttttctgaattgatagaaccacctgaaagcgatgctgtggcaatagagactgaggtcagggttacagagagagagagagatcttttaatataacaccatgtagtgaggaagtaaacagatctaaggatgtattgatgttctttaatattggagtcaagaaggccacttagcagtttcacagtaggttagttaagagatagtaaaagctcagttgggaccagacacttggctcttagaatggaaaga

SEQ ID NO: 213901 - DNA, 353 bp, Homo sapiens
ttgagtttgtgtttgtatatgataagggtccagcttcactttttttgcatgtggatatccagttttaccagcaccatttgtagaagagactccctttccccatttgactgttccttgtcacgcttgttgaaaaccgtttgaccatatatgcaggggtttatttccgaggtctctgttctattccattggtctgtatgtctgcctttttgtcattaccattgttttgattattatagttttggaatcagaaagtgtgagccttctcaactttgctctttgtttctaggattgttttggctatttgtggtcccttgagatttcatatgtattttggaatggatttttctatttca

SEQ ID NO: 213902 - DNA, 253 bp, Homo sapiens
tgtatggataaactgacccttcataaatatgtgtttattccttacaaatacttagccttatttgtttctttatttccatgtgactgtatatactttttactgattatcattggttttgagcatttttcctgtgtggtaattttctatgaaataggtttcaatcattttctgtgaaatagttttcaaatagttctcatttatttgtttgtttattgcttttacccctcccccctttaaacatactctgcacgct

SEQ ID NO: 213903 - DNA, 441 bp, Homo sapiens
ttctgatcttaggaggatgctctccatggtgcctgttccttctgttttgtccttgtttttcctcttccatatccacacggggtgcagggactgtggctcatggtaaatgattcacaaattttagctgaaaagcgaatgaatgaagattggctctttataacttgaatagaatgatgataagggggtgaaatgatgaaaaggttacagaagtaacataaaatgttgtttaactggacaccagtagaggtatacaattcctaggcaaaaggacactgagaagaacaggagtcaggcactcagggataccacctggccggttaccactgcccagtgagcctctctgtaaagctaccccaagaggctgcagaggtaatttctcaattcagtgacaggcaatgctacatggcaaggaaaaggacaaagcctggtgataagaagcca

SEQ ID NO: 213904 - DNA, 111 bp, Homo sapiens
aaaaaaaaaagatattgttttgtaacctgctttttttgcatcatgacgtattggccaacatttcatgaaactcttgacatctataacaacatgctatattcttttatcttc

SEQ ID NO: 213905 - DNA, 396 bp, Homo sapiens
tacagccttctttggagagtgtgtatgcccatcttctgctgggttaatttttaattgatgagttgtaagagtgtctaattgtattaattagtgcctgaatataaacattaacttagaccatgtcatatattgacagtaatgtcttattcctgattttaaagcaaatgtatccagtaattccactgtgcccttggaattatataataagcctatagttttttccagttttctatttctattatgtttcatcttcaatttttatatttatttctatgatgttttaatcttaatttattgttacatgtatattgttgctatttggcacattcctaactactcgatattcactatggattgcattctttattgttacaaagtatatatttcatttcttgt

SEQ ID NO: 213906 - DNA, 431 bp, Homo sapiens
agtgtctgttgtgatgcattatcagggctcaccacggcatggattaagcagtcctcagaagggttagccatccttagcactgattccaacacccctgaaccacattctgaatgctaagtcaacttcctgggtaccattagctcagaaaggtatattctggacaatggacatggtcactggaaagaaatggcatttttttgtagattccggggtgcccagcagcctcttgtgaatttttactcagacattctgagtctgatccctctggctcccagataaaagggagatgtggggacctctatgataacgctctgtgcttgatgtagtgttctacccctccccaagaatgccactcttaggggtcttttcagggtaaacagcagcctctcctaagtgtcaggcttactttgttgttgctcctcttcaaaatg

SEQ ID NO: 213907 - DNA, 871 bp, Homo sapiens
ccttttggattcccattagcttgaaacactttaataatatatggatcctttatttccatatatggaaaggtggggaaagtccagataggaggtatctgatgtctttttttttcttgcctatgccttcaatgagttaagtctgacaaggctgccttcagtgtgtctgcacagcacatatattttgtgcttagatatataattccttctagacctggagaactttgcatgtttggggtacactttggatgtttccccctatttgcacatgatttcaggtgagatagtagtttttcttgaaatcggctcatagcctgaaaagagtacagattcaccagaacataagagaatgggatttttctgccagaaggtgagctatggtatgtacagtttagttagtgatgatttgttgtcttctggcagctatacttaataccaaaaaattttaagagagatacacacaatagttgaacctgttatgggcaaagtgataattcagtggtaacttgccagttcaaaattaggaagtcattggcaagtgcatcctgagccctgcattctgtggcttgcgtgaggtatgagtacacatgaggatctgtggtttgagtccattagacctcgaaagggcggttcatgatatgtggttccaaaagcttgtttggaaacaagcttttgaactttttcgtgtggaatttacaaaggtaacttttgctctgcaactcactgaaatctctttccattattttttaaatgtttgtaaattgtggcttggtttactcagttgtacagttgacctttgaacaacatggtatgaaccgcatgggtccacttatacgtggatttttttcaataaaagttataccaactatgcctc

SEQ ID NO: 213908 - DNA, 360 bp, Homo sapiens
caaaatcttaggtccacacaaaagcctatatatgaatgcaactatatttgtaatagcttaaaattggggggaaaagctgggtgcagtggctcacacctgtaatcattttgggaggccaaggcaggcagatgacgagttcaggagttcaagaccagcctggccaacatggtgaaaccctgtctctactaaaaaaatacaaaaattagccgggcctggtggcatgcacctgtaatcccagctactcaggaggctgaggcaggagaattgcttgaaccccggaggcggaggttgcagtgagccgagatcgtgccactgtgctccagcctgggtgacagagcgagactgcgtctcaaaaaaaaa

SEQ ID NO: 213909 - DNA, 539 bp, Homo sapiens
tttgaagaaagtcagtttatgtcctattgagtttctcctagactggattttgccctttgcatcctgtgatgttgctggaaatagtcctccttctcttctttaaaggagcagctccatctagaagcttggtcagattctggttcaatttttatggcaagaaaactttctgggtagttggtgcgtatgtctgtgtgcataggctgcaaacatctgcttgcttctgtgctgttctgtggaccactggattcgggtgttgtgtattcagtagtcgttcttgtttgagtggtctctgtggctgtgggcctcgtgggttgtcctggctgtggggtggttgggcctgtggtgcttgctggggttggacgtgggcctgtcgtctgggtggccgttgttcctggcagttcctgattggtcgattttggcagcgtggggcttgtccctgatgtggctggggttggtagtgtcattgtggttcgtgttgtggactgagctgtgacgtcgtggctgggctgcggtgcgatccgtggccctagcgacagcaa

SEQ ID NO: 213910 - DNA, 303 bp, Homo sapiens
tttgaagaaagtcagtttatgtcctattgagtttctcctagactggattttgccctttgcatcctgtgatgttgctggaaatagtcctccttctcttctttaaaggagcagctccatctagaagcttggtcagattctggttcaatttttatggcaagaaaactttctgggtagttggtgcgtatgtctgtgtgcataggctgcaaacatctgcttgcttctgtgctgttctgtggaccactggattcgggtgttgttatgaagttctttgtcaggttttctcctgatggttttagcggatag

SEQ ID NO: 213911 - DNA, 417 bp, Homo sapiens
gggattacaggtgtgagccatcgcacacagccaaacctttttctttatgtgcatttgcttctaaaatgatctgggtttcgacttcatttgtaacattttgttttttttttttcttttagacagccttgctctgttgcccaggctgtagtgcagtggcgcagtcatggctcactgaagcctcaacctcctgggctcaggtgattctcccacctcagccaccagaatagctggactacaggtgcacaccaccagacttggctaattttttttttttttttttgagacagagtctccctgtgtcacccgggctagagtgcagtggtacaatctcagctcacagcaacctctgcctcccaggttcaagtgattctcatacctcagcctcccaagtagctgggattacaagtcacgccacac

SEQ ID NO: 213912 - DNA, 317 bp, Homo sapiens
gaagacagaaggatggaatgatctctgaagtctcttccagctttttcaagattccaggttgcatattctccaagattggaaaggttctggctcattaaatttgacaaatataaggcatagtcttggctttactcaactaattggtacttttttccctcaaactcttgctcctgagttgattaaacataattgaaactcatacaataaaaaatgtgggtgtggtaatgggaatgtattgaagctaaattatctagactttctgattgcactaattaaaaagcatgaaaggtttcttcaactggaagatcagttccttg

SEQ ID NO: 213913 - DNA, 303 bp, Homo sapiens
aaaaaaaaaaagaaaagaaaaaaagaaaaaaaaaaaactcaacccagaagaacagacctaatgcttgggccatgccgcctgcaattactactaggtccactctgtttgctgtcacagccccagtgcctatttgagcaagtgactccaggttggcactcgaaaaacccctcggttaatttttttgtatttccttcaaaaatatctaccatcgcgttatattaaaagtacattttgttctccttaaaattagtctgaacttcctgtaaaatattgcaggaaataatgcatggtaccgtcttctta

SEQ ID NO: 213914 - DNA, 117 bp, Homo sapiens
agaacggcggcaagaggcagcagggaagacaagaggccaccaacctcagggagaggcttatagggggcaggctgcagcatgaccttgagcaagataccctcatccgcttatccaatg

SEQ ID NO: 213915 - DNA, 252 bp, Homo sapiens
atcatgatcgttgggcattgatacgactttttttttttttttttttttgtgggtaatctgtcttttctctctgcaagcttaagatttttctctgtatcctggaccttttgaagtcttactgcaacatctctaagtttggacttttcttttttggtacttcttgtgactgtttctagtgctcatgtcttttattaattctggaaaacttagccatgatctgttcaaatattgtatcccttctgtcgtcttctc

SEQ ID NO: 213916 - DNA, 340 bp, Homo sapiens
aaaagctttgtgcacaaatacttttaacaacctcatttataacagaaaatgaataaatggaatatcaggagttaatattatgtttataaaaactatgggccaggtgcagtgagtggctcatgcctgtaatcccagcactttggccaaggtgggtgtatcacttgaggtcaggagttccagaccagctggccagcaaggtgaaaccccatctcttactaaaaatacaaaattagccgggtgtggtggcgggtgcctgtaatcccagctactcgggaggctgaggttgcagtgagccaagattgcgccattgcactccagcctggatgacagagtgagactc

SEQ ID NO: 213917 - DNA, 187 bp, Homo sapiens
ggagacaagaaattaaagtggagaaagggaagaattaaaagtcaaaaacagtgtgagggaggaaagcaatggatataacacctcggatctttatccttgagaggccttaaaaaatctacttaataataatcagatgctattctataagaactttgagactagacatgtgatgacttttaggaacctg

SEQ ID NO: 213918 - DNA, 400 bp, Homo sapiens
acagactttgctttgcagcatttttgtggtttcttctttgtgacaggcaagagtgtgggaaaaccggaaacagctcagcatcaaaaatgcacagaaggggggaaaaagcggagatttcttcagaatttaagtaatataatccaggtatcaaaaggcatgctgtgaggcgttgttccaggaaatagtttccaatttgcctctaaaactctaggacaagtctctgaagctaagttaatactaataaagacttgaacattctctcacttacatgtgaaatgtacagcgttttggggaccccagtgttttcagatattctcctgacttttaggaaaaagaatagcatggcttttcatctgaacagtgaaaagttccccctatgaagtatcctgataaagttaaa

SEQ ID NO: 213919 - DNA, 443 bp, Homo sapiens
agagacacagatgaggtccgtgtgaaggcagaggtagagaatggagttatgatgccccaagccaaggagtgccagaggtagacagccactaccaggagctcggggagaggcatgggacggatcctcccttagagcctccagatggaacctgcccagctgaaaccttggttttggatttctggccttgagaaccacaagaaaataaatttctgctgctttaagctgcaaagttagtggtaacctgctactgcagccctaggaaccgaatatacctaccctacccctagtggtctcatgtaaaggtgaagacacagaggcacagagaggttaaataattcaccaaaggtcacatgccaataagtggcagaactgggattcaaaccctggcaatctggctccagagtctacgcttctaaccactctactcttccagctcttgaaag

SEQ ID NO: 213920 - DNA, 648 bp, Homo sapiens
tcccctaaaacctatcctctcgctgcccccccaaatttctcccatcagtaattgtcacctcctaaatgtcagcatctgaggactttgtttccctccccgcttccattctaatgcactagaaagttctctacatcttcaccacttctgtacttcactttagtccagggacttcgctcacctggtctccgtgactgcactgctgcccacctatgaaccatcctgcatgaaacagcagaagggatgctctgaatagaaacctgaccatgccactctcatgcttgaaactggccgatgttttcccatgagagctagaataaacctaacctcctccctgcccctgaccacctccccgcacatccatgccacactctccctcacagccgctccttccacaagccccagggtctttgcacaggctctgccctcagcacggaagccctttccaccatgtgcacagtgaactccttcgggatttttaggactctttgtaaatgtcagctcctcagggctggcccctaacatttgcgtcctttcttgcttcttatcacaatttgcaattgttccacttgtctgtttacttgctaattatacagaaattccttgctggcaagggccccctctggtcttcttattccataacccaacaac

SEQ ID NO: 213921 - DNA, 493 bp, Homo sapiens
aagcaccaggaattttggagaagttcccagcagctcaggagagtggctggtgccttgtcccaggggagagggaaataagcacaggcctatttctttctcaagacggaaaaaccgagccccagaaaatggcgataagatggggatgcaggaaaaagctagctaatgaacagttcagcagtgggcaccgtgtgggaacctctcctaagccgccctccctctgatggatgcatgctcaagtgatttcgttggcccttaaaggaaagtgttattccatcctgtaatcctagcactttaaaaggaggccgaggtgggaggatcacctgaggtcaggctgaactcacccgacctcaggtgatctgcctgccttggcttctcaaagtgctgggattacaggcatgagccaccgcgcccggccggtttttaagatcttattgctgaaaaacttaaaataaaaaataaattcagtatcagcagggcagcaggaattgccatt

SEQ ID NO: 213922 - DNA, 539 bp, Homo sapiens
aagcaccaggaattttggagaagttcccagcagctcaggagagtggctggtgccttgtcccaggggagagggaaataagcacaggcctatttctttctcaagacggaaaaaccgagccccagaaaatggcgataagatggggatgcaggaaaaagctagctaatgaacagttcagcagtgggcaccgtgtgggaacctctcctaagccgccctccctctgatggatgcatgctcaagtgatttcgttggcccttaaaggaaagtgttattccatcctgtaatcctagcactttaaaaggaggccgaggtgggaggatcacctgaggtcaggagttcacgaccagcctggccaacatggtgaaaccccgtctctactaaaaaatacaaaaattggccgggtgtggtggcatatgcctatagtcccagctacttgggaggctgaggcaggagaatcacttgaacccgggaggtggaggttgcagtgaggtgagatcgtgccattgcactccagcctggccacagagcgagactccatctca

SEQ ID NO: 213923 - DNA, 1201 bp, Homo sapiens
cccggagcgccagcgatgccctctgcccgcggggacccgagcctcgcgcgccctccgccctccctaccctggcccctgtacccatcacacctggggcactgccgtccgccgagcttgggcgcgcggcggcgagaaggcactggaggaggagaagcagccggggcgtaggcgccctcgcccccagcaggccggggagggcgcgcatggcgccagagggtccgcctcagttctcgtggagactgctccctcagctcgccgccgcgggtgtccggaatccctccgcacactcgcaggtggcccggcacccgcagccagtgccgcgggcaggacgctgaagaaaaggcggaatgggaggggcccggccgccttgccctactccccgagacgctcttaccgcgcccggccttccatcagttatgcagccctcagcccgctgctggcgttcccggatgtgcggtgctactcccggctgcagcctctccggcctccgccctctaggctctagcaggtcgggagagagcttgggcaggtgatgtgtagcccatcgcgtggggagaggttgaaactatccctgcagactggcctttgcacttcatctgaggcagatttcactaattttcgttgatgggacagatgagagacactttcctcctcccgaccccggacatctttgggctttcttatgagggaggcttatttttgcgcaggtgtacggttttatccagctgccagacaacttgtactgatctttctttgctttgcctactaatcacacacaccctctcttctagcctgtgaagacttaactgattttctacggatgaaggtttcagtgtcccaaggccccataccgtatctgattttactttatttttttttgttaagcctaacagcttctgaggagccacgtagagctcaagaagcaaaagctactgagagtagatgctatgtaaactgcacaagacgttgacctttgttaaatccgaacactgtttaagataatgctatctcttacccacgaggctgtagcttggaatattcagtgctctgaaccaaattaaataaattagtgctttatccgggaggggaggagaaatctatgttgtaacattgaaacacattgatttgatttctctccaggatgttataacgcattaaaagatattttaaatatttttcacgagctttgtttcctctccct

SEQ ID NO: 213924 - DNA, 365 bp, Homo sapiens
tggagcctggggtttgaggtttatatgggtacagaatagggggttgtgctgtgccaaaaggcaacatttgggctcaaaaacaggaatacctattcccatttagggccacaggtttctaggcttggggatgggggctttgctggggaactgccctcttctacctagtatttccctgtccatatcacctccactccagccacactggccttgctgcttctctaaaaggtcacgttcactgccatcttgggtcctttgcacttgctttcttgtttggaaagttcttcttttagatcttcactcagatgtcttttaagacattacccctcagacaggtcttcccttatgatgtgggttcacatagaacc

SEQ ID NO: 213925 - DNA, 439 bp, Homo sapiens
agcatattatcaagttttagatctttgctgagtgaaacctattgtcttattattgtatatttatcaatctatcactgaagttacactttttttatgtttaaaagtcattgacatttattcttggctgggtgtgtggtggctcatgcctgtaatcccagcagtttggaaggccgaggcagacagatcgcttgagcccaggagttgcagacagatcgcttgagcccaggagttccagacaagcctgggcaacatggggaaaccccatccctacaaaaaatgcaatattagctgggtgtggttgtgcacacctgtagtcccaactttacttgggagactgaggtgggagaattgcttgagcccaggagacagagattgcagtgagcaagatcgtgccattgcactatagcctgggcaacagacaaaatgagaccttgcctca

SEQ ID NO: 213926 - DNA, 751 bp, Homo sapiens
cgcttccgccctgcgcgctaacccaagacgggagctcgagagcttgatcctgcgcgagtttacagactgccctcttccctttttgcatcgaagaccacgactcccaagaggtaatgcgtcggcccgggactacatctcccggcatgcatcgccggcgggtccgcgagttctcaccatcgcagctggactattagcgggggccctagcgctcttgtggtttgtttcggcagtatctgaatgtcagcttttggcacttctggtcgctctgagcctcctactcgcattcctggagcaaggtgctttccaggcctcatggaggtggaggagctgaggaagctcgagaagatggatagaagtgggaaatggagctagcgtacgggagagggaaatggctggaatattcgtcaatctgtggtgctttactggagatttgcaggagttcagaggaagggggcattgaatttcataacctaaaccgtatcgtggtttaccagaaagttttgacccgtgattccggttttaaaggctgagtagggccgggcgcggtggttcacgccagtaatcccagcagtttaggaggccaaggcagggcggatcacctgaggtcaggggttggagataaacctggccaacgtggtgaaacctcgtctttagttaaaaatacaaaattagccaggttttgtggcacatgcctgtaatcctagtactcgaaaggtgaggatgagatcggttgactcaggagggggtggca

SEQ ID NO: 213927 - DNA, 447 bp, Homo sapiens
gtaaggactaattcaaactttatgccgggggcggtggctcacgcgtgtagtcccagctgctcgggaggccgaggcgagagtatcgtctgagcctaggagttcgaggctaaccacggcaacgcccctactcctaccccagtccctcgcgggtggggcgagggatttcagggggcggtgggggaagacttaaccgagttgccgtcttctgtttaccagatcgaagaccacgactcccaagaggtaatgcgtcggcccgggactacatctcccggcatgcatcgccggcgggtccgcgagttctcaccatcgcagctggactattagcgggggccctagcgctcttgtggtttgtttcggcagtatctgaatgtcagcttttggcacttctggtcgctctgagcctcctactcgcattcctggagcaaggtgctttccaggcctcatgga

SEQ ID NO: 213928 - DNA, 602 bp, Homo sapiens
aaaaaaaaaaaaaaagaaagaaatcttcctttgctatttctacatagaaagataaaaatcatgcaatttcctatgatttttcatctctcattggaattagatatctaaatggccagtttgctgatctgttgataattttacatactagaagtcaggtttcaagatatagtttttcgagtcagattaggttagatgtttttaagatgatgtctttgtcaacttttccaaaatttggatacataaaatgcaaaaggaatatgagagactattcttaaattataaaagaatgttcggttacctgcagcagtttctatgagattgtttttgtcccagagcagccaggagagaagacagcaattgtgtggtaaaataagacataattggaattgagagtccagattgctaaattagactttttttttagctttgtcactaatttgtaatttgacgtctttgatgtcattctatcttccttggtttcattccttgttctctaaataaaatattaggtttacatagaacacgaagcatccttagaaatttttatatgttcaactaccacttttaatttaaataaaatgttagctgttcaaaaagcaaaa

SEQ ID NO: 213929 - DNA, 450 bp, Homo sapiens
tccattattatttgtggtggctccatcctctggaaagttcttccttatttcttattccctggctgtcacctctgaagtggctgttaagaagtgtgctcttcttgcgatctttggcttcataactcattctgcaagagtaaagacggaaactaatgggtgttttaggtttaaggtctgtcatttgcggactctggggctgtgggagaaaaaataaatcgtttggttcatgcacacaatgtgacagcttggcataagtaaaagacatgaacaaaaggattaatgaagaagtgaaagaaagaaggtgtatacattaggcacaacatcacctaaaaaaaaaaaaaaactggaatgcattaaacttgttcattcaataagtgttggctgagtgcctactaagtgtcaagcactgaaccagatgtggaggattcagtggcaacacacggaaaagtt

SEQ ID NO: 213930 - DNA, 313 bp, Homo sapiens
gaaagcggggagaagactagtttaagaaacagtaaaagaaaaaacagcaggccaggtgtggtgggtatgcattattttatcaagacaagatagggaagcattttgtttattatgcaatgactctacggtcatcccttggtatctgtggatcaaccgtggataccaaaatctatgcacactcaagtcccacagtggcccagaggatacaaaaatttcactgttctgtatctgggggtttcctcaaataacgtatttttgatccacgtttggttgtatatgtataaactgctgattgtatttattgaaaaaaaat

SEQ ID NO: 213931 - DNA, 182 bp, Homo sapiens
gtacaacaccccaagggtactggcgagctttaaccatcttgtttccgacttttatctcatccatacttcccacaacagcaaacggcaactgtccattcattgcagcgttgaccttagcaatagtgtcatcatccgttggaaactggtatatctggacgccattgctgaccaattcactcatg

SEQ ID NO: 213932 - DNA, 389 bp, Homo sapiens
gcacagttagctgaaccttgtcctcttcatttgaattctgctctttatctgttggatatttctcaacgccagactttgctggagttttcatatcttccccatctgtaaaggtaagtaatggcaactcatcaaagtcttcttggttctcctcatcttcctttccaactgcataatactcagtatccaattcctcatcaaaatcatcttctaatgaagtaacgagtctggttgtctcatcatcagatacaagtgcatcagctgttgagccaaatttggttttcaagtctagagtcatttcttttttcaaaagtttataggcatcaatcttatcctgttcatttgagacctgagaactattgctggttttgttgttttcactttctggcact

SEQ ID NO: 213933 - DNA, 503 bp, Homo sapiens
actccctgctgtccctcttcctttgcatacccctcagcacacacacaaagcacatgcctgccacacagacacagctctacacagagaggggcattgtactttgaaacagtggaagccagagctggccacagaggctctttctccaacaaatgcagatgctagagatgcagccacttggccgcctgcctaggaagctccccatcctctccataccctgcccacttgggtcctccaggaagcaatagcctgaaaaaaagacaatagccacaggcaccccacatccccctccccagcccagaaaatcccattcgaagcagacaaggctttttaacaaacaattagcttaaatttttcattagctgctgcttcctctgcagttcctgcctccacccctttcaaatctccaagctacgtatttagctggggaggcccagccaaaggagagtctagcggatgtatgttcgggttgaggctcccataaacccacctctgaagtggaccta

SEQ ID NO: 213934 - DNA, 158 bp, Homo sapiens
tggtcccagctgcttgaagtgggaggagagcttcagctcaggatttccaggctatagggagctgtggtcccaccattgcaccccagcctgggtgacagagtgagaccccatctcaaaaagaaaagaaaagaggctaggcgcagtggctcaggcctgta

SEQ ID NO: 213935 - DNA, 480 bp, Homo sapiens
tatactaaaatgttgaatatcttatgtaacttattgatttctgtactaaaagtgaaaaacagaatggttgtatgggcactcgaagtacggtttctactgaatgtgcattgcattcccatcaccgaaaagtcatttaagtagtaccattgtaagttgggagctgtttgtaatcatttctgttgagacataagtaatacaacttagagtcattcaacttttacatgattaaacaacatcttaaataaatctagaagaaaatagctgtttttaatatattgaaaatactcctgtctatggatgttgtatatataatcctttttagaatctgtcctatgattccagattaaaggagactgaagagactgggtgtagtggctaacacctatagttcaagcactttgggaggccaaggtgggaagactgcatgaggctgggattttggaaccaccctgggcaacataatgagaccctgtttctaca

SEQ ID NO: 213936 - DNA, 466 bp, Homo sapiens
ctgggcttcttggatttaggggtttatagtttttgtcaaatttgtaaaaattttgaacagacttctttgaatatccttgtcttcccctttttctctgggactccaattacacatatcttagaccttgtgaaactacaccatggcacactgatgggataatgcacatcaatgttcactttattttccgtatttttttgttttattttaaatgttttctactgcttttttttcaagttcactaatcttgtcctctgcagcctctaattagctattaatggcatctcatgtattttacatctcaggtattttttatctctagaagtctgatttggatctttgtcatatcttttacatgtccatttaacatgctcatgttttctctatcttcttaaatatacagaatgtatttataatagcttttttaatttccacatgtactaattatattatctgtgttatttaatta

SEQ ID NO: 213937 - DNA, 1005 bp, Homo sapiens
aaaccctgccaccttgctccccgtatcagagagcccagttaaacataactgtgtagaagtactggactcagtttattctagtaggcccaaccactgagaccacgcttaaacatcagtagactaggagctgtacgtggataggagaagcttcgccaacccctgcaaagtgactctgaagaagatgacaagccctgctccagtcacacccggaagctgacttgtacacacatggccgaagcatgaggaaactcattgcgggactcattttcctcaaaatttggacttgtacaataaggacttcaactgaccttcctcagactgaaaactgttcccagtatatacatcaggtcactgaggtaggacaaaagattgctacagtcatattattttatagttattatgaatgcctaagaactccaaaaggaacctgtttgtataataacactcagtataaagtaggtaatccaggcagtgaccagcccaatgtgtgctatgacccctctgaacctcccaagatcacagtctttgaagtaagactaaggactggtccttttctaggtgacacaagtaaagtaatagctagaacagaagaaaaaggggtccccaaaaatgtaatcttaaaatttgatgcctgtgctgctattaatagtaaacagcatgggataagatgcagttctctagattggaaaaaaagttacacagcagaaaataagtacatctgtcaaaaatcatatttatgcgagatgtgtcaatactggtcttgtgtcatttgagctacttaaaaagaaaataaaaaaagatcctgtttggctccaaaaatgaaaagtcagcccctcctgcacaagtgggagctgcatccttttaaaattgataatcacaaacccctcagacccaagtaaaataaaaaaaaatgtaacattaggcattgatggaaaagggctggatcttagtgtaagcatcctaataaaaggagaggttcaaaaacgctctccagaaccagtattt

SEQ ID NO: 213938 - DNA, 414 bp, Homo sapiens
tctcggggacaactttgcgaggccatgtgctcgtcccccttaggaaggaagagggagaaatccctgcggctcggttttgttccaatggtctgctcagcgagtgattcccgtttccccaaaggctgcccctcattagcatgaacgggggtgggggtgtggagaaggggttgggggagagaaagcaagcaaaagaccaggctcacttttagagcctgggaaccctgtctgcaaaaatgacagctagagctttctggctcctctgtttgatcgtcggatcatcccccgaagcaccggtggcggagagaaaaacctcgccgccgcacagcagaaagccggactcccgcggctgcccgagcgcggaggagacaccggggcaccgcgcgcagccactccttgaggccccgcagcggccgc

SEQ ID NO: 213939 - DNA, 510 bp, Homo sapiens
ctcagataatctcatgaattgtctcatgtttctcataccagtgagcctcaaatctgccattgccctatagctgctatgctcatatacatgctgatcacctcccactttgactattatactttcctaccaactggtctcctgttctcctgcccctaccttctccaaacaatccagcccaagaatcttctgaaagccttgttttcattttatcattttttgtaattatcaaaaaagaaattcaaaggctctccattaccttccagataaagtttctactgattagctgaatttcagggatctgtttccagatctcactgtgttaccagactctttccataatatcataaacctttataagggatggatggcaaggatgtggagaaaagggaacccttgtacattgatggatggccagaatgtaaattggtacagccattgcagaaaggagtatggaagttccccccacccaaagaaaaagaataaaaatggaactaccatatgatccagcaa

SEQ ID NO: 213940 - DNA, 332 bp, Homo sapiens
ctgccagtgggctgaggaggaaggcataggaaatatccaaggtcaaccccaggtgtttattccttactagaagttggcctaatagacatcagggcttggcaggagagagtgtaggttaatgaaagggggttgacttacagcagagtcaggacaggaaagtaaacagcagagatggggggttttctccaagtaaaaagactgttctgcagactagagcaacacccttagttcatgtgttcacatcttcagatagaggtgactgctgtgagctgatttagcaaatacgatcatcccttcgctcagaattcacccctctatccagcgttctcgtg

SEQ ID NO: 213941 - DNA, 336 bp, Homo sapiens
gggacatggtttcctacctactcatgtgccattaaagatgcagtattaaccaattggcttttataaagtgtcaatatttgtgtttatttcgaaaaccttaaggcagctttgcaaataagtactaaagttgtactagcccataaaaatcagctctactcaactggcatagatggctaaatgtttggtgtgctcaccaggtcatttgctcataactaatagttctttgtaaagggctttcttttcttccacattactgaaaattattgcagaatgctgttatgcccagattcagacttgttgtgtaggcagcagtgtggtgcagagttgtccatctat

SEQ ID NO: 213942 - DNA, 565 bp, Homo sapiens
taaagctagcactgttttgatccccatcactgaagtttgcaacgtttaccttatttgtttaatatagtacattttaacagaacatgttagaaaagatagattactgccacggacgaaaactgggtggttttcttttgtttgttaaaaaccttattaccttgacagcttgagattctggagacatcacctttgtatgtacttattattattattttaaataatcaacagttgttaaaataaacagttaaacagttattaaacaatcaaaatgctttaatcagaacttgtatgaggagtggatttgatgcacaatgtaagaggaagctttggagcctgatgtgaaggactgaaggggatttttttgagtctttgagaggatgtctctgcccatgcccagcctgaagaagggaacttgtaagaatcaccattaattaatatgcattcctaccctacttacatatggctctgtcaataccagtggttgagtctgattgttttaaccaactgttttgagcttgtcttagagctcaccccaattaaaatttgtactcttcaaaagcattga

SEQ ID NO: 213943 - DNA, 176 bp, Homo sapiens
tgtcccatgtggaagggttctaaaaaggcatgatttttaatttacacttcagaaagaacctgtgggggctgtccattcttccgcaatccctctttcacatttctaagcaattctgtaaagtgttgcttttttgtagaaagtcaccaggctgcttgttcctttttgccaatagtcct

SEQ ID NO: 213944 - DNA, 288 bp, Homo sapiens
  misc_feature (10)..(11): n is a, c, g, or t
ttttggatcnncccccccaacatctcatttccttgtcttccaattgctcatcccttgctaagtcctggaggctgtgccttcccaacagctctagcacacagctctcacatgcacggtttaattttcattgcagctaacattactattgcccaagagtgaattcacacccatcactgacctccctcgaatacacatctctgctggtgaaactttccagaaagcttccaaaaacactgctttcaccagcagaaatgagatgttggaaggccttccaacatctcattacta

SEQ ID NO: 213945 - DNA, 482 bp, Homo sapiens
cgtgttgcttccttcaaagaataggatctcattctttttctgtggctgcatagaattctatggtgtatatggacaacattttcttgatccaatctaccgttgatgagcatttaggttgattccatgtctttgctattgtaaacagtgctgtaatggacataatgtgtctttttggtagaataatttgtatccttttgagtatatacccaggatactctaaattctgtctgcaaatctccataaatatgcaaaatctgtaccatttgatcaagcatgatattaaactggaaaccaactagtgaaagaatttaaaatcaaagcatatcaatgaagtgctccctgcagcttcagatttaacagtctctaattaagccgtcataatacctgctaatatacgttcatctaaagcccatagaaagaagctggaatagagatgcttgtactgtgtaggaaattgtagaatcattgcagtagccaaaaaa

SEQ ID NO: 213946 - DNA, 603 bp, Homo sapiens
tacattactcacttttcccctcaaatgacaagctttctccgacaacatgggacccattgcgtctggaaaacacacacttcacccaaacacttccattaactcctgtaaattgttttgtgtaaaagtttcctgtggtttttcatgcagcattcaatttcatcttcttttgaaattgaaaaggtcagttttgtggttgtttttagcattcactagtagaaaattaaaaagatttctaaggactaccttttccagtcacacattttaccaacatttgagctactgccttgggttggccaggaaatgtctgccgccacattagcgatgtgataatgggcttcacatatcacctggacattaatagaatgaaatcacttactgctcctgaaagcagctttgttctcagcgggtgtcctgaaggcactgcatgagcacaatggaccttctatcacagaggtgaaagtcagaaataacctaaacccatctttatctcgggtgtgtgtgtgtgtgtgtgtgtgtgtgtgtgtgtgtatgtgtgtgtgtgtgtttcatctttatttaatgagtccacagatatttgaggggaaaagaccaaaattcagctag

SEQ ID NO: 213947 - DNA, 360 bp, Homo sapiens
ctggatcaatcgtgtggtatttttcagttttgcttacatattatcaaattagtctttagattctggaatatgtttagagtctggaaagttttcaccaatttgtgcttatttcatgaaaataagaaagcttcagtatcttcaaactctattcaacattggaattttccaatacaatagtttcagtgagagcattttgatattcacttctttattagtgaggttaaacttttttatactttattaaatatttatattgatgtttatgttaattgtatatacctagcccttatccactcttttgttaatgttttctattttaatattttttcaatttctaacattaaacttttttttaatctg

SEQ ID NO: 213948 - DNA, 281 bp, Homo sapiens
gtatccagcagagaaggactctaacttggaaaacagagaggaaattagagatggagacaagcctgaaattagtattatttaaagagtgccgttggcacctacagcatgaataaaagtaattagtttaacattgtgtctcgtcctgacgttttctttttcttttttgatgcaatcaagcccctttccttcactgtcctcaatcatcgcaggcttcattagagccacaaagcacaaactgctggggacgtcttctctgctggatacttgagatccttattcag

SEQ ID NO: 213949 - DNA, 594 bp, Homo sapiens
ctgcatccccagctaggtaccagctgtgctagacacaggaaatcccactacacttatctcctgactccaggtagcacagtgcagagaaacttgaggggaggaaagggaagagcgtgatggactttgcatgctaacccagagaactctccttgaacttacccatgtccttcaggcatgaagacctcagagtatgctatagagtctcagcaaacagggaattaggctaccctatagtgctgacatgactgtatgaccacaggcttaggggtcaacagtcagttccctttgcattcctagaaggccctctaaacaaggaagggtacaaacaaggccacactgtgaagactgcaataaataattcttccatacacagacatcaacatacatgtacaagcatcaagaacattcagggaaatataaatttactaaaaggactgaatagggcacccatgaccaacccgggaaaaatgacgtgtgatttctcagatggaattcaaaatagttgttttgagaaaacttagtaaattttgcacacacacacaaacacacacacacacagaaaagcaactcagaaatttatcagtgaaatttaat

SEQ ID NO: 213950 - DNA, 204 bp, Homo sapiens
ctgtctgcgtcgctaggttcatctcaaattcctgggctgtaattttaagaggccgatgaggctctgcactggaaggtctgacaggaatggaagtcagagattcctgagcccctggcaagcatatgtcaggttgcatgtgtgcggtgtgtgggtccacccagagaaaggtgcctttttcacagaagaatcctctgatcttcaaag

SEQ ID NO: 213951 - DNA, 461 bp, Homo sapiens
tttctccccaaaccatctttctctcttagcttttcttgtttttaaaagtagtactattgttttccttggcttgaaacttggcattaacttaattttttcagcttccatgtatctgatagccattcagtcatcaggcctacttgacttactctaacaaattttgatcctcccaaattgtattaatttttcatgtttaagcttatgtagtcttccttgcgtgacctggactcttcctatgaaaggcaatctcctttttttctaggttcccatattccattgtttatactatgttttacatcctgctttgtgatgctagttacctcttaatttgtgtgtgtcatcaacaaaactattagttcttggaagttagagttgtcaaaccgttatcacccaacccccagtgcctttatatgattatgtaccttaatgtgtatggaacaaataatttaaattcaaaatga

SEQ ID NO: 213952 - DNA, 360 bp, Homo sapiens
aataattctatagccagctaaactatccttcaaaaaatgaagctgaaataaagacattcccaaataaacactgaattggttgctagcaagcctgtcctacaagaaattctagccgggcgcggtggctcacgcctgtaatcccagcactttgagatatcagggaacctgctcccgatagtcatgtaggttcttttctattttccctaagcattggctgggttgagaaataaagggacagagtacaaaagagagaaattttaaagctgggcatccgggggagacatcacatgttcgtaggttctgtgatgccccccaaactgtaaaaccagcaagtttttattagggattttcaaaaggaga

SEQ ID NO: 213953 - DNA, 537 bp, Homo sapiens
atgggattaatcaataaatgatgtagaaaaaaattggctccccttttggctcccctacctcacactatataccaacctattctagatgtaataaagaccgaaaaatatttaaataccatcaaaatagtcaagagaatattttcataaccttaggggtgaaaaaggcttttctgaaccagacccacagttcagaagccttatgcaagagactggcagttgggactacacacaaatgtcaaatttctgtaaggtgacactctataagcaaagtgaaatgacaaagtaggaaaatattttcaaaatgtataagagacaagaagttaatgtgtctgtgtggtggtttaaaaatatgtccatgaattctgtgatactcttccttttaagaggtgagccttattcccctccacttgagtgtgggctggacttagtgactggcgtctaaagaatagcataaagtggaagtgatggtgtgtgactttggagactcagttaaaggcagagtggctttcatcttggtctctttctctcttggatcac

SEQ ID NO: 213954 - DNA, 413 bp, Homo sapiens
ctgatgaggagtggattcgaattaggaatcataggccaaagaaaagtaggagaaaaacagaatcacaattggcatggccattagggctgatgacttcattctgttcagaaaggaggaagggtactgaacacatctttggttagaggataagcacatcctgaaattttcttgagaactaaggatttgtgagttgaataactttttttttttttttgagacagagtctcactttgttgcccaggttggagtgcagtggcacaatctcagctcactgcaacctccgcctctgaggttcaagagattctcaagcttcagcctcccgagtagatgggactataggtatgcaccaccactcctggctaatttttggatctttagtagagactgggtttcaccatgttggccaggctggt

SEQ ID NO: 213955 - DNA, 406 bp, Homo sapiens
taaccccattgtttctttgaaagcagtatcttcactgtgaaatgaaacctgaaatattcaaggaaggagaattcattcttcctctatcatcaaataacaaaactatgtaaatattgttcatttcaaaaagaataaataagggagaaagggaaactacaaaatcagccaatatgtttacaggatagaatacagctttcaggttactgaaggaaattcttcttttccaaatagaaataaattgtagatgctttgtactatcaacaaattttagataagttagagttcatgaagcaggatagatgagatgggacaactgactgatatgaaaagtgacttctgagttaggtggcggtaaagcttttaaagattatataatataaacaataatctcagcattaatgtcagc

SEQ ID NO: 213956 - DNA, 394 bp, Homo sapiens
aaaatgccagggtggcgtggtaaagaaaaaacacacaaacaacaatcacatcaatggttgagcaatcttaagatttaacaaaatagaagggaaaaatcttgccagattactacaaatttttataagtcgttcctttactggctgtttggtgatattatcttttatatgctagcaaaagggaagagttaacaggagaatgaaaagcagagaaagaaactttcttttggtcaaacagaacatcctgttttgagttctaaacaaactcttagttgtggagttctcagtcctttgcctcaggcgaaacacagcctcttcttcctaaatgtttaaaaatatttagtgggagcaaacagtgcaatgaacttctcaaacatcaaaacaatctataaatgga

SEQ ID NO: 213957 - DNA, 428 bp, Homo sapiens
ttctacaatagaacctaaaaactgtttccaacccatcacgacatcaccctgaaaaatgagtgagcagtcactgaggcttcccaagtttgaaaattccacaagactgagagcaaatgttttgttgaaactgaagtcaagatgaagtcagctgactctcaaacctcaggtgaagtgactcagggcccacaccccggttctgaggcagggacacattttacttgcagcaccctgcagctttggatgaggctgcaacccgggtgaatcctggccctgctatcacgtgggcagccactgcatcctccggaggctgtggatgggagtcaccatgctgggaggtctggagtaagatctgtgccatctgccttgcccaatcctgtaccagtgcctgtgtttcaaaatctcaaaataaaagtgattattcttgcaaa

SEQ ID NO: 213958 - DNA, 473 bp, Homo sapiens
tggtaaccaccagcttgagggctctgtcaagagttgcctcctacaggaagcctgcttggcaaccgtccccctgccaaagctgccctctgccttgtgtggccaccacctcctgtgttccatgcggctcttgtcgcatccagcaccatctttatggcggcccactgcccggtcctgtctctccactcaggacagccgacaggcaggcctcatgcctcgcagacaccagccccagtgcctacgtgtctcccgcccgtgatcccctgtcccaccctattatctgcctttcaccaaagcatcctgccagccaggaaaggcaatctgaaccggagcccgtgcagctgagtggaaggggggctgccctattgcattgctctgcttgggtttcactaaaacgtgggattgggccatggtccctcatctcctggaagggacaggtcatgtttgacaaagttttctgggtctgcagcaaagtg

SEQ ID NO: 213959 - DNA, 554 bp, Homo sapiens
gtggtggtgtgctcttgtggtaccagctactggggaggatgaggtggaaggatcatttgagcctgggaggttgaggctgcagcaagctgtgattctgccactgcataccagcctgggtgacggaacaagacgctgtctccaaaatcaaaaaaatcatagacctaaatgtaaaaactatcaaacttctagaagaagcattggaaaaaaaatctttgcaacctggagttgggtgaagattctgaggtataaaatccaaagtacaatccataaaagaaaaaaataacatcttggacttcatcaaaattaaaaactgtactaagagccttgttaagggaatgaaaagacaggccacagactgggagaaaatatgtgcaaaggacccatatccagaatatgtttcactctcataactcaacaacaagaaacaatccaattaagaaagtgagcaaaagatctgaacactttaacaaagaaaatattcaaatggcaaagcacattaaagatgcttttaacatcattatccattagggaaatgtaaattaaaaattacaatg

SEQ ID NO: 213960 - DNA, 198 bp, Homo sapiens
cttacagaccgaggagccaggcaaacctggctgcccactgggctcctttacctgtttgctgtatgatcttgggcaagccccctcaccgctctgtgcccggcttttccactgcaagaaaatggcaacaattatggtacctacctcaaagggtgaaatgaagcagagtgatgtgtgtcgggtgccccagagagcacctac

SEQ ID NO: 213961 - DNA, 404 bp, Homo sapiens
cttgtatttttttaacttttattgtgcaacaatgtatcagaaatcagaaatttaacccatattgtcacaacgtataaagaaccaacaggttcctaatgatcgcatcagctgaaaaatcaaccttctcaaaattaaaaatgagcaaaaattacttaccatgcatttgccaagaatacatgttactttcaattatatattgaaaataaagttgctaaaaatataaattttgatgacttaaatgaatttgcaaaaagagggccagaaaatcttatgatcaatcaagatatcatattaaaaactattagtaattattgtatcatttaaagttattgcaacaaaactttttttgtgatttgtaaatttgttattatatattacgattatacctattacattttacaagt

SEQ ID NO: 213962 - DNA, 154 bp, Homo sapiens
gggcgacagagcaagactctgtctcaaaaaaaaaaaaaaaaaaaaaaaaggtcacttccgctaaattagaaggacaagtagtaggaaggaggtagacaaagagaatggaattagaatggtaaatttttaatgttatgtctattttaccaccaaa

SEQ ID NO: 213963 - DNA, 699 bp, Homo sapiens
gtcataccctgtacgaatataccttgtgcagcaaataacaggcatgcctaccgtgcctaaaattatatatcatggacatttctttttcctctttgcaacattaaagatctagaactctgtgcatttgattgaaaaagctttgaaaaatgtctttgataagaggctatatttgaaagaaaaattatatcatgcaacataaagcaaatatttcttaaaatctttggacacctcttgcccaaatcctgcttattgctgcttcacctggatatctctatttttgcctacattctgttgtcttctcccagaaataattgtctttctcatgtaaatcagtcgaccctttctttctaggcatcttcaagtctacatctccaccactttttctgaatagcacaaggtcacacctagtagctggctggataagcactattcctccttagaaggcagcagagacaaacaacaaagctgttctctgcctttgtcacacaccctttgctactaatgtgaagttaagaaactcgctgggatcctcttccctatggcccatgaaatcagagctccacccaggctttcattaattacttcaataaattactttctgagtgcctaagatatgctaggcactattctaaacaaacaaaaatctctgctctcaagggagcttacattttggagggaaaagcagaaaatgaacataac

SEQ ID NO: 213964 - DNA, 714 bp, Homo sapiens
tgggtcattagtttccattatcacctcgaaggtctcgtccattgtcctcctctggctttccttgtcgctagaaaacatcatctctcagtcactcccttgaaggtcattttccatgcatctccagctgcattcaggacgcttttgtctttggtgttctgaagtttcaatgtggtctatctaggtgtgggtttattttgtatttttttctgcatgaggttctcaattatataaatttatatgaatttctcaattatgtgactttcattagtttagaaatttcatagccattatctcttcaaatatttcctctgctccattccatctcttctccttctggcactctaattaggctcatgttggattttcctattctagcctttatgtctcttaaccctttttccaggttttccaaatctatgtctttccaggcagcattctgtatactgtattcatatttatcttttagctcatgaagtctcgctttggttatttataatcttctgttaaacatgcatactaagtttttaatttagttgaaattaaaattcaactaaaatttgaactaaattaaaactttccttttagaacttccatttggttcttttcaaactgcttgactattctttatagttttgtgggttttgcacacattttctttctttttcttttctttagagacagggtctcactgtgttgcacaggctggagtgcagc

SEQ ID NO: 213965 - DNA, 486 bp, Homo sapiens
cgtgattttggaatcagggctgctccaagcattggcacggtgtgtctgaggcaccaacatccccatgcccgtggccttacggtccaggacaagagtgacccacctgcttgagacccagtgagtactgctgcccatccccacccccttttcattttattctttccctttgaagctgagatgaaagcccccgagggtgtcatttggtcaccaagaccccctctccgcctcccactttcttgccccttctttgcggcccgacacttgcctggctttgcagggcagggctcttttcagcctgggcttcaggtgagaagttgacacattcccactaaagctgcctcataaaagctggaactatattgagcaaaggattccatctcctgtcctccgccagcggcagtgtgtacccggctttcattcctggccaagtactccagggaggtagcactgcaaaccatgtttctgaataaatgtttgcaccgtaaa

SEQ ID NO: 213966 - DNA, 811 bp, Homo sapiens
attttgaaggcaatgtttttctcatctctgcaacccagaattgagttcggaaaagctaacaagaaagtctatgacttgtcaataaaagcatttttaaaaaattgaaagctgcataaccaaagaaaaataagagcaaaaccccaggacacgccacaaaggtgaagacttacttctaaatgaatgaaaggacctcatttctactcaagatccttggcccctttccaaaaatattcaagtaatgggatttctacttgcaggcagacagtgcttccatcggggaatgttctctgaggcaaggcaacatggtcaactagggatggaattttgaaggcaatgcttttctcatctctgcaacccagaattgagttatctgtgctctgagactttttctttataaaccatttaatgcttcaatgatggcaaagctaattcagcttcccaacagtgttacctctggaatcccacctcagggattttgtatcctctagatcttggcagtaaatttttggaagtacttgtttctggttagaagtatttttaatgtgccctgatagatatggagacagtatctccaaaagttgaccttcggaacaataagacatcatcctcatcatcacagtagcttgttgtagtgggccaagatcatgccactgcacagcctgggtgacagagcaagacagagcaagagccttccttttaactagtctctcctcttaacatattttattgcttctaattaaacataaggcacaaaatacatacattccactacaaaacctcttatcaaataaattttacatatttaacattt

SEQ ID NO: 213967 - DNA, 567 bp, Homo sapiens
taagaaaagctgagtaagtttgggctttcatgatataactggttaacttagaaagctaaattaaccatcctacgttgtaggtgtcatgttggtgaagacctggcttgctgagccaagtttaacttgaattcagaggaaaaagaaaaactaaactaaattgactgtgttactaattatcacatagatatacacaacccgagagagtattttatgtgtgattcatgtcagtagtaagaagaataaagtagatgctggatacaacttttaaatctgttatgcgtaagaaataacgtgtgtcttaattgctgtcctcaatttgagcagttctctagcatgtgaactaatgccaggcatgtaaatgtgggttcagtagctaggcctttcgttcagatagccagacacctcattacagtgcccctctccttcacccagcgtgattgaagcccatggtaaatgtccctttggcacatacatttttgggcttctgtgaacagaaagaaagcgagtgaagcatctgtaaaatgtatatttcatatttaggtatataaaacatatatagctatgtct

SEQ ID NO: 213968 - DNA, 888 bp, Homo sapiens
gaggatgacaactgaaaacatatattcaattgattaagaaggaggctaccaatgaccttattgccacaaatctagcagagtcttgggctggaaagcctgattatgtggagtaaataaagaagaattttgttaatatgttagacgagaaaaacagatctcatgtgccttttccctttcctgatgagcctattgcaatgagtgacaaaatatggttaaggctatgttgagccaggaaaactataaacatatttggagtagggaagggaggaaagtacaaaactgaattaaatcaggaggaggaaaaatcttctggtatctttaatttaggagctgaaaagtgctgctttcaccccaaatcagccaccaatttgttgtaaatatgtttcatgtaaatataaatttactttcttggaataaattgtgaagctatagacaagatggctaaggacccactagatgcagggaaactgggtcaggtacataagcccaggaaaagaagtttattacctgtggtatacatttgaattggattgaatgggcaacaaaataatatcttaatacaagatattcataaaatgtggggaaacaaatgcaaaaatgaaaggtcagtgtaagatgtgggagcaagaatagccccttcaaaccaatgttctttccttattgtttagtatttatttggaggaaaagtgtgtggtgtgtgagggaaaggtaaagccctgccacaggggaagctatcatttctcctgcatgtggagctcagctaaagggatctcccaacactaggcttagcccaaacaaacaaacaagccctacagtgattgggctttgtcctgcacagagtgcacttagtgcacttagtggccatccatacctcctagagcaggtgcc

SEQ ID NO: 213969 - DNA, 665 bp, Homo sapiens
attacaggcatgagccactgtgcgcagcccaataccccactttcaataaattattaatagaacaactagacagaggatcaataaggaaatacaggacttgaacaacactgtagaccaactggacctaacagacatacacaaacactccacccaacagcagagtacacattcttctcaaatacacatggaacattcattctccagaatagactgtctccagagaggtcataaaacaagtctcaataaatttaagaagactgaagtcacacaaagtattttctctgaccacaacagaatgaagctaaaaatcagtaacagaaggaaactgggaaattcataaatatgtggaaatgaaacaagatgctttcaaacaaccagtgggtcaaagaataaatcacaagggaaattagaaaatatcttgagacaaatgaaaacacaacataccaaaacttatggaatgcagcgaaagcagtgctaagaaggattattcaccatgaccaaggaaacttatggctgtaaatctttatattaaaaagaaggttaaaaatgaacaacttacattatacctgaaggaattaggaaaaaaagaacaaactaaacccaaagctaacagaagaaaataaatactatagcagaggaaataaaagacaaatgacaaaaatcag

SEQ ID NO: 213970 - DNA, 359 bp, Homo sapiens
ttatatatatacatacatatatatttattttaatcttttaaaaacaattgtttttatagacaaggtcttgccatgttgcccaggctggtcttgaattctcgggttcaagcaatccacttcagtgtcccaaactattgggattacaggagtgagccaccatgcccagccaacattatattttaagattcattcatactgttgtatggtttagatcattcattttcactgctgtataatatcacaaaatgcaaatgtaccatagtttacagttgacacttctttgggtatttgggttgttttcagcttattgctactaaatggtgctgctaataaacattcttgttcacaaaaaaaaaaaa

SEQ ID NO: 213971 - DNA, 496 bp, Homo sapiens
tcttgatggcaggtatggagtacttaagtctttgcatttgtcaaagctagaaaagccataaacttgaaatctgtgcattacactgcatataaataatactttaaataattttaatgtttgtgcaacacttaccatgaaacatgttaaaagacaggctgggagaagatatttgccatctgcccatctaacaaggtattgtggagattatatacataaacataaaatgtatgctaacaacagtataaaagatggtagggataacctgttgtaaggttatcacaccatatgtgaagtggcataatttatgtagactgttagaaaattaaagatgtatattgtaaaactgaggacaaccatttaaaattatatgtaactagtaagagaatggtgaaaaatagaaattactaagaaatagaatactaatataaaaatagaattaaaaaaaaaaacctcaacctcaaagcaggcagttggggagagagagagagagagagag

SEQ ID NO: 213972 - DNA, 290 bp, Homo sapiens
atcctgtttctgcacttcatgagcagcatgaacttacccttcattcataagcgtgctctgtaccaataataaccacaatttcccctagccaggcattacagtaaatttaagtaattacctgtttcagattgtcatagtcctagtctttgggggtaagggttgggaatcactttcagaatctgatgaaagttaatgatctttcttttttttggtagagatggggttctcactatgttgccaggctggtcttgaactcctgggctcaagcaatcttcctgtttcaacctccc

SEQ ID NO: 213973 - DNA, 623 bp, Homo sapiens
ctcaacccttatagcacaatagatcatttctgcagtctatgggaatgtaatctgctggttttagtacagattagtttttcacattagctgtaagagcttatttttatttcattatccatacttgtcaataccagttatctgaactctatggtaaaaattaataaaattatccatagttgttttttataataagttattaatataaactagcaactttgttgaaatactgagtaaactttaaatgatgatgaataccatatttttcagttagtataaatcattagtaaattattgagtatacttaagtaccatatttgtgacatgaaagatattttccattttgtcaaattgggttttatatatatattatgtattagaattgaattttgaattaagttctctttgtaaaaaattagctgagaaagaaaggggagtttaagcctttgcatgttgacattgttccttccccgcgcctttaagattgtgtcttattgcagctgccttctttctttaacctgtgctactctaagactcttatgctcaaacccccatcaacttttatcttttttaattagtctgttaacactcatttatagaccaaaataaaagatattattaatagc

SEQ ID NO: 213974 - DNA, 414 bp, Homo sapiens
atccagtagtgtgttctctttatccatttgtatagttaagagttaaagtttggggataagataactaaattattttatataaagtgttcatcaaacacttcagagggcccacgggatctctggaaattcaggcttcaccgttttcatcactgtcttctccgaggttacccagggagcctaaaggagctgtggaaagcgaatgggtctcttgactctcagtccacgatgcatgtatccttgcctgtttcctgatatgctgctggatggtttgcatttctgtctcagagctgtctactgtgtacgtagagttacagaacttttaactgtttttttttaaatagggcaatgagaaaagttcaagtaatagcatctactcatttatcagggtgacctttttatttaaatggacatgtc

SEQ ID NO: 213975 - DNA, 382 bp, Homo sapiens
ggtaggggtgggagtgggggttagttctgacttccattaggtaatttggtatctgactctgggcagagtatctgacgttttggaactttaagtttcttatctataaaatagagataataaaataaaggttaccttgagaattgaacgagagaatgtatgtaaaatccctagacctcaaacattaacatgtttaatgtatacctactattgttgacagtataataggcatttattctacttttatcaaatcagtttaatttgtttttctttgttttttcagtttgttttagtcagtagatcttaaagttcttattttatgccagggctttactaggtaatttctctgagcatgtctttgtgttgaaataagaaagtgttggac

SEQ ID NO: 213976 - DNA, 476 bp, Homo sapiens
ttacattttggcatgattttgcagcggctggtactggttgttcctttccatgtttagcgcttccttcgggagctcttgtagggcaggcctgctggtgacaaaatctctcagcatttgcttgtctgtaaagtattttatttctccttcacttatgaagcttagtttgactggatatgaaattcggggttgaaaattcttttctttaagaatgttgaatattgaatgcctacttattctttagagctcagcaaagtggtcactgctctaaggatgcctttcctaatctctctgactaggtcaaaaacacctaatataatcttttgttacatcacctatctctttgtagtatttataaaatttggtaattatttatttttatttgtttttatgttcctctgtgaaacagtatttgtttgtatcccagtggctagcacaaagcctggaacaataggataatcatatttcttgaaggaccc

SEQ ID NO: 213977 - DNA, 174 bp, Homo sapiens
tgtgggtccaggagacaggctggcagccacctgtctgtgccttgaggactgtaagggtcatcaggacacgtgctgtgcacagcaggccactgttctccacacacccagtgctgttctttcttggaccatggcagctgtgagtcagcgcaccgtgtagtttgtgcatccttgtga

SEQ ID NO: 213978 - DNA, 660 bp, Homo sapiens
gacagaagggacttgccttgcctcaggttagactttggacttggacatttaggttaatgctggaatgagttaagactttgggagactgctggaaagacatgactgcattttgaaatgtgagaagaacatgagatttgggagaggcaatgtggtttcgctctgtgtccccactcaaatctcatcttgaattgtaatccacatgtgtcaggaaaggggcttggtgctaggtgattaaatcatgggggtggactttccccttactgttcttgtgataatgagtgagttgtcatgagatatggttatttgaaagtgtgtggcacagctcctttctctaactttctcttgctctctcatggtaaaatatgcttctttccctttcatcttctaccatgattgtaagttacctgaggcttcccagtcatgcttcctgttaaacctgtgagttatttgttatttttttcccttcaaactataggtttagttcttgttttttgtagttccttgaaatgtgatgttaggtttttaattactgatctttctacttttttgacgtaggtatttaatgctaaaaacgtcccttttagcactgcttttgctgtatcccacaggtgttggtatattgtgttgtcaatttaactcacagagaaaaattttaaaatt

SEQ ID NO: 213979 - DNA, 353 bp, Homo sapiens
tagttggggggtcaaagagtgaaaagaggctgcttgggtgggataggattgggctcgctgagaggacaggggttgggggtttgggaaagagtgtggactctgtagactgaggggagagttagacgtttcccctgtgtaggctcgtcttgttgatatgagaaggaagaaagagggctggcgcttcccttttcttcacactctgtgtgggggtcctgaaggaagcaggtggcctgtgttacttctgaatgttgtatcaggtgtttttgtttgtttcctatccttgcttgacaaatgagctggagtgtccaccgtaagcagtaaactagtccgtcctgcggttttctctgtggtta

SEQ ID NO: 213980 - DNA, 407 bp, Homo sapiens
ttaagtgtgcaatagcattgtgtctttaaaaaatactttttgctaaaaaaatgctagcaattagcagtcacctaagccttcagcaagtcttgatctttttgctggtgaaaggtcttgcctcgatgatgatggctgctgactgatcagggaggttgttgctgaaggctggggtagctgtggcaatttctcaaaacgacaagaacgaagtttgccgcatctgttgactcttcctttcacaatatttttctgtagcatgtgatgctgtttgacagcattttactcacagtagaacttctttcagaaattggtatcagtcctctcaaaccctgctgatactttatcaactaagtttatgtaatattctaaatggtttttgtcatttcatcagtgttcacagtatcttcacc

SEQ ID NO: 213981 - DNA, 243 bp, Homo sapiens
agtgggtcctggggaaggagtgacctaagtgtgaaccaggagtgacgcccaccaccaaagacctttcatagaacagtgaagtgttaagagcaagcattccaggaagaagactgcctgggttcaaatgctagctcggcatttacaagctatgtgacccagggcaagccacttaacttatctgggcatcagtatcctcaaatgaaaaaggggagcaataactagtttgtacatttcagggactga

SEQ ID NO: 213982 - DNA, 487 bp, Homo sapiens
tgttatctttttgaagcatttcatccaattcttattaggctaagattctgataagatcattggtcagctataacctatggctgttagattttaaagaggcaagactttcactatttggtcttggttttagttttttcctctctataaagagtttaccttgttgtgtttctgtggatacataatgactcagatacatgcgcgacatgagacaactagagaaaatggatgaggctaataataataaacaaataaacccaacaaagaaatatgacttggttccatcccttttcaaatatgtgctcagtggcattgtctttttgtttgtttgtttgtttgtttgagacagtgtctcactctgttgcccaggctggaggactatggcacaatcacagctcattgcagccttgacctcctgggctcaagtgatcctctcagctcagccttctgagtacctgggactacaggtgtgtgccaccatgtccagctt

SEQ ID NO: 213983 - DNA, 366 bp, Homo sapiens
aaaggcattgcccctaaagctggggcccaaaaaaaaaacccccttccaaaaaaaaaaaaagccaggcgtagtggctattcacaggcatgagcatagtgcaccacagcctcgaactgcttgggctcaaacagtctttctacctcagcctcccaaggagctagggctacaggtgtgcaccactgttcctggcgcagagaggttttaagagaaaagcattttgaagtttatcctattgacatgtatgtagcaggatgccacttccagggattagtcctttcctccacccatctccaccccttcctgtcatcctctatgtcccactgtctctctccttctctccagttttggtcccatcttcctgctacc

SEQ ID NO: 213984 - DNA, 1087 bp, Homo sapiens
aaaggcattgcccctaaagctggggcccaaaaaaaaaacccccttccaaaaaaaaaaaaagccaggcgtagtggctattcacaggcatgagcatagtgcaccacagcctcgaactgcttgggctcaaacagtctttctacctcagcctcccaaggagctagggctacaggtgtgcaccactgttcctggcgcagagaggttttaagagaaaagcattttgaagtttatcctattgacatgtatgtagcaggatgccacttccagggattagtcctttcctccacccccacttcctaaatgattttatttgtaccctgagggccttttccccacttcccccacagacctgcgtgagtagacctcaggcaccaactgcacaactaactattggagaagcaaagattaagctccagcacagccactaggcaaaacctgggacacagggattctaatgtgaacttgcagagtaagattctctgcttctgagaaaacagctgtgtgggctgtgaagatgggagaggaggtttgagactccagttacctcagcaggagagcagccagtccctgtcactccaccttcatctgcagtgagtgatgttccagcagtgctggcctgggctgggctgtgcctgcggctccaatgccctcctgacaacccaggaagctgtcttactccattttgtgctgctataacagaacaccacagactgggtaacataattaacagaaatgtattggctcacagttctgaggctgggaggtccaagagctaaaggccagcatctggcaagggccttcttgctgcatgatagcacagcagaaggcgccacatggtagaacagtaaagagaggatgagaacgagagagaagtaaacatgggtcaaactcgtccttttataaggaacccactcccgagaagacaaacccactctggtgataacaggattaatccacagagtcctcttgccctaatcacctcttaaaagtcccacctcttgatactgttacaataggaatacacttcatcatgagttgtttgggagggaacagacatctaaaccacagctgagcccttcttacagcaaga

SEQ ID NO: 213985 - DNA, 293 bp, Homo sapiens
gcttgttaatgacagtgtgaataaacgagtatgactggctcaattctctgcacctgaggggaaaatagcaaaataaaggagtgacacaggaaagaaaacaaagaaaagaaaaaagtacttttgagtgggagtaaggggcattttccaagtgaaaataaaggggagaatgctggggagatgattccatacatgttcattataggaacagaagagacatatcctgatagtggattgaatgggggagagaagtgtgaagaataaatcctgggccaggcctggtggctcacacctgt

SEQ ID NO: 213986 - DNA, 411 bp, Homo sapiens
tgcagtggctcacgcctgtaatcccagcactttgggaggccgaggcaggcagatcacgaggtcaggagatcgagaccatcctggctaacatggtgaaacctaaaaagagacaaagaaagtaattatgtaataacaataagaggatataacaattgcaaatatatatgcattcaacacagaacagctatataaagcaagtattattagatctaaagggagagatacacaccaatacaataacagttggggacttcaataccccactctcagcattggacagatcatctagacagaaaatcaacacagaaataccggatttatactacattttacatttagattgcattttagaccaaatggacctaacagacatttacagaacattccatccaacaggtgtagaatacacat

SEQ ID NO: 213987 - DNA, 537 bp, Homo sapiens
gctgatagtgttcttcaagtattattaatgatttcacatctacttgttctgtcaattactgaaaaggggacattaaaatctacaactagaattgtgaaactgtctgtttctttatgcagttctgacaatttttccctctatattttgaggttttgttagtggatgcgtaaacatttaggatcattatgttctcttgatgaattaatacctttccattaaaaatgacctttgctatctctttgttattctttgctctgaaatctactttgtctgatttttaatataaccactcctactttgttttaattagtgttagtgtggtatattttttctcatccttttacttttaaccttttagtgtgtttatatttaaagtgagtttcttataggtagtatagagttgggtctatttgttttgtttttatccaatctgacagtcaatctctgtcttttaattgtgatgtttggatgactaatttttgataccattatagatatggttaggtttaaatctaccatcttgctattagtctttta

SEQ ID NO: 213988 - DNA, 861 bp, Homo sapiens
tgctgcagaccaggtgagagtggaatcactactggggatggaatttgcagaatctcagaaactagtcaggtcagagatgcgactactgagcagccattgcatcagtagcactagtgtgaggcagaatcatttgacttgttttacataccaacagcagaaaggaaaacctgtacctgtgcctgcatctgtgtaaagaggatccaaagataacctgttccaaggggcagggataaaagaactttgatgtttttgattaaattattttagaactctataaatgtctgaaatatcagataaagtatgtaaactcacccctactacaagcaggagatagtgaggtaatatacttaggctagagttctgggagctgagccaagaggtccgggttagagtgatggagagcacagtcctgctcagtaacagatatatcttggggtatgataaaaacagtcctttcgctggttcaaaacatgttctgtgataggaactcctaaataaattgactgtttcctgtgtacaaaactggcaataaacatatcaccagtctcctcttaaaaccagtaactcctctcttttattataagcagatcatcattccatctgagcaatatattatgacagtcaaaggaacccatcatgtactagtgatatagtcaaacttagaacataaaagttaacctaacacatgtttactgatacatacaattgctatcttgctttacagtaactagtcataaatagtaaggaaggtttaaaaaccaatgaaaaattcaactttttaattttacactaggtcccaaaggggcaaatctccttctcagaaactatccactcagatttgtatagctgtaaaaggctttt

SEQ ID NO: 213989 - DNA, 546 bp, Homo sapiens
ctctcaatctggggcatgactttgaagggaaggttgctaagcctcctaaatcccgatacacaccaatgccgtttccccactcatctggaaacctggtgggtcctgcccaaacgcctgtatgtcaattccacctcctgcttggcgacccaccatgcccacattttccactcaagcctttcagatctgctttgggcacctgaagacagagagaatcatctttcaagagtcagaaactttgcacgtgccattccctctgcttagaatgcttttccctttctcccaattgccttatcatcagcctgggaaaatatttatttcggctcctaaaatctcagatatcacttctccaggagctttcccagatgcctcacttgattccagaaggagctatcgccacttttgcctggcgagtacgttttcaccgttacacttatacgctatggcaatttattggtgatttgtctgtctcccctactcaatagtgaattattcatctatccctggaaacctggaactgctcaataaatgtatgtggcatgaatatac

SEQ ID NO: 213990 - DNA, 150 bp, Homo sapiens
ctttctttctttctttctttctttctttctttctttctttctttctctctctctttctctttctctttctttctctcctctctctttctctctccctctctctttctgtctctgtctttctcactttctttcctttctgtctgtcttgtc

SEQ ID NO: 213991 - DNA, 454 bp, Homo sapiens
atctgtggatttgtcctagttcagagtgatacattgaaattaattttataatccataacttaaagcagtattcttcagccatttttctcattattccctcctaaggagcatttttagacctgttttctccctaatggcctaatgggccttctccccttcagatattttaatactacagatatacagtatataataactatgttatcagtagggttgaactttggagggctacagaccattgtagtgtttaagatttccaactctccataaggaccacttttattccccttagggatattgccccagttgagaatgtatgatttaaagctgttaaggccaggcatgggggctcatgcccgtaatcccagcactttgggaggccgaggcaggaggattggttgaggccaggagttcaaaaccagtcttgggcaacatagtgagaccctgtttctac

SEQ ID NO: 213992 - DNA, 547 bp, Homo sapiens
tgtatagtggaggcttgttaagaaaaaaagccaactgttcataaagaaaagtggaagtctgggtagcagaaacagaaagcagaaaacaatggagagacatagcaggtggaatcacagagttgagtaatgcatccagcctagggagatcctcaagtgggaagaatctaagccaaaccctgggtacctgggatttcctgggatccacgtcactcaccctgtccattctctgataacgatgagaatatcactaacagtaaaaatgagaacaatttcctttcatagggcatatacggtgccctgggctttctacatttggtatttaacccctagcaccatcctttgagccagggactagagtcagatgggcccacagaggaagaaactgaggcccctagaggctgggttatctgcccacggtcacgcagcagcaagtggtagggcctggattcaaaccccagtgcttccacctgcgaagacagagaccaaaggccatctgaggcgggggcatgggaacccctctgcctggtttctccggggccaggggcac

SEQ ID NO: 213993 - DNA, 492 bp, Homo sapiens
caatgtcgtagttcatcagcctccgaaagcatcctttgctctctttccagaaaggaagagcatctctgccattcgtgtctcaaggacaagcgcttcagcctcgttctctgtgagctgatctgtggatcgcggcgtgtcgggcgacatggaggaagaaagaaaaactgctgagttacagaaaaatagaatacaggactcagtagtctttgaggatgtggctgtggactttacccaggaggaatgggctttgctggatcttgctcagagaaacctctacagagatgtgatgctggaaaacttccagaacctggcctcactagggtatccgctacacacaccccatctgatctcccagtgggaacaagaggaggacctgcagacagtgaagagagaacttatccagggcatctttatgggagagcaccgggaaggcaagaacccttgggagaaactgttttggttgggggaaaaaataaacttaaagtaaaaaac

SEQ ID NO: 213994 - DNA, 502 bp, Homo sapiens
tttatacattttagggagacataaggcatcaatcaatgcatgtaagatgtacactggttcaatctggaaaggtgggacaattcgaagtgggggggcttccaggtcataggtagattcaaagattttctgattaaaaacttggaattaataaaaggaagcatctgggttaagacaaagggttgcggaggccacggttcctattacgcagatgaagcctctggtagcaggcttcagagagaacagactgtaaatgtttcttactggacttaaaaaagtgccagactcttagtgaattctctcttggatcaggaagaacacctggactgggaagggggttctttatagaaagcagattttccctgcaagagacagctttgcagggccatttcaaaatatgtcaaagaaatgtattttggggtaaaacactttggtttcttttagggcctgctatccatcatgctggtattagtgctacaaagcatctttttgtcagtcttaaggt

SEQ ID NO: 213995 - DNA, 537 bp, Homo sapiens
ttttcagtaagtttatgatatttttataatttatagaaaataaatttaagaaatggctgggaaggaattcacatttacagaactgaccacagatttactcagtattgatgcttaaagacaagtttctgttagcaatgtattgaagaaaaaaattggaacttcagtgaacagattgttttctagtataagtggtggctttttagaggtgtactattttaattttgtataatttatatataagccaatgcagaaatatacatatttatcgatatttgagctaaaaatatttatattttattttggaacaggttttatggacttaaactaggccctgcagatagctagaatctagataggcaaaggagagaagtttttctctagtgcaagtaaatagcatgggcaaaagcttggagaagaaaaaaatgtgtaatatatttgggagactttgtagaagctagcagtattgaaggtttgtactggtgagcttttggtaggtaagtgagggctatattgcagagaaatttaaatcccagaact

SEQ ID NO: 213996 - DNA, 597 bp, Homo sapiens
ttgaagtagtgtgatgttgaagaagaatttgtgatatgttcaccacatatgctttagagatattctacatctaaatatcgctgggagttagagttgggagagatttgctctagaagcaacatcattggtggtgacaccttgtataatgaattagaaaggactatagaaaagtagagtcacctagaaatggttttaactgggttttaccagttagaactctgtgatttggaatatgttatttaacttctctgggcctccgtgttctcaaatataaaattgctgtgatgatccctacgttataggattgttgtgaggctttgtgaaggagggaacacatgtaaagagtttagcacaaggctggacacatagtcaggctcaacaaatggcgatggtagttgtttcctaagcaattctatactacagagaacattctcataaaaggctgttcacaggcgagcttaggccttcagtccttcaaatagacactaacacgagcacctgctttgcatgtagcattgtgctaggtgcaagagaatcagacatgtaaaacaaaatccctgctctaatgttcatagtgagtagaagataaaaacaagt

SEQ ID NO: 213997 - DNA, 569 bp, Homo sapiens
tttgttgaccatctttggaaaaagtctatcagaaactgtttagtaaatgattattgaattaaactataacagttaattgattgtgagattttagaaatgattttttaggaacattttctaaaaaagaattcctagttaaaaaatacccatgtaagctgcccaaatgggaccttgcacacatgaagaattcaagagattgatatttactcaccaactcactgtgtaaaggagtggaaatgtgtttcctggcccacctttgggccagtgacttcacagggggcgtggcagggctcttccaggaccaagacctttcacttccctgtctcaggatagtattgtaataggcagtttagtgatttgggaattctccaccttgaaagcaacttctgaaagggaaggattagaaaaacaacacgtcattagacaggcatgacaacatgtgcctgtagtctcagctacttaggaggctgaggcaagaggatcacttgaacccaggagtttgaggctgcagtgagctctgactgtgctaccgcactcttagcctgggtgacagagcaagactctgtctc

SEQ ID NO: 213998 - DNA, 437 bp, Homo sapiens
ggcgatggcataggaggctttaggattaggtcatgagcctgagccccttatgatgggctagcacccttataaaagaggccccagaaaaaccctcgcccctgggtgaggacgcagagagaagccagccgtccatgaagcaggacactctcacagcacccagccacactgccccaacccagactccagcctccagaacagtgaggaatgttctgatgtgtccacaccactgcccacggacctgtgggagccgctggagcacccaggatgctctgtaggaatggcactgactccaggaacctggaagggcgagctcactggccatgtgggaggcgcctcatcaaatctgggcccatttttctatttgtcttttcattactgatttgtgagttcttcatatattctggacatttgatcttttaaattttaagtactgcaaa

SEQ ID NO: 213999 - DNA, 437 bp, Homo sapiens
ttaaaaggatggaaaatgcagcttaactgggaatcgtgtaaaaatactgatattagactatatgaaaatgtagagagtttattttttcccaaagtttgtgaactttttgctcaacactttctttttataaaatagatgaagctgaaaacatattgcagtaattgttttggattttagttttccttgactcctttaatccaaaaagagaaatgtgttatcaaaggaaggattattttcatttaaaaactaaaaaaaaatttgtactgttattgttggcccatgccttcagactggagttcagagtacagtcttctcattacaaactacttgggaggctgaggcaggagaatggtgtgaacctgggaggcagagcttgcagtgagccgagatcgcgccgctgggctccagcctaggcgacagagctagactccgtctca

SEQ ID NO: 214000 - DNA, 261 bp, Homo sapiens
tcataggaagacagtgattataattttagatgccagttgagaggtttttaagtgttatatattagggcaaatggaggtaacaagggttttttatttgagaagtaagtaagactgtcttgttagtggagctgacctcaaaaatccaaaaattgtatttttcttatataacaacatagtcaaaaattattaaaatatgaggcattctggtagaaatagagagcgtctcagttcttactggtaaacttaaatcagtctcttgtt

SEQ ID NO: 214001 - DNA, 633 bp, Homo sapiens
aaaatgtgcaagtggctttggaattgtgtagtaaatagagtctggaagtgtttttgaagcatattctagaaaagtttagattgtcttgaagaggctgttggtagaaatctggacattaaaggtgttctggtggggtctcagatggaaatgaagatcatgttttggacaccggagaaaaggcaaccctatttataaaataattgagagtttgatgatttggaaaattctcagctattcatatttcaaagaatgggaaagcatgttctggagagaaaacaccataggtgtgtctgaataaatttttgctacagagattaagcgtgtgactcatggatccaatcaactatctcagtagaaacggtcaccttggatgaaagatgatagaaatgaacaaagggcaggaaggctgttggactttttggttccacaaacagaaaatgggcagctagagctgcttggctagcaacctctgttagccttcaagaaaaaaataagaaaatttttaagggtggctcagatgccagtgggattttcaatgtctgggagggtgggatggttaccactgtggatcaagagggcagggccactgctattgaataccagaaggggatagggagccatctcagtgggttc

SEQ ID NO: 214002 - DNA, 671 bp, Homo sapiens
ctcgactctcttgggggcaccggagcgggcgcaggagaggcctgcggggtgcgtcccactcacagggatcctctttcagttcatttagataggtgccctttgggcccttgaaattcaacggctatgtgttcacgttcagcacgctcggctgagagctttcatttttagggcaaacgagccgagttaccggggaagcgagaggtggggcgctgcaagggagccggatgaggtgatacacgctggcgacacaatagcaggttgctctttgtgctaagactgacaccatgaggacacagatttgggggaagggggaatctctaggcaaaggctgttacagtcaaatctctgcgaacgattgtgatccgacagcggtgcaaaaggaaagagcgaatgcagtccacgccgcggaaatctaggggtagaggcaaggggggagggtattccccttgcagggaccgtccctgcatttccctctacactgagcagcgtggtcacctggtccttttcacctgtgcacaggtaacctcagactcgagtcagtgacactgctcaacgcacccatctcagctttcatcatcagtcctccacccccgccccacaacagcctaccctgcctccggctgggtttctgggcagaggccgaggcttagctcgttatcctcgcctcgcgt

SEQ ID NO: 214003 - DNA, 697 bp, Homo sapiens
ccacaacttaagagtaagaccaaaaagaaaaaaaaaagtaatggtaattaatccagaaatagtatagatgacataattagtacataaagacattaaagcagttaaaataactttattctgtgttgccaaaaagctgcagaaagtttgaccgtgctaagtcaataaataaatatatttaaaagaccaaaatcatatcctgagagagaaaatatcatattaaagtacatgaaaaataaaaattataaaatttattccatatgaaatattccagataaaaatattagtaattctgaaaatatagcatcataaactatacagactgtaacctagaaaaaaagaagaattaaaaaaaataaacagaggttcagtgaactgtgagacaaagcatgcaaagcaagtagcctaaggcatgtgcaattggattcccagaaaatagggtgtgggcagaaaatgccacaagaaataatggatatttttgcatattttattaaaactgtaaactctcagatccatgagctcaataaaatatgacataaactaaaacaaagtacatctttattgaattgcttaaaactggcattaaagaggaaattttaaaagcaatcagaaaaaaaaatacacaagacacagagagaaagaaattagaatgatagattacctctcatcagaaaaaatgcatggtggacagtaggaaaat

SEQ ID NO: 214004 - DNA, 398 bp, Homo sapiens
tggagtttcattcttcttgcccaggctggagtgcagtggggtgatctcggctcactacaacctccgcttcccaggttcaagtgattctcctgcctcagccgcctgagtagctgggattacaggcacatgccaccacatctggctaatttgtattcttagcagagacggggtttctccatgttggtcagattggtctcaaactcctgacctcaggtgatcctcccgtctcggcctcccaaagtgctgggattacaggcgtgagccactgcacccaacctctcattgatactaatgttcactttgcctgagaaagaagagaggcaacatttgttactggaaaatttagtatctcattaatagatatatctttatatctgtttatccattagacaagagca

SEQ ID NO: 214005 - DNA, 607 bp, Homo sapiens
tcatatgcatctatacatacatatatatgagacttaatacttcaatgagaaacactgaaataaaataacaaaagagcatttccactgtccatcagttgctaagtagccatgtgccccatctaatgtaatgtaatttatcatggaattttggtttaagctggacattaagaattgcaaataaatggcttttgcctaagattaatagtaacatattaatattgtttttcttccatctgcaaaagtaacattaatgaaaatcaaatgttaaaattctataattattagtaaagtgttttattaagtaccttatacatctggaattactctttagttctggaaacaatttacttagactcttctctacataagagtacgatttcatactatgatatagatttatgcaatataattgtttccttttgaattaataatatttgaatttgagctgcaagtttttaaaaaagtacttcaaaggctaattcatctttatggattaggcaaatagtctaatcaatttatggagaatgtatttggaatatgtaacagcaagtggcaggaagtactttagagttcaagactcatgtgcccatcactatgctagaagcac

SEQ ID NO: 214006 - DNA, 598 bp, Homo sapiens
aattcgcggccgcgtcgacgagaagacgacagaagggggaggcagtgtcagttcagcaggccttgcagaccatccttaggtctcctggcagcccaggcctggtggcacctatcagcagcctctgaatggccaaagggtttggaatctcagtggctgaccaagtacttgagtgagagccggtgtgggtggggcccggaaacaaaggttaatgccgccagcgggcccttccaacacagaatgacagaacacatgcccttggcgtgtctgactttggatagcaccctatcgtgagccagcctagacgagtcaccatgagtgacagtcccggctgtggttggggttgaccccgtggacaggagtgtttgacacagattgtctgaacagctgagaagtgaccaagcccacatttgtatcagcagggcacctagctattctttcaggctcttagcacagggctcgttgtttcagaaataggctccagccaggcatggtggctcatcctgtaattccagcactttgggaggccaaagtgggtgggcgcatcagctgaggtcaggagttcgagaccagcctgggcacatggcacccatctctgtct

SEQ ID NO: 214007 - DNA, 338 bp, Homo sapiens
tcaatgagaatacccattatggtggactggacaagtatagaattcctgttgggaagccagtattgcaaaggggagacatgatagactcccatttagaaattgactgtttaatcctaaatatactttgaatttattgtttgttacctgttcaaagtttgtcactacccattcttaatttggagagctccagcaccaaataacccttctgtgtccttagctatcaaatgacctacagaaagtcatggaattgttgtgatggtgtctgctgtatataagtatcctatgtcttatgtcttcagctgacctgcttagtagtccgtaatttcatctccttattc

SEQ ID NO: 214008 - DNA, 1887 bp, Homo sapiens
caaaaatgaaaagccaggtaaagtttccaagggctgtaagaagcctgcaaaacaaaatgggaagaaagcaacctccaaagtgccctctgctcctcagtttgttcactccaatgatcatgccaatcgagaggctgaaataaagaagagggttgaggagatgagggagaagcagcaagctgcccaggagcaagaaagacaaaaacgcaggtctatcaagagctactgtgaggatatcctaagacgccaggaggagtttcagtgtaaggaagaagttttgcaggaattaaatatgtttcctcagctggatgacgaggccactatgaaggcttattacaaggagtccgtgaggtggtagaatactctgatgtgattctggaagtcctggatgccagagacccattaggctgctgctgctgcttccaaatgggggaggctatcctatgggcagaaggcaacaagaagctggtcctggtcttgaaaaagattgacctggaccccaaggaggttgtgaagtggctggattaccttcggaatgagttgccaactgtggctttcaaggccaggacccagcatcaggtcagctttggagctgaaaacctcatgagggttctggggaactattgctgccttggtgaaatgcgcacccacatccatatggacattgtaggccttcccaatattgggaaaagcagcctgattaaaagcctgaagcacagccatgcatgcagtgtgggagccattcctggggtcacgaaattcatgcaggaggtctacctggacaagttcatccggctgctggatgctccagccattgttccagggcccagctcagaggtgggcaccatcctgcataactgcatccacatctagagactggcagaccccatgaccccagtggagaccatcttgcagtgctgcaacctggaggagatttccaactattaccttctctctgggtaccagactactgagcactttctgacagcagtggcccaccatttggggaagaagagagacttacacagtcaggagcaggcagccaaaactgtcctagctgactgggtgagcgggaagatcagcttctatagaccaccaccacccactcacactctgcctgcccatctcagtgctgagaattaaggaaatgaccaagttctttgacatcgaggataccgagcaagtcaatgaagacaccatggaatgcttggccactggagaatctgatgagctattgggtgacacagacccactcaaaatggagatcaagttgctccattctccgatgatggaaatagcagatgccattgaagataaagctactgtatataagattggagatctcactggttattgcaccaatccgaatcgtcatcagatggggtgggctaaactcaatgtagaccaccaccctaaaaaaaaacagtaaggtggatgtgtgcccagtggactgctgcccagtactgcagaggatcatggagatggaccccctacaacagggccaggctctagcatcctccctgaagagtaagaatttacagaaatgtgcagataaaatccccagggagctgtctgattccatgatgtctgccctccacctctctggcaatgctgatggcagtgttggtaactaattgactgatctcacttcccttccgatccaagcaccagttccagtgggacgggagattaccagtgaaatagtttggttctccctgaagcatctgcatattaaaagaacccttccccaactatgtgtctttgcctcccactgttctctccactctctccaggaaaaagagtcccaagaggctggagctgacaaacccaataccctttatttaacccctactctgttttacaacagaaataaaagaagtatcagcagga

SEQ ID NO: 214009 - DNA, 852 bp, Homo sapiens
gagtgtcaactgtcaactggtggagataaggaggaagggcttccaggcctgggggacataaaaacaagaaggtgggaataaatatgccctgtttgggctaacaaatattccatttttgactaaaggcaaagaggcttcaccttaagggagaagcaggaagagagactgcagggtttcccaaactttattatattctgctacagtaggtctggagggataagggaatttggggggaggagggtagtgcgcaggagtgtcctttttaaaattttttttctcattttaaaatagaagtaatccatgtaccttatttagaaaactcaaatcagtaaagtcaaatcactacagacggactcgtgaaaagcaaaagtctactgccccacacatccccacccccactctcactttttgccaccacttttagttatttattctgatttttatctccatacctacataatatgtgggcatttaaaaaatcattactttcagacattacccattgatgtcctgctatgagaaatgaggatttagatcatttacagcaagttcaactccgtcctgcttctagtatagtttagtttttctgtgggttattgagtaatgcctttatttcctgttccatgaactacagacaatatttctaaactagaactttgttagatgagagaataccctttcctatagcccccttccgcaccattaacctcccaacttctgtcatctggtcttttatattgtcaaaacataatgttaaattctgttctgtaatcataattgagtttttttatgtttgtctatagttgggttctaaaagttgaaaagcaataaactgctgttaatatgaaaaaa

SEQ ID NO: 214010 - DNA, 729 bp, Homo sapiens
gagtgtcaactgtcaactggtggagataaggaggaagggcttccaggcctgggggacataaaaacaagaaggtgggaataaatatgccctgtttgggctaacaaatattccatttttgactaaaggcaaagaggcttcaccttaagggagaagcaggaagagagactgcagggtttcccaaactttattatattctgctacagtaggtctggagggataagggaatttggggggaggagggtagtgcgcaggagtgtcctttttaaaattttttttctcattttaaaatagaagtaatccatgtaccttatttagaaaactcaaatcagtaaagtcaaatcactacagacggactcgtgaaaagcaaaagtctactgccccacacatccccacccccactctcactttttgccaccacttttagttatttattctgatttttatctccatacctacataatatgtgggcatttaaaaaatcattactttcagacattacccattgatgtcctgctatgagaaatgaggatttagatcatttacagcaagttcaactccgtcctgcttctagtatagtttagtttttctgtgggttattgagtaatgcctttatattgtcaaaacataatgttaaattctgttctgtaatcataattgagtttttttatgtttgtctatagttgggttctaaaagttgaaaagcaataaactgctgttaatatgaaaaaa

SEQ ID NO: 214011 - DNA, 2202 bp, Homo sapiens
atttcgttgatgctttgcgtccaaaccaaatcgttatgcttttgcatacattagggctttataaagaacaacagcgacatctgcatgtgccgcagtgccaaggagataggaaaaataccgaaaacaaaactctgtattggcttggaggctgtctgactctctgtctccctagcagcccctgacaccaccatggataggagtaattgtacagtgtaatcacatcaggcctcatctgcatattcataacagagacaaagctttggaggataaggggggagccggggtaatttaaatataaagcagcatctcatttccaaatcaagttgtgccagttagactgtgcaccaggactcagtattaagccaacattgttttacagtttggaaattggagtgaagaagatggagaagagactcactaaagagggggtgatactacattttcattcttaactgaggaaaaacaaagcaagacaacaacaacggcgacagaataaaaatgaagtaatatttgaagagtcaccagtagtggctaaccagctgctgttttaccaggaatgaaatagcccattgagggagctttaaaagcccccaattaatatgttgtgcatgtataagatctacaaagaactcactgtattctttctctccccaccaagtccccccctccccaagtactcacatattccctaaccaccacctttctgtcctgtcgggtgcagggggaaaagatcagagctacaaaataattgactaattgcttcaaaagtaacaacatccctcttcaaaaagaaaggacaaaaacaaacacatacaaaaaggtgactgttcattaatgaagggataaattaccgatggcttcttcattctctttagttcattaccccccaaaagaaacaaatataatccacgtgttaatatttcttgtcttcgttttctttgtttctaatatgatgctgtttattatatatttttaagtgttggtatttgtagaagcctctgctactgcattccccaaagagctactagtttcagcccactggagtttatattcctttaattgtctagtgcaggaacatttctgctgttttgtaaaatacactgctctgcaggaattagaagaatccaaggttgtatccaacttcaaaggtttccaagtcataatgattttagcaaaagtagaagacagatcatggaacaagtccccgtttgaagataagcatcatagggacctttttttcttccctctctccccaactttgtacttctcctggttctgaatgcccctcactaacacagtttaatgatatgcaaatgaaatatgcataaaaccattctactgtatgatgattaaacactggagacattaacagcggaggcttcactctgtgtaataatccttcccgaccatccactttgattgcagagttatggaaacccatagcagttggcagagagagcgaaagagagaaggaaggaaagacgcagggacacatcacccatctcggtgcttctcccactgcaggagaggtccccccctttgtactgcgttcctattgctgtcttttgtaatccatccatgcagtcgcaccagagcgattaacggaaaaaacctcttttctcttaatgtttcaaagctcattagccaaacgattattcctcattaacagcgaaagctcattcattaaaaggaagaatatgcccaaaagatgccagcgcagctaatcctgagtcccgtaactgggctgtaaatcccatactacttgtatattccatgcaaaagggacacgcgccaatccacatttttttttaagaaagaaaaagaaaacagtttatgtgttttgtaaaatccacaagagcagcaattaatattcccattgaatcactttatttttttgtctctcccttttgtttccagcgcctgcccctggctcagcgcccggtgccaacagaacacctttcaggatccacagcaacgcagacaacgtaagtaccagccgttccctgaaacccttttgcagattttttaaaaacaaccacctaaaacatagagagagagagacaagcctctttccccttcttctcccctgcgttatgccaccagtgtttcctcagtagccccttccaaatcgctctgccttcaagtttgtgcatgtctgtgtggcatccctcctcctccttcactcccatagtggatcttgta

SEQ ID NO: 214012 - DNA, 872 bp, Homo sapiens
ctctagatctcgtatttgaatttgtggcgcttggtgtccgcgagttgccgaatgaagctgagcgtctcagtggaaccagggatctcagggaggggaaggtataaaattttcaaatggaggagtatacctgaacctaatcatggatgtgattttatgtaagtaatatgtgagatacagataagctgattctaaaacttacaagaatggcaaagaaacaagaagagcttaaactgcaatcatcaacagagaagctttctgcaaccaaagtgaagactgaagccttaggctatggcagaagttgggcgcctgaagtacacgtggaaatatgccaactgaacattggactaccacgtcaagggtctcctacccctgggccatggatcaataccagtctgtgacctgttaggaaccggtagcaggagcgcctgcccctggctcagcgcccggtgccaacagaacacctttcaggatccacagcaacgcagacaacattttaaagcacctgatggatttggaaaatatttaatgaagacaatgatgctgacatctcaagttaaaaggttctacagagaaggcaaagattttgaaggcacaggagactatcatagatattcacaacggcatctccctaaaggatttgaaagctttgcatcaaccaaaggaaaagcaccagtgagagtcaagatacagttccagacagatgtaattggttaagataagatcatactggatgtggatgggtcctagatctgactgctgatatccttataagaagaagaaaggacacgcggagactacagtgatgttgccacaagccaagaaatgccaagaatttcgggagccaccagaagatggaagaggcagggaaaaat

SEQ ID NO: 214013 - DNA, 698 bp, Homo sapiens
  misc_feature (654)..(654): n is a, c, g, or t
ctctagatctcgtatttgaatttgtggcgcttggtgtccgcgagttgccgaatgaagctgagcgtctcagtggaaccagggatctcagggaggggaaggtataaaattttcaaatggaggagtatacctgaacctaatcatggatgtgattttatgtaagtaatatgtgagatacagataagctgattctaaaacttacaagaatggcaaagaaacaagaagagcttaaactgcaatcatcaacagagaagctttctgcaaccaaagtgaagactgaagccttaggctatggcagaagttgggcgcctgaagtacacgtggaaatatgccaactgaacattggactaccacgtcaagggtctcctacccctgggccatggatcaataccagtctgtgacctgttaggaaccggtagcaggaggtgagtagcagcctagcgagcactactgcctaagctccacctcctgtcagatcagtagtgacatgagattttcataggagcagaaaccctattgtgaactccaaacacaagggatctaggttatgcactacttatgagaatctaatgcctgatgatctgaggtggaacagtttcatcctgaaaccaccgcccccatgtgtggaaaaattgtcttccacctggtccaaatggncggaatatacccagcatttaatattgcatggtatattggtatat

SEQ ID NO: 214014 - DNA, 525 bp, Homo sapiens
ctctagatctcgtatttgaatttgtggcgcttggtgtccgcgagttgccgaatgaagctgagcgtctcagtggaaccagggatctcagggcaatcatcaacagagaagctttctgcaaccaaagtgaagactgaagccttaggctatggcagaagttgggcgcctgaagtacacgtggaaatatgccaactgaacattggactaccacgtcaagggtctcctacccctgggccatggatcaataccagtctgtgacctgttaggaaccggtagcaggaggagtgcgttgccagggtaacggaatgtaagcaggggaacagcaccttgcagatcacaaaggcaaatctctggaaagaaatttcactgagtttctcttttccttaccagtgtaataacaactcgtattttccctgcactatttaatagtctcacataaacattctttcccatttcccttttctgtatctgtttaaacatggacaatagcataaatctgaaactgtcaagctcagtgagctaagcaaa

SEQ ID NO: 214015 - DNA, 1958 bp, Homo sapiens
ctctagatctcgtatttgaatttgtggcgcttggtgtccgcgagttgccgaatgaagctgagcgtctcagtggaaccagggatctcagggaggggaaggtataaaattttcaaatggaggagtatacctgaacctaatcatggatgtgattttatgtaagtaatatgtgagatacagataagctgattctaaaacttacaagaatggcaaagaaacaagaagagcttaaactgcaatcatcaacagagaagctttctgcaaccaaagtgaagactgaagccttaggctatggcagaagttgggcgcctgaagtacacgtggaaatatgccaactgaacattggactaccacgtcaagggtctcctacccctgggccatggatcaataccagtctgtgacctgttaggaaccggtagcaggaggtgagtagcagcctagcgagcactactgcctaagctccacctcctgtcagatcagtagtgacatgagattttcataggagcagaaaccctattgtgaactccaaacacaagggatctaggttatgcactacttatgagaatctaatgcctgatgatctgaggtggaacagtttcatcctgaaaccaccgcccccatgtgtggaaaaattgtcttccacaaaactggtccctggtaccaaaaaggtcagggaccactgctgtaggtaaacctgcactggtacaaaatgacagaaatatacacagtcatttattatagcattgttatattgttatattgttattatagcattgttgcatgaatacaggattggaaataaatcaaggatctagtaataagggactggttgaataaaccatggaacacacgcaaacacacacacacatatacaaaatagagctgtatatactggtatggagagatatacagaatgtatgaagctggtggggtgaagggaaacaatatatagagcagtgtttattgtttgttaccttttgtaggaagagtggaaaagtaagagtatatatttgtattttcttgtatttttgtaaagaaactggaaaaataaaaaaaaagcaactaataaaatggttacctataaggagttgacaggaaatatggtggcaggagtgggacaaagattcatctgttgcattttttgtataacattgactgtttaaaaactttttgttgtgtactttacacaaaagaagaaagaataggttaactaaccttgatacccatcacctagcctcaacaattatcaatgcatgagctatattacttcatccataattccacacccatttcccttcactaaattattttaaagtcagtgtcagacatcatattatttcatctgtatatatccgtaaatatttcactgtgtatcgctgacagataaaggctgttttttaagaaatcatatcacactaaaaattattgtaatttcttatgtctaatggaaatttaaataatatctaattagactacatttttgtgaccattaccttatatttcagctgccctgcttccttctttatttatagtgtctaagtttattgtgggtcttcttagtacaaattagcaataaattttctcttggaaataatcttaatctcagagaaaagcctcaagaatattacaaagaatttctgtatactcttcccccagatacccaaatttaccatatttgctttgtatcgtcctcacagtctgtctctatgtatgatattatatatttaattatatatgtgttatgtttttctgaaccatttaagggtaagttgcagacataacgcctctttcccccaaaatacgttcatttgtattttctaagaatattctgatatataaccacaggggaaattaacatgatacaatactattatgaaatctacaaatttgattcatattacacctttttttcccttgtatttctttgcccttacaggaaataaataaattttttttctgta

SEQ ID NO: 214016 - DNA, 419 bp, Homo sapiens
agagaaggcctgcgtagagggaggatcccctgatggtgcccacttctccgggggtcccaggtggcgaagggagcagatgcaaagaggtggagggaaagggcctgcaggtgccacagggacaaaccagcctaatttaggatcagagaagtaagaattttaattgagttttaatagtgtctggcccttcgttctgaaatcctggtgtgcgaggctgggggagggtaggtgcatgtgaggaagggcgagccggtggccaggatgatccctgccctcgggcccagacttcaaggagatggggaacaggctgtggggtcccaatgtgcagagcagctaacatgggacaggcaagtctaagaagacagcctggaggaggtagcatttgagctgagccttggaaggcaggtggaatttccaaagat

SEQ ID NO: 214017 - DNA, 119 bp, Homo sapiens
caagtgatcctcccaccttggcctcccagagtgctggattatagtcatgaaccaccatggccggccctgaaaactacttttctacttcccttatggtggccacccttctcatcttcatg

SEQ ID NO: 214018 - DNA, 525 bp, Homo sapiens
agtattccttttgtccaaagtctttcacaatttttactgacagtggcttgcaaggctgtgcggtcttgctctagctctccatcctcctcatctggtaatatcctctttgtctgtactccatccattctggaatttgactcccaaacatttttttctctccttgttctcagagctttaacacttgttatcccctttttgtggaacatttcttcctgtactttttgtttttttgttttctacaggtctctgtttaaaagatcactttctcaaggcagcctctaggaaacactgactcacttagaacttcctttggtatattccaggacatcgttttagtaacactgattgttactaagttgtaattgcttgattactgcttgtactatcctttagtctgaaaaattataggaggacagggactgtctcttttctcatgaatctctctaaagctatattgaagaagctcaatatatatttataaatttattaaaatcttccttgaaggtttatatttatttattgttt

SEQ ID NO: 214019 - DNA, 338 bp, Homo sapiens
aaaaaatgagtaaacttatacatgatgtaaagcagaattattaaaacagatgaacggccaggggtgatggctagtgcctgtaatcccagcacttttggaggctgaggcaggcagataacctgaggtcgggagtttgagaccagcctgaccaacatggagaaaccccgtctccactaaaaatacaaaattagccaggcatggtggcacgtgcctgtagtcccagctactcgggaggctgagacaggagaatcgcttgaacccgggaggcggagattgcagtcagctgaaactgtgccattgcactccagcctgggcaacaagagcgaaactccatctca

SEQ ID NO: 214020 - DNA, 1056 bp, Homo sapiens
ccccaccctgcatcctgtggccccagacgtgaggtgccccctcccgcggggggtcctttctgccctccccaccctgcatcctgtggccccagatgtggggtgccccctccagcggggggtcctttctgtcctccccaccctgcatcctgtggccccagacgtgaggtgccccctcccgcggggggtcctttctgccctccccaccctgcatcctgtggccccagatgtggggtgccccctccagcggggggtgccccctccagcggggggtcctttctgccctccccaccctgcatcctgtggccccagatgtggggtgccccctccagcggggggtcctttctgtcctccccaccctgcatcctgtggccccagatgtgaggtgccccctccagcggggggtcctttctgccctccccaccctgcatcctgtggccccagatgggtgccccctccagcggggggtcctttctgtcctccccaccctgcatcctgtggccccagacgtggggtgccccctccagcggggggtcctttctgccctccccaccctgcatcctgtggtcccagatgtggggtgccccctccagcggggggtcctttctgtcctccccaccctgcatcctgtggccccagacgtgaggtgccccctccagcggggggtcctttctgccctccccaccctgcatcctgtggccccagatgtggggtgccccttcccgcgggggggcctttctgccctccccaccctgcatcctgtggccccagatgtggggtgccccctcacgtgggggtcctttctgccctcccctgccctccctactctccagacatttcctgcccctccccacctcaggtggcggctgctcagcagctggggtctggcccggtcccccatccctgcccatccccagcgatttttatcttggcttttggttttctgctgtatagtaggtgaaagtcatcttctcggtggagggggtgtggctggcagcccctggtcacttccagttcatctctcactgcctccttgatgaggaccaagggtcaataaat

SEQ ID NO: 214021 - DNA, 509 bp, Homo sapiens
aagataaaagtcagtttctccctcatatgaaggttcaagctagtctgaaggttttgactgcttacaaagctgtaaagtgccctggatgattgggaaatgcccatgttgttgggaaaggttttttagaaaggttattccccccatttacaaggtatagccctcattctgatgtgtcatgacagttgcctacattttcgttaagaaaggggctttggccgggtgcggtggctcacgcctgtaatcccacctctttgggaggccgaggcaggtggattacctgaggtcacgagttcgagaccagcctgaccaacatggagaaaccccatctctactaaaaatacaaaattagccaggtgtggtggcacatgcctgtaatcccagctgcttgggaggctgaggcaggagaatcattcgaacctgggaggtggaggttgcagtgagccgagatcatgccattgcactccagcctgggcaacaagagcgaaactccatctcaaaataaataaata

SEQ ID NO: 214022 - DNA, 551 bp, Homo sapiens
tgtttttgcttaatgttgagatcaggtagttctgaattttctgccttgtacttatgtcaaaaataattaagtcaaatttgcttcttgagtcttttaaagcatgtgctaaatttattttattagctcacacacactgtaagatagattcaatgaggtttatgtgatattacgttagtacataaaattgtctagttttacagactggttactctaatatctaaaagaaatcagctttttcaaatggcatgcctaagtcaaatgaataaagagaatggttttgtgatctttccttaccaagtgagaagaaataggatatttacttacttctaagtacatgaacaccaaatatgctttttaaaaaagtgttttataaatggtccagagaaagaatctaatgcacataataaatactttcaactaatgaggaaatttcaaaactgttcagtaatttgtgctctgggcttctcacatgatgaaagctgagtattctggaaagtagaacactgggactctaacattccaccctaacactctaaataaggctcctaaat

SEQ ID NO: 214023 - DNA, 544 bp, Homo sapiens
tgcaggaattacagccttacacggaaaaaaggcatatgctgttctgaaagaaagtgctgattgaaaatgtggacggtggagtgttcctatcaaaggacacaaagtattccagatgctcctagtgtcctttagtcttttccacagaaagataaggtcttcaagggagatttccccacggtaggaaggggatgagtggatggaatcttggtcattatcggtccagacacccatgaggggaagaactctgggcagagtcaaattttaaatggacctggcaaaaaactgaatggaattatgattttcccctcaaatcctttgtgatttcatctatatctcctgttgggactgcttactgacagagtggagggtatgcacttcttaactgctataagaactttctacagcaggggtcagcaaactatcaagggccaaacagtaaatattttagactttgcagaacatagggtctctgaggcatctacttaattctgctgctggagctcaaaacagccacagacaatatgtaaataaatgagcacgtctt

SEQ ID NO: 214024 - DNA, 483 bp, Homo sapiens
gtgagcctttgtgtggctgcagcccacctgctgattgaagggctggggagtcctggctcatctgtttcatgccttggtaccatggtagatgccttctgtgttccatgtagccaagccaaggttggaacactttttttggtgttatcctggaagatttcagttgttggctttctttttcttacttttcacatgtactcttttttcacatctacaaaaacctagagacaaaaaggactattgactgcaagtggttgcttatagttagacgatagtgtgcatgtgagagagtgatggagtgagaagagtaagagtcagcagccacactatggagaacctttggtcctattaagaaaattcaatttcagtccagaaataatggcgagacactgaaggatctgccagcccctgccattttggaactgttctgttggtgtgtgtgtgtgtgtgtgtgtgtgtgtgtgtgtgtttgtctgaattgcagtt

SEQ ID NO: 214025 - DNA, 119 bp, Homo sapiens
aaaaatatctctaggctccgaagctctcacaactcatccttgctccctacccttttgggaagcaattctcaaaacttgagatttatggtccagaaagctgatagtggctatcaagtttt

SEQ ID NO: 214026 - DNA, 696 bp, Homo sapiens
agggagcttcttgaatcttgttttggttatttttcccaccgggaaactgcccctaaatctggcatatatggcttttttgatagtgtattgatcacattcccttttaggacactttaggttgtctggagtttggagcccgtaggaatattgaagaagttagtgaagaaatgctatacagtcatttgttgattaatgaagggggataaggtctgagacatgtgtcgttaggtgatttattcattgtgcaaacaccatagagtgtatggtacttacacaaacctagagggtatagcctactaaacacctaggctacaaacttgtacagtgtgttactgtactgaatactgtcaacaattgtaacacaaatcaccaggcgataggaattttttagttctattgtaatcttatgaggctactctcatatatgcagcccctcattgaccaaaacatcattatgcagtgcatgaccatattgagagtattcgttttttatttactaaaaaatagtcaaaacttgaggaggaagagacagatgtcactagaaaaagggagaagtccggtaagggagaagtcagcttcctgaggtggaatcgtattacctttgggattaggacatttcattgtcattattcaccagtgtaaaacacttttacatttttctactattattactaaaaacatttttctactacttta

SEQ ID NO: 214027 - DNA, 502 bp, Homo sapiens
gtgcagtggcacaatctcggctcactgcaacatccacctcccaggttcaagtgattcttctgtctcagcctcccgagtagctgggattataggcacacaccaccatgcccagctaatttttgtatttttagtagagacaggctttcaccatcttggccaggctggtcttgagctcctgacctcatgatccacccacctcggcctcccaaagtgctggagttacaggtgtgagccactgcgccgagccaggtcacaactattttcatggcaaatactgttaatactgattcttatcactttgttgacatttagcactggtgcaaacccaagggttgctcaaacttactggttccttatcgctaatcaaggcagtgatactatactgtactagtgattattgtatttctttaccattatgcactcactgtttcttttaaaaagaaaaaagactttttttttaatgtccttgaatctgaaacattattttattaatagcccttaa

SEQ ID NO: 214028 - DNA, 410 bp, Homo sapiens
ataaataaaataataataaaatgaggcatgcctgtatctataaccattcatgtgaggtcagctggtatgttgcatatctcttttaagagttcgaagaagacaaattatgttaaatggaattgggatatggcaggcatattaaattgacatgtccaacacaaagacatggtctgtaaaagcaacacacacatatacaggcacacatgtcaggaaactaaatataaatatgtttgtgtattggtgtgtatagtttcaaattttgtagcactttggatttcagatttttggattaggaatgcccccaatccagaatactctaaaatctaaaattgagcacatgctgttggaaaacaatgccaataacttgctggatgcaggattgccacagaccttcaatttgttaaaaaaca

SEQ ID NO: 214029 - DNA, 276 bp, Homo sapiens
acatggttacagggtggtgaactcccaggtggaatggggcaggatcccagctacgtgccccccctgcattgcgggagggcaactgccctgccccgccggtggctagctcagagggtctacagtttacagttttagcgccaaacgcgccacaggaaatagtgcaaaataaaagggggaggagagatggaaggcagcggggtggccgagctccaagggccccggctgctcctcccctcctcgcccttcccccttctaccctctccgaaacagagaacc

SEQ ID NO: 214030 - DNA, 304 bp, Homo sapiens
acacccaatactgccacattcttcacatttgtagggtttctctccagcaggaattatcttatgtgtagtaaggtttaagtaccgtttaaaagcttttccacattctttagtaagggaagaggaccagtaaagccctttgccacattcttcacatttgtagaatttctcctcagtatgaattccaatatgaatgaccttatgtctactaaggtatgaggaccacttaaaagctttgccacatttggctgggtgcagtggctcaagcctgtaatctcaggaccttgggagggcagtattgggtgtg

SEQ ID NO: 214031 - DNA, 457 bp, Homo sapiens
tcaagtaggtgaatatgtatttctaacattatgttaacttgatgcactagtccttttatcattattatgtgttgttggaaaaactctcaaccatttttcctctgctgtggtgtcaacaccacaaacttcaacacagaaaacttccgagacccccaaatatgtgaggatttctccccacaagcaagcgagcgagcaagcaagcaagcaagcaagcagtcaattttgcaataatactagttgggtgtcttccagttcaattctgaccctgcctacgtggggatagtgtcacatcccacaggatgagggctcagttcccaagactgccccttccccgcttcagacaccattggcaagtccgggcctcaggaacttctgactgatcagcttcaagttggggcttccacaactcttggtttgggttcagttagttagaaacacttaatgttagagatagggt

SEQ ID NO: 214032 - DNA, 486 bp, Homo sapiens
taagaaacagagtctcgttgcccaggctggaagtacagtggctcgatctgggctcactgcaacctccacctcccaggttcaagtgattgtcctgcctcagcctcctgagtagctgggactacgggtgcatgccgcaacacctggctaatttcttttgtattttagtagagacagggtttcaccgtgttgcccaggctggtctcaaactcttgagctcaggcaatccgcccacctcgacctcccaaagtgctaggattacaggcatgagccaccatgcccggccaagttaaggctcttgagatggggaggttatcctggattatctgaccgggccccatataatcacaagggtccttatacggaaagagggattcatgagaattagagaagatataacaattaaagcagttattggagtgatgcagccatgggctaaggaatgtggacagcctctagaagctggaaaggcaaggaatggattctctc

SEQ ID NO: 214033 - DNA, 549 bp, Homo sapiens
atgctgcttataagaaaccaactttaaatgtaagatataagtagattaaaattaatagaacagaaaattatatactatgctcaacctaatcagaagaaaactagagtgctatattaaatcatatgaagtagatttcaaagcaagtaatattgctggagataaggaggaacatttcataataattaagggagtcatttcatcaagaagtattaaccgtcttagttatgcatctaataacaaaacaaaatatttgaagcaaaaactaatataaggaaaaatagacacatttacagttactattggacagttcaatatccatcttcaaataattgatacagcaattggagagaaattggtaaggttatatagcaacttgggcaatactatcagtcagcttgatctaactgacatttatggaacacgctacccaacagcataagaacacttatttttctcaaggtcacagatcatttatcacagtgtaccatatgttgagcaaaacaactccatgaattttaaaggatttaagtactgtaaaacattttctct

SEQ ID NO: 214034 - DNA, 559 bp, Homo sapiens
gaggtcactgcggtgagctgtgattgtgctactgtactccagcttaggcaacagtgtgagaccttctctcaaaatatagatatataatcttaatcacttctcaccatggttcaaacaattaatttaatctcatacctgcattagtcatttaactggtctccctgattccatcattgcttgtagtttatgtagcaccctgatcctcttcaattatctaaatcaaatcatatcacacttctgttcagagcccgacaatgactttccctctcagtaaaagacagtctttaaaatgctctgcaaggccttaggtgatcaagcctcctgatactgttccccgaaactcatttgctactgttcttagccacgctagcttacttgaatatactgggtccagttctaacttagagcttttgtactggcttttctctttggctgaaatattttatgtccttcaggtgttcacttaacttcatctcatgaggggtacactgattaccctatttaaaaatcaaaaccctccatttgtctccatacacacatttttcatctcgctgctctt

SEQ ID NO: 214035 - DNA, 262 bp, Homo sapiens
actgggtttgagcacatcaataggatttaataggtctccaccaaagtaatctctttgcccttccttgtgtgtttcctttttggttttctgttagaaacaaaacgaaaacagtgttttgtaaaacaccagattgtatttaccctttctttcctttcaatcaggaagaagctcctgttactgatagcagattgttttaggtgctttgtttttaggtgcttcctaaaccttccataaagcataaaggtgttttcatatttcacat

SEQ ID NO: 214036 - DNA, 444 bp, Homo sapiens
actgatatgagttggctgtgtccccacccaaaatctcatcttgaattgtaataatccccatgtgtcaagggcaggaccacgtggagacaattgaatcatggagctggtttccctcattctgttcccacgatagtgagttctcatgagatctgatggtttaggggcttccccctttcctgggctcttattctctctgctgccgccatgtgaagaaggatgtgtttgcgtctccttctgccatgattgttaagttttctgaggcctccccagccatgcaaaactgtgagtcaattaaacctcttttctttataaatcacccagtctttattagcagtgtgagaatggactaatacaagcaccaaattcagaacagtgtttacctagggaaagaaaaaaagaaatgggatctgaaaggcacagacagggagctttatatgtgactta

SEQ ID NO: 214037 - DNA, 597 bp, Homo sapiens
aaaagtaactcataagtcctcaaatagaagtcctttatactttggaaatttttctccctcccacttacttagacacctatcttgttatccatgggagcagctaacaatataggtggcctgctgacttggccaccactccctctgtctcggtaacagctgtctgtctagcctgtaggtgggctgtgaactccacgaggacagtgctcagagggtcttgtatagcaggtcagtgccctgctataccctggtgcctacagagggctggcacctagagagtcctcagcaggggtctgcgggtagagggagtgcatttgccagctaggactctgccactcctcatcttatgtgtagttattaaggagctggtccaacattaattacaatccatttctagggattaatccatcattttcttttcttcataaaggctgttcattggtttgaaatgaaagaagagtataggattttcttgtttgtctgaaaaaccccagctgctctgtgccaaaaagaagcatgatgcacaatacttgaggctgtttttttttttaatttgcctttcctcctccaccaaatggaaaggccctgtttcctgactcc

SEQ ID NO: 214038 - DNA, 1057 bp, Homo sapiens
atagaaaatttatttctgttaaagattgagttttgggaaatagaattttctgatttaagaaacaagggactatttccaagattaattcctcatagatcagtcatttttttcctcagaaggataacacctactgagaggcaggttctaactgtggcttagatccaaagatcctccctcatgcctccctagaggacctgtaaaggtgacttgtggaaagaacagatatgtctttatgtatgtaaagcaagtgatatctgatttcaaagaagacaaaaccaaaagcttatttttttaatgataaggaattcccttcaaaataattatagaactgatgtccctagcccttccagtatttgcattccaagtgtagttttcttgtcccacctagataagactaaagcagaaagttttgttgcatgtgcctccactttccagcagttgagcaagtatgtacctctctttacgctctcttttactccagctattgatctctgggtactgtgatccctgggtactgtgcttggcataaagtgtatgccgttttattttgtagcaattacttcacaaaactgcagagggcagcagagagctgctgatagatttataatatggacataagcttgccggagtgagagtcttggttttccccctgtttgtctgttgagcacatgcttaccataggattatttaaatatgagattattttttaaatgtatttcatgcaagtttttaactatttaataatgatagatggggtatacacttataagctcaaagtcaagtgtgtttatgttgtattcactgacctaaagtaaaagaaataccctactcagccactgcattgtagtctgctgaagagtggtttatttataagggactagagaagcactttctaacattttgccatgctacccaggattttaaattatatcagttgaagttctctagcttggatttttgggttttttggagggtggtttttttgttgtcaattaaaaaattatattcaagctacttctaatattttaagaaagtgaatcaatccatttgaagctct

SEQ ID NO: 214039 - DNA, 395 bp, Homo sapiens
gtctctgtctgtctcccaagctggagtgtagtggcgcgatcttggctcactgcaacctccacttccggggctcaagcgattctcctgccttagcctcccgagtagctgggactacaggcacgccccaccatgtaaaaatatatttttaaaaaattttatatttttattagagacggggttttaccatgttggccaggctggtttcaaagtcctgacctcaaatgacccgcccacctcggcctcccaaagtgctgggattataggcatgagccacctcgcctggccattgtgggtatgttgtgtcattttgtggctggtctttgtcttcccaggtagactgtaattaaacctaaggactttacctatttgtttctcacttctctcttcccagtaca

SEQ ID NO: 214040 - DNA, 258 bp, Homo sapiens
tcccttacgttccagcagggagtcaggaggaccaacagcccctgcgacatcgggctgcatggccacaaaataaaacaaaacaaatgtggccacatcagtgaaagaaatcactgaagccagtctggtgttggacagagaaaaatcactgaaaattgactgagccacttggaggtgttagttgacttcatgtatttatttatatccagcttgctcctaaaaggatacaaagtcacgtaaagactattcattcatgcacct

SEQ ID NO: 214041 - DNA, 331 bp, Homo sapiens
ctcccatcagacaggtctcttgcctcatccctcaaactcactcctcatttccccttaggtctatcttaaattaggcaaagatttcttaggtacaccaccaaaagtacaatagataaattaaaaactgatcaaaattaagagcttttgcccttctaaagatactgttgcaagaatgaaagccaccgggtgggagaaaatatttgcaaaacataactggccaagaacttgctccagaatatataagcaactctctaaactcagtaatagaaaacaacccaataaaaatgggcagaatatttcagtagtacttttactaaagatttctacatgg

SEQ ID NO: 214042 - DNA, 1230 bp, Homo sapiens
cacttttcagatgtctctctctctctctctctctaagagctgctctcctctctcctttcttctatctattaaattttccactccctaacccacccacatgtgattgtgtcctgaattcttggtgtgtgacgatgaaccccagggtgtataccccagacagcacagccacttcaccagcagggacagcagctgtcacatgaactggagatgaactggaggtgagtctgatgtctcggaattttgaggaaagtgggtagaaagttgccaagcaagctgaagagacaagcaaaagggatcatattccagaagaattcttagcaagaccacagtcagaacttcaatcaaggtgattgattggtctgaaagggggaatagaatgtaaataaaatacaaccatgagaaaccacatgtatgttgttgaaccttatctagacactaactgtgaaaaagccagcttggattattgatgaacgacattcagaaaaccacaattttgccatgcttatttagagaacagagacagtggtattatcagcctatagctcaattgtaaaattgggatgactagatgtcccgagactattctgttcctcggccctctcgacactcacctaagaagcttccaaatttaccacttctcagtcattgtaaggatgctgcatgtcataaggatgattatggaagattatgggcatgttctacatagagaacaagaaaagtcacaatattttcttttataaatttatattttggaatttatattagttcccctaactctaaataaccatgggaatattgacaaatttgattttccagaactttaaagctgaggctagacactaaccacagtgactttatctatgtagtagcacactctaccagctgggatgtctggataacaagttccccagattgcagcctccctccagcaccaagtaggattacgagtctgtttggtttcattttagctatgtagatttgtcaaattttgtcacctctggacttcagttttctcatatgtaaaatgatgcattggcctgaatgttttcggagaaccttcaatctctgtgagtctcttcactgaaaaaattgttgactttcttttttttattgttctgtttttcttttctatgtcaaaaaagcactatggtaaaagtctttcagtaaaacttgaaccttggggcttgttcctgagtttgacatgttaaacaaatgaaagaactgttttca

SEQ ID NO: 214043 - DNA, 183 bp, Homo sapiens
ataaaacctttaaagtcggtagtggaaagattaagtaggacttccaagaccactgaagatgttgtattttatcttgggatcagtgggaatcaattagagttttaattcaggggatatgcattacaaaagagatcactgggtccttgtgaggggaatgaatgagggagagacagtggggatagc

SEQ ID NO: 214044 - DNA, 164 bp, Homo sapiens
aataatttctgtcatatctgttgaactcacagatgtttggtgtggatatagtgtgaaccaaataaggacctttgtttcatgccagggtcagtagggcaaaggaaagtttctcagggaagacaaaattcaaaagaccatcacaacttgatattcaagaatggacc

SEQ ID NO: 214045 - DNA, 508 bp, Homo sapiens
gggctgcgggacagtgggtgccatttacctaagccaatcgccccggcagccaaaggccaagctgcatcacagcagcttacctctttctcccgcagactctctggaccatcacccaccttctctggagcccaaacatccaatcaaaccaggtcgtaaatatacaggtagtccccgcttatgatggggctatggcaggataaacctctttggagttgaaaatatcattaagtcaaaaatgcactttcaacttacgatgggtttgttgggacataacccaccatctgtcatactaaagatggtacaaactcttcctatagactcagccacttgtctcgctggggccagcatggcagcagggactggtcagattggggtcagagaatttttcctttaaacattaagtgctcaaggcagaaaagacaacatattgaaaacttggagagactgaaaaataaagcactagcatggctctagcattttaagcagcaaatcagatttttaaaaaata

SEQ ID NO: 214046 - DNA, 461 bp, Homo sapiens
gttgctgttcctgcctgagttcagggaggttccagggtaggatttagtagcagagggcatggagccatctcaatgtgttcagctctaggttgcttgactggctgccatcactttttgcctcctgctgacgtcacacacacatatcttccctgttgctcctggctggcaggagagctaagggcagctgcttccaggtgtgaccactgttgagccaagctcctgtcacagcccttattgccatgtagaagcagcttctactgaagttaagcccaaggtaacacagatcagccctctgtattacttctccagggttgccagctcattttaacccagactggtcaaaaattaatatcccatcatttcagcttgcaaagccattcaacactaggtcaatgtgaattcaatagaatttcatatcacttacaataaagactctggcttttttgaaagtgcatacagaa

SEQ ID NO: 214047 - DNA, 456 bp, Homo sapiens
taaatgaagagaatgatgactacttcatagcattgttctggaaatgaaatgagatgcactgcatatcacttttaaaaggcatttagtaagtagttgtcctcaacttttccctctcattttgtttctatatgtacaatttgaaagatgcagaattattttttaagttgttaaataatatcattttgtgtcggtgtgagaactgctggtttaaaaaacgttttcatatgtctcaccttatttgctgctgccacactaatttgagttaggtaagataattatttactattcttctttcagataaggaaattaaatctcagggagataaagagaagcaagtgtctagattcataatgccttcaacagcacagtagaaatgggagggaggtagtgacacatttcctgtgttgtggtgtttagtggagacacctcctccctgggttgtggtgtttagtggag

SEQ ID NO: 214048 - DNA, 692 bp, Homo sapiens
ccagtcctgagctgggtgtgaagttaggctggtgtctgaagtttcttccagtgttgtgagtccaagatgcagatcttgggtttgaatcctgtctctactctgcccgatttcatctctttgattcttagttttttcatctataaaagaaggactctttctggatagttgggagggctgaaggaatgtttgacacatcataggtgtttaaaatggcaactatagttttttttgtttgttttgtgtgtgtgtttttttcttaactttcattttaagttgcagggtacacgttcaggtttgttacataggtacacttgtgtcaagggagtttgttgtgcagattatttcatcacccaggtattaagtctagtacccattattaaagaaaatgtggtacgtatacgtcatggaatattatgcagccataaaaaggaaggagatcatgtcctttgcagggacatggatggagctggaggccaaatattatccttagcaaactaacacagggacacaaaactaaatactgtatattctcacttataagtgggagctaaatgatgaaaacacatggacacaaagaggggaacaacacacactgaggcctattggagggccgctacgagccgcctcccctctcccccctctctcctcaccctcgctcccctcttctccgcccctatcctcccttctttcct

SEQ ID NO: 214049 - DNA, 830 bp, Homo sapiens
ggcttcgtggagctcactcggtctgagaggtcggaggctgcgagtgtcgctgctgaaggctgtggtggaccaggctggatcgcggattctgagctacatcgcgggtttggtggtggatcttggatttgggggtggatcgcgggttgtgggggggatggcggatttggggctgggtgggggtggaaaggccacgaggagccgcggcggctcaggagcgggtggtgggcgtctgaaaagtcgccaccatgaggaagctcttcagcttcgggagacgcctgggccaggcgctcctggactccatggaccaagagtacgctggtcgggggtaccacatccgggactgggaactgcggaagatccacagggctgccatcaagggcgacgccgcggaggtggagcactgcctgacgcgcaggttccgggacttggacgcccgcgacagaaaagacaggactgttctacatttgacctgtgcccatggccgtgtggaagtggtcaccctcttgctgagcagaagatgccagatcaacatatatgatagactaaacaggacacctttaatgaaggctgtacactgccaggaagaggcttgtgccattattctcctggaacatggcgccaatccaaacattaaggatatctacagcaacactgctctccattatgctgtgtataataaggggacttcactggcagaaaaactgctttcccaccatgcaaatattgaagcactaaacgaggagggaaacactccacttttgtttgctataaattctaggagacagcaaattgtggaatttctgttgaagaaccaggcaaatttacatgcc

SEQ ID NO: 214050 - DNA, 710 bp, Homo sapiens
ggcttcgtggagctcactcggtctgagaggtcggaggctgcgagtgtcgctgctgaaggctgtggtggaccaggctggatcgcggattctgagctacatcgcgggtttggtggtggatcttggatttgggggtggatcgcgggttgtgggggggatggcggatttggggctgggtgggggtggaaaggccacgaggagccgcggcggctcaggagcgggtggtgggcgtctgaaaagtcgccaccatgaggaagctcttcagcttcgggagacgcctgggccaggcgctcctggactccatggaccaagagtacgctggtcgggggtaccacatccgggactgggaactgcggaagatccacagggctgccatcaagggcgacgccgcggaggtggagcactgcctgacgcgcaggttccgggacttggacgcccgcgacagaaaagacaggactgttctacatttgacctgtgcccatggccgtgtggaagtggtcaccctcttgctgagcagaagatgccagatcaacatatatgatagactaaacaggacacctttaatgaaggtatatagtagccaactttttcagcatgaaatggatttgatttaaatacatagaattaaaatgaatttatctcatttaaatataactagttggtgaaacctgtggaatatgtattttgaattcttagaatttatagtctagttt

SEQ ID NO: 214051 - DNA, 479 bp, Homo sapiens
ggctgccccccacccccggcccatgaatccaacactcttagagaagaggcagcagcacagggagtcagggaacccagatgctgggaagccgggtgacctgatggccacctcggaaaatgacagcctggcagatttgtgtgtaagagctcttccacccttgctggttggtacttgggaactctgatggcactatgcatggcatctctggcatactcacaccaagccctgtaaagctgtcagaggtggggtttatgggcctcatgctgcctcctagagcaactgtggccatagctagctgccctttatgagtttacaaagggctgtccccctcctcctccagggagcatgtctgagctggcgggcagcgggccaggggccaaggctggcgtgcaatgtctgggctgcctaacttttgccccacactcctatccaagctactgtggactcttctgccataaatgacagtttgtctccaagtg

SEQ ID NO: 214052 - DNA, 311 bp, Homo sapiens
cgcctctccccacttaggcagagctgggcatgatcacctagactagtactcccacacacaggagtcacacttacacagcagcagcagcttgtgtttacttctcatggcctgagaatcattggctggttcttctgtcttccacactagactgtaggttgcttgtggcctaggcagtgattttctctccagttctctggtacctgaccaagtgtgtgctgtgctaggtactcagtagatgtccctacggatgtgtgtgggcagagacagttttggtgatgtatagccacttacctttgaaacctttcagaaaa

SEQ ID NO: 214053 - DNA, 612 bp, Homo sapiens
ctatatatacctattaagcatattgattatatgattttcatttactgtgtccttatttttctgatgaatttgacaatttgagccaattttactcaatatacctactataattttggatttttcaatttacttttgaatataaaaacttttgattcatatattttgatgtgtgtaactgtatataagctcaagactactacatcttctggacagaataaaacttttactcctataaagcttccttagaaaaactcttctttgttttattttatgctctttatcctaaattccattttttccccataggattgccactcctgctttctttttgtttgcctggcatttttaactggaaatttcacttattcacattaattgtaatacataatatatgtgaatttattcttataatttttattttttgtttgttgtaggttcttattgcccttttcttcctctttcttggattaatcaattttctgggccgggcgcgttggctcacgcctgtaatcccagcactttgggaggccaaggcgggtggatcacgaggtcaggagatcgagaccatcatggctaacatggtgaaacctcgtctctattaaaaatacaaaa

SEQ ID NO: 214054 - DNA, 290 bp, Homo sapiens
tcccaagttgatcagactcagggaggctgactcactcttatcaagctcctcagagtctgactcgtaagctggaatgccaatgtcctccatctggggtctgcttttcctgccgtatttagatttgctgaggaaacataagaagcagagccaagagggatgaataatttaaagagaaatttcttatagaacctaggacctagtacattattccagccagaaacatgcatttctttttcattcaaaaacaaatttttctttttcttcccaggacagtgctggataaaactgcc

SEQ ID NO: 214055 - DNA, 354 bp, Homo sapiens
cattaatgttgaacataaatgatctaacttaaaagatacagattggcaaaatggacaaaaataatcacaaaccaaatgtctgctgtcttcaagagactcaccaaacacataacgattcttatagactcgaagttaaggggtagaaaaagatattccacacaaatggaaaccaaaagtgagcaggattaactattcttagataaaccagactttaaggcaacagcagtaaaaaaaaaaaaaaaaagacaaagaaggtcattgtgctaaaaggaaagtgtataatgctaaatgccaacatcaaaaagtcggaaagatcataagttggaaacctaatgtcataactcaaggaagtag

SEQ ID NO: 214056 - DNA, 220 bp, Homo sapiens
ggtaagctcaaaaaaatctgatagttcttgtgttcagtgccaactaacaagggttaaaaataattgaaccaagttttgacaatattaccttctactttcttcaaaaatactgggttgatgtcatctggtcccagtggtttatttattacccacttagtcaatcaagctttgaacatccaatgcatttaccaatagcagacctaaaacctttaagccatct

SEQ ID NO: 214057 - DNA, 490 bp, Homo sapiens
atgtgacagtttaagggaggttaccaagaaaaattcttccatacccaagacaattctcccactcacacttccatacaagcacacaaatgacctcatggtttttgaggaaggtcagctcatgtttcggagtctaataatgcctaaagcaagagcaaggaggggtgttgtggctgtcagaggcatgggaaaccacagcttgttcaggaatcctcaaagggcatgtgctggagcttttcaggattgaggaccagaatccacatggtcgaagacaatctcaattttgtatatctttgtagctttagggttttgaacactttagcttcccaggaagatacatgagaggaaaggttcgcaacaagtattgaatgaattaatgtatgaaatgaatgaattcaattgtttccccatccatgataagtacaaattacttcttcctcgaagacaacctgatgttgatgtttttgaggtcaggcagcccctttgtcattta

SEQ ID NO: 214058 - DNA, 662 bp, Homo sapiens
ctaatattttcactcagtctgttcaattaaatgggcgataggtcttccttgatcatagaaattgtttccactggtcatgggaattaaaacaaaatactcgtcaaatttaaacaaatttggagcagcacttaacaaaatttagatggactgccttccctagcacccatggtaatatttttatttgaaataattaatcaaaagttttttttatgattaactgtactcaaagtattcagcacacatggtagattttcaaaaggaaatcaaatctccatgtatttgataaatgtatatgcatttagtgctttaagagatttactgtataaagagttattcccataaaaatattttccccctttaaggaacttctctataaaatataaataaaaaatctaaggtagccaacatattatttatatacatttgtatatatataatatttccatatatataattttcatatatatgtatatatggatttccaaatatttcttactctaaatgagcactgtgagaaagatatgttagaaaaagggaagtattgccgggtgcagtggctcacgcctgtaatcccagcactttgagaagacaaggcgggtggatcacctgaggtcaggagtttgagaccagcctggccaacatggtgaaaccctgtctctact

SEQ ID NO: 214059 - DNA, 416 bp, Homo sapiens
catattattcaatgactaatacaaaatacggttctacctcctgtttgtggtaaagctactcatgggttttcctgtgaattcaccaccatataaattgtgataattttaggctggttttaatgttaattatgactttcaagagaacaactaaaagtttgcagtatgaaacgtggcccctgcaccagcaggaactgcagttaagttggctttcctttgaagtcagcacaaatgataactgtaaaacagtcagtttctctggcaggtctaatttgggatgtatattaaatagaaggtgcctttaaaaaataacaacttccattctatataaaggcttaatagctttctctagtcattagatgcaatttaaaacccagtaatacaatgcaatttaaaacccagtaataactttaatgatg

SEQ ID NO: 214060 - DNA, 731 bp, Homo sapiens
tgatttattttttcctttatttattttccccatcacaaatttcatacacaattctgtgatatattttaaagcaaccttgcttttattattgaacaaaaataattttcaggcttaccttaaatttttttttaacttcacaacatagaatcaacccctttccagagagttttgattcctttggtagagaataatgcaaaggacccacttctaggactctaggtgcacatgaggttgtagaggttgtagtgttcataagcactgttgctgtcatgggctactcttagtgactgagttggaaagttaattttttcaaggttatgagttcacataagggtgctgtatctaacttttcttagaatgcttggttttattgaccattaatactgtctcctacataaatattaggaagtatttttaattacttgctgtgatcagttccattgaattatgcccaaatacaggcctggtgagagatacatgttcaaaacaattagaagataaaagttgatatttatacataacacattttgtaaaacatatataccttactttatctctttctgtgactatgtgagatggatggaatgtgatctattttacgaacaaggaaactaaggcacacagcagaagttaagtgactcattagggtcatgcagctaataagtaaaggctggaattttaacctgtatcttcagaatctaaatcctgtttattttccactgtctgtacat

SEQ ID NO: 214061 - DNA, 493 bp, Homo sapiens
tgaagtaggatgcaaggttcatattatctatgaggactgtaaaaatggctccactgaccttgagcttattcgctcacaatgcatgccagttagatatgggtatttagcatgctgtattttaggaatattacatcaaatgtggaaatacggaggcacatggtaaactgtcacgtactatacaaatgatcattgtgatgacattttcttaaaatgggttatatgaagtataaagaattgagaggctgactattgccagcaattagtttagtatagccttgtttattaatctatggccagatgtggtaccttagagcctatagatcttactgtgcacacccatgaccttcagatgttcgtcgggagacacaacatagagcctggtcttggtgcttgaggaatctgggatgtcatacctgactctttgatgcattatttggataccttaatctctccaaatttccttgtttataaaatgaagatgtaaatgcctcaa

SEQ ID NO: 214062 - DNA, 349 bp, Homo sapiens
ccaggatggcgtgttggtgcattagggaccccttcctctcctgccctgctgtttaaattgttggtctgttggcgttctcaggagccctttaccagtacccttaggccccagacgacctactcctcaagctgatcatatctgctggctgtgtccctgctctgggcccagcaccctcatggttttccataacacgtatcccaactcctgctgatgggaccctcgtgagctgtctgtgtagggagcatggctgcccctgggtctgctttcctgcccctgacccacaggaataggatgtggcagagtgggggccagatgacagagatgctggtgctctctgagctgaggccca

SEQ ID NO: 214063 - DNA, 459 bp, Homo sapiens
gaaaatcaaaattcaatactcaatgaagaaaatagtttatataaagctaaaaaaaaaaagagctccataaccttattatattttaagttatctgaggaaacctcatctgaatctgcagtattaaaacctaaggacactgctccccctgcagactctggctttatcgcccttgtcttcccaaccaccagcctggagagggagcattccttcttgatttgcattgctgcttacacaccattgagcctctgtggggcacatgccatcaaattatatcatatgttcccctcatttttacagtgatccccatgctccctgtttttcccctttatttattgaagattttgatacctgccttgctgtatttctctctaaaataatttatattccttttttgatgatttcaatacctacctacataatgaattcaacatgctgacttctttatttcttgtcccccat

SEQ ID NO: 214064 - DNA, 633 bp, Homo sapiens
tattctcccccacttgacagatgggtaatctgaagcttagagaacttgaatggcttgtccaaggtcacacagcctgtacatggtgagccaggattaaatccaggcagttacctgtgccagatggcctcaaaccaaacaactgcgctgctccatgcatgccttgctttcttgtgcctctgttttatttgtttgtttgtttgatgcttgagatagggttttgctctatcacccaggctggagtgcagtgccatgatcagggctcattgcagcctccatctcctgggctcaagtgatactcccacctcagcctctcaagtagttgggactatgggcatgtgcctcggcacgcagccaattttttttttttttttttgagacagtcttgctctgtcgcccaagccggagtgcaatggcgcaatctcggctcactgcaacctccaactcccgggttcaagtgattctcctgccttagcctcccgagtagttgagattataggtgcatgccaccatgcccaactatttttttgtatttttagtagagacagggtttcacgatgttggccagactggtctcaaacacctgacctcagatgatcagcctgccttggcctcccaaagtgctgggattacagg

SEQ ID NO: 214065 - DNA, 460 bp, Homo sapiens
atttgtaactttttgtgactggctgatttcacttagcataatgtcctcaaggttcatgcatgttacagcatgtatcagaaattccttccttttaaggctgaataatattatattcactgtatggaggtatgtattttaaatttgcagacagatattctgaaaatatccttctaaaaggtgataaccttcactcccaccacagcaagtaggtccaaccgcccttcccccaccctcaccaatcctgcctactatccagcctcttcatgttgccagtttactccatggaagaggaatctggttattgttctcctttgcatatataagtaagactggtcaccgtttcacagatttattggcgacttttttttttttttgttccacctgttatctttacccactgttttctttggggctgtctttttcttagtaatttgtatgcgttcttaataaattaagaaat

SEQ ID NO: 214066 - DNA, 334 bp, Homo sapiens
ctaatttattttcaaatctgcttcagtggtggtagtgggggaatttgcaacaaagtggtgagatgcaacaataaccattgcctctttgcaactctgtgatcaaaaccagcaattctttcttttatttttaatttattttttatttttttttgagaccgagtctcgctctgtcacccaggctggagtgcaatggcgtgatcttggctcactgcaaactcccgcctcccaggttcaagcgattctcatgcctcagccgcccaagtagctgggattacaggcgtgagccaccgcacctggccaaataaacaaatcttgatggttaatgttagagata

SEQ ID NO: 214067 - DNA, 173 bp, Homo sapiens
tgctgacatcactggccacactggtcatttctttatctctcaccaccacctttcctgctatgctgttccctctgtctggaagacccttcccctctgctaactcctactcagacttcaggatcccagtgtaaatgtcccttccttggagaagccctcctgattccctctgacca

SEQ ID NO: 214068 - DNA, 181 bp, Homo sapiens
caatgaggaattgagccaaggtaacaacactggtgaggaaaggatggagcctggatttgaacccacgctggtcagattcaggagccacgctctttctgtaacccctgaaccctctcctagcattacttatatgatatgtctccatacccattacaatttccagcattccccctcaacccta

SEQ ID NO: 214069 - DNA, 466 bp, Homo sapiens
tacatgtttgataggatttaccagtgaagtcatctgaacctagagggttttctttggtttggtttttgtttttgtgggagaattaagattttttaagagatattttcagatttttctgttgtcggttttggtaatttgtgtcttttaggaaaatttcatttcatccaagttgttggatttattggcataaaattgttcagaatattcctttaatatccttttaatgtctgtagaatctaatctgtattgcagtctcttcatattggtaatttgtgtttttttccattttttcctggctcagttagtctagctggaggtttatcaattctttataagatcatttattttagatcattaatgatcttttaatacagggttattcaatcttttagcttccctgggccacaatggaaggagaattgtcttgtgccacacatagaatacactaatgataagctgatgagcc

SEQ ID NO: 214070 - DNA, 107 bp, Homo sapiens
tgtcttcacggctgattcctagtagtgatattgctagctcaaaggaaaaatgcatttgtgcttttgagggattacaggtgtgagcaaccgggccttgccccgggaat

SEQ ID NO: 214071 - DNA, 363 bp, Homo sapiens
aatctaaaaattgttccccaataagcctaatctccaaaacaatttctaagatcctaaaattttaagagctaatccagccaaccaagtttgatttgcaggacctatgagaaatcaagactaaaagaataggtttcatccaggaaagttcttataaaaactgtttcactgcacaagcatcagacttctttatgacactgatggtctcatcatcaacactagtaaaagaactgacaggaaaaaaaaaagccctattttagaagctgacctcaaaattcactatcctattactcttttagttgttgttttttgaaacagggtctcactctgtctccgaggttggagtgcagtggtgctgcaacagct

SEQ ID NO: 214072 - DNA, 582 bp, Homo sapiens
cacttaagcaaatacctctgaccccataattctaattaatgtatatcattaagtgaatcacactgactttactctgaatttccttgacagccatgctaaaatacttaccttggacataagctaagctttaagtttgttgtttataacttcaaagagagacaagggacagtgacttaagaatattctaagctataaatttacatgtggactttgctacacacctgggatgcagccagatgagttttgttccattgcagtacatctgatgaccagaattctatcagagaatgttaatgaacgaaaagcctgagctttaagactgagattggtaccacgggtagtcatggccacctgctggcagcgtagggtactgcagcccagctatggttcagactaaaagccgagaaacgcctgtggtccagggaaaggtatgaagatcatataaaccggcggtggacaggaaatgccacagtcaagaagatgcccctgggatgctgagctcttacaactcgaaatcaacagcttttacaaataaaaccgctgcaaaagcaatagctcttacaaataaaactgataatttgg

SEQ ID NO: 214073 - DNA, 830 bp, Homo sapiens
actctgttgccgaggctggagtgctttggtgtgaccctggctcactgcaacctccgcctcccggattcaagcagttctcctgcctcagcctcccaagcagccgggatcacaggcgcccgccaccatgctcagctaacttttgtatttttagtacagacggggtttcaccatgttggtcagtctggtctcgaattcctgacctcaagtgatccacccgcctcagcctcccaaagtgctgagattatagtcgtgagccaccgtgcctggccaggtttgcggttactagaatgaggcaaaagttgggagctatttccaaaatggaagactggaagacagaagaatacctatgaacttaccttggacataagctaagctttaagtttgttgtttataacttcaaagagagacaagggacagtgacttaagaatattctaagctataaatttacatgtggactttgctacacacctgggatgcagccagatgagttttgttccattgcagtacatctgatgaccagaattctatcagagaatgttaatgaacgaaaagcctgagctttaagactgagattggtaccacgggtagtcatggccacctgctggcagcgtagggtactgcagcccagctatggttcagactaaaagccgagaaacgcctgtggtccagggaaaggtatgaagatcatataaaccggcggtggacaggaaatgccacagtcaagaagatgcccctgggatgctgagctcttacaactcgaaatcaacagcttttacaaataaaaccgctgcaaaagcaatagctcttacaaataaaactgataatttgg

SEQ ID NO: 214074 - DNA, 511 bp, Homo sapiens
tgagatctagctcaatatgcccttttaagtagtcactagaattatttaataatgcagaatatatttttggtaaaaagatttgatctttttgtctgtttttcaaagtgcaaatttcctcctgaagatagacaagtcttgggtacgtttttgtgagaacagaccctttgaatgaaattttaaaaccatcagaaagtcataacatgtataatcaatagggaatttcttgctgtctaagaaaacgataggaaagaagagttccactctctccagtcttctttgctaagtctcatttctctacttgtgcatttctttggagaataactgcttgctgacttctactttcctatgaaacttttgtgaagaatggtggaaatctttgcaatgacagatgccattgcagattattatgatgtccattacttggagaatgaaattaggaagagtttatttctgacatggcacatacccttccctgcaacagaaagactgtagcctagaatctctgttaaaa

SEQ ID NO: 214075 - DNA, 421 bp, Homo sapiens
gcatttgctatggtaatcactagctacctgtggctacttaaattaaaaattcagtttctcagtcccattagatacgtttcacacgtggctagtgcccaccataagggagagtgaagatgcagaacatttccatcactgcacaaagttctattccacagcactgctccgaaagcagggtccatgcctgtcctgttctcgaatcagccaggcagctgcatctgccgagtacccattaaggtcacgggctaagttctatcagactcagcttctgctttctaaaagactcattgcagttccccgggtttttagtcttgattatacctcccagaagttgtctgctccaaaggtcaacagttcagcaggaagcagagcccatgcctttgagaggctggaggtattgcatactcccaaaaatcccagc

SEQ ID NO: 214076 - DNA, 401 bp, Homo sapiens
gcatttgctatggtaatcactagctacctgtggctacttaaattaaaaattcagtttctcagtcccattagatacgtttcacacgtggctagtgcccaccataagggagagtgaagatgcagaacatttccatcactgcacaaagttctattccacagcactgctccgaaagcagggtccatgcctgtcctgttctcgaatcagccaggcagctgcatctgccgagtacccattaaggtcacgggctaagttctatcagactcagcttctgctttctaaaagactcattgcagtctttgcctcctgggttcaagtgatcctcctacctcagcccctcaagtagctcggattacaggtgcgcaccaccacacccagctaatttttgtatttttagtagagac

SEQ ID NO: 214077 - DNA, 432 bp, Homo sapiens
ggcaacttcctgggagctaaggctactaaaaggtagaagccacagtactcatctgcagagggcttacagcctcagcaaggaccttgtggctttgtaacaacaatcagccataacaagtttacttgtggaaaagaaaaggtgtagcactttcagaagaggctatcaaagaaaagagatgaacttggaagcaagagatacgcagatgagaaaaccaaggcacagaggtgttatgtgatcacacagctagtaagtgctaaacatgagatttgcacctggcagattggtgccagaagtcgtctcttaactgctattctgtactgcctctgtcttttgaaaaagacaatgagaaccctggaaaagtgacaaggaagataaagacaactatcaaaggaatgggaaaacagcataacatttaaaagaaaagatttttgt

SEQ ID NO: 214078 - DNA, 1229 bp, Homo sapiens
tgtctgtccatgtctgaacttattgcagaaattgaaaagtaccaagaagtggaagaagaccaagacccatcatgccccaggctcagcagggagctgctggatgagaaagagcctgaagtcttgcaggactcactggatagatgttattcgactccttcagattatcttgaactgcctgacttaggccagccctacagcagtgctgtttactcattggaggaacagtaccttggcttggctcttgacgtggacagaattaaaaaggaccaagaagaggaagaagaccaaggcccaccatgccccaggctcagcagggagctgctggaggtagtagagcctgaagtcttgcaggactcactggatagatgttattcaactccttccagttgtcttgaacagcctgactcctgccagccctatggaagttccttttatgcattggaggaaaaacatgttggcttttctcttgacgtgggagaaattgaaaagaaggggaaggggaagaaaagaaggggaagaagatcaaagaagaaaagaagaaggggaagaaaagaaggggaagatgacaacccaccatgccccaggctctacggcgtgctgatggaagtggaagagcctgaagtcttacaggactcactggatagatgttattcgactccgtcaatgtactttgaacaacctgactcattccagcactacagaagtgtgttttactcatttgaggaagagcatatcagcttcgccctttacgtggacaataggttttttactttgacggtgacaagtctccacctggtgttccagatgggagtcatattcccacaataagcagctcttactaagccgagagatgtcattcctgcaggcaggacctataggcacgagaagatttgaatgaaagtacagttccatttggaagcccagacataggatgggtcagtgagcatggctctattcctattctcaaaccatgccattggcaacctgtgctcaatctgaagacaatggacccatgttaggtgtgacacgttcacataactgtgcagcacatgccgggagtgatcagtcagacattttaatttgaaccacgtatctctgggtagctacaaaattcctcagggatttcattttgcaggcatgtctctgagcttctatacctgctcaaggtcattgtcatctttgtgtttagctcatccaaaggtgttaccctggtttcaatgaacctaacc

SEQ ID NO: 214079 - DNA, 244 bp, Homo sapiens
atttttttctttttttttttttttaaactggaagaggatgcacaggggaagaaattgaaaaaaaaattttgttggcttttgtttacctggcgtgtgtggcagccggctcgctccctctctctgcttgctatccctgacctttctttctttttgctccttttcaaaaaaaatattaatttcccccttctgtgcaatggagcatggggggggggaggagggggaagggtttgagaatccacccaag

SEQ ID NO: 214080 - DNA, 651 bp, Homo sapiens
tcagcaaaaacaacagaccttcattcagcttaggaacataataaataggacgaagttgaataaacgaaatggaggggagtgaagtattccagatggaagaggcagtacgtggccaagaggaaacagaccatgtgcgctggagaaaaaggatggccagacttgcagaaacctggaattggtgattggctttagaagtggagagacaaaaaaggaggcatagaaagtgccaacatttggctacacagggaagaaagacgtaaaataataaaaacattggcatcacctgtagactcaaatcctgtgagtgaaggacctgagcaatgaaggatggattgaactcgtgattagccttcttcagcatatgtaaaatgatgtctgcttttcttctctatttgtcattttaccgactttttatatatagtagtttccccatatccatggaggatgtatcccaagacccccagaggatgcttgaaaccacagataataacaaactctatgtatcctatgatttttcctgtacatccttacctatcataaagtgagtgtataaactaggcacaggagattaaaaacaataactcataataaaatagaacaattagtacaaccttccgaaaaaaaaagtctttcaatataataggacctcca

SEQ ID NO: 214081 - DNA, 578 bp, Homo sapiens
ttgaatgttagtatcatcaaaaagaccttcacagaaacatctaaaataatgtttgaccaaatgtctgcataccatggccaagccaagtttacacataaaattaattatcacacatcccacgaacaccatccccaacagatgctcatgagcattgtggttatgatttcaacttcagaataaggcagaaatgtgtacaaatcctgaccctttgacttatcagctctctaaaaatcattatatgtcaactttctagactttacctgaaaaacagaaaccaagatacccacagcataagattgttaggattgaagaaattgttacgattgttaggtatgaagaaatttaaacaatgatgcagctgagatatttagaattgtacctggcatgtactttgtattaaataactaataaggcctttttctggtgaaaacaaaataagcctggataaaagaagatgagaccagattggttgatggctcggcctgggtgggctcctggcccatctgaaattacattactcttatgtagtgccttttttgttattgctaaaataaaataaataaaacactctactttca

SEQ ID NO: 214082 - DNA, 498 bp, Homo sapiens
ccatttttgtgttttaattaaacaagtttggtgctgtcacagatgctgttcattgtcaacccaatggccattgtttaacccttttcccaagcaggtagaatctttctcctgcaaagagactgaaaatgctggatattcactcttccaagcccccatgacttctgggggtggccatccaacatcattctagccaatgcaagtaaaggggatatttctcaggggtgctgggaaacattttcttccctgataaacagaccgacaagtagagttatcttgtcacatgactgggctcctttctttcttcgtttgagcatgatgggatgaggatgtgattcttggagatgctgcagccaccttgtgatcatgagggagaatcactggcatactgaagatggtggagcaagagcatgggaaagcctgggggctttgagaccaccaacctctcaatttcttattatttttaatcttaataaacccctactgattaagcttctttca

SEQ ID NO: 214083 - DNA, 459 bp, Homo sapiens
agaatatcatagtgaactctcatgagttcctcactctgcttcaacagttgtcagcccatggtaaatcttgttagacatatttgtattataaaactggaaataagctagatgttcaactctagagtgctgtgttaagtatagtacgacatatctattagatagaattttgagccagtaaatgtttatgaagaatctataatagtatgaactatttatactatatattaagttaaaaggcagcatacatagtaatacatatggtataatcccaccttttttaggatttttaagattttttattactctcctatattttctaaattgtatatcatgaacatatcttaattgggaaaaattaatatttctctaatattcagaaaaatatgaatttcttcattaataaaggcagcttatttacctagcctcacagagtaagactccatctcaaaaaaaagaata

SEQ ID NO: 214084 - DNA, 380 bp, Homo sapiens
tctatgcatggagcaagtcctatcagtgttaccccctaaaggagtctctgaaatccaagcactttgctgcacccccattgcgaccatctactccaagctatcatcatgtttcatgcagacttcagcagtgatttccaaactcatctccattcgttctggtctcctctccacactgcttctaaagtaatctttgaagatgctaatctgattgatcatgtcatatgttttgttcatttttccctttcttttcttcaccaagggctttaaggatttttctaagatgttcaagtgcttcctactaaaaaatctcccacagataataattataaactctgggcaaaacactaaataaaagagacttaaggcaggtgaaaagtgaa

SEQ ID NO: 214085 - DNA, 729 bp, Homo sapiens
gagccactgggcccggctgagaaccattgttttaaagaactgacttgaggagaagcagcaggatgccaggagaaagtcatgagatacaagaaggaatgctaagcaaggaaaatggtaaatgactaaaactgaaacaaacatggactgtataaaatgataaaaatgattataaaatcgagagtagaggtaaaaatgatatctacttgttcttgtttattagaaaatgtgtaacaatgtttagctgaagtaacatgtaagccacaaagggattgatttgagctaaggaattcaaagatgtctgtgttatttgccagaaggacagaagattgattatcttttaagtatccttgttaacacttaaggacaactactgcaagaatagaaatagaggatttaacttcaaaaccggtaaagaggaaataaatgagctgggagaaatcaccagttcaaaagacagcaagaaaggagtaagagtaaaaaatgggttaaatagataattacagaaaaagattgtagaatgaaattcaactatattgataacctataattaattaaaaggactataacattcctagttaagacatagacagtcaaactagattgaaaactaaaatctgcttagtatagaatagtagacatgaaaggtatagtctattcacaacaggcattactaatacctagggatagtaggagtgaaaattaaagaatggaaaaacatataccaggtaa

SEQ ID NO: 214086 - DNA, 362 bp, Homo sapiens
gtagacacgggatcttgccacgttgcccaggctggtcccaaactcttgaactcaagtgatctgcctcccaaagtgctgggattacaggcataagccaccgtgcccagcctccactgctttctcctggcaacctgttcttgctccttttccccacccaagaggaactatctctgtagccccatgagggtgaaagggttccctggaagcctgtccccccagccaggcccctaaataccagctctatctctggccatacccacaaagggcagcagggacacaggccatcccgcagcccttgtgcataccccaggaaggggtgtaggagggaagaagaaatgtgatttgggcaaagcaggcctcgg

SEQ ID NO: 214087 - DNA, 717 bp, Homo sapiens
gccagcatcagtcggaagggtgggccccaaaactccctggatttgagcctcttaataggcaaaactgttttcatataaaccccaatcaacatcatatgctcagattcataaagaaaatttcaagtcattatggtttatttctgctaagtaggaagaactactgaagatcctttaaaatatattgtatcatgtatacattattggatttgattctggaaaataatatattctagttcataatcccttgcttgcaaattgaaagcttttttcttagcaaatttggcagcaaaacctgatctgatgtgagaggatttatcttttatttaaaagtttacttggtgtaactattcctttgtttcactgcagaaatagaatatgtttcattatatggtgctgtctctaactccacaaaatgtagggtaatatatgatacagttaataaagtccaaaaaattctgaccttcaaggcatgtctggccccagaagttttggataaggaatctatattccattataacactcacccaattctattatcttgagatgtaatacttccataatgtgtgggctttgaagtatccagcaaaagcaaagtcacagaaacacaattagcatgatttgagcatttggaagtaatataactgaaagctgttccaagtttcctctgatctaaagtatgcatatatgctattatactattgattttcctacatgtac

SEQ ID NO: 214088 - DNA, 531 bp, Homo sapiens
agccatcctacctaaatctatcccaacctgtcttactagttagtgaaaacatttttgtggagtatcttgagggtgggatgggttggaaattgtcacatattttaagattgaaaaggagcttaactataatctgctttgtctcctttcatgctggtgggtggcatgacgcctaggaaaggtaagtgatgtgtctgccttagcggaacattcaggagtaaaatcatgacttcctgagtcttatccagatcttcctttacttatgcctatttcctctgttttcaacatttatatattgcctggtaatcgccaatgtgctcattttatttacgtgactagattaccaatttactaagcactcgaatcatatctttgacttcttttgagctcccaccatctagcccaagtctttgaacatcataattcacagtagtattgttcactttaaggattaatgattgctgtgggctgcatttgttttcataaattgctctgggtgaagaaattgagagagagttggaaaactccaccaaa

SEQ ID NO: 214089 - DNA, 494 bp, Homo sapiens
aagaaagtcatagtgctcttagctcaatgagctatgtagtagctttggggaatatactagttgattctgatctctggcttaagaactaccttcctcaaatgttatgtatttaactcaaaattcacagacgatctccaggtaccctcctgcccctgtgccctgtcacccctccagcctccaccaccaaacatgaacatcagtattgaagcggagggacgaaaggcatttgcatataggagatgctgtctatattggtggcaggaggaaatgtggcatctaaaacaaggctgagagtcttttggcatttctcttattgggtgttagagaggcttcctcgcctacatagaaagagactttagtccaggggtcactggttccagtatacccttggttcagtttttacttttcagaatggctttctttttatggatttttaaaaattaaaaatcaaaattagtcatattttaaaaagtaatgactactttttttaaaac

SEQ ID NO: 214090 - DNA, 324 bp, Homo sapiens
gagtaatcccagggggctcccatcagcttggaatagagaactacagcctcaccttctgtggcctcaaaatctcctttctccaccccgatagaaagtaggcagaggacatgaaacacagaaaaggaaatacagatgatggggatagttgcccactgtccctcataataagagaaatgcagttttagctgctcacagcacctatgctcccagcctctcaggagactgaggcaggagggttgcttgaacccaggaagttgaggctgcagtgagtcgggactgcattactgcactcccgcctgggcaataagatgagaacctgtctct

SEQ ID NO: 214091 - DNA, 633 bp, Homo sapiens
ctggttctaacttttttctaccacaacgtgtattctaattggtgccaaataaattataatctgatgggtcctttatatcttaactcttataaatataatttcatttctgaatcccattttgtatgctttataaaagtgctatattgtccttttaatgaatgtatactcatgtaagtatgtattaagatgagtggccatttaaaaatattcatatctttttatttcttgcaaaatactctatgtcacctgctcccaaaaaaacgaagttttgctcaacaatatcttgagagattctacataacaaaggttccatgacaaaaaataattaggaaattctgagaaagctttcccttaagatgtcatatggccaggcacagtggctcatgcctgtaatcccagcgctgtggaaggccaaggcaagtggattgcttgagcctgggagttcaagaccagcctgggcaacatggcaaaaccatatcgctacaaaaaatatttaaaaattagccagatgtggtggcacatgtctgtagtcccagctacccaggaggctgaagcgggaggaccacctgagctcaggaggtcaaggctgcagtgagccatgatcttgctactcagcctgggaaacagagtgag

SEQ ID NO: 214092 - DNA, 569 bp, Homo sapiens
ctttaatctgcaatgataggctagcattatttctcttagaatttgtcttcagttggtatgcctccctctgcctttctgataggaatgtaatgataaatgatgactgcactcatttttaaaagttaaccagtttttgttcaattgaaaaagtaatgtacatggaaaaaatttcatgtttacaggatgttcagtgaaaagcaaatctccatttgatttcaactctcagtcttgctcctcagggcaactgctgttactcatttcttgtgtctccttccagaaatcttctctgcatacaaacactaatgagagagctgtccacattgctttttgatttgctttttgactatcttggggattatgtttttatcataatattccattttgggatgcaccatagtttgttcagacccatatggatgaccatttagtttatttatagtcttttgctaataaggacattgctgtaatgaaaaatccctatgtatctttatgaatatgtatgtatgtatttttatgtacatatgtgatctgtaggataaatgttttaaagtacattgcaaagtcaaaag

SEQ ID NO: 214093 - DNA, 816 bp, Homo sapiens
tgaaatttcactcctttccagatgcagcttctgaagaggagacctggcagcctggcgagcatccagctcgctcacgcaccctcttttctagtcccgtggccatcagtgagcttctccgggtccctcttgccacttctcagatgttcctttctgtcctaggagatttgtaaaaccagatacttaggatatgattctctagtggagggttaggcctttaggtctctaaaaattgccattcatgaccttcgggcctagggttttgagatgaatgtgcagtgtgtgtggccgctctgtgtgtcccgcttccaccagcttggcattaagcacccggagcatcgcctgctgggcaggcctggccaggggtgagcccctccattcgggggctcagggtcaaggcagattccttgcttggctttcctgctgatttcctcatgaagatgccaattcgtatttaaacatttgttatcaatggtggtgtttgtgtgctgatttctataggtagaggctgttgttttaggagccaggtttgctgggccagctcagacctcttacaaagtgaagatactaatgatcgtcttgcaaggtgccatagtgtcgtgagggtgaactgaggcagtggctatgcatggtgtctgcagcagcgtttctgaggctccaagaatatcgttcctttttcagaaatggggccagattcttgggatgtagacagtgttctcttcacggatgctaacaacttatcaaagctataatatattaagtatctctgttataataggatagatgcattcctaaaaaaatgtgttaagcaaaaatcag

SEQ ID NO: 214094 - DNA, 913 bp, Homo sapiens
tcacatattctaagaaatagactgtactctcctcaaatcgaaataacggcactttaattcttggattttccacattttcgttggtaaagctcctatttgctttctctgaatctgtatcagttcatgcagttctgccaagtggggaagctttgcaggacactgccactgtagcacttgaaatattaagatgaacagaacaagcaaaaggtgggaaaactggaaagattgaatgtcctttggagttcacagaggtttggcagtgggaggagaaaaacaaaacgaagcatagtgggagtgttgaacagactttcccaagatccccagatcctgaaattcaagaaaatatttgtcaaagtattagctgagtgcaagctaaggtatcaaaatagtgaatacacacaccaaggaataatctttgcaaaaatactttgtctcaagacaaatagaacacagcagactttaataatcaaaacagaaacaccaacatagagaacctaaggaacgaagagaatctgatttccaaagtcaccacattataaaaatcaaatgccaatcttcaacaacaacgaaaacaacaaaattcacaagacacataaagaaacaggaaaatggctcattcaaaggaataaagtgattaattggcataaactgtccctgagaaagcccagatactaaagtgacttgacatttgctcaactagataagagtgagtttcgacaaagaagtaaaggaaatttggaacataatattttatctaaaggagaatatcatcaaacaaagaaattatataaaagaaccacacaaaaattctggagctgaaaagtacagcaactgaagtttttaaaattacttgcagagatcaacaacggatttgcagattagtgaactcgaagataggaaaattgaaattatt

SEQ ID NO: 214095 - DNA, 360 bp, Homo sapiens
ctatgtatgttaaggggctaatgaaaactgtcatgaactgacaccagtccagggacaggtattttagaattattcatctacatggcttccaaggcactttttcattcttatgatttacatacaaaacaatgattctttgtaaagatgatgtcaaagtaaagcatccaagttctggtttgaagcctaaaaatgtgtaaaaaaatctaatttacaattttatttaagaaaataattattatcagtttagtaaaaattaaattagataccaggaaatgcatagttagataatttttttatttttattttttggaaatagataattcttagtgctaaacttgactattggctgctctttgaaaa

SEQ ID NO: 214096 - DNA, 434 bp, Homo sapiens
gcactcagcaaatctataattttagaaacccatcagggagtttctagatgagtttctaagaagtctaagaaatgtccaggaaggcccttagccacctcgtggaaattgggagagaagaaatgtgtgcagagaaaagagggatttttgatgcagagaaaaagaacaggtgtgtcccggctgctggctctgagtaacccgtctaatctcactgtacagaacgtacctgcactttatactaacaatgagtgccattcagcgcgccatttatgatgttcacagtggccttccttggtgtggtccctgaagccctgcaaagcagggacatgtgcggtctgaaccaaacaggggcccctgggaatagggtagcgtgttctgatacctgagctggtagtagagtcagagcaagaacaaaagccccagcgagcaatctgggt

SEQ ID NO: 214097 - DNA, 410 bp, Homo sapiens
ttaggggaaggcttaaacaatgactgtgatcaagttaggtgagagtctggggagggaagttctggcctgtgctccaccttatcagttttaggagaaaaagtactaagaatatagatgacttttcacatatcgtactgacttccttgctagagggactgggtaggtaggactcaactattcgaaaattctttgaagtgatgtgaagtttctatatattatgaaagcagggatcatgtctatcaaaatccttattttatctatagcattcaacacagtgcctaccacacacagtagaggtcagtaaacatttggtgaatcaataaacaaataaaagacacttgaccatgagaggccacaatactgagaaattggagatgtttcgcagggtggatgctgctggattcaacaga

SEQ ID NO: 214098 - DNA, 394 bp, Homo sapiens
ctgtcagtttgttcacctggcagggtgtctcaggcaaccctgtgatgtgtcagaaatgtggatacttccaatttagtgtcattttgaaaaagcatgtgagaccctcacattcccaagcagcatgcccatgtgagggtgacaggcactcggaagtctagtatgccccacagaggaacatataatccaggggagcacatgtaacgctggtcagggagcagttgtgttaagagtctgtagtccagctgtacaaagctttgtttgatttaaccatgagttaggtggcagggtaaagttgtccaatgtatggaccttcccatactatctgtgatgtttaatttgcctttgatttttttttttttttacctctgattttatgtctgtggaagaggtaagc

SEQ ID NO: 214099 - DNA, 440 bp, Homo sapiens
aaatgtttgtaagattgggcttgctctcttgtgcttctaccttctgccataagaacatgtcttggaccgcttatagcccaaggaagatgagaagcttgtaaagcatgtctcaacttgacctgaggcttagacctaagatcaacaaacccagcctacattagctgaaccccagccagttggcatatgtgggagctagaaataaatgtgtgttgttttaaaccagtgagattttgcaattgcttatgacacagtgtggtaggcagcatatggcccaccaaagaggttcatttccatatccctggaacctgtgaatgttacatgacatagcaaatgggaattaaggcttgtagatggaattaagattactaatcatttaaccttaaaatagggagattaatctggattttccagctgggcccaatataatcacaagggcactt

SEQ ID NO: 214100 - DNA, 334 bp, Homo sapiens
agagggacaatctgggattatcaagctcatgtttactcaggctctaagcctggataggctattccataattctagaatattcatgataggagagcaaaggctcactgtgcttgtaaaaaaggtttcaactgcatctcctctgaagtgataattcttgtgtacctttatatccggaagaggaaacaaaataactagggttctgtcagacttgtgcaaaggtcaggtctcctcaaagttacattaggagaaaggccagcctggcagcttctcaatgctccaatttaaaagatgcaccaaagacatttctagaaataaaattgttttaaaaatcaat

SEQ ID NO: 214101 - DNA, 440 bp, Homo sapiens
gaacattggtcgaggacagcaaagaggtcctcagataagggcaacgccctccctgtatggagagatagaagaaaaagaaattgtttatactacttattcagctgaggaactcaacatagtttttgcgttgaatcatagaatgttacagctgctgacttttcactgcataccgacttgatttgtcccattttttttctcaccaagagcatttattataccttcccctaccgaaatttttcaaaaagaaaactttttaagagctgggcgctgtggctcacacctgtaatcccagcacttcgggaggccgtgggggggcggatcatgaggtcaggagatcgagaccatcctggccaacatggtgaaaccctgtctctactaatacattagttgggtgtggtggtgggcgcctgtaatcccagttactcgagaggctgggctga

SEQ ID NO: 214102 - DNA, 177 bp, Homo sapiens
aagtcatattgctgataattatttgaaaatttctaaaactaaaacataagcatagcagatacgtttatttaatactaaccgattgtggacctctgctgtttgaattggctgttttatctagtcaaataacttgttgaatgtcatggaatctggaccgtcccttcaaatccccacccc

SEQ ID NO: 214103 - DNA, 252 bp, Homo sapiens
agtgaaaggtagcaagaggagggagagcttccagccactcgccaggcctggcctggaattggcagtggggagtgaggcagcctagaggccatatactgagcctggcccctgcacccctgccccaggcacgcactgtttggaaggggcagatctgtgagcacacaggagtagtggagtccactcccacagagatctcagggtgccccttcatgccgcgcccaccagactgcaccctcatctcctctcttccgg

SEQ ID NO: 214104 - DNA, 580 bp, Homo sapiens
cttctaaaagaaaaaaaatttcaggaacatttactctagatttcaattttgctccaacatttattactgtcttgagaacctctatgacaatttaggtcaagggacaatttattcaaaaaagaacaaaccatctacaaattctcttatcatgtgagcctcactcccattccgcatccagtgtggtttcccacaaagatgtttggagaagagaatcaatggaggtggaaatctttggtccagcagttggatgagtcacaggaccttttggcccatctatttgtttcagaaggaacaagcataatatgtgtgtgcagatttcaacactacatggacaatagcacagctgttattgttgtgtattcttctgcaagaggccatgaacccaaaagccttgtggtgaggggttaagactaagattttatttcttctttgttagttgttctttgtttagtttcttctttgtgcttaaaaatatatgaagtcattacatgtgaaaaaaatagatgtacattattttaaggtcccattctgtaaaacgtggtacaaatatgcattaaatgagagacctcagtataattta

SEQ ID NO: 214105 - DNA, 685 bp, Homo sapiens
cctgcatcatcctctcttctagccagagcatggtctctggggccaggcagacctgggttgaatacctactcctttactgtgtagtcttgggcaaattattgttggcttcagtctatttataaaatatggataaaagcaacctctgcaaagaaccactggagaagcgtattaaaatacagactcctaccctgcccacccccagtcccaactaagactcagcaggtctagctggtggctgggaaggctgcattataagcaggtacctgtgtgttctgtgtagacctggccctgccgtttgagaaacaatggtgttagaattagaggtatgaatgtaaagtgcctattacatacatacacatggctatgtaatgaatggtgctgcctttcttctaagggccttgtctcagagttatgtcattctgtacacggtacctcaggaagtcagggcagccaagacccagctcttctgactctgcacctacatccctctgtgccttcaggacacttaggtgacattcatctggctgtcaccacaggcttcctgtgggttagccagactcttcgctgcttcctcacttcagggctttggttgtggccatgacagctttccctaacctcaggttgccctctagggacttgaaactgtctcttcaggcttaaatgctatggcagaacctttcagggg

SEQ ID NO: 214106 - DNA, 607 bp, Homo sapiens
gtcatacaactaatgtggtatacctcatgtcttagaactatgaaatttagaagagcatgaataaattgtagtttttacttacaattgagccttggaaactaaattgctatgccatacaatatagatgctgaccctaaacatttctgcctgagaagtaaatcttcactgccatggtttaaatgagttgactctcaatgtatagttgaagtcaaagtaaggtcagacttctaaagggtgtgtatgttttggttaagactgccaagcatctggattaggagttcttaatttgggattggttaaccccaccccctaaaaaataatgtatgtgctttctctggggcgaggttcatagctttaatcagattctcagtggaatacagcaccccaaatgtgttaagaatcattgacctagagaggggtaatcatgtgtccctttctggggggcgggagggggtggatcatgtcaagagtatttatttataaggaaagtttggcatcctagatggcctaatggcttttaggaggctagtaattccttccgtgatacagtaaatctcttggtattaggtctattttggtaattatattttggtagaaaccatagttt

SEQ ID NO: 214107 - DNA, 492 bp, Homo sapiens
acccaggctggagtgcagtggtgcgaacatagctcactgcagcctcgacctcctgattgtgaagtgatcgtcctgcctcagcctccccagtagcagctgagactacaggcatgcgtcaccatgcctggccaatttttttggtattttctgtagagaaaaatacaaacacgtcaccatgttgccctggctggtctcgaactcctgggctcaagcgatccctccacctcggcctcccaaagtgttgggatcacaggcatgagacacgatgctcaggctgtgctgttttcaaagccctttcacacacagtccttaccttccttagtccctgaacagcctcattgtggatcaggattattatggccccaattgcatggccaagggagtgggtggagagaggctgagcccaggaccattcaggacagaactgtggtgcaaatcctcctacctttctgagccagtgagctttctttgctgaggtcctgcctctctgca

SEQ ID NO: 214108 - DNA, 147 bp, Homo sapiens
ttgctttatgtgtcatccatctgccctccaaagtacccattaatgagcaggcctcatgctcagatcctagaatcattcattaaatatatcactactgagtgtctatgatgggcatggcactgccctcagagagtacccagtagagga

SEQ ID NO: 214109 - DNA, 370 bp, Homo sapiens
tgaagtcccataacagtcagcatcaagtattatgtaatagactttttggatatccagctaggcgaagccttcaaatgatagctccggctgacatccagttactcccataagatacccggtggagaactgttcaggatgcttgctcttttcctccttcttgaaatctagccaccatgctatgaggccacccaagcagccaagtggagaatcgtggtcgtgaatgtcagcccagctgccagttgagtctccagatgactgtagctccccaccaccccatcaccccatctcacactacatgaaacaaaagaacaagccagtcaacctactgaatcatgaagagtaataaattgatgttttaagacagtaaatt

SEQ ID NO: 214110 - DNA, 743 bp, Homo sapiens
accagggatccttttaggctagtggtaatattctgtatcttgattttggtggtggttatgttggtttctgtcattgtcaaaactcatcaaattatatgcttaaagtggggtacattttatactaaagttaatttaacagtattacaccattttaattagttgctattttagctataatggcaagctatgacaggtgtattgtccttggatttttgtttggcagggtgtaaatccactatatttttttctaggtaaaatgttctctatgttaatgtacaaaaatatatggctagtatttggctaaagtaaattcacataattagtatgactttaacaaacaaaatatcattttttctttcttcagtaagttccttaaatttatcctcagccagatatctccaatttttaatattttagttaaatatcattgcatatctgctaaagtttttttttttttgagacggagtctcgctctgtcgcccaggccagactgcggactgcagtggcgcaatctcggctcactgcaagctccgcttcccgggttcacgccattctcctgcctcagcctcccgagtagctgggactacaggcgcccgccaccgcgcccggctaattttttgtatttttagtagagacggggtttcaccttgttagccaggatggtctcgatctcctgacctcatgatccacccgcctcggcctcccaaagtgctgggattacaggcgtgagccaccgcgcccgg

SEQ ID NO: 214111 - DNA, 384 bp, Homo sapiens
gctcacacttggggaaagggcaggaggagcttccagtgaataagcaaacacatcactgtataattataatttgagataccagctgtgaaagatgctgctctgaagaggaacaaagcagtgtaagtggacagagaggggcaagtaagggagactcttccctgcaaggttgacggcctttcggtcctcaccctggctttctgcaggggtgacttttggcagatccccagctgcagcgagggcattagccaggtggagatctgtgggaagagggccccaggcaggggaactggcatgtgcaaaggccctgaggtggtgcctgcccggcatttggagaataaccaggaggcaggggcagaatgagtgaggcagggagacatacggccg

SEQ ID NO: 214112 - DNA, 421 bp, Homo sapiens
gagtgttgtaagtgctgtaaaggaaataccaaggtgcagggatgataatggagggtggggctacaaagaaaaaagtgaagttccacccatccgttttcacaaaggtaaccacttttaacagacctcttttctattcacatagaaacaagtacgtgtatatatgtggtttcacaaaacttctcagttttccacactttagtatggatgttgtgtcatgaccatatgtatagatttacttcgttctgttaatggatgaatggttttctgttgtgtgactgtatcatagcttttccgaatatgacctccattggtggaactttaggttgtctacaaattattattgttattataaatagtgctgcagaaagcatccttacacttatatccttgcactttgtgcagttaaatatttggaatttag

SEQ ID NO: 214113 - DNA, 285 bp, Homo sapiens
acccttgccattaactaggataggaaacaacaaagggtaggagtttgacaggggagaatgtttgtgctgttgagttgttgagtttaggtgcttgtggcacgagcaaggggagtgagctggtctaggaggtttttggaaacactgacctggctgcagagagggagatcctgggacacctgttttgggagttatcccagtggggaaggatcactgggaagggggccacccctttgggaggggtcagtgggacgactcccaagggaagaggttggttatagggagtta

SEQ ID NO: 214114 - DNA, 451 bp, Homo sapiens
ctttcctgagtgactgatgctgtgaggatgagcatgtggtgtttgcattggagggacaaggtgccaacttaagtcagcgcttctgagagcggatcaagtgaagttgtatctaccatgaccaaaatctcatctccaggatcacttggtcttggaactctgagccagcatattagaaatccagctgtttttctgggagaccatgtaagagactctgagactacatggagaggaagaggaaccaggtgagctgtcttccagcctctcctgtcaggcaaccagacacttgggtaagactgtctttgatcctttaaaccagaccatccagcaactcaataccaccaagtgacctccgtcaagctccatgtgtagcagaagaatctcccaactgagccctgcccatatacctgctacacaaaattatgatatagaataaagctgtggcattttaaac

SEQ ID NO: 214115 - DNA, 317 bp, Homo sapiens
gtatcttttcctttgctaactcatagatgtttaaatatattacattttaggtgttagatgatttatatatcttcagtgttaacacaaactgaagatattgctctaatattcatcacccaatgagaatttgtgatattctgcagatttggtaacattttcatggagatttaataaaaaacattgacatattcattctacagacatttattggctatgtaattcatgtcagaaactgattcgacacagcaaaatcacgtgaataagaaggtctatattgttgaaaagcttaccaatgcatcttcttcaaacacacatac

SEQ ID NO: 214116 - DNA, 418 bp, Homo sapiens
gtgagactgagattttctctagtgtgcgaatattgggtgttattattattccaagccatcttacctgctgttttcattcctatgaagccaattagaattaaaatgggctgaggccgggcacggtggctgatgcctataatcccaacactttgggagcccgaggcgggcagatcatctgaggtcaggagtttcagaccagcctggccgacatagtcatagtgaaaccccatctctactaaaaatacaaaattagccaggcgtggtggtgggcacctgtaattccagctacttgggaggctgagaccggggaatcacttgaacccaggaggcagaggttgcagtgagtcaagattttaccattgcactccagcctgggcaaaaagggcgaaactccatctcaaaataaataaataaatat

SEQ ID NO: 214117 - DNA, 643 bp, Homo sapiens
cacagtgacttatgcctgtaatcccagcactttgggaggctgaggtgggtggatcacgaggtcaggagttcaagactggcctggccaagatggtgaaaccccatctctactaaaaatacaaaaattacccaggcacggtggcaaagcgcacacgtaatcccagctactcaggaggctgaggcaggagaattgcttgacctggggggcagaggcttcagtgagccgagatcacgccactgcactccagccggggtgacagagtgagactccatctcaacaacaacaacaacaaaaagagtaaaaagctgcagaatttccactttgttgctacctcgcttctttagatttactcgtgctcttcctagtttttggacctcaggtcttaaacagaggacgtttattgatgaaagagaaactgtcccaattatcttcataaagacctctcatagccctctgatcctattataaagccatctgtttattttaaatcgtaagagttctggaacattcatttgggaatatatgcaacaattcaagagtgcaatcgacaatataaaaaatttttctaagcctataatctcagcactttgggaagccgaggtgggcagatcacaaggtcagaagattgagaccatcctggcta

SEQ ID NO: 214118 - DNA, 210 bp, Homo sapiens
tgtggaaccaatggcatagctgagacttcaggaaaggaaaattctttgagccttatcttcctcgtccataaaatgagggaagtaacaattaaataatcactaaatttcctttcagctctaaccttttctaaatgcaagctggataaattgatacaacctggcagctgttgtcatattgctatagtttttgtatttttttttttttttttt

SEQ ID NO: 214119 - DNA, 426 bp, Homo sapiens
atactataccattattgagaatgagaagagcttgagaaatttgtttatatgatatactaccgtcttccaaacacaactccttctcttccccttaagagtaattaccactattctgatttttatgcagtcactttcttgcttttctgtattgctttattacccaggtatgcatccctaaatattacagttcagttttgcttttcttttaatagtattttttgagtatcttataatcttcaggtgccccaaacatagcacctgacgtccgatacaaagacatctctctcccttttaaaatttatctattgaaaaaaccaggccaggtgcggtggctcatcactttgggagtccaaggcaggcagatcgcctgaggtcaggagtttgagactagcctggccaacatggtgaaaccccatctctgctaaa

SEQ ID NO: 214120 - DNA, 796 bp, Homo sapiens
gggtgaccaagagatacataacctattaaagccttgagaaggaacagattcagtcagaggggatgtagtaagttaaaatggtgttatccactcactagatgtatgacctatttctgataaatacatcaaaatactactttctacatcaaaatacaactaataaaatagaaaaacggacaagtatgaatgatggttcttaggctacaagtggcctgtaaacaagaggtggaaaagttcaagtctattgtttgcccaagaaatgcattattagtgagaggtactatgatctctcactgccaaagggatgattagccattggtggtttttaggggtttgcagtatgtgatgacttgacatttggtagagctgtccttattagttaaaggtgaggatttagcctttaatcactgattgccaccttttcaaataagagaagctcttaaaaaaaaaaaaagcaaaaaactttgccagatccccacgtgttattatttcgatatatccatatatatatggatatgaaaatatttggaatattttcacgaaagctttttaaatggttgtatgttattaattgaaacattgagtatatttgaaaaaagcgtgtttcagatactggtcaagatgttttgcattagagacaatagttgattacatagtgaagctaaaatgtcatgtcaattaaaatgttgtcttaatactatttatgtaaataaccctttgaaatcgaaaactagattcaagttattttgcagtaccttgatctgtctagggaggggagatttctctctaaaaatca

SEQ ID NO: 214121 - DNA, 520 bp, Homo sapiens
aatagcagctgagtagatatctattataaagtgtgtggtagttttgaaaatattttctaatactttgaagctggtgtatagaaatggagtttaattttgtatgttgatcttataatcaacaacctagttaaagtgccatattaattctaacgatctgtttgtagttcttttgggtttcctatgaagatagtcctatcacctgagaaaaatgatagctttgtttcttcctttccaatcatttacatttgtttctttgcctatattatacaagtggcaagagtttccaatgccatggttaattaaaggaagtggttcataacaggcacctgtattttatccttggctttaaaagaaatgtgtttactatttcaccattaaggatattattcggtgtgggacttgtgcagatattctctattatgttaaggaaaagcctgttttactcttcctttataaacagttttgtgcatgtgtgcatttattgagtggttttaaaattaaatatattcattttatggaa

SEQ ID NO: 214122 - DNA, 357 bp, Homo sapiens
tagtgaaagctcagtaaattttgaatgaatgaatatattgatgtcacaccagcagctctggagcatgaaggaagctactatcaccttctcttctgtgtaaagcattaagtgatagacacattttaaaatgacaagtgttcaatttctctgccaggctgtccttgcatacagactaaatagggaggctttttggactggcaaaacaattaaatacgacttgattcaggattaatagtaacttatttggtgataatgacattacaaactcttttcttcatattgcaaaaagaggatttctccatcttgaaagcctcttaatttcatacttggaggacctgcaggaagaactataattga

SEQ ID NO: 214123 - DNA, 521 bp, Homo sapiens
caaagacattttcaaataagcaaaaggtgatagaatgtgtcatccacagacctgcactataaaaaatggtagaggaagttcttcagtatgaaagtgaatgataccagatggaaactgagatctacaaaatgaaacatcactggaaatagtaaatacatgggtaagtataaaacatttttttctcatttaaaaagagtatctttaagggcaaattaattatttaaataaaaataataactacattgtatagttaacatatgcagaggtgaaatgtatgatgaggatcacaaagtaaggcgggcagaaatgatagtttactcttttaagtttcttacattatatattatttgatatttgatgaatattatttgatggtagtcagtgtttaaaagaggcatactgtaaatcctaacaaaactacaaaataaataaaactaaacgttgttgttaataaatcactagaaaagataaaatgtaacacagatcctgcataattcatccaaacaaaatcagaaaaagta

SEQ ID NO: 214124 - DNA, 150 bp, Homo sapiens
ggctaccactagaggcttggaatacctcttgagatttgcatggttgttagtttagattatggattcattctctccctccctctccttctgtccccatctcctctcttttctgtctctccctccctccctctccccttctccctctctctc

SEQ ID NO: 214125 - DNA, 451 bp, Homo sapiens
gccatttttgatacgatttacaaatacttttccctagtttgccatttgctttgtttataatgttttaagtaatcaaactttacattttcccttattttgtgccatagcattagtatcattaagaaccagaattcagttagtccttattttattttcacaattaaatctctaatccctttagaatttgtcctagtgtaatatgagaacttgatccaattttatcttttctatacacttaaccagttactccaatcaatttattacatagttcattttccccagtgatttgaggtaccaccttcatacttattttccatatgaaactgggtctgttcctagcttttccttttttttttttgagacagtctcactctgttagccaggctggagtgcagtggcacaatcacagctcacggcaacctccacctcctgggctcaagcaattctcctg

SEQ ID NO: 214126 - DNA, 379 bp, Homo sapiens
gatttctgcttgcactcactggccaattctatctgcaaggatgataagaaatattttattttagctgagcacattgctgcccagtgttctattaccatgaaaataagaggaaaatggatgttgtgtaacccagaggcttggtgcatgcatcagaatcttctggtggccttattaagacacggtagttcccccttattcacgggagatccattccaagacccccaatggatgcctaaaaccacagatagtactgaacgatatatattctgttttctatgttttatcctagacatacatacttatggtaaagtttaatttataaattaggcacaataagagatgaacaaaaataagtaataaaatgagcaattataacaat

SEQ ID NO: 214127 - DNA, 338 bp, Homo sapiens
attttcattcccagaaactgtagttaaattgtactcattttctctgtattgcatttcttttaatttataggctatcttgcaatcgcttttatttatatatttttacagtttatccgttacagagcccagagaggtgcttatgctcatggtttaggctttactgattgccaatcatggtacaagtaagcacgttcttctgaactctatctttgctagaaattgtcagctaaatccagaggctaatttgacaaaactatagtggatagtgtgttctcctgtcaaggatcacatcttttagttgtttttatttttgaggttggcagcctttgatactcagt

SEQ ID NO: 214128 - DNA, 1053 bp, Homo sapiens
cgagagagcgtccacagtgtaagaattaagtacaaaagacgctcaagaggctgcgaagagcaaacacacacacacaaacgtgcaacgaagccaagttaaaaggtaaacaggccgaagaggggggatttaggggagggtgcgggagtgcagtcgtacagcagaggaactcttaggagggtaggggcggagcttggcttcagttaccgcgactggagccgattttatacctaagatggctgcgcccacagccactcccattccaagatggccgtaccaacatggcagcccccacgtcacggagtttaccgtacagggcttctcttaaaatggcggcccccaggcaaccggcgttctcaatatggtcccttccgccctcttctggtctcaaaatggctgcccctgccctaaccaagccggggcccgcgccctgcaaccccgaaatctggatttcggtgtcctcccgattgagtcgaaggcacacgggcggccataacgaagaatcactaaacaaggggaccccaggaagcacagcgtggccgacgctggtcgcgtggatcttgcgagggaatctaggtttctacattttgccaagaaaggagaggctccctttggagcggaaatattagcggcagggggttaacccccgaccctgtccgtctcggtgcaccgctcctcagttgcttcctggtcttcccaggagctggataagcctgaagttgctcagtttgggtttcctagtagaactggggcttgtttttgctttcattttcccctcaggccgattcagccacagcagccagaaagcagtggccgcacccctaatgtgccttgcaaaagtccagcatgctgtctgggcagggaccaaacttaaggcttaacatgtcatggtcatctccaggactcaaacatggcggaggtttacgaacaccagaatgcctcctagaatcttttccttccaagggtgcacagaggcgagatgggaccagggacaagacaaagaacgtaacaatcccagtacgtgtgctcctgctagaggtcccctaaactcaggga

SEQ ID NO: 214129 - DNA, 495 bp, Homo sapiens
ggtcccagctacctgggaggctaaggtgggaggtttgcttgaggcttcagtgaactgtgaatgcaccactgcattccagcctaggccacagaacaggaccttgtttataaataaagaaataagtaaaaatataaataaaaagtaaaaataactataagtaaatataaatataaaaatgcatacatgaaaagaaacaatttttaaatttaacatcactgagggcatcctatccatttcatttcatgattccattacatcatttcacttagatgaaatgatgagatgaaatgatgagatgaaatgacgaaatgatgagatgagatgatgagatgaaattttgagatgaaatggtgagtagaaatgatgagatgaaatgatgagacgaaatgacaaaattgaaaagaaattgaaaggagaggagatgagataaaatgagatgaaatgagatgatggatgaaatgagatgaaacgagatgaaatgaaataatgaaatga

SEQ ID NO: 214130 - DNA, 1892 bp, Homo sapiens
cgcccgccagaggctcggctcgcgcggcgcggccgctgcgacttcctggagttctgcctgccgggggcgcgggcgggtgtgtgagagagaaggcgaagggagccgcggggtgggagaggagggagtcccggcgggagggcgggggagaggctggcgggaggggggctccacggagctccagccagggccgcggttcgcctgcacgtcacggctactcaaacccaagcacgtcccgaaagcggtattttctgcgtctgggaggtttttgcatcctcagttcccaccgctggggctggcggcgaccaactcgcagacctgtcgcagccagagagctgtcatttcagtaccgggattcagaattgatccagtccgcagcggagggggcacatcccagctaccgagctgctgagtgtctctggctggaacaatagtatttttttctctgcgaggctgcaattaacatcttatttgttctggctccatacaggctttgtcaggatcgcggtgcggcgaccgacgttgggctcttgcattgctttctgcttggcaatggaatcatggtttcggggtctaaacttttgtttcgttttgtagtcttaatgtatctgattctttttcaagtttccctagtaacaggtttggggacggggtgggaagaagcgagaaaaggggtgaagagaaaaaaccagattatatagaaaggaaaaagggaaaagggatgtttccccaccttttaatctaactatctatctgtctgtctatctatcatcatagatagtcattttgcctcctggacagttggctgacgaagtgtctgataaaccagcttcagatacatgctacaaaaggtcattcgcctcctgattatgtttctacttgtaaacgcagttggtggtttgcaaaacaagtgctaaaatagtgcagtgatgtggtgggaggaaccataatgggtaattcatataaagtgctggaatcttcgtaagggtgagtttctcgagcggcaggtgaagttgaataaagcaattttccatcatttgttcccctcactcttgcatttttttcctccgcttgtttctctcccctggggcgattatggatagccaagaacaccattttaaaagagattgatagtgaaaacaggaagtttatggtctgttatccactggagttgtttgaaatattaaaattggtcctttacttcttaatgcatattaatagagtgaccctcttcaaggctttcccgtcttaaacgaatgcctgggataaacactgtaaggggaaacagttaataattccccagcaggctttaactattttcccagtaacaaatcaccggcaagagagcagcctgggtggcattttggttttgtgtcattttggttctttacaatattttttattcatttaaggaaatgttaaaaggaaataattagggtttatgtccagaacaaattttgaaacaccgtttaagcaacacattttcttttaaaaacaaagaacattgagcaacacaaaggagaaaaacattttatttatttcaacttccctagagatcgtaattatgattttcgcaaggcaatttggtcagttctgttactttatccagaggaaaaaaaagcatgacagatgtggaataaaaacggaggaaaaaatgctttggatggtttatacataaaaaggaaagaatgtaatgtgaggttcagttatacctctattttgcatctagtgatttctcatattatcttgtaacactgattttgatgtttcttagaaattcttaaagtcatgacacagtggcataagaataacagctgaaagggacaatttaaaagcctaaatcctaaatggaaaggttcacttactcccaggatcatttatattcaagtagaagt

SEQ ID NO: 214131 - DNA, 2001 bp, Homo sapiens
cgcccgccagaggctcggctcgcgcggcgcggccgctgcgacttcctggagttctgcctgccgggggcgcgggcgggtgtgtgagagagaaggcgaagggagccgcggggtgggagaggagggagtcccggcgggagggcgggggagaggctggcgggaggggggctccacggagctccagccagggccgcggttcgcctgcacgtcacggctactcaaacccaagcacgtcccgaaagcggtattttctgcgtctgggaggtttttgcatcctcagttcccaccgctggggctggcggcgaccaactgtaagagaaactcactgggaggcgaggcaggggggtgcggaggatgggaaggcgactctgaagggtgggaagtgaatgctggacttgatcgtctttctctttctttcagcgcagacctgtcgcagccagagagctgtcatttcagtaccgggattcagaattgatccagtccgcagcggagggggcacatcccagctaccgagctgctgagtgtctctggctggaacaatagtatttttttctctgcgaggctgcaattaacatcttatttgttctggctccatacaggctttgtcaggatcgcggtgcggcgaccgacgttgggctcttgcattgctttctgcttggcaatggaatcatggtttcggggtctaaacttttgtttcgttttgtagtcttaatgtatctgattctttttcaagtttccctagtaacaggtttggggacggggtgggaagaagcgagaaaaggggtgaagagaaaaaaccagattatatagaaaggaaaaagggaaaagggatgtttccccaccttttaatctaactatctatctgtctgtctatctatcatcatagatagtcattttgcctcctggacagttggctgacgaagtgtctgataaaccagcttcagatacatgctacaaaaggtcattcgcctcctgattatgtttctacttgtaaacgcagttggtggtttgcaaaacaagtgctaaaatagtgcagtgatgtggtgggaggaaccataatgggtaattcatataaagtgctggaatcttcgtaagggtgagtttctcgagcggcaggtgaagttgaataaagcaattttccatcatttgttcccctcactcttgcatttttttcctccgcttgtttctctcccctggggcgattatggatagccaagaacaccattttaaaagagattgatagtgaaaacaggaagtttatggtctgttatccactggagttgtttgaaatattaaaattggtcctttacttcttaatgcatattaatagagtgaccctcttcaaggctttcccgtcttaaacgaatgcctgggataaacactgtaaggggaaacagttaataattccccagcaggctttaactattttcccagtaacaaatcaccggcaagagagcagcctgggtggcattttggttttgtgtcattttggttctttacaatattttttattcatttaaggaaatgttaaaaggaaataattagggtttatgtccagaacaaattttgaaacaccgtttaagcaacacattttcttttaaaaacaaagaacattgagcaacacaaaggagaaaaacattttatttatttcaacttccctagagatcgtaattatgattttcgcaaggcaatttggtcagttctgttactttatccagaggaaaaaaaagcatgacagatgtggaataaaaacggaggaaaaaatgctttggatggtttatacataaaaaggaaagaatgtaatgtgaggttcagttatacctctattttgcatctagtgatttctcatattatcttgtaacactgattttgatgtttcttagaaattcttaaagtcatgacacagtggcataagaataacagctgaaagggacaatttaaaagcctaaatcctaaatggaaaggttcacttactcccaggatcatttatattcaagtagaagt

SEQ ID NO: 214132 - DNA, 749 bp, Homo sapiens
ccctgatctgggtttccccgctcatgtatatcacctctcagctcacaatcactagcagatgtcttacccgggtttccccaggtccaccctgccttcttgctcttcaaaatcactaggctaggaaatacttctagaaagttaacctacaaatacacttacatgtttgcacaaaagcacaaaagtatgtggatgtctactgcagcactgttttcagtcttttgctattattagggattggtaaaaaattatcatatacagtatgtatagcacactgccatcaatgtaaagaaagggattaaaaaacacgtgcatatttctggaaggacaagaaactggggaaattagaagaagagaagttgagtttctagggttagcagagacttaagtatttctttctcaataagtttaattaaaaagtcaacttacaagaaaagagaagtagaaggctagtgatccatatatacacatacccctaccaccaaagaaagagaaccagggagagacaggtgacgggcaattccttttaggcccatgctttttttattcttttctttttttttttttgagacaggatctcactgtgttgcccaggctggagtgcagtggcacgatcactgctcactgcagcctcaatctcctggcctctaatgatcctccccacctcagcctcctgagtagcacaccaccatgcccagctaacttttgtatttttttagacatggggtttcgccacattgcccatgctggtc

SEQ ID NO: 214133 - DNA, 523 bp, Homo sapiens
tggattagctcaacgaagcagatatctttggagacgcactgtgagctaggacacagggaggaatgcaagacagccccttccttcaaggaacaatgaagacagaaacagaaatgaagtggggcgggactgtacaaaggtaccgtgggtgccgggatggtaaatgctgtgttactggtgtacacaaagtggtttgggaacatcgaggaggaaatgagttttcttaggaagatgagagaaagcctcacaaagtatgtgacacttgagtggccatctgaaggttaagagcgatgtaaaggaaggacaccattgtataagggtatcaaggctgtgggccattcctgggggagaactgtggtgtggttagatgggtcgcctggctgtgcaggaggagtgctaagacatgaggctgtagagggagatgcgggaaggaggtaaaaatgattggtggtttctgctgggagatggcatggatctaaattgggaagaaaagctaatttgaagtggagcctcccaaggtatgtag

SEQ ID NO: 214134 - DNA, 837 bp, Homo sapiens
gtgaggatgaggtcatactccatcagggcgggctccactctgatacatctggtacaacaggtgtccttataagaagaggagacagacatgaggagaaggccatggagatacagagacacagatgcagaggacggccaccctgtgaagacgtgggcagagaaacctcaagccaaggactgcccatggccaccagaagctgggagaggtgaggaaggatcctccgtggtggctttggagagaacgcagccctgcccacacctcaatctcagacttctggcctccacaactgagagggaacatgtttctgttgctttaagccacctggctgtggccctttgtcacagcagccctgggaaatgaatcaccctcttcacaaagtcctcactccataagacaaaggccttccttatccctttccctgtcctggcctttgccacagtcctctcagacttgccaagcctgcacgtgcccaagtcctgaccccacccctagttcctgctctcatgtgtgtctttcctgaattaccaaaacctcctgttcccaaggggcactagaatgttgcctgtgagggcctcggcatcctcagtactttcattccgggctccccagtcctgtcaatggtggagatgatgaattgtccaccagagccatcctcccctggtcctggcttctggacacacaagcagattgcacaatcccacctccagggatttgactaagtttctgccacagaaacagaaacaagcatggtgtgcaccatgcccaggcctctgcacccactggctggatccgactctcccagctgagccttgatatggtagagacccagcttcaact

SEQ ID NO: 214135 - DNA, 314 bp, Homo sapiens
gctcgcagtatctttaacatatttatttatttgctcaattcctttgtatgtggccagtttcctgaccccactgggccactgtcccattcagatgccgtttttatatggatttatacccttatttggtggcctccctgcttagaaaacctccttgtgcttctggctgacttcccaccctactcaccatcttccttttttttttttttttttttttgtaactcaccatcttcctcatgtgggccctggctacccctgggctgcaagaaggaaggtctgatttttatatgttgttcaggtaattaaagtttaaaaga

SEQ ID NO: 214136 - DNA, 280 bp, Homo sapiens
tctttcaggtttcaatataacctcctctgagggagctaacctaaccactctagttagagtatcctctgcactccaccccaggcattttctgtcacagctccctgttttgttttgtttatagactatatcactagctagaagtacttctttttctaaaatgttactttttaaatttctatatcagtcaggactttttaatttctcccagtcaggcattcaggacgttaggttatgccatgcttggagttatgccaactctaaaatctcagtggcttcaaac

SEQ ID NO: 214137 - DNA, 1268 bp, Homo sapiens
tctcctggtaactcacagaacatatttattcattttcaaaaatcatttctactttagtcttcacagagtattaacacatttcattatttggctggtatgtgagtagcaactaataaatatatttagatatactttttccttatgttcttacatataactaactacagacagaaaactgtttggagggctcccatatgatcaatccctgccacctatacgcaagcccttgtgtgatctcctctcactgaatgtgggctataactaccaaatatggcaaagtgatgagatgtcatttccaagaccaggtgactaacctgtgacttttgtcttgttcacactcactctctattgccttatcaatttgcacgctttgattaagcaagctgccatgttgaagaggcccatttggcaaggagctaaatcttgcgaacaatcatgtgagtaaggttagaagcagccccttccccaggagatgactataatcccagtcaacaccttgattacagtctatgagaaaccctgaagtcgaagacccagataagctgtgccctgattcctgactcacagaaactgtaagatggtaatatgttgtttaaaccactaagttttgggccaatttgtcacacagcagtaggtaactaatatactgtttaaaaaaattgtatgaattttctggattactaacgtattttttccaataattgaatccacagatattcactcttccacaaaatttcgaatttgccagtctttcagtttatggctcttttttagacattacttattaaacaatatatacaaaattataaacatgtatgtagcaacaacagagcaccaaaatatatgatgccaaaaccaagaagaaatgaagggaggaagagctaatacaacaacaataactagagacttcgatactttcagtaacggatacagaggccgggcacggtgctcacacctagcactttgggagaccgaggcaggtggatcacctgaggtcaggagtttgagaccagcctggccaacatggccagtgatgaaacctcgtctctcaggagtttgagaccagcctggccaacatggccagtggtgaaacctcgtctctactaaaaatacaaaaattagctggtcatggtggtgagcacctgtaatcccagctacttgggagggtaaggcaggagaatcacttgaatctgggaggcggaggttgcagtgagccaagatcgtgccactgcactccagcctgggcaacaagaacaaaactccatcta

SEQ ID NO: 214138 - DNA, 836 bp, Homo sapiens
ccagcagaagctagcacctttggagccttgggaacccatgaacatcccgacagtaccctcagtggaagcctttgagcacaagtttacgggaacgaggcaccagatgccgtttctcacatcctaacttgatagaggggacttgggcaagatgcagcttcaggcgttggcaggggatctgcatttcttctccacccagaaccataggccacgcgctagatgagagtgggacaaacactgccgtttgtgtttcttctcaggagctaacaccactctgtgtgtggcctgggtagggccttaagaaatctctgtcttgctgttgcaatcctgcctcactgaccgagtcactcaccatatgttgagttcctgctgcatgtcagccctgtgactgaagagatcgggtcccacaggggcagcggtataagggtgggggtacgcatcccacaccagaatccgttcccaaagcttgagtcacagcacctggggcgagtggcactgggatgctttgtgatgtgttcccatggcagcagagccttggggacacttgagtcatgcaagttcataagagggacacctagcaagttcgtattgctggagacagagtcgctctccgtatgagcagaatagtgatcgatttacgttcaggggttccatgttcttctttttgaagagacgaagtagaaatgattaggcatgtcagcaacttagcatgattctagagtatgcattcccaatgaacattctatctggaagatttagggacttctctgttatctaatctgtcagtgaaatgaagattaattttgcatcaattaattctaatacctttttttaactga

SEQ ID NO: 214139 - DNA, 393 bp, Homo sapiens
cttcttgaagctgtgagggagtcatcatctattgggcaagaggtgctgggaagagtgataagtatgacaagcaagattccttccctcatggagcttatagtctaggagggacacagacaggaaactagcaagccacaaacgcatcactgaaagtagggaatgcaactcaggtaaagagggggattgtcagagagactaaaggggcgctccttgggggtgaggagtcaggggggcctttgtttcaaggacatttgaggataaggaacatcgaaggataaggaggcggttgggtcaagactgggggtgcagggtgtctgggtagacaggggatcacgtggagaggagacagcagtgtaaagtggatgactgaggagagaacacatggggcggggc

SEQ ID NO: 214140 - DNA, 292 bp, Homo sapiens
cagttctaactgtggaggttctggagggtgtggaagttctgttctcacctctgagtagaggaattgggagactggaggacaaaataagaggaagatttatttttcactgtttgtccttttacactcttaacattttaaaaagcacatctctgtatagcccattccaaaaagataattatgcattttttaatgcatgtgtatttagtgttttacttcatcatagagccttgtttattctattcagatagaaacaattgtttatcaaataaaattgtcctccagaaaaacagac

SEQ ID NO: 214141 - DNA, 113 bp, Homo sapiens
ctgttactctttcaaacgtttatgttaaaggctcatttggtttaatttccactcagaatagatgttaaggatacaaaaccaaatgtctagctgactactactgttctttccct

SEQ ID NO: 214142 - DNA, 457 bp, Homo sapiens
ctacaatgagatatcatctgaccccagttaaaatggcatttatccaaaagacaggcaataataacaaatgttgacaaggacgtggagaaaagggaacgcttgtacactgttggtaggaatgtaagttagtacaacccctatggagaacagtttggagtttcctcaaaaaaccaaaaatagggctactatccaattcagccatcctactgctgagtatacacccaaaagaaaggaaatcagcatatcgaagagatatctgcactcccatgtttgttgcagtattgttcacaatagccaagatttggagcaacctaagtgtccaccaacagatacatggataaagaaaatgtggtacatatgtacagtcataaaaaaagaactagatttgattatttgcaataacatggatgaaactggaggtcattatttaagtgaaataaaccaggcacagaaagac

SEQ ID NO: 214143 - DNA, 470 bp, Homo sapiens
aaggaaaaacaagcagggctgaaatccagtctgcacagagctggcacagagctaccttaacccagacccagagcaaggggtacttttttgtaattggtccaatcagcagggttcctttttgtaatatgcacaaagaaatggtatattctagcagacggccttgcataacaaaaagatatgacctaagtactttaggcagcaaaatttaaaagagaaagtccatattagcttggagatgttaaagaaagacttcagctagtagaggtcttctgattacatttatcatgagataaatgcattgctattcagttgtttacttacatcatctttaccgttttttaattttctgtaaggatgtagcagggtatttttagccaagcctacataacctcagacggatcacaataggattattttcaaccctggtccaattcattgaggactaacttagtctacacaagcagtaatgg

SEQ ID NO: 214144 - DNA, 533 bp, Homo sapiens
tcctggacctgctccaggggtctctgtggctgacccctaacgaccattctggctgtgtccctggaagctggtgctgtggcccagcctggtggatggcactatcagtagctccctggaacctggggcctttaacaaactttcattaaccccgccatgcccggagtcacaatgctgaaattacatgggcctgtgcctatgaaatattaagtgcataaaaaaggacttacgaagacaggtttggagcatacatttttgccctttactaagcaattgggttagtatataaaccagtttggagggagctaataaaacttctgtttgcttgtttgaagaccaggtatttttaatgctgaatggctagcatttttaaagccaagcttgacttggtcaggtgacatagaatcaaatatagggagctggcacggtggctcacgcctgtaaatccaaaagctttaggaggctgaggcaggaggatcatttgaggccaggagttcgagaccagcctgggcaacataacaagacccatctctaca

SEQ ID NO: 214145 - DNA, 633 bp, Homo sapiens
tacagcgctaggtgggaaaatggggtttaagcagtaactagagaccaggcatgagctatgattaaccactttaaaaaatgattaattagctctaacagcaacttaaatgtcctaaagaatagatggctaccaaaattaagggtggccttcagggtacaaaactgtaaacccgggtatctgaatccgtgtcacatacagagggtaggaattagagcagtatctacatcaatactactactccttcagaacactggatgtcatgagcctgtggtatctcagctttaagaccctgaccatttattagaaactgccgttaggatcatttcagtgctaataatgcaatggtggctgggagcggaggctcacacctgtaatcccagcactttgggaggctgaggcaggcagatcacgaggtcaggagttcaagaccagcctggccaatatggtgaaaccctgtctctactaggaaaaaaaaaaaaaaaaaattagctgggcctggtggcacacatgtgtagtcccagctactcgggaggctgaagcagaaaaatcgctcgaacccaggaggcggaagttgcagtgagccgagagcgtgccactgcactccagcctgggtaacagagcgaggctctgtca

SEQ ID NO: 214146 - DNA, 292 bp, Homo sapiens
cacacgctaggggcgtgaccttgggaaaatcactttgccttgtgcttttacagaaagaacaaggccttttgtgggggattgtggagaggaatgtccatgtgtatgtgtatgtgtatgtattgcatatctatgtggtcattccctggtacatagtaggtgcttcataaacaaaaataccctcccatatcactgcccttctattccatttgtgccatagtgtgtgacctaagagtagataaagcactttttttgtttgtttgttttggtttagatggagtctcactctgtcgcc

SEQ ID NO: 214147 - DNA, 858 bp, Homo sapiens
gagcagaaggtaaagagatatctcacacaccttgtgcccttacaaatgcatagcctcccccattcccagcgtcccccaccagagtggtacatttgttagaatcggtgagcctacgctgatacatcattgccacccaaattctgtagtttacacaggagggttcgcttttgggtttgggtaaacgtataatgaccattataagtgtcatacagagtagcttcactgccctaaacatcccctgtgctctgcctaggcatccctcaacttctttaattttcatgataaaattggaagaaaagtgtttattatgtatgttttatgtatgaagagactgcagctcagagaggttaagtttattgcccacagccacatagctgctaagtggcaaaaccaggctcaaagccagggctagcttttctttctacagaactgctgcctccaacacctgcctctgccctgagcatgttgccctctagaatccgaaaagctctgtaggtggagggacttgtgttacaagatgctggtcctcaagatttgttggtcaaatgaatgaatggtgtaattctgatgtttgcctttgcagataaagagaatgctgccttttttctgcacaaagaaaaacaattacaaagcagaaaacaaagcagtgaaggctaaaaggaatattaaaattttctgaaataaagttagttattcacagtaaaatactccagactttctccaacagggcctttgctttataacccagaggacttttaggatagaaaatactgacaccaaatggtgacaagtagaactcccatgtctgggacaatagaaacatctgaaatgaactctgctctgtctggccggctcact

SEQ ID NO: 214148 - DNA, 1015 bp, Homo sapiens
gtgtatggctatcatttgttttgaggttagttgattagtcatgttgggtggtgattagtcggttgttgatgagatattgggaggtggggatcaatagagggggaaatagaatgatcaccaccgcgcccagcctaatagtatattatttttaaatgtgggctctattagtaggatcagggagttctgtaaatccttgaaattacagtaaaaaattctaatgtgaggctttttttctggaaattcctaaaccaaggctaagaaccactgttctaaaagaagtaaatagtggaattcttagagtcaagaatactttatataagcaaggtataaaagaagggcttgggctagatgatcacaaaggtctcttctagttattattaactatgacttaaagaatgtaccggcatgaactaagtgctaatactgagttaagtactatggaagatataagaaattattaaacagttaatttctttaggtttacaaattttattggaaagaaaacaatacaagatggtccatgcttaaagagtcaagtggggctcacattaagtagggctaggagacatggggaaagatggaaggaggcttaaacttgaccttgaaaaaggaggtgaataggtgggttcggaatagccaagaatgggaatgtgagttttgacattatgtggaaactccttatgcaggaaacaattggtagattgatacctaagaaggaaccaggagtgattcagatctatagtgccagggagacaagttatttaaaagttgaggatgagacttttaaaacctaacttgggtttttgttaatgtatacattttcctaacttttttcattctccccacactttcctgtgtttttggattgctgtctgtttaataacttttcagtggcacttgggaaggtgcaaatggattgtacagatggactgttttgacagtttaaagtgggaattctttatattgtttcaaggacaggcttcaaacttccccccgtctttgttttttctaacag

SEQ ID NO: 214149 - DNA, 992 bp, Homo sapiens
ggggtttcaccgtgttggtcaggatggtctcgatctcctgaccccatgatctgcccgccttggcctcccgaagtgctgggattacaggcgtgagccaccgcgcccagcctaatagtatattatttttaaatgtgggctctattagtaggatcagggagttctgtaaatccttgaaattacagtaaaaaattctaatgtgaggctttttttctggaaattcctaaaccaaggctaagaaccactgttctaaaagaagtaaatagtggaattcttagagtcaagaatactttatataagcaaggtataaaagaagggcttgggctagatgatcacaaaggtctcttctagttattattaactatgacttaaagaatgtaccggcatgaactaagtgctaatactgagttaagtactatggaagatataagaaattattaaacagttaatttctttaggtttacaaattttattggaaagaaaacaatacaagatggtccatgcttaaagagtcaagtggggctcacattaagtagggctaggagacatggggaaagatggaaggaggcttaaacttgaccttgaaaaaggaggtgaataggtgggttcggaatagccaagaatgggaatgtgagttttgacattatgtggaaactccttatgcaggaaacaattggtagattgatacctaagaaggaaccaggagtgattcagatctatagtgccagggagacaagttatttaaaagttgaggatgagacttttaaaacctaacttgggtttttgttaatgtatacattttcctaacttttttcattctccccacactttcctgtgtttttggattgctgtctgtttaataacttttcagtggcacttgggaaggtgcaaatggattgtacagatggactgttttgacagtttaaagtgggaattctttatattgtttcaaggacaggcttcaaacttccccccgtctttgttttttctaacag

SEQ ID NO: 214150 - DNA, 199 bp, Homo sapiens
gtaagtcagagtactattcatatttatataaatagcatgaaatagttatacatttgactcaagatacgtgaaagtatgggacttttatttgtccaaagaattattgatctgttaatgattgttagatttaatttaaataaattatatttgttgtaagagaaatttgaagatgagcttcatttctcttttattataaacc

SEQ ID NO: 214151 - DNA, 842 bp, Homo sapiens
agctgtaccattttacattcctaccagcagtgcacaaaagttccgatttctctacatccttaacacttgttactttgttttttgaatagtagcaatccttacgggtgtgacgtggcatctcattgtggttttgacttacatttctgtaataattagtgatgttggacatctttacatgtgcttattgactaattgtacatcatttttgaagaaatacctatttaagacctttgctaatttttaaaatcagagtttttttgttattgagttgtgggagttctttattatctattctggatattaccccttatcagatacatgatttgcaaatgttttctgcatagtgggttgccttttcactgtgttgattgtgtcctttgatacataggagcttttaattttgatacagtccaatttatcttttcttttgttgcctgtgcttttggtgtcacatctaagacatcgttgccaaatccaataccatgaagctttcctcatatgcttgcttctaagagttttatctataggtttagctcttaatgtttagatgcctaaccacagagtgtcaaaatacatgtcagaaagcaaaagaatggcaaggagaaatagatgaatccactgttacagttggagatttttaacacctctctatcagaaatggacagagacagaaaatcagtaaggacgtagttgagttcagcaacaccatcaaccaactggatataatggatgtcgaaagacaacttcattaacaacagcagaacccatattcttctcagggtcacatggaacattcaccaggacagattacaatctgggcaagaaaacaaaccttaacagat

SEQ ID NO: 214152 - DNA, 150 bp, Homo sapiens
agaaggcagaatcaaagaaactagtcagcatagctgtgatggacatttgcaggttgtactgtctagcatcaatcttcctttccattaggggaacacctgttgtgggtagcttgaagggacagtgccctgcctccttctcctggtctcctg

SEQ ID NO: 214153 - DNA, 254 bp, Homo sapiens
agattaagggttgtttcatggacagtggaaattaaatgaagtcatcagtgccactataagcatcttaagaaggtttctttgctgagttttttttaagcaaggaatactcttgtgagtattaagttaacctgtctagattgagttgtgttttcttctgcagtacttctaactttctgttttataatattcttctaggtgatgtgccaaattatagattattgaaataccttataataaaatcctcttaaactttg

SEQ ID NO: 214154 - DNA, 294 bp, Homo sapiens
gaatgagggaattgatgtacatcagagtcaagtagtaaaataagtgttaagtgggaggccgaggctggtggatcacgaggtcaggagatcgagaccatcctggctaacacggtgaaaccccgtctctattaaaaatacaaaaaattatccaggcgtggtggtgggcccctgtagtcccagctactcgggcggctgaggcaggagaatggcgtgaacccgggaggcagagcttgcggtgagctgagatggagccactgcactccagcctgggcgacagagccagactccgtctca

SEQ ID NO: 214155 - DNA, 576 bp, Homo sapiens
gatagccaatatggggtaaaatattttgcaaaccgtgatagcaaacatttggagagtgggagttgagatgcggcagatgcctgtgtatttatccctgcagcagccttgtgaattcaggaggagggacccacagaggggtgtttgaagctcagagatgttggcgggtgtgcatcactaccagtcatgcacgtggaggactggacctgagatcactatctcagctgaaatggcgctatcctaaaaattgcatgcagtcagaaatagagccctgtttggtggtggtggtggttaacaaggaaggccacccaccacatcgggcagggccagctttgtgctcccacacagtcctctacctcgggtggggtgcagcctgaagcccccttacttactggttatgcctgtgattttgcaaacagtgtcagaaagattccatgacgaccacctatggatccaagggtaagaaccttggtgcagtgtgtggtacttggcttttaattccccagagagaattctgaaaactgagtagtgaaatgaaccttctagaaaggaatgcttcaaatctcagctctgcttccc

SEQ ID NO: 214156 - DNA, 1103 bp, Homo sapiens
tagccttggctttctgctggtgttaatgtgagtgggtctctgttgacctgggcatgactcactaaactgcagggaaggtaacaccaagtgctccttcccttggggtgaatgacctgagttttgggacagactctggtctcgagccaattattttacttgtttgagcctgactaaaatgagaggaatggacaggatggtgtctaaggttcagtgctgctctgacattctcagcctagagatgtttttcctgcttacctgcaagccctgtggtgtccttgcctggccctaggattatttataagctccagtcttcattcatctgtttgcccctttttggatgtgaactctataactgtgagatagtaccttcttgttctttgtgtggcaccctttcagcagctgggtctggtatgtcactgggctggtagtcgatgctgattttcagaacaaagaatgacctttgaatagccagagtgttggctgccaggtctataacccggattgttttaatgaaagtgccaacaacaacagtatttttaaaaatggactgtcgttggagttcatcagacctttttaaaaatgtcattcccttccactcttaaatcttatagccattttgagtaattctttaaaaaaaaatctctaaagaggcctattccttatacagctgaaaatcattaattatttcctgtccttgcgtcaacttcctcttgcccagaaagggtagctgagagtggtttcctgacttctgggaagggaaaacttccttgttctcaccactctgcccttgggctctaacctcaaagtggtagagcaacagctgtactccgaacaatgttaatgtgaacctttggctaatggaagcaaaattttaggaataaaagtcactttcaattatggctgatgtaaggtgtggttgtgggaatgggggtaggaagacaggagttctgtaaggtttaagttacagaattaaaattgtttgatagaaaaagtacatgacattttattgttttcttaaactaattgtttttagacaggaggcccagagacctagctttatatcccagcctggtaagagcttgaatatcttgaaattatttggt

SEQ ID NO: 214157 - DNA, 566 bp, Homo sapiens
tagtacaactgattgatggctcaggagcaggtattgcccaaaatcctgggtatgtggaattggaattgtggagagttgttggtgggtaataagacttcgccccacagttgagatttaggaactatgtactcacttatggcaggaaggctttataagaagggggctatgagagaaaatatttgcaaatcatctgggcacagtgatgcatgcctgtagtcccagctactcaggaggctgagatggcaggatcccttaagcctagagttcgacaccagcctggacaacatagtgggatcacatctctataaatgaaggaatgaatgaaaaccattgaaaaaatatttgtaaatcatatttctgataagggatttatatccagaatatagtactcttacattcaatgataagataaaatttaataaggggcaacgatttgagtagccatttctgcaaagaagatatacaaatggccaataagcacacaaaaaggtactcaacatcccactagggaaatgcacattaaaactgcagtgagagactattttacatccgtagggtgtctgttg

SEQ ID NO: 214158 - DNA, 334 bp, Homo sapiens
caccttggagggcacagggaccgataacaaatgtatgtgtgcaccacaacacccatgtaaaacaagtctacttgccccgtgatgaaaaactattcaccttgacaaaacaggcatgatattcatttggaggcttgcttctaagaaagataaatcctgctgtcactgcacaaagagataagaaagaccggatgacagtttttcattgataaaagattctgtctgtattttaaaagaatttactttctcccctctactgatacccacatgagttaaggcagagatacactatctttcatgtttttgtcagaatgtgttattactgtgggtggcggtg

SEQ ID NO: 214159 - DNA, 333 bp, Homo sapiens
agagatgatggcagagaagcagaggggtgttttagagtgaccaggacagagacagagatgatggcgaagaaacacaagggtgttttagaggctgaatgttaggaattcagaaagcaatttcttcatgatgtgtattttcaatgttgtttcattccctcagctccatctctagagaagcggcccatgctgttgatgacctgagtctacaagtttcctcacaaattgtattcagagagcagcttcctgcttggtgggtgtccgtagtccccacagatccctacaatggagagcaactcagagactgaataaatagaaaataatttattttaggct

SEQ ID NO: 214160 - DNA, 1061 bp, Homo sapiens
ggcctgtacaaaaaactactttgtatatgccttattttattaattttgcttctgaatttcatcaaattctctgatcataactctatattcttgtaaggaatgctcagaattatactatttcactccaaattttattattattgagacgaaactgggtatagaaagttgtgggaccagtttgtaatttattgctttaaaatttggtcaagccactcaaattctctagctgtacctatgaaatagctttaatatttcaatcccctgcattttctttgaataatatggagtttgaattgaagtggtcctgaatttgagtgctgcatatgctacttttgagatatgtgatcttgagcaagttgcttaatcacattaagcctcaattctctcatctttaaaatagaaaaaataatagctactttacagtgttgagaaaagaataagatgaaacagtttattaaaaacatagaagagtgattaagacataataaagtctacataaattgtgcctattgttattactaataaaaaaaaagaaattctacgtgtcaggaatttgaacaaattacagctggatttgcatatttcttccacaagatgtatgtggtcccatctgataatagggaattggttggtaactggaatcttcttggaaacctcttaaatcacagatcttgcacttgtactgggataatctggagtgtgtgctccgctgagtttgttgaccaaatcacctacaggtgaactctccatatatgtattttcctagtcaattcctacactgacctcaagcaaacactgatcagctttctgtcataatagatgcgatttacttttttagaatttaataaaaatcaaattatactgtatgcatccttttgtgtctggattgcttttttttctctgccttacattgttgaatatattctaggtatgttttactaattgcttggttgtatattaatgcatactgcattttgtttatccattcaactattgatggaaattggagttgttttcagtttctggttataaataaaacagctatgaacatttacatacca

SEQ ID NO: 214161 - DNA, 343 bp, Homo sapiens
agttttgccatgttggccaggctggtcttgaactcttgacctcaagtgatctgcctgtctcggcctcccaaagtgctgggattacaggcatgagccaccacacccggtccagatttactgaatttaagtgtgatcctttttctctatgtggccttggctcactacatgtggtgtttccttgtagcatatgccatagggtttcatgcctgttctatcacaatgagtgctaaaagtttctattttttttttccttgggctaaaactatgaagtgtacagtgaaaacttaaataaacaaaaagtctctgccttgttacttagaaggtattatggaacatgtatatt

SEQ ID NO: 214162 - DNA, 505 bp, Homo sapiens
ggaatatttccaaccttaagttctacagattcaaactatcgatcaaacataaagatagaaaaaaagcattttcaggcatgtggcagggtaacaagctcatcctggtttgtccaggattttcctggcttcagcagcattagtctcacatcctgggaattccctcagtcctaggtaaactatttacccagatataacctggttaaaaaaaaaaaaacctaaaattcacatgtcccaataatctctcaatcccaggcaaatcaaggaagttggtgacccctgatgaggtctcaaaaactttctgtgtcatggtcactttctagcgaggttactagaggattctgtcaactgaatcatgagatttaacaaaaagtaaggactgtagctcacatcatcctcaatggtgaaacactagacattttccccgatgaatggaataagacaagggtgcctactctcactatttctattcaactttgtactagaagttctagccaggggagttaag

SEQ ID NO: 214163 - DNA, 616 bp, Homo sapiens
ataatttccttgataagatttagtattaatcactcaatcgtaggtttttttttaactaattaatttatttagatggagtctcgctctgctgcccaggctggagtgcagtcgtgcaatctcgactcactgcaacctccacctctcgggttcaagcaattcccctgtctcagcttcctgagtagctgggactaaggcgctggctaatttttgtatctttagtagaggcggggtttcaccatgttgctaggctgttctagatctcctgacctcaggtgatccactcaccttggcctccccaagtgctgggattacaggtgtgagtcaccgcgcccagccaatcatagatttttaactgcctaaaattgttcagtgtgtctgatgaagactactattttttgagcttttactgtgtgccaagcactgtattcagttatttgttgaatttccccaacaacttcaggtggcaagtattatttttatacatgagtaaactcaggcatggagagaaaaatagcttgtgcaaaatcacgcagcgactatgtggtacagcttcgactttctgagttgaaagtttgcacttctaaccagaacttggtacctcctcccttgcagctgg

SEQ ID NO: 214164 - DNA, 457 bp, Homo sapiens
tgcattccagcctgggtgatagagtatctcaaaaaaaaaaaaaaaaaaaaaagaaaagaaaaaaaaaggtgggggaaaagtataaaaattccttaaattaagaatctcttaaaatgaagagaatgtgactattaatgataatgatattatatttttaaaattcctacttttattgttttattgtggtaaaacagacatacaatttaccattttaaacttttttttttttttaaagagacagggtctcgctatgttgcccaggctagactcaaacccctgaactggagccatgtacgcacctcagcttcccaagtagctgggacgacagatgcatgacactgagcctggttgatttttttttttttttttttttttttgagagggaatatcactctgtcacccaggctggagtgcagtggcacaatctccgttcgctgcaacctctgcctcctgggtt

SEQ ID NO: 214165 - DNA, 1034 bp, Homo sapiens
tgcaatagttttggtttctcctggtgtgattttattataaatacctgtatattgaaattattcatttattcagtacagcttgttgagcaccaagaatgtgccaggtttagggctggatgcttggaacacaaagacaagtaagtcatggatggttccctgcccgcagggctttgctataaaacagtgaaaataaggagaacagaaggaagtctaaaagacaaaggaaaatgttttgtctctgtttatagttttgattgtcttttcatgcactctaaaagatgaatataaaaactactaaggaatgagactatattatttttgtaatacttcgtcgaatgcaaatagtaaaataaaaataattttcttatacatggaaaatcacatttcatgttacatttcattaagagcctaaaggacatgagtgtaatttccaagaggcagaattttttattcactgctgtatattcagtggctagaacattggctgacgcatactagtcacttaataaatatttgctgaataaatgaaatggaaaatatgaactagcagaattttgtattttgtagatgttattagtatgaattgtatttcctaatagaagtgtctaaaatatgtgatgcctacttctgattaaatatataacattttcaataaaatattaagagttagaatatgttttgaagcagtgtgtaaattgtgaagtaattttagaatgttcctaaagtaattcatattagatttttaggcacaaaatttatttttaaataaattacaaagggttaataaatacaccagattctgaatttttaacaccatttggaaagtggtatgagaaatatatcaaattctgtttttttatttattattcatgtgtttattcttaactctatctcttgcaaatatcatcccaggcttattccttatatataaaagtaagggcaagacagagctacttctgatgtcttaaataaatatcacttgtatggttttaaattttgaaaacactttttaaaaaatttgaaagccttcttga

SEQ ID NO: 214166 - DNA, 274 bp, Homo sapiens
gtaatggttgcacagcaatgtgaatgtacttaataccactgaactctacacttaaaaacagttaaaatggcaaaattttgttatgtatatcttgccaacattaaaaataacaagtaaatatgctcattatcccttagaccaaactatcctacttctggcaatttgtcctctaggtattctacaaaatgatatgtatatggacaggacatttgtactatgtgtaattaaaaaaactgaaaaaaagatgctcaccaacaaagggcaagatgaataa

SEQ ID NO: 214167 - DNA, 478 bp, Homo sapiens
gtgaaaccacatctctactaaaaaatatatacaacaattagctgggcatggtggcaggcacctgtagtcccagctactcaggaggctgaggcaggagaatcgcttgaacccaggaggtggaggctgcagtgagccgagatcgtgccactgtactccagcctaggtgacagagtgagactccgtctcaaacaaaacaaaacaaaacaaaacaaaacaaaaatgtaatgggcaggctatctgcctggagacaaagtacatgcccatttctgagaacattatttgtcctggaaaggtagtttcatagtgggattcttcttccctgcttcttcctgggtcccacaaggttgatcttcctccatacctttcttttgttccctaacattttacagcattgattttctaacaaaaggaaggaaagttcctagggaggtatatcaacatttctaaaaggaaatgtatgtatactttgaaaatacat

SEQ ID NO: 214168 - DNA, 382 bp, Homo sapiens
acatttctccagtaaaacgtgtctgatgggttaggaccatttgtctccaaggaatggcagtggttttctttttaattgtttgtttgtgtttttcaagataatgctgagagacatccaaggagtacagttcaagaggtgattttaaaaagcagataattacttgagaatggctagagtcattggaatctgattagctcctttcactatcaaatacctattttgattttcaatactagggagaaactgattttatcacattataatgtttattgcaaaacaaagtcataactctttaaaaatgtgtatgttggtcatgtttatttaaaattacatttaaggaatcatatatgactcataccacaaatgtaattcatcagacact

SEQ ID NO: 214169 - DNA, 521 bp, Homo sapiens
aacccctgcttctgccgcagcacagggaggggttctctctggaagttcccttatctgatgaaaacttcttccaaaggaaatgcacttgtcttaagattccctttctctctgaatctcatcaaataaccaggaaaaatcaaccacttgagaagagactcaaagtcctcaccatgcccagacagattttcatttattcttctgagagctgcaccaagagattacttaagagactgttttggcataagactaccattaacagtgcagtttcaccccccaccttcccgtaactcatcccattcaacttctgaaaataatcatttacaaactattgtctgatctttgggctcattaaattcccctaaatattattcactacctttcaaaattgtccactcccctctgtcttcgacctctcccctaggaagagggtgcattttaaacctcagctatctggaccttctttgaatctcatattctatctcatgtacacattaatacatttgtatgccttttatccagtt

SEQ ID NO: 214170 - DNA, 751 bp, Homo sapiens
ttatttttctttatttgaatgtaacacaatctagatcatgctggatcattcttttattatttctttgaagaattgtgtttcctgagtaggttgagtattttatagacaacacattaatagtcaaatacttatgaactgtcaacaccgtattgtatatttccctacataccaatttggataattggagttaatgagaccaaacgatcaaaactagtgtgatgtgttcagatagtacatgatgtaggaagatccagctataaaactatcacttcaaagtggtcaatacagatgctcagtgaagcttagtttttgaaatattatgtacctaagcaacacaatgaatgactttgctgagtgaattttacaaacctatagtcttttctgcatttcattaattctcttagagtgcactgtgttaaggcagaatgtattacgtgtgaataagaagtgtccagtaattttcgaagtgcagattgtgatccattagtgaattaccttaacagttcagatgtttatgacaagaatcaaacatagataatagaaaatattgtgtccggacttggtgggttcttggtcttactgacttaaagaatagaagccgctgaccctcgcggtgagtgttacagttcttaaaggcggcgtgtccggagtttgttccttctgatgttcagatgtgttcggagtttcttccttctggtgggttcgtggtctcgctggctcaggagtgaagctgcagaccttcgcggtgagt

SEQ ID NO: 214171 - DNA, 472 bp, Homo sapiens
agatagggtctagctctgtcacccaggctggagtgcagtggcaggatcacaactcactgcagcctcaactgccagaatacaagcgatcctcccacctcagcctcttgagtaggtgggactacaggcacacaccaccacacctggctaaattttgtactacttgtagagatgggatcttgctatgttgcccaggctggtctctaactcccaagctcaagcaatccgcccacctcgtcctcttaaagcgctgggatttcatgcgtgagccaccgcgcctggtgtgtctttccatttcagatcagactggaccaaccctttgggtttgcagacaaggaaaccgagacccagagaagggaagcaacatgctcaagcccacacaacaagctgctgggaagggccaggaaagaatctgtcccccagatgactctgctcagcaccggctcccttctctcctcatcccataccccataac

SEQ ID NO: 214172 - DNA, 200 bp, Homo sapiens
gagaaaagagatatagagagtttcagaaactttccagtttcaagatccatcccttctcaagacccaactatatatatcctgtcctacagttcttaaaagaacccctgtacactaagtacatttcccctttttattcaggatgtctcagccaggcacggtggctcacgcctgtaatcccagcactttgggaggctgaggtg

SEQ ID NO: 214173 - DNA, 556 bp, Homo sapiens
aaagatactaactggagcccttatcactagatactgttgcatataaatagtaggtatatggtacgttagaagaaggggtcctagtattcttgaccgtgattatttgagatgatgtgattaatcatctacaaggtaatctgacgctaatggttctatgtgatccttcctccttgggagattaagcacttaattgtcctactgttcttccaaagaaatacttaagtgagataccttgaggaggtggtaaggctaagaaagtggattcctgagtaaaatgtcctggattccaatcctcgtattatttgtgaaattttgggtgagtcacttaatctctccaagactaaattttcctatctatgaaatgaatttaattgctgtgcctactccataggattattataagaagtaaatgatgccgggtacagtggctcacacctgtaatcccaggtggctgggattacaggcatgcaccaccacgcatggctaattttgtttttttagtagagacggggtatctccatgttggtcaggctggtctcgaactcccgacctcagg

SEQ ID NO: 214174 - DNA, 424 bp, Homo sapiens
cacgtgagagccttcagaataaagacccaagctaacaataagatacagaagcttttatattaatatcatcttagttgatagaaataatgtggactcagagcatgccccacaacaggttttagttgtaaggcaggttataagagagagaaaggaagaggcttgactggcaagggtggtcttgttaggtaaatgaagcttccctcagagaaaatagatggtaaatgtttccttttagacttttaaaggtgtcagcctctcaatctctcttagttctaggaaaggcatacaaaaggccttagtaagctgagcgtggtggctcatgcctgtaatcctagcactttgggaggccaaggcctagcactttgatcatgaggtcaagagatcaagaccatcctggccaacatggtgaaaccccgtctctgct

SEQ ID NO: 214175 - DNA, 784 bp, Homo sapiens
agctcgcctttccagggttatttttggctgaggctgttcgctgatggcaaaaggtttcagccccctcccaaatccctccccgtccttgttctaaagagaaactggtgtgtgtaggctgcgcactcccagggagacagggagacgggccgggcgccggagaggcttttgggacaccccgaaagtgagtccaacttggggagaaactgagggcagctcgggcggtctggcagcggagaaggtgggtgggagaaaactttacaggaaggcagaagcaatctctgccgagagagtcagccgagcggccgcgcggagaggaggggcgggcggtccccaggcgggcgggtgcagggcgcagggcgccgacctgctggagagggggcccgggcgcgaggcggagtcccggcgcgcagccaggctggtggaggcccccggcaggctgcagattccctccggctccgggagccgcagcaggaccggccaggaggcgccatggaggggagccccatcccggtgctgacagtgcccaccgcgccctacgaggaccagcggccggccggcggcgggggtctgcggtgacccaccggcctcttttagggccagcgcaactacctgcccaactttatccagagcgtgctgtcgtccatcgacctgcgcgaccgtcagggctgcaccatggtggtgggcagcgacggcaggtactttagcaggacggccatcgagatcgtggtgcagatggccgcggccaacgggattggacgactgattattggacagaatggcatct

SEQ ID NO: 214176 - DNA, 701 bp, Homo sapiens
cggcgatcgcgggtgaaggctggggccaggcgcgggtggaggcgtcaccggggtcgggctagcaggccctggaatcaggcttttgggacaccccgaaagtgagtccaacttggggagaaactgagggcagctcgggcggtctggcagcggagaaggtgggtgggagaaaactttacaggaaggcagaagcaatctctgccgagagagtcagccgagcggccgcgcggagaggaggggcgggcggtccccaggcgggcgggtgcagggcgcagggcgccgacctgctggagagggggcccgggcgcgaggcggagtcccggcgcgcagccaggctggtggaggcccccggcaggctgcagattccctccggctccgggagccgcagcaggaccggccaggaggcgccatggaggggagccccatcccggtgctgacagtgcccaccgcgccctacgaggaccagcggccggccggcggcgggggtctgcggtgacccaccggcctcttttagggccagcgcaactacctgcccaactttatccagagcgtgctgtcgtccatcgacctgcgcgaccgtcagggctgcaccatggtggtgggcagcgacggcaggtactttagcaggacggccatcgagatcgtggtgcagatggccgcggccaacgggattggacgactgattattggacagaatggcatct

SEQ ID NO: 214177 - DNA, 524 bp, Homo sapiens
ccaggaagttgacatttgcacaataatgctaactagactacaggcttcattcagttttcagcagtttttacctgccactcagttggggagagggggcattatgtgtgggggtatgaacaagtaagtgtgagtaagtatagtcttttgcaaaattgaatcccctgtatggattcctgtaaccaccatcacaatcaggatacagaatggttctattgccataaagcaatgagcagggcctacccctttgtactcacaccaccttcttcactgtctcctggtaaccactaatctgttctctatttctatcattttgtcatttcaagaatgttatataaatagaatcatatagtatgcaaacttttgagattggttttttcactaagcataatgcccatgaaatccctccaagttgttgcatgtgccaatcatttgttcatcttattgctgaagagtattccatgatatagacacaccagtttgtttaaccatttacccattaaaggacatttgtgttatttccaatt

SEQ ID NO: 214178 - DNA, 155 bp, Homo sapiens
aaatacttttatggatcgtggttcaaaaacagcccagtgctgcttcacaggaaactgaggcagaaggatccctggaccctaggagttccaggctagctgggcaacatagcaagacccttgtttcttgataaaagaaaaaaaagaaacaaagaacc

SEQ ID NO: 214179 - DNA, 350 bp, Homo sapiens
atcaccttgtttaatcctagtgacagtcttgtgagatgggatttattgtccccatttcacatggggaaactggtggggtgtggtggctcacacctgtgatcccagcactttgggaggctgaggcaggaggatcacttgagcccaggagttcgaagccagcctgcgcagtaagacctcatcttaccataaatgtttaaaaattagccaggcatggtggtacctgtctgtagttccagctactctggaggctgaggcaggaggattgcttgagcctgacaggtggaggctgcagtgagccatgataatgccactgcactctagcctgggtgacagagtgagactctatctta

SEQ ID NO: 214180 - DNA, 575 bp, Homo sapiens
atattattaaccatgctgaccatgccacatttccccagcatctaggagtgttctcttcctagagcatgctttctgagttgttcacgtgaacatctacaatgttgcaggagcctttttttttcctatgggcaaaatcatctattgaccaaaacaagacatttaagtcactcagattctgaaggtaccccaaaaccagggataccccttttcctctttactgatcatcgagccaaggaaaagccactggaagggacttgggctcacacttacaaatagctggcttgcatggaaggcattagaagtggtttcctgaagacctggacaactgcctggctatcgttctggctgagtggaccctcagatacccaagtggtgtgagctggctgcactctgttctttgggctctgagaaacaaatcctttggattttcaaaactatatttagaattttcataaagtctgtaacagacttggccctaggatggccaagtctccatctggatagcccagcctgtgatcaaaggctgtgggcatcttcatcgtatggaaaagtaaattcactggcacatctcacta

SEQ ID NO: 214181 - DNA, 497 bp, Homo sapiens
gagccggcagcccctctccgtttccttagacacttactgatgctgctcctcccagcctgatgagtgacggatgaagatattagatttctattatccctaagtctctcgtttgtttcctgaggcaagtctacataaggccgggttcccttgtttccaaggcccgcctatcgtgtttgcactgactgagctcctccctggtgggcccctagaagctgttgtacttatcaagtattcttcagccctctattcttttacctactcaggaaattgccctcttattatcaagaagacctcatcaaacaagtttcttatctgactcctctctaacgagaaacccataaacctccagacaggcaccaccggacaggcagcctggtgtggggacctgggagtcccagacagaggttttcagtcctagctctaccacttgctagcaggagaagtttgctatcctagttgggttcttcctgaagccgaccctaagacaaggccttgga

SEQ ID NO: 214182 - DNA, 414 bp, Homo sapiens
  misc_feature (359)..(359): n is a, c, g, or t
  misc_feature (361)..(361): n is a, c, g, or t
gagccggcagcccctctccgtttccttagacacttactgatgctgctcctcccagcctgatgagtgacggatgaagatattagatttctattatccctaagtctctcgtttgtttcctgaggcaagtctacataaggccgggttcccttgtttccaaggcccgcctatcgtgtttgcactgactgagctcctccctggtgggcccctagaagctgttgtacttatcaagtattcttcagccctctattcttttacctactcaggaaattgccctcttattatcaagaagacctcatcaaacaagtttcttatctgactcctctccctcctccaccctccaccctcaagtaggccccagngnctggtggttctaatcttgtgttcataagttcttgtgctctgtcacccaggctg

SEQ ID NO: 214183 - DNA, 427 bp, Homo sapiens
gacctcaaactgagagttataccattggcttccctggtctccggctttacaacttggactgagccacactactggcttctccggttctccagcttgcagaaagttatatgggacttctcagcctccataatcataataaacaggattcccaggagtgacttggttctgaatgacttggaagtcaaaaggaagagtccgtttctccagtaacaaaagtatgcctgacaagaggctctaagctgtcctggatgccaatctttgtgccgactactttacagtgattgattgctcatacttcacggcaaccctgtggaatagataacatcatcatcccccttttactgaggtgtggggaagttacctctattgcccatgatcatagtttagctggcgctgctttataaaagaatgaatgaataaattaatg

SEQ ID NO: 214184 - DNA, 417 bp, Homo sapiens
agcaccagaaattattgtgtatcctggaattaacctaacacaaatgcacaaaatctttatgaggaaaaatataaaactctttcaaaggatgctttaaaagactcagataaaagacatgcctttttttttttttgagacggggtctcactccatctcccaagctggaatacaagtggcgtgatctctgctcactgcaacctctgcccccaggcttaagagatcctcccacctcaggctcccaagtagcagggaccacaggtgtacacgaccacacaaggctaatttttttgtacttttggcagtgatggggttttgccatgttgcccaggctggtcttgaacctcctgggctcaagtgatctgcccacctcggccttccaaagtgctgggattacgagcctgcgcaacagcctgggtg

SEQ ID NO: 214185 - DNA, 322 bp, Homo sapiens
agtccctacaggaccgtgcttctcccctacctctgggcctgtctggaatgttctgtctactagcccacctattccttctacctggccatctcccctgctgaagctttgagactgtgagttctagagacagagatgtgggtttgactctaggttttgtaccttctggctggaagtctagtcattcttctctgaatcttagctgtgagaagtcagtgagatcatgcatgtatcgtgcttagcaaagtctagcaatatacatgtgccttggttgcaccagcgtggtttgagagatatgtccatcaatccaatagttcggataacc

SEQ ID NO: 214186 - DNA, 461 bp, Homo sapiens
tttgaattagttggatttccatggttatttaaaaactaggcccacttattttctaaggcacttttcatttgtaatatcactgaaattgaaattccttttggtttgttagaactctgataggaaaaggcagccagaagaataggaaaatttaccttcaggactttctgccagataatattgttgaatattttagtttatttactcttagaatctttattctgggaattaaaaaggtaagcgaatctttcatgtacctcatcaattttatgtatctgaatgttataatctactttagccagttacataaataaaatcaattctatatttaagctaaaaaataaaacatacaaatctggagacctgcctaaacagtggcactttagggaaaatataacggggagttttaggtcattataagttgaacatattgtactacacagtactgtaagaaggaatagttc

SEQ ID NO: 214187 - DNA, 390 bp, Homo sapiens
agcctggtagagaagtgagaagccatacttccattctctgagtgcactgactcttagcaactatgagcagaatcatggatgcaaggatttttataaaattgcaaagtggaaactgcattcttgtagcatggggtaaggagaactcatacttgagacaggtgaagagctaggtttggggatgaaagcaagtggacgaggcatgtttttcttgggagaaatcctgggaacagaattgaaccacttgtggaaaggcaggtaggggaaaggagggaattcagagggatgaccaaggtagaagctcagtcctgctgatgggctctgcatctctcagttgaggtgggaggtggtgggaacaggaagcacattggtcttagagccactgcctcctgg

SEQ ID NO: 214188 - DNA, 455 bp, Homo sapiens
aaccagtgcaagttttgaaacataatttagctggcaaatgcacagtgatggaaattagtaatgactgatggagagccgtacatacctgttgctccttatcctttcagaatggctgctttggcagatctgcctgtgctgggagctactcaacatcacttcattttcatctggacctagtgagagtccctttgcctaacgaatttctgaaatttatttatttactagaccccttataatattcatggctttaaaaaatgacacagcatctttattttattacatgtcaattttattaataatatttaggggtttttttaaattataaaaatggcacatgctttttataaaatgttttaataccacagatgagtatcacatccacagtcaaggcatccctttgttctggtgttgtgtcccacttcccaaaaataaatacggttaacactgatgaacac

SEQ ID NO: 214189 - DNA, 357 bp, Homo sapiens
agtcaaagtcatagaaatagagagtaaaatggtggttgccagaagttgtgggggttaggagatgttgatcataggacacaaaatttcaatttggaggaataaattcatgagatctcttgtacatcatggtggctatagttaatgataatattaatatattgcatacttgaaaattgcaatggtataaaagagagtagattttaagtgttctttccataggaaaataaatatttgaggtaatgcatatattattttgatttagctgttccataatgtatacatatatcaaaacatcaagctgtatgttataaatatatataatttttacttgccaattaaagaaagaatgctaactct

SEQ ID NO: 214190 - DNA, 431 bp, Homo sapiens
tcagcagcctgaacgggggcttggctctggctctccagtcctcatccatgatgccccagaactcaaccttccatctgagagctgaactcgctcctccaatgttctctgaataatggaagtgtcagagcagagggattcaagggtcctggccaaggatcagctgccctatctgccttcacatgttcctgaggacccagagactccaggctgccccctgaccactggagatggctgcaaagggggcgtcctctggaagatggtcagcagcctctagaggaagcagacatcctggacgctgacctccagggcctaatgctctgccccctctcctgacctgcacctcgagggggatgtgtagagggtctgctctgggagtcttggctgtggcccccacctacccaagaaagccaatgcccacgatcagctcagct

SEQ ID NO: 214191 - DNA, 405 bp, Homo sapiens
ctctatataagatgcaaacacttttattttttctgaaatgatctttttgtgaaaaaattaaaaaggttgctcaccagttgctaaaattaaatgcggaaatttccttagtggaattgatacatttgaatgctggcttcggggatcccaaatgtgattgcttctatcggtgcctgtaaaggagtctgtaattatggaagcagtcttaggctgtaggtaagatctggagccagggtggacctttgtatgttcagcaatgaggggatatttttgatgagctggaatatccaattgaacagctgtaacaaagtttctgagaatcttttcctcatggttgtttatagtttgcttccagcctgggcaacaaaggcaaaactccatctcaacaacaacaacaacaaaaaaaaa

SEQ ID NO: 214192 - DNA, 1019 bp, Homo sapiens
ctctatataagatgcaaacacttttattttttctgaaatgatctttttgtgaaaaaattaaaaaggttgctcaccagttgctaaaattaaatgcggaaatttccttagtggaattgatacatttgaatgctggcttcggggatcccaaatgtgattgcttctatcggtgcctgtaaaggagtctgtaattatggaagcagtcttaggctgtaggtaagatctggagccagggtggacctttgtatgttcagcaatgaggggatatttttgatgagctggaatatccaattgaacagctgtaacaaagtttctgagaatcttttcctcatggttgtttatagtttgcttccagcacacccagatctgacactttctggccttaaagttgcataaaacaccctgtcagttgtaggcagtaagacagggtcttgggccgactggggacaaatatcagaatcttcctggggccagtagcaccagaatggggcctggcagacagagagccaaggttcttctgggagaaaccagcaatgctctggtggaacgaggtctgttctccacgtctgacacggtcctcagccagtttctaccaatcagattggagcctttgccggctcagcctggcagatgggcatgtgcacgttttgggcatgtgcaagttttgggcctgtgcccaggctgtaaggtactgctgacaggctgcgggctgtggtcttggaagggaaggttcaaggggtggtgcaaggctagtacagcctgtgctggattacccaggaaagctgccagcatgaccactgggtgaccagagaagctcaacaggtcttctctgttccagcacagtcctctcagtgggcatgtggagagctaccagaaggccatgggttacccagggtctctcctttaaagagggcggaagtcccctgtaatgcttgttacctggtcagcctgagggcacttgactgtgtgtcctatgctgcaagggatgtaggaaggcaggctgtggttagagtgtgggcttt

SEQ ID NO: 214193 - DNA, 728 bp, Homo sapiens
aatgacaacaaaaacccgaatgaaaacaacaacgatttaagggagagaaggagtaggtatgggtagatttcgagagtcagggaacaggtttcatttgccctttcaagtttatataaactaaagcaaacaattaaatttgaagcctgctgacactgtaatagatttcaagtaagctggtagaatttaatgaagtgtattagatgtcagctatagtattagtagcattttaacaatcagccaataaaacaagagcacagtcttctgtgcctgcaactttgtagaagatgttttatagtggtatggtactgcaagataaaaaaagtagaaaggattttagcccttgatccttcattttgtggggagaaattgctctcatttagggaagtgatacgttagtaataggcattgagtgggcagataactgaatagaacaggttgtaagttggtggcatttgggtcctgaaggttgagcaggattgtgataggacctggttgggaagagcggttgtagtagcagcagcgtgaggatgggcatggcttggtcttgattgaatgtgtctataggagaggagaaacaaagccaggtgagcagactttgcttgctgaatgaaaagggtgtctctgtttttcctttacttctcatctgtcattgtgtgaccctggtggttatagtttggggcagcaaattctgggtccttaccttattactgtttgggtgtgctttgata

SEQ ID NO: 214194 - DNA, 318 bp, Homo sapiens
gtcctgcatggagcttgttcctgtgccagcacctggagcagccagccagatcctgcactcgctcactcacgtgctccctcccaaaagaggttgagtgcggggggccaagtagagggggcacccctgctgtgagtctagcagaggggccaagaaaagtgctgcatcattagttcatacctctttagccacctagagtctacaccatatcatagcttcctaaagggtctttctgacttctgctgttccccctctaattaactttccaggctgctactcagattaaagtttctatattgctctgattatgtccatccttcc

SEQ ID NO: 214195 - DNA, 531 bp, Homo sapiens
gtcgacccacgcgtccgatggaaacaagaattgtgataggcaaaacacaactaagggagatgcatctaccttaataggcatctttcctatgagagagtgaagacacttgaaatgattatgggcaaattgttagtaagccaaaagattcctcttgatagtttgtttctgattttttttttccatcttaggcaagggccttaaatatcataatatagggataccttcaaggagcagtagaacatgtttccttttggtaaagttctggttagagcttttggtctgtcatacggtgagggactttgaaaaccagctctgtaagtttttaactttctaaatatagaagggagattactttggaaaatctgaattaaaaaagagaagtctccagaactctggtctgtaggctcaggtgtaaacagcataccatgcatgaaatgcctggtgtagtctggcccctaactagactagctgttctgaattctgcgtgagtgctgctctgtagtcagactcgtaagtcagacattcctctaa

SEQ ID NO: 214196 - DNA, 681 bp, Homo sapiens
ttaaataaaataaataaataaataaataataagttcacataaaacctctcccatggtgtatgtagtacatcttctagataattatttgtagttgattaatccatcatactaatattgacacttaaaattcaatagctaattgacatgttactatattatatacaaagtaaaaagctagagtgaaaattcaatacatacagcaaattttagaaagatttcaactacagtttgtggtgctatcaattattacatgaaaattttaatatgcaactctgactataaatatttatccattaatatttattaaatgtatgttatgtgccaagcactgcgctgaggttacagatacaaagatgaatatgatacattctctgcccacaagcatggaaagaaataactataatgaaatgtggtaagtgctgtaactataacaaagttataagcacttgtttttactatagcatttaagtaggctgcagaaacctattcatttacttcgtgcatataagttattctttgatgtagatattatctcctgttattctcctagggagtcactgtgcttattcacaaccaattctaaccagctctaggtctaatagtgtaggatatgaaaactgattacagagaacctagtttgggagacatgtaaatatgcttactccctttactacatcaagt

SEQ ID NO: 214197 - DNA, 540 bp, Homo sapiens
gtagcgggagacagagaaagggcagggtctctccggatgctccaaggtgctggacgcacaggtccctttctgtagtccttgtcatgtaagatcttttcatttaggctaagcaaatccagatgttcttcaaataattcaggcatatttggcccaagcataaacttgtcttcatttttcatccaatctgacaaacgtttgcaatcgcctcactctgtgagttccaggacaccttcgggctggaaggggttaatgagaacaagccctccctggtggcttcccttccccctggtgctgcccctcggcccctcccaggccagcaggatttgctgtccaaaggccctcaaaagacatccaagcagtcttttcttagaaacaggaaactgtcttcggccaagtacaaatgaagtgaagcacccagaaacctgaggaccgctccaaactgaggcctggaggcagacagggagggcccaactcctggcagggcctccaggactcaggctctcatgaatgagactgaaaaaaagaaaataaaaaaagaaa

SEQ ID NO: 214198 - DNA, 1602 bp, Homo sapiens
acttgtcaaattgcggatcttggagttaagagaaaatcacttgaaaactctaccaaacatctgaagatccagagtgtgccccttgcccaatcgcctgagactatacagtgacacctacaacagaggatgtggagggagcagcttttcgggcaccagaaatggcagcatcaggagcatcagcacgaatagactttgtagaggtagttctcccaaactatattatgaaaccaaacatttttggtgcgctacctgctgatgggggctgccttcttactgcctagtatctacaaaatgtttggtctttgttaaagtttaacgatgacatttctgactaatatagagagacctgatttttttccaaatgtgttcagttgccataactttcaatgaatatgaaattttatcagtctcagaaaaacattaatacccatatttttatctaattgatttcactatttgttatgttaaggtgcttttgtgtataattttgtatatatttttaaatgggatcaaactaagccataatttaaaagtcatcctaatgcagtaaataagataatttctctagtttgttaaattcttcagagaccgaatataattgctcgtttttctgtcatactccctgatgatgttccattgtggacttattttgcaaagttcccagatggcacaagtcaaaatatgaaatgctgatgattgattgattttatgtatcctttcatcttatgtaatttaatgtggaacagttattttgtagctctaaaatacatttgttaattaaccatattggcttttcatgcagttcaatggcttatagcatttcaatttgcatagaaaatgaatctctgtaatgatacttttgctaaataaataacaatcgacataatgggttcatttgcttttaacattttatacatacaatttagaagtaggatatatttcatattgaaattttgaaaagcttgaaattcaacatacaaggtcaccatcttgctgatgcctaatgcagtacagcaaattcattcttcatcccatgttaactcctttttggaacaagtcaaaatacaaataatttacaatgattgtgttggagctattgcttgattaaatacaattcaaaggttctttttataaaacaggtgtgagcaggacacattgcacttacgggcttttcctatttttttggttctatttcattttactgcctaggaaagaaacatttttttgtaaaacctatgctatggaactgaaatgtactttattgaatatttctattctgttttatgaatatcaattatgtgaaatatataaatataaaattgccttagaatgcctaactctttgtataaaacagatatctgaaagtagatgttggttttttgttcaaattgtgtaaatgctgatttttccatgagtacttatgaagatctatatgtaaaaattttaagtctgcttactgtgtttgtaccaccttgttcttagctgtgtatactctatgctaattgacttctgtcattgtcacatatattgcatatgtctctcaaaaattaaaaggtatattgctattctaaaaataaaaaatgtaaattcctgaaaaagctg

SEQ ID NO: 214199 - DNA, 122 bp, Homo sapiens
caagataagcctagaacatcttgtcacagcagaaagcagggaagctacagaggattttaacaaaaaaaaacctaaaaagttagcgcaagaggcttctcctgaccaaagatgagacaatttta

SEQ ID NO: 214200 - DNA, 473 bp, Homo sapiens
caggtggcctttgagtgtatgtggtaaagagtttttattacagtccaagagttccacaaataagttatcatgcatcacaaaaagtttcacttcttaattgcatatgattttcttttaaatgcaaaaatatgaggatcatcattgcacacctgctgtacatattttttaatgcatgttctaaaagagatcaagaaaaaatgcggaagaagataaaatttctttggaatttcaatcttttcctgagattccctaggtacaggcactgtgcacatgcttctgacatgctgtagttcattgagtcctggctacagccctgtgacagtgatatctccaactgacagataagaaggaaaagatcaaagaaatttcatgaaacttggaccagatcaaataaaactggcactcagaacttaggatctttgaagcccgccctctcctatcattcttttatttccttccctgcaaaactatct

SEQ ID NO: 214201 - DNA, 479 bp, Homo sapiens
tcttctaaaaggttgtttcccagatttagtgttgtcaaaattagaagaatttttttttccttttgagacagtctcactctgtcacccaggctggcgtgcattggcatgatctcggctcactgcactccagcctgggcaacagagcaagactctgtctcaaaacaaaacaaaacaaaacaaaaaaaaaacagtcttctccaggcacatgaaatgcctgtctcctcttttaagggagattttatgaagtttcagaatgaaaaaagtgatttaacttaaatttagtcctgtatcattacaatatattatttttataaataaacaggcatcattggcaatgatgattggcaatctagtcatcactggtctatgttgaaaacactactaaaacatttgtgatctcaaagctcagttaagaaaatactttggacattaaatacatattggagcttttcataaccattctgatgttggagcggccc

SEQ ID NO: 214202 - DNA, 376 bp, Homo sapiens
tccagcaagaagtcataactttatttatgatagaaacagtacaaatttcaaaccaagctgcagttactcctttgagacaccaaaaaaagttgcttccatatggttacattgttaattccataatcgcatttacaatatcattactgttgttcttcagggctcggactgcctttgctctcgacacatttgcttgtgacatgaccaattctatgtccttaacttctacacctgtttcatcgacctcttcctcttcactctcctcttgtgggagcttaagctcccaacaagaattttagatcacatttgtcttactcacataaatgttatgaagcttaagatggataatacaaatggttttgacattacttactgcacg

SEQ ID NO: 214203 - DNA, 298 bp, Homo sapiens
gaaaatatacaagatgagcttcatcttgtatattttaggaaactactacagaccactgggattgtgccaaggacaaaggagccaacataaataagctgccactggtcaaagaaagaataatttgaacatcgaaaatgaatgggaggcaaaaatccatgagtttataattctaaacaaacaaacaaaactctagtcatgttttgaggctcctaaggcacaaattaattattctgggaatatgtaggtaaatggtatatgaggaagaggtcttctttcctgaagaatcccagccaataaa

SEQ ID NO: 214204 - DNA, 558 bp, Homo sapiens
gctgctcagcctgtgatcttgcgcatggcctctcccctctgggataccgtttcgccttctgaaataaggataacgatatctgcttcacaagttgccatttggattaaatttaataactcagacaaagggctggcattgcctggcacatagcaactaacaatcactatacgtttcccctttcttcctgcagagtctacttttcattctctgccagcacctgcgccactcactcttgcttatctagcctagttgctagttagaattggggcaggaatgttccagaaggaggcatattgactggctttggccatcattgccaggcggatgtcagtacagctggaatggaggcagctgaaggaacctgcttctcaaggaaatgagcaaaaggacctagcttccgtaggctctcaaagcacgtccctttgggatggttcaggagctgtggtcctgaagccttaatgacctgaagtaaaagctcagaaacccaccccagactttacctagaccttccccccttccttttatctcgctttcccatgaacaagattattttaatgg

SEQ ID NO: 214205 - DNA, 149 bp, Homo sapiens
atatgtgtctaatatttgtttcttttgtatgatatatgttaaaccttatatgaatgttttcatctgtttctaccacatctcagatgttcttgataggaataatttctctatagtatttaaaatacatcttaatgtgttcattcctgttt

SEQ ID NO: 214206 - DNA, 350 bp, Homo sapiens
ctgtctacaagaaacgcttttcaaatgtaattccataggtatgttaaaaggatggaaaaattcatactttgctttttatcctgtttttagaagtaaccatttctgtttgctgcaatcatgaatgatgtttcctattgtgaaatatcattcatgattgcaaaaagacaacactaatactaatcaaaataaaactggagtggatataataatatcagataaagtagattttagaacaaagattaccagagctaaacagagacatgacataatgataaaagggtcactttactaagatgacacaacaatcctaattgtgtgtatcgcaaacaacagagcttcaaaatacatga

SEQ ID NO: 214207 - DNA, 474 bp, Homo sapiens
gtctgccctttccctctgaatactttcagttcagcatctgcccttggcagggcaccagaatatcctgacaagccctaagagaaaataaagatgcaggcatcatagccagctgggtcagtgacagtgatcctccccaccagcgagccctgcacgctgcacagcgcttccaggcaggtgatacctgtgagccggcagcccaggggctcaggcacctgaggaaagggacgccagagggcgtagcgggacacaggcaactgtggcaaggcctgttcagtgagatggaaatgtaagctggagaaaaaaaactgaaagatgagagacaaaactgtgaaataagaattgctatggagaatgaacatcagagaacaaaaaaggctcttgggaattaagcataggcatcagaaattaaaaatgaaatgagtttggaaggtaaacttgagtaactctcacagagagtagagtgaaagacaaaac

SEQ ID NO: 214208 - DNA, 1222 bp, Homo sapiens
  misc_feature (785)..(785): n is a, c, g, or t
  misc_feature (891)..(891): n is a, c, g, or t
caataaacattatacatagttttaattgcattgatgggagtgggagttttgcattttcacatcttacataatggatgaacagagaactttagttcttagtaagaaaacaaaaacattgaaccatggatagaacagtggggagctctcttttgaacaacttgtaggttgatgagtaaatcaacactagcacttatgtctatccagaaaataatcaggagattatcacagctcatgagataagcacagtagatacgttatagcttttaaacaaatttctttctaaacacaataaaaggagaaatttaattgttttgcttaagataaaaacctaagtaggctgggcgcggtggctcacgcctgtaatcccagcactttgggaggctgaggtgggtggataaggaggtcaggaggtcgagatcatcctggccaacatggtgaaaccccatggctactaaaaatacaaaaattagccagtgtagtggcgtgcacccgtagtcccagttactcaggagggtgaggcaggagaatcgcttgaacccaggaggtggaggttacagtgagctgagacagcaccgttgcagcttgggcgacagagcaagactcggtcttcaaaaaaaaaaaaaaaaagaaagataaaagaaagaaaaaaaaacaaaaaaaccttgcggcggtttggccccagcgacttaagattggccaagttatgcatgcggccgaattttaacttacttggccatttggccttatggggtcggtatacaattaattgcccgggtttcacaagngggactggaaaaccctgtggttcccaattaatgcgctggagcaaatccctttcgccgttggcggaaagcgaaaggcccgaaggatggcctttccaaagttgcgacnctttatggaaaggaaattgagcggtatatttgtgaaaatccggaaatttgttaaacacccttttttaccaaggcccaaatggaaaaccctttaataaagaattcccctttagggtgagttctcacttggacaagtctcttttagaagggccccacacaaggggaaaaccttttaggcgggccatttggaccaccctctaaaattttggcggggcccagaataatggcccctagggccccctatcttctgcaaaagccccactgccggataatcggacccttagcctggcgcctcggttacacctccttctttctttatggtcctttcttcg

SEQ ID NO: 214209 - DNA, 277 bp, Homo sapiens
aaaataaaagacgcaatgaagaaaaaaaatacaagaaacgaaatgaaagaggaggagaacacactaaaaaaaaaaaaagaagaagaaacacagaatgaacaaatacaaaagtaaaagagaaaaaagtaacgcgaaagaacgaaccgccccgccccgccgcccgccgaccgccgccgcccgaccgctccccgcccccagcggacgcgcgcgcgacgagacgtggggtgggggtggggggggcgcgccggcgcccgccgggctccccgggggcggccgc

SEQ ID NO: 214210 - DNA, 419 bp, Homo sapiens
ggttggcatagctaagagaaccaggaatccattagttttctgacatatagaaaacaaaagacaactttttcacttcctgcagagcatgggcttatgaaagggatggtttatacttccattgaaaagggaactggggctaaatacaaaagtagcctgtcattatgttctctttgctcaaaggagaggagcacaatgatttgtcaggagagcaggtaacggtgacaactgtgattaagtaaaaatgttcacagatgtgtaacattagtcagtttagctgtatcagtcacttatgatgattggactagatgaaatacacattaaatcatatatattatgtaaatatgtcttaacagaggttttaatttccccagaaacccatactgtgtctccccatctcatccaccctcatccctcccctg

SEQ ID NO: 214211 - DNA, 794 bp, Homo sapiens
  misc_feature (678)..(678): n is a, c, g, or t
ggtgtggtggctcacgcctgtaatccccgcactttgggaggctgaggcgggcagatcacctgaggtcaggagttcaagaccagtctggcaaacatggtgaaaccctgcttctactaaaaatacaaaaattagccgtgcatggtggcccacgcctgtaatccaggctacttgggaggctgaggcaggagaatcacttgaacatgggaggtggaggctgcagtgagccaagactgcgtcattgcactccagcctgggcaacagagcgagacgccatcttaaataaataaataaataaatgctattaaatagaatgtcaaattcccaagaacaactgacaatgatagacaatgaaattacattttgtttttaactgagacagagtcttgctctgttaaccaggatggagtgcagtggtatgatcacagcccgctgcagcctcaacttcccaggctcaagcaatgatcctgcctcagcctcctgagtagatgggacgacaggcacacaccagcctgcccaggtgacttttcattttttgtagagacaaggtcttcctacgttgcccagcctggtctcgaactcctgggctcaagtgatccttccaccttggcctcccaaagtgttggaattacaggcataagccaccacacctggcctgaatcacttttctcactcgtttancctcctagacttctctcccgccgttctcccccaatcctctgtactcctctaccctcggatcccattccctcccacgtcacgcaccccctctgttatcttgcgctcctcttcgtccg

SEQ ID NO: 214212 - DNA, 418 bp, Homo sapiens
aaagtgctgggattacaggtgtgaaccgctgcgcccaccggcctggagtcactcatttctaggaggagaactatcctgctagacggaccaggtttcctaactcgtttctggtagaaggatgtgaggattgttgcattaggaagatgggtcctaatacagctttttccaagtttcctgggcgttacttcttccaagtcttatgggtgtttttcaggttcccattaggctgttagacagaggtatgcccagggggtagatcccgacagtggggtcgtggctgtagacactggggcaaggcaggctgtttgcgccctccatgagtgctgaagagacagcatcgtggtgatctcgatgaggccctcacaagaggtctttcatgacatggtggcacgagaaaggtaggagggtcaagaaccag

SEQ ID NO: 214213 - DNA, 340 bp, Homo sapiens
ctgtcagaccacagcacaataaaaatgtaaatcaatactaagaagatcactcaaaatcatacaaatacatcaaaatgaaaaaagctactcctggattacaatgtgggtaaacaatgagattaaggcagaaatcaaggaattatttgaaatgaataacaaagatacaacacatcagaatctctaggacacagctaaagcagtgttaaacaaaaataaacaaaccctaaagctagcagaagacaacaaaaaaccagagtcagatctgaactgaatgaaataaattaagacctgaaaaccatacaaaagatcaacaaatttagtggttgtttctttgaaaaaa

SEQ ID NO: 214214 - DNA, 466 bp, Homo sapiens
atatgacctggcccacagctacctctctactctcatttcctaccattcctacctcatttccttttcatttgttcttttctgccacattgacctccagtgctatccttaaacacactaggcatgctcaagatttttttttttgtacaggctgttctacctaggaagctcttcccttagatcaacagtgtcttgcttcttgtaagtctttgttctaatatcatcttagaagaaagtcttcacttatcattcagtcaacaagaatctcctacttcccctcattctttatcttcttgctttggtttgtttgtttattgccacttttttttagagatggtgtcttgctatgttgcccaggctgccttgaacttctgggctgaagcagttgccccacctcagccccctgaatagccggaactacaattttctgtctattttttgttttctaaattttttgcttgattttttt

SEQ ID NO: 214215 - DNA, 235 bp, Homo sapiens
agtgcaatggtgcgatctcagcttactgcaacctctgctgcccaggttcaagcagttgtcctgtctcagcgtcctgcattgctggggctacaggcgcacaccaccacacccggctagattgtgtattttcaatagagacggggtttcaccgtattggtcaggctggtctcaaactcctgacctcaggtgatctgcctgccttggcctcccaaagtgctaggattacaggcgtgag

SEQ ID NO: 214216 - DNA, 435 bp, Homo sapiens
tgaagaactggtcccatcagtgagaaactcctagatttggtcatgattatgctccaaggtgtaatggacttgcatgatggaagccattcatactagcaagaatcactagtgaatttctgaagtttgatttgggtaagataccatatgagttgaaactattctactggatctcctataatacaaagtatgttttctcaagcactttttagctgtaaaggtaacaacgtaaatttaaaatagaagtgcagttggcaatttatccatttaaatcatataccttgaaagccctttttaatttcagagttttactgacacagagaacaagggagagtttggaggaaataagagaattaagaatgattcattatgaagagatattattgtaagattggttacaagagcaagggttattggataagttcaatttgtaagtac

SEQ ID NO: 214217 - DNA, 443 bp, Homo sapiens
tactttatgctttagatattagggaaataggttttttcaagttctttgcacatgcacttgcctttgcctgaaacatttaggctttcctttggtcacttgatgagttcctgcttgtcctttagcactcaccctgtattatctcatagatgataccttccctgatggaagtattttaaggagaggaatgaagaaagctcttggaatcggagaagagagatacttctggttgtaataaaatcccccacatctttgttcccatgacagatgtgtttgcttctgttacagtgtttttaacttgtaaggttctgtcttccccactacacctgagtttagggactgtctcttactaaattttgcactcttcatgcctggaaaatagtaagcattcaataaatgcccttcaaattaacgagaggataatgagaaaaagactgctctttaaa

SEQ ID NO: 214218 - DNA, 451 bp, Homo sapiens
tttccacctgccactcatcagcaagagttcagcagatgcacaggcatcaggaagcctcctctgatcactctgctccctgaagcaagtcaagaaaccggggaagagttctctaacctttccctgaagcaggtcctaggaccttgattcaagaagtgccctgtctatctccagagagaaagaacatctttatttctgaagacacagacacagagaagaatcctaacatgcagcccttgctaggttccccccaccccagtttattcccgttagatcacgccctgttgtccctcaatcacacttctgtgtgatcgcccacaaaaatatagttttctggctggtcatggtggctcacgcctctaatcccaacactttgggaggctgaggcagggtggattgcctgagttcaggagttcgagaccagcctggacagcatggtgaaaccctgtctcta

SEQ ID NO: 214219 - DNA, 446 bp, Homo sapiens
gtttcaatcattcttagctggaaggagtgagtgaaggtgtgggttatggttcaaatgttacatactctcagtggtctgtagagtttttgtagattttcttgaatttttttttcatttgctgtatgcctttaggacaaatttccaagatctcaaatagtttagtttttctagtttttcaccagttatgcttatttctctgggaagtgcatctacagagctcttcatgctacctgcccagaactagaactctacagtccatttttaatcccatctagtacctttcaaatttttaaatattaaactattctatcatagagtttcaattttgttcttatttatagttaccattactctggtggtatttcctttatgttttctcattatgttcatattaaaaatatatttgaacatcattatgataaaagatttcacatattgtcgctaat

SEQ ID NO: 214220 - DNA, 565 bp, Homo sapiens
cgaacgcattagagtaatgaaaatgcctgtctgactgggatgtttatatttttcatgattatgtcatttctttgccttggcctatagtaagtttgtatgtgaatgctttgcatgagggtcatagctacttggtttaccttgaaatcaatgattcagaaattgctttttgtgttccagttgcatgtagctgtgactccttttaaaagtgtggtaacaatgtggtaggaatttaaaagcttcccaactttagacatagattattttgatcctttctgaactggattcataaactttggttccaaagaacagcagctgtagaagggagccagatcttgactcactgttgaggttctgcttcttgagagatttcatatttagtgcaacccaattccttggttcgttcttctcccccagtactagatagccaagttgggtggtaggaaggaagaaaatatgcagcaagtcgagtctagttgtcatgctcctttggaccagaaaggaccttaaagattgtctcgtcatgttgttcctataccttttgttttcgtctacctgtaaaatgaaa

SEQ ID NO: 214221 - DNA, 171 bp, Homo sapiens
gccatagccagactgaatcagcacaattggtatcacagtaggatattcctttgtgactttaaggcgcaggttaaatccccatcccaggcagcccaattcccagcacccctgttttgtgtctactcaggatttcttcccttccttttctttttctttccttcttttcccttt

SEQ ID NO: 214222 - DNA, 419 bp, Homo sapiens
cttcacttttattctttatcccagtaggagctatttagaagtaatattattattgtttggaagtgttattggtgttgcttttaattttcaagcctgaaaaggcttggttaccttttttttctcctaagttaattttactgtggttagagaatctgatctgtacctatcaattttgtgtttgtttgtttgagacttgcttttaggtctactatgtgatcacttttctgtaaatggctttggtatattgaacagaatgcagagtctctaaatttggggctctatatttgttcactgtcacacttcttgatggtattcttaaatactttatcttactaatttttatctgctttatctattggttattaagaaagtgtgccaaaagctcccgttgattgtcttccattaaatgttttcttgca

SEQ ID NO: 214223 - DNA, 392 bp, Homo sapiens
aattccagctcggtactcctaattggttcttcgatgacgcagcctccagagtagctgggaccacaggcgcatgccaccacacccactaatttttgcctttttatttttattttttttggtagagacagggtttcgtcatgtttgccaggctggtcttgaactcctgagctcaagcagtcctcacgcctcagcctcccaaagtgctgggattacaggcgtgagccaccacgcccagcccaaaaccagggaattctcttgaactccttcccctcccctgcatcctgttggccaccaggtcctgtcacttccatcacagaaacgccaccttccctccctcgccattcccgctgctcatgccaatcgtcatcgaagaaccaattagggtggagccc

SEQ ID NO: 214224 - DNA, 282 bp, Homo sapiens
accgatcttgattctttttatttgatgcttttacgctgactacaccatccagccctccatttagcatgagaggtgagagtacacgttgtggtgctcatggtgtgaaggagaaagcagcctttccccattgagggcaatgataagtatgggtttttccaagaaggaagctcccttctgttctgagtttgttgggtatttttccttatgaaagtatgttggattttgttggattgggtactggttgactctacgtccgtgtgtaatcccagatccttcgtagag

SEQ ID NO: 214225 - DNA, 463 bp, Homo sapiens
actgtgcccagcctgctgtcattcttgaaccataatttcactggttatagaattctgagttgtcagttttttctttcaggactttaaaatatagggttccagtgtctttggcctccgttgtttctgtcaaggaatcagcattcatctagctattcccctgtagaccacatgttgtttttccctggatgcttttaagactttttatccaagtttgattgctcagtacctatctctgggcaaaaaagcctccagaaaccagaaacttatctagttttattcccctctgtcaggtgtagactccactccagcttctacctacttgagatattctatactgactccaggctgttgttattttgttctttcaaatattttgtccagagctataatgttttctgcagaattgaccagatagcagctactctctgtgaccaggagccttgatcttccagacttgctgatg

SEQ ID NO: 214226 - DNA, 366 bp, Homo sapiens
aatgtgattccaattgcttggtggtgtagatgtgaacccagtgaggaagcctgttctaattaatgtcgtctaattcggtgactccttttgagttctgtgtaagaatcaaatggtgatctgtcatctaaaattatgtttaccagcctgtcagctgacaacccgattaaaatgttgaaaacaaagaattggaaattatttgacttcaaagtatgtgtattgttcaggcattagtcattcattatgggaaatgacagttttctgggaaaactatctcctaatagcaaggcttgaccaagactcatgatatgattattaattatatctattatgctttcacttgaaagccatcttgttttggaaataaat

SEQ ID NO: 214227 - DNA, 446 bp, Homo sapiens
gagtggtctttgttctcaaggaattttgtttgttttgacttctgtgtgggttttctgaaggagaggggctttcctatgttttacctaactcagaattctctcagggcagggaagtgttcctcaaaaacattgagaggcaaaagaactagcactgattcctgggacaaaaaagaacaattgaggcaataataaacacaccaaaatctagaaggaaaagctgggaatgagaattttgttttggaatcaatgctttaaaaagttctcacatataacagggaacctacacatacccagggtaggatgcatggttggaaaagacctgataagaccacaggctttcaactttgactagtccttacacaaagtgcaagaagaaagagaaagctaaggcaaacttgtaaatgccccaattaaatattagaggtgtgccccaacccagaaccaac

SEQ ID NO: 214228 - DNA, 353 bp, Homo sapiens
ttgtattttcagtagagacggggtttcaccatgttggccaggctgatcttgaactcctgaccttgtgatccgcccgccttagcctcccaaagtgctcggattacaggcatgagccaccgcgcctggcctgttcttccttttttttaaagctgttgtttctctaactaggaaagccatttgtgttcattgaggaaaatttggaaaaagtgaaaaatgatacaaagataaattatataatcattttgagttagttcactgttaacattttggcctattgtctttttctatgcatattgtatgttactccttttacaagtttaggtaattttgtattttatagtttatggtaagct

SEQ ID NO: 214229 - DNA, 210 bp, Homo sapiens
tagctgctcactcccaaagcctgacaagttgatgccattgctgtctgaggccgcctccagctcagtagtcagctcagtgctcgtgtgcttcttccgggcttgtaataccttcatgaacgctccttctggattccctacagatagatgcttcttcaactgtcaggtaagacacaataagtctttctgagtttctcttatagggtttagctt

SEQ ID NO: 214230 - DNA, 1212 bp, Homo sapiens
taaatatgtcatagttacactctgctcatcacaaaccacttatggaatgaaacatgtttgctttccagtttgaaaattatacatagttaccactaccagttcagacagctgccaaagaatcatttttaaagtgctgaaaactgtctaagtactttgatttcaacaatcacgttttctttgtggcttagggtaaggataggagtatgaagaggtgggctaatttttagaaatatccccatatgagctggtatccttaattatagtgaaggtgcgggagaacaaggaaggtgatgaataggtatagaatataatccctttaagttttccctgaatgtgtttataatgagtaaacatatacactaagtatgcacacaccacacacacacacacacatatatatctacctacatatgcgtgcacacacacacacacacacacacacacacacatacacataagatacacaaaatgaactcgatcatatgttttggaaatacggactaaattaactattctattttcgtatattgtgaatgcactctgatgtatcaaactcttgcaaaatgtaaattggtcttcaattctctttggtagcttgttactaaaaaaagagagaaaatccttttaaaacttttcagggaaaccatgatttccttggcctcaaggatttgtgatgaaacagcagaaaaaattttgaagccacacaaactctgggttcttttctcaacacccgccatgtatcaattctgtaaccttaggcaaattatttaaactttctaagccttgattttctcatctactaaaaacagcaataatctaagatcaagataaaacaaaactcacccagaacaaagtatagtctccatgaataaagaacatgtctgttttgtttccccagcacctagaacaatatgcgatgtatacaatggcagatactaaatattatttatccagcagaaaacaataaagttgcaggaccaaccctgtcaactaagctaatgctacataaaaattacatgcaggattagctaaagaacataaattctacacatatactaattcttagggtctctgggttttcttaatgttatttccttcagaaaatgggcataaattcctatctaatgacatctcacatcctcatcaagaagcaagtcatgaaatttaagccttacaaggtatattctttttggggttttacaactattaatg

SEQ ID NO: 214231 - DNA, 417 bp, Homo sapiens
tctgcttagtaggtggtttcccaaagatgatccaatgcaatgagtcatccctctgagcacttactgcacattatttctttttactaatcctcggtgcttttggttgcatgttttttaacctttagagccctcctgggaggttcagagtcttctcactatgaatataaaacagactctactacatccccccacatgtccctcttgtcctttacttcctatacttttcaaatctaagataatccatcacttaggagaacagtcaggatcatgtccaaagataaaagatcagcagtaagtttctccagagttagcagcagctccatctcattcccagtataaaaatcaaaaatgtagatggatgtaagtcaatgtgtagaacccatatcaagaaaactataaaacttgattgagatacat

SEQ ID NO: 214232 - DNA, 481 bp, Homo sapiens
gcacttgtccaaggtcacatggctggaaatgggcagaaccagaagtcaagcccagatctgctaaaaccacagccccagctcttggccacacctcagcttctctgatacaaatttcagaatcgacacttaaaagtggtcacctggaaacaggtcagggcccagtccttccattcaccaggggccaagtcctcaggcacctcactttaccttctgcacccctcatcatttgctaaggaagggagccccctaccctctgtggggggcatagggaacttaaacatgacccttaggtaaggtgcccagccagactcagccaaggtacgggttcagcaaccggcggcccagagccagagacacagctccaggtaaaggaccacgtgctgacgtcctaagattccctgaccacagcaggctggggatggggagacaaaaaggggctgaaagctgtggaaagacttggtcttctgagaaggggcctctc

SEQ ID NO: 214233 - DNA, 817 bp, Homo sapiens
acaggatcccccccgcaccactgcaagactatgtgaatccactgcttcccacccctaaaaccctgacaataccaagtgctagtgaagatgagcaacgactaaaactctcatccactgctgatgagggcgaaaaatgatgcaaccctccagaaacatctgagagtttcctgtaaagctaaacatgtatttattccaatgacccagccatctcacttgcaggtctttaaccaaaagaaagaaaaacatgttcacacaaagaactgcatgtgaatagctttagcagcttcattaagaatcaccaaaaactagaaaccatccacgtgtccttcaactgagaaatgcagaaaaagctggggtctatccatatgatgaaacactactcagcaatgaaaagaaacaactgaaacactcccactaagtagtcagatgactctaataaactatgttaacgaaaagaagcctgactcaacctctacctcccctgcattgtatgatgccattttccatttaatatgacattctagaaaaagcaaaatcatagacacagaaaacagatcaatcgttgctgaggagccggacacggtggctcacgcctgtaatcccagcactttgggaggccaaggcgggcaaatcacgacgtcaggagttcaagaccagcctgaccaacatggtgaaaccccgcctctactaaaaatacaaaaattagtcgggcatggtggtgcgcacctgtaatcccaggtactcaggaggctgaagcaggagaatcacttgaacccgagaggcagaggttgcagtgagccgagatcgcaccacactg

SEQ ID NO: 214234 - DNA, 293 bp, Homo sapiens
ggatttttagtagaggttgggttcagcgtgttggccaggctggtcttgaactcctgacctcaagtgatctgcctgccttagcctcccaaaagtgctgggattacaggcgggcgtgagccaccatacccagcctttttttatttttattattttaattttactttaagttctggggtacatgtgcagaatgtgcaggtttgttatataggtgtacatgtgccatggtgaactgctttcttaaaattctcttctcccttgactccagggtaccattcccttctgatctttttttc

SEQ ID NO: 214235 - DNA, 388 bp, Homo sapiens
gcccccgaattgtcagggattccaagaaagaaaatgtctctgtctctgtctctctctttttaattctcaaggaggcagcccaaaagagaaagagaagagagtaataaaccaaggtaaagttaagatgggactaactcagctgacagataacaatccccatgaaacccaggcttgacccctagtaacaatgccatgaaagaatagatagaaatgcactttgaaaaagatgacactttagaacataatcaaatggacttgcatgggtcacaacacatccttcataccaggaaacgctgcgtgagggttctcagaagtcgcatgactcatatagtccgtcaactctcaggaatgggttctgagaattccaagtaagacaaccccatgcctg

SEQ ID NO: 214236 - DNA, 342 bp, Homo sapiens
ttgaatttgtagattagtttaggacatattgccatcttaataatattacattgaacataggatgtttttctatttatttaggttttgtttaattcctttccctttcttgtagtttttggtgtataagtcttgcatttttaaaaaattaaatctattcctaagttttttattatttttgctgctattacgaatggattttttaaaattttatttttggattgttcattgctagtgtacagaaatacaattactttttgtatattgatccctgccaccttgttgaactttattatactagttttttagtggatttcttagtattttctatatacaatatcatgt

SEQ ID NO: 214237 - DNA, 520 bp, Homo sapiens
agaacatgcaatgcattgcccgcttcctttcccctgtcttgcttgtcttggtttttctcttctcctccctttccctctccctctcctcttctctcttttcttcccttttttcttctctctccctcttgctttctttcctttctagcttaacaatattccccaccttatcccctggaattttgcccaggtactttagaagaatctccctcctttacttccttttcttttttcctcctttatctcttttatttgtttagtccatttgtagaccattttttaaattatcattgataaatgcatgaatattgccatcaaaacatcagtggaaaggaaagttctatatctgagggtgaaattaggcaactggtatagtcaggatcaaaaatcctgggagtcattttagaaaagccaggtctggcgtggtgcctcactcctgtaaacccagcactttgggaggctgaagcgggtgggtcatttgaggtcaggagttcgagaccagcctggccaacacggtgaaact

SEQ ID NO: 214238 - DNA, 391 bp, Homo sapiens
gaattctgaatgtctttggttttaggacatgcgtgagaggcaagttcctactcagggtcccacagtatttcagttctatgtcttcagacctgaattaacaatccagcatctcccctgcattccagcagcactgagaggggtcacagggagtcgcccagagaaccaggtgggcttcattcctttgtcctgagccagctctccgtgggctgctctcagttagcagactgggaatggagtgtccacttgaaaacaacgtgctcttcattacaatgaaacaaacacgagcggcttgagtttaattttagcttcatttatgtatcgtgggagatatagaactgttcctgggtccaagaaatcatactgtaaattgagctaattagattctttaaaa

SEQ ID NO: 214239 - DNA, 571 bp, Homo sapiens
aagtggttcagccgggattcaagcacaggctgtctggttttagaaccttcctcttttatcttgcctgggagagttttcatcgatgccactgttatgtgttggcattggccaagaggcaggcctgggattgcttgggatgtgcctgtttaacaatcgtagtcatttgctgactactgtggttaagaaatttttcattagagacaaatttccaaactaggaaggaagaacttcattgtcatttactcctgatgcagacttttaaaatttcatgagtgaatagacatgattccatataaatgattacatcacatgcaaataccatttcccatagcgtcatgattaagggctcctatggattacccagcggggagtgatgttggtgattatggaaggtggccttgtttccttgtttaggaatgctgggatttgatctgattattagaggcctctcttctagaggccaagcacctccccaggccacagaggatttgaaggtgatgctgtgtttgttcattacattttggaagatattcagatcaaatcccagcattcctaaaaaagttggcggccg

SEQ ID NO: 214240 - DNA, 381 bp, Homo sapiens
gcctgactgggacagaggtagtgtccagcttcacctttcatatccaggccctaatacaggaagagtactcagggttcgactcctgggagcacactttctttctttctttttcttttttttagacagagttttgctcgtgttgcccaggctggagtgcaatggcacaatctcgactcactgcaacctccgcctcccgggttcaagcgattctcctgcttcagcctcccgagtagctgggattacaggcatgcgccaccacgcccagctaattttatatttttagtagagacagggtttttccatgttggtcaggctggtctcaaactcctgacctcaggtgatccacccgcctcggccttccaaaatgctgggattacaggc

SEQ ID NO: 214241 - DNA, 399 bp, Homo sapiens
tacttttattattattcctctcaattaaaaataattttcattaaaaattatcattttcaaggctatggaacaatatgtgtcatacagcataattgtaaaaacatatacagtcatccctcggtatacagagaggattagttccagccccccatctctgcatataccaaaatccatgcatactcacatttcacagtcagccctctggaacccacatataggaaaagtccaaatattagttgggcacagtaccaagcacctatagtctcagcatcccgagtagctgggctgatagggcgggtaccacacgactgtagtttcagctactccggaggctgacgaaggagaatagcttgaacaaaggatgcggaggttgcaaagagcccagaattgtgccactcg

SEQ ID NO: 214242 - DNA, 287 bp, Homo sapiens
cgagcccttagtcatgcgcatagctggttcttgcgaagaaaaggacttacaggcgtgagccaccacacccagccctgaaagccaaatgaaaataaatgttttaaggagaagacagttattaactatgccaaatgctctgtaagatcaaaccaaatgaagactgagaattaaccattggatttagaagtttggaggttattaatgttgttgacaagtagtcacactgaagtggtggggttgaaaatctcactacagtaggttcaagacagaatacccctctcacctct

SEQ ID NO: 214243 - DNA, 566 bp, Homo sapiens
ttagacatgactttcaataaataaccaaatggaattactttcagattagttgaattaaaatattttcatatatatattttgttgacagtgaatagataagagttattacaaaagtgaaagcctatttaatcaccaattttatattcatgcaagaatggaatgattccccatgtagttagggtacaaactagcctatctgttaattggtaccttttgaatttggttttggactatatgtcacaggtgtatcatttcgataatgtaatctcgtccactgtatgactgacagcttctgcatgatttccctattggacagtgacaaaatctgtttgctttatagtgagtacatacacttctatcagcaatattatcttccctgtgcaagagtgtcagttaacaataaaacatgaagtctggggtgggagaagcagtgaaaaaagatggggagattgaggagaaaacactgtaacaaaagaaacatgttttactatgaagcttaaactgaatattaaaatataaagctgactattctaaactgcagtacattaccaagatattgttatcag

SEQ ID NO: 214244 - DNA, 394 bp, Homo sapiens
ggtgtcaagtaagagagtttctaagagcagcaaggttctgccgcgtttacaacccaaatttcttgctcatggtcaagccatcataccaagccactaagaggaggaaaaaaggagcccctcctctaggaggccaaagaggagaaggattttaaagaaatcaaagaagccttgactcaggccccagctttaggactgccagatctaactaatcaagcttttcttcttgtatgtgcacaagtgaaagggaggccataggggttctgactcaagccataaggtcatggcatcgcctggtggcatatttatccaggcaattagattctgttgcacttggatggcctccttgtcttaaagcactagcagccactgccgtactggtgcaggaagctagtaa

SEQ ID NO: 214245 - DNA, 417 bp, Homo sapiens
taatggagtctcgctctgtcgcccaggctggagtgcagtggtgtgatctcagctcgctgcaagctctgcctcccggcttcacgccattctcctgcctcagcctcccgagtagctggaactaggcacccgtcaccatgcccagctaattttttgtattttttagtagagacgtggtttcacagtgtttgccaagatggtctcgatctcctgacctcgtgatccacccacctcagcctcccaaaatactgggattacaggcgtgagccaccgcgcctggctctcctacgttttctttaagaagttttatagttttgcttcttacatttaaaattatgattcattttgagttaatttttatgtatggcatgaggtacaaatttaatttcatctttataaatgtggttatccacttgtccc

SEQ ID NO: 214246 - DNA, 240 bp, Homo sapiens
aaggtataccatgattttatgatttatttacatttaggggggaacccctcagtgaaccatttactccccattttaactcccctgccccgatcctttcagtttccagttaaaacaatgcattaaccaatgttaaatcttaaatctcgtgagtttctctccatcacaccctaatattttaaaaaaattattcctttacatttaaaactgaacattggctactgaagaatgatttaaaggctg

SEQ ID NO: 214247 - DNA, 1150 bp, Homo sapiens
tcagagacagagtctcgctctgtcacccaagctggagtgcagtggcgtgatctcaactcactgcaatctccacctcctgggtttaagcgattctcctgcctcagcctcctgagtagctgggactacaggcactgccaccacgcccagctacattttttttttttttggagacggagtcttggctcactgcaagctccgcctcccgggttcacaccattctcctgcttcagcctcccgagtagctgggactacaggcgcccgccaccacgcctggctaattttttgtatttttaatagagacggggtttcaccacgttagccaggatggtctcgatctcctgaccttgtgatccgcccacctcagcctcccagagtaaatttttttagtagagatgggatttcaccgtgttgctaaggctggtctcaaactcctgagctcaggcaatcagcccgctttggcctcacaaagtgctgggattacaggtgtgagccactgcaaaagcccataaaattgtttaatacctggatcttttgccccatttaatggtagaccaaaaaaaaaaaaccttataacaaaaaaacatgtcggccgcttggcccatcgacttagactcgagcagcttatgatgccgccggaattcggctaattggccaatcgccctataggagccgattacattaatggcccgcgtttaaacgttggacttgaaaaccctggcgtcccaatttaacgctttgagaaaacccctttccctgtggcggaaacacaacggcccaccgacgcttttcacaattgccaacttatgggaagggaactgcagcttaaattttgtaaatccggtaaatttgtccttttttttacccagggccaatcggaaacctttaaatcaagatatccccctaacgttaggcttccatttcccagtcccctttagacgggcttcactctagggtccttttaggggggcccttgtgccctccactaacattttggctgggtgcaacccattaccttagggcgtcttttcatctcctcgcaccaacctctatgtccctatcgcacgccttcactctcccctagctatcatttacacctccccctcgttcatactcccactccttctcggtccccctcctctcgcgtcttccc

SEQ ID NO: 214248 - DNA, 436 bp, Homo sapiens
cgaggtgccttagttgcacacatatcaccgtccccgaatcttacagtcctatcagaatctccaggccctccatacagcttggatacaagggaaagtaaagaggaaactaaggtgaaggtgatcaaaatcaaaggaattctgagaaactgtcacaactaagagggctaaggagacctgatgactaaatgtaatgtggttttctgaatgcgatcatggaagagaaaaagaatactgggtaaaaactaaggaaatctaaataaagggtggactttaattaataataatgtatcaatattagttcattagttgttacaaatgcataatactaatgctaagatgttaataaaaagagaaattgggtgcagaatatgtggggaccctctattaccttccatttttttcctgtaaattaaaaacttgtttttttaaaaaaaat

SEQ ID NO: 214249 - DNA, 831 bp, Homo sapiens
ttggaagcaaagacagagagggcacctggagaatggttgccagagtgaaattccccagacaatagagataatttggaactgtttaaagaacaagggaagaagagcccaaggaccgtagcaaggccctgattctgggagacgagagaacacgctgacttagaatgcttgtctctgcatcctggtcagaaagtagatggacgacactttcatctccgactggattttggtgagagatgggcaaaccccgggctctaggctggagcagcagctcttgtatccacacaaaatcaggactggtggagggagccatcttcaaacataaatttgcgtcttttggcaatgcactccttgggtttggaagcttccctccaagatgctgagcccaatgtttggggaaagccagggaaacagatgctgggtcagtgctgctcccacctcctctgctcccctcctgagggctccactgagtcaccagccagcaaacagcccatgcgccctggagcagatggactgtgggtacacgagcctctgaactcttgggcagcatgggcacaacatccttttggcctcacccaatgacctggctgtgaggccagaggagctccgtgctgctaggagatccaggcagaaacatccaggagtggaagctcagcccagcggctgggaggctgtggcacctcctgtccacatggcaggccaggccgaggtgggctggctacacagtggggctccccctctctgataagggatcgaacggatgcttgaaaataaatggcacctgtggagaaagtgccccatccctgattatgtcatcggagcctctggtcccca

SEQ ID NO: 214250 - DNA, 1160 bp, Homo sapiens
ttggaagcaaagacagagagggcacctggagaatggttgccagagtgaaattccccagacaatagagataatttggaactgtttaaagaacaagggaagaagagcccaaggaccgtagcaaggccctgattctgggagacgagagaacacgctgacttagaatgcttgtctctgcatcctggtcagaaagtagatggacgacactttcatctccgactggattttggtgagagatgggcaaaccccgggctctaggctggagcagcagctcttgtatccacacaaaatcaggactggtggagggagccatcttcaaacataaatttgcgtcttttggcaatgcactccttgggtttggaagcttccctccaagatgctgagcccaatgtttggggaaagccagggaaacagatgctgggtcagtgctgctcccacctcctctgctcccctcctgagggctccactgagtcaccagccagcaaacagcccatgcgccctggagcagatggactgtgggtacacgagcctctgaactcttgggcagcatgggcacaacatccttttggcctcacccaatgacctggctgtgaggccagaggagctccgtgctgctaggagatccaggcagaaacatccaggagtggaagctcagcccagcggctgggaggctgtggcacctcctgtccacatggcaggccaggccgaggtgggctggctacacagtggggctccccctctctgataaggacacagcatttgtctcctccagaggatacagcaccaaggcgccatcttggaagtagactggagctcttagcagaccagaacctgtgggtgtgttgatcttgtacttcctgacctccagaactgtgagaaatgcatttctgttgtttataagttgcccagtctcaggtattttgttacagcatcacaaacagactaagacaatctcctagaggagaaatcctctcttccactacatgcattgtgtctgtgtatggtagctggagctggagcagccacgctgcaacccaggggccagccaagggcaaggctgagagtgttatcactgatgtgtcaggtggttctttgttgttttgagaaagaactttaattgagataatttatgtaacataaaatttactgttttacagtgtaca

SEQ ID NO: 214251 - DNA, 623 bp, Homo sapiens
agcatttacgtgctcccaggcattctgttacacttaaagaggctcatggaagagatttgggcaagtggtataactctacaagctgctatattcaagtcctagttccagcttagccaaaacacctactccgattgcaactgatctttttcttggttgctagaaaactgagagtcatatgtgtagcctacctccagcaaaccaataggaccttacaccatgcattttgcatacaaaactgctggcttaatcttatctttcacactcacggttttcttttgtcctatttttctctgtacttatttttaatttaccctgatgtacacatttatgtaaactacgttaaatcctttcctctggaataaagtagggtgtaaataaatttaacaaaacaacaaagagtgatgatgagccaggtcttcactcctgaaggcctcaaaacgaactggcagtgatctgtgaaaactacagagaactgcccgttcatctccacagattactgaagtctgtgaaaactactccagccaggaccaccattatagcctgctgcctgttgtgttcacaatcgatgcacaaactcaaccctgaaatggagagaaaaatagggggaaaaagacattaggaaa

SEQ ID NO: 214252 - DNA, 914 bp, Homo sapiens
  misc_feature (168)..(168): n is a, c, g, or t
  misc_feature (315)..(315): n is a, c, g, or t
tgcaccttggcctggctgttggtcagcttggcagggctgaaggtgaccacgtcatgtagggagaactgtacgtaagggtgtaccacatacagcatctccggcgactccagcaaggcctcagcccgtaaaagactagggcaagcagggtctgccccgaggggggcaggnggccttctctggcatatgaagggcattgggtagtttcacccactggcaggaaggagcaaccatagaccctctgcagagcctgccgtactgagtccaaggcagggacagctgagggggcagggctgtgactgtacggctggccgtaangtgtggtatgcatggcgccacaggttgcgataattctgggcggcaacctcctgcatgaagcgagtgagggtctcagggccgcaggacccgtcctcaaagggcaggcccccgcccagagggtaggacagtctccgcttccgcagcccatgcacctccacgcgcgtccagccggcaggcagcctttgcacagagcgctgcaggagagtcctgacttccgcttctcccaggccctctgcgcggggacagggtcccaggggcagccggcgatcgcggaggctggccagccagcgcgcaggcactagggccaccacgtgggtgccccccggggccggagccagctgcctgggatcgatgctcaggtccctctccacgctccggagcagctcctgcatgtctgggcttggcggggaatgccagcccccggccggggttctgagagcgccttcccgccccccgctgccctgggccatctcctccaggccgcccgggggcagcgcggggctgagcccagccacggccctgctggcgacggcttccggggtgccaggccggcggggctgggatgggcgcgggacaggggctggggcggaggcggccgc

SEQ ID NO: 214253 - DNA, 675 bp, Homo sapiens
tgcttagttggtgctggacacagggtaaattgtcagtaatgctagctattattaacatcttcccatctagccctaaatctggctctcctcaggaagtcctgctctgtgggagaggaataggggctgacagggtcagtctatgcctaatcttccaggctaatagtttccaaatgggaaaccttgcagagtgctcaaaaacttttctgggatatggggagacttgaatttctgtgtcagagtttgctgtgtattgactaaacctcattgccttttccttccaagcatgagctagactacatttcccagcctcccttgctgggaccacatgactgcctttggacgaatggagtcagggcagccatgatgccataatgttgccccttccaggtctaggtcttaagtccccttgcaccatgcaggcctcaagtcttcctctctttctccattctttggttaaaagaagaggattccaaggccttagaggatgaaagggccatgagatggaaagatcctgcatcctcaaatgaatgcaaggggccaacgccctctctaccaaacccaacatgagaaagaaagaaactttattctgtcaagccactgaaatttgggagatatatttgttatagagattcacctgtatcatgtcaacttctattaaaatttattttaaaaata

SEQ ID NO: 214254 - DNA, 619 bp, Homo sapiens
tgcttagttggtgctggacacagggtaaattgtcagtaatgctagctattattaacatcttcccatctagccctaaatctggctctcctcaggaagtcctgctctgtgggagaggaataggggctgacagggtcagtctatgcctaatcttccaggctaatagtttccaaatgggaaaccttgcagagtgctcaaaaacttttctgggatatggggagacttgaatttctgtgtcagagtttgctgtgtattgactaaacctcattgccttttccttccaagcatgagctagactacatttcccagcctcccttgctgggaccacatgactgcctttggacgaatggagtcagggcagccatgatgccataatgttgccccttccaggtctaggtcttaagtccccttgcaccatgcaggcctcaagtcttcctctctttctccattctttgatcctgcatcctcaaatgaatgcaaggggccaacgccctctctaccaaacccaacatgagaaagaaagaaactttattctgtcaagccactgaaatttgggagatatatttgttatagagattcacctgtatcatgtcaacttctattaaaatttattttaaaaata

SEQ ID NO: 214255 - DNA, 682 bp, Homo sapiens
gggtcccggaaatcctgccttccatatgtgggcttccgcaggcagcctgagccagctatggctcacgttctgcaagcccaggcctgccaccagagggaaagtgccctagatgcccaggcatgccttcctcttggtggccaaagatttcccaggcagctcccagcaggctgtgagggggggctttccagaaatatgcccttaaagatgctctgatagagaaaacataacatgttctttggcaggttgtgggcatctatcatacagtaatcatgggcagtcgggatggtgtaggattggagcctcccgatgtctagacactttggtctgttcacagtttcaaaaacattttaattacaaaccactttatggtgtaaggtgacccacatggagttatcaagaacttctgagtaagtttgctaacttcttttgtggcagctgcaagttgactcaaaactacattccgctggtgagtatgggttgtctggcctggaagacatgtgtgagttgctctaaggggctcgctgttctcttactatctggaaggcctcaaagttcctctggtgggaaagattttcttctgcaaacaccctgggatttgtctcttgaagaatcagggttttggactctcctacgtaaccatcttctgtgggttggatatcagatgtgtatccaacccccagaa

SEQ ID NO: 214256 - DNA, 259 bp, Homo sapiens
caaggaagggttctcccctaaggccttaggaggaaggacagccctgtcaacaccttgatttgtgacttccagcctccagaactgtgacaggataaacctctgttattttaagccacccagtttgcggtatgctggccaccccaggaaactaatctaattcctagtaacaaagaaacctaattaattgtggaggagaagaaaggaacagttttgccatcctgggagcatggctgggcccatcagcggaggaaggtcccca

SEQ ID NO: 214257 - DNA, 679 bp, Homo sapiens
tacagaggcccttgagaggacggacaagagataatgttgggcagaaggttggcaagactgtcaaggatgttgagggtgggcatagagtccagctttggagggcagcttggcagaaaggtgcccatcaccccaatgtagcaggtttcacctgtgatgcctttgcaaaaaggaggtctagacagatggctgtcaggggtgtggctgccacagaagcacgccctggccacccccacactgtgatgagtgccaggccttctaggcagagatggaggtgccctctgcctagccgggaactgacaccctagactagtgcaggacctagccaaggagaactcccacgcaggagcagagcacccaagaggagcagtgtaggggatgtgggttcatagagctgcctgtctgcctctctgggacttgggcttctggtgtggctgtgactgggtgggtgtcagggctttggccaactctgtgtctgtatcttccttatcatatctcaaacacggcacagcaccaactcaaagaacctcacataggtgggcttttctccctttaaaaaatgtggtggacctggtgtggcagctcacgaggtcaggagtttgagaccagtctggccaacatggtgaaaccccatgtctactaaaacaatacactagccggtgtggtgccggtgcctgtccct

SEQ ID NO: 214258 - DNA, 383 bp, Homo sapiens
caatttagtgaccttccagtcacactttttacttatgtatttacaagtaaaagaatatgtaaagacaattgagtattgtgcaacattgatgtgtatttataaaatagctttattttataataaagtaatatgtgtagatagtgtcatgaaggaaatattctccccataatatagtttcccttcttcatttcagcacatgaaattaaacaaacagaggaaacttcatctcaaacccatctaacctagtcagtaccatagtaagctgctttaaatcatatttaaaacaaggtagagtacaaataaatacatgcatgtaagacccaaattaaagcccctcaaaaatctattacttttaatttcataaataaattttttattgggct

SEQ ID NO: 214259 - DNA, 556 bp, Homo sapiens
cgttccctctctgttgccaccctgctcttctcctgggcttaccagattgaactggcggaacaccgtgattccatgagatgagcagttctgggctgggacagctaaggagttaagggacaaccttagctgtactctgggggctgggtgtggcatccccagctcagaaggcagggccagtcagggggccatgccctgggtgctggtggggtctcagtgctttgggaatttggacagcaaggaaggacccctcatcgccactcctcctgctgggctggtgcccacgggtgtccagtgggactcctcacatggtatgtccttcgtgaggcctgccactgcagtcctctaggtcctgtgtggcccatggcatagtgcccacatcacctctgtcctactgtctacccaagccagactcccagccagctgccagtatcactcctgcatttggaaatgcagacagcagacacgttggagcgtctctgagcagaaagctgtgccagggctctgggatgcccagagaaaaagaagacaaggcctggccctttgtcaaaaaaaaata

SEQ ID NO: 214260 - DNA, 1134 bp, Homo sapiens
cgcctcccgcggagccgctcgctcgcctgagtcggagtcgggaacccggcgtcgttgccatggcgactcccaggcttccccacaagactcccacagcctggaggctgctgcgataccccagaggaaagctgcacccccgtaaataacccttcagcctcccgccgtgcccctggaccctgctcgcttcctcctctacccaggcgcggagctcagcctacctcgtggacccgcgcatttgcgggggcttgaattcccgagcttctcgcttcctacgcgcgcagcagacacgcagctcggtggccttggctttcatggcctcccagcgtgtgccaaaggtccccctcaaggaggaggaaaagcagtgaacccatctaataactatgctcatgacataatgagccctgcgatcccggaccaaggccatcataagaggagagcaggctgcctaataagctgtctccacctgccacaaacgtaggcgttcctggacaaaatatttccttgcagagattaaacagatttctatttaatgaggtcagaatgtgaggcgttaagtcttaaactataccatctagtgtggaattcaattttaccaggtttctacaataataagagttaatagtgaaactgttgtcatccttagttttaaattatgtatcactcattgtcaactaataggagacacctattctaatatcagtatgtcattgtttttctgtaaacgactggctaaatttatttttaaaatgtcattgtctggtttagaactgtctatactacatctgcatttcaatatattatctacagaaaaataagttttttctcctctctcttattattattattattattttttggagccggagtctcgctctgtcgcccaggctggggtgcagtggcgcgatctgggctcactgcaacctccgcctcccgggttcaagcaattctcctgcttcagcctcccgagcagctgggactacaggcacacagcaccaagccaggctaattttttgtatttttagtagagacggggtttcaccgcgttgtgcaggctagtctaactcctgagctcaggcaatctgcccccctcggcctcccaaagtgctagataacaggcgtgagccacagagcccg

SEQ ID NO: 214261 - DNA, 485 bp, Homo sapiens
gcctgggcaacaatgcaagaccccatctctatttttgcaaaaaaaaaaaaaaaaaaaaaagacatcattaagaaaatggaaagacaagcaataggctaggagataaaatctgcaaaacacatatctgataaaggagttgtatccagaatttacaataaactcttacaactgagtaagacaaacaacccaagcaaagtggattacctaaggtcagaacagaagatgtggcccaaaactagtatctctagcatagttcaatgttaatttcatgatttaaaatcacagttcacagcaaaaaagataacagggaaatgaacaaaaaatatgtcattgctgtacttgagcctattcagtccttcaaaaaattactaaaatatataaaatggaatattactcagcatttaaaaaggaataaaattctgacatatggtacaacatgaaacctgaagacattatgctaagtgaaatacaccagacacaaaagg

SEQ ID NO: 214262 - DNA, 310 bp, Homo sapiens
ccttctttcttgatctattaagaagctttatgggatgacaatccattgcttttataaagcactctgagcatttcactatactttctaatgtggtttctctatggaagtggaggagacaaacattgttccagttttacataagtgaaaactagttcagaaaagtgagaaattttatctaaggccatgcaggaccaagtgcagtggcttacatctataatcccagcactttgggaggccaaggcaggaggattgtttgagctcaggagttggagaccagcctgggcaacatagcaagaccttgtctctacta

SEQ ID NO: 214263 - DNA, 348 bp, Homo sapiens
ctattgtgacttttactgagtaaatacagttgattttaattattcagcgcagttacgtttccgtaaaatcacagtgaatattgaattagcaaatactgaagcattgctcctaggggaaatacagggttaggtttctatgggcctctggtcacatttcatcaaccaatcaattataaccttgttttatgtgtgtttctatttaaagacaccttattaactatatgttgttgattcattaacacggcacactcacagtctgaacaaaacttatctagcacacgaattttctttgcaaggcccatcacagccttcttgttcttaggaacgccagacactgcttcagcacta

SEQ ID NO: 214264 - DNA, 467 bp, Homo sapiens
aacaatctgccactaatacaattgagggaaattgagccactttagtaacatccagagaataatagtcattctggaaccatgtatgcatgggtgggaggttgtggggagctgaaaacaacagaaatttatgctcacagttcttgaggccagaagttcagaatcagtatgtcagcagggctatgttcccctgaaggctttgggggcaactgcagtgacccctggagttcttggtttgtggccactccactctccactggagctgttttaatgcactatttaatttaaaacctttgaatgaacattggttgcttctaatcaataacattttagaaattttatactgattcaaaggctttaaaatgttgaatacgtgtaaaataattgagtctctgttcacaaataagtatgtatgtatgtggcaagagagttggtaggttttgtttgtttgtttgagatggagtcttact

SEQ ID NO: 214265 - DNA, 533 bp, Homo sapiens
agactgttctttcctccattgaattaccttggcacccttgtcaaagatcaattggccatatatgtgtggatctttttttagattctgttgttatgtttgtctgtccttacattaatacaacactgtcttgataactgtagctttgtagtaagtcctgaaatcaaatagtgtgagtcctctacatttttgttgttgttgattaagattatttcaacaatttgaggtcaagtatatattaaagtaattgtatcaatttctacaaagaaagactgatgttttgatttggattgtgttgtgtctatatattttaataatatgaaatcttctcattgacttttcatttatttatttatttattttgagatggagtctagctgttgttgccgaggttggagtgcaatggcgcgatctcggctcaccgcaacctccgcctcccaggagaatcgcttgcaatcccaggaggtggaggttgcagtgagccaggatcgcactactgcacttcagcctgagcaacagagcaagactctgtctca

SEQ ID NO: 214266 - DNA, 361 bp, Homo sapiens
ggttcacttcaacttctgcctcccgggttcaagcaattctcctgcctcagcctctcgagtagctagctgggactacaggcacacacaactacgcctggctaattttggtatttttagtagagacagggtttcaccatgttggccaggcttgtcttcaactcctgacctgaggtgacccacctgcctctgcctcccaaagtcctgggcttacaggcgtgagccaccgcacctggccgccatcctcattttaaatataggatttatttttcctaaagcacactttaataaacctccttatacaacttaatcacacacaaaaattcatattcgttaaagaaaaaaatagaccatgcacatgagc

SEQ ID NO: 214267 - DNA, 493 bp, Homo sapiens
  misc_feature (236)..(236): n is a, c, g, or t
  misc_feature (438)..(438): n is a, c, g, or t
  misc_feature (446)..(446): n is a, c, g, or t
  misc_feature (452)..(452): n is a, c, g, or t
  misc_feature (488)..(488): n is a, c, g, or t
gtcggcctccaggttggatgtcagaggacagctggaggatctgatgggccagcacaaggacctctgggaattccacatgctggagcagcgactggcccgggagatccgtgccctggagagaagcaaggagcagctgctctcggagaggaggctggtgcgcgccaagctgcgggaggtggagcggcggctgcactcgccgcctgaggtcgagggcgccatggcggtgaatgacgggnctgaaggcggaagctggagataattcggggaagcaaggtccggaagccgccccccaaggttcgggggccggcagaggagagaggccggactctgagctctccccgcgctctgcgacgaggaggattcccgagccgccggtggggctggcccctgacgccctctaggggccagcagggacccggcccgtgtcccgacccttcncctcgagnacccgnccaagaaataaaggggcgatgatttaccgaccaaanaaaaa

SEQ ID NO: 214268 - DNA, 421 bp, Homo sapiens
ttggagctcattcgaggagagacttggagactttgtgagggaaagacacagggaaacgctgccggcattttcccaaacctggactgggagcaggacaacactgggggatcttccctatctggttcaacccatcttgtgcccccaatccccctacccctacattttctatttgatgttttgggggaatttttttatttttgccgctttccttagtttctgtctccattacaacatcctaacactctaattggctttgtatgggacaaacaggaagtattgcttctggcaggatgggattttctgtcctgttgattgatggattaatttttattgagcacggtgtgctaccagcggaaccaaaaatccaagatacaattccagctctaggagtctatgttctaataaaagtaagaacaacata

SEQ ID NO: 214269 - DNA, 1350 bp, Homo sapiens
aaaatttaagtgggtaaaatattttaatatgtcagtggaaagtgcagtggagcaggtaatgcaggagctagagcttgcagttgtacatagggtgatcaaggagggcttcacttaatgacatttaagcagagacttcaaggaggtgagggagctatatgtatacccaagggaagagatgctgaattgagatcagattctatatatattttgaaggtggaaccagtggaatttgctgatggatcagatgtatgataggaaagagaagaggaattaaggatgatgccaattgttttgatctgataaaatggcaggatggaattgaagatttactgagttcaggaagaccttaggtgaaataagtgtggagcaggggcaagattggagttgaattagataactaagtaggggaaacaaaggggagaggttggggcagagataaaagtttgggagtcatgaagataaagatattatttaaagtcatgaaggccaggcgtggtggcttacgccataatcctcacactttgggaggccaaggcgggcagattgcctgaggtcaggagttcaagaccagcctggacaacacagtgaaaccctgtgtctgctaaaatacaaaaaattagccggctgtggtggcatgcacctgtagtcccagcttcttgaaaggctgaggcaagagaatcgcttgaaccctggaggcggagattgcagtgagccaagatcatgccactgcactctagcctgggtaacagaacgagactccatctccaaagttaaataaataaataaataaagtcatgagacgggatttggtcaccaaggaagtgagtatatatagagaagaggtccaagggctgggcccttgaatatttaatattatttagaagtctgtaagatgaagtagttagcagaagaaattgaggagagaccagtgaggtgggtagaaaactgaagaatgtgtttcaagaagcaggaactggccagttcctgcttcttgaaacaaaatgcaaattggtgcttgttggggttagacaagccacagaaaagaagcttctttaaattaatttttgaaagtttagagggagaaaattcagtcaatgggatgtttatctgcaagaatgtctgatatcacctggaatcatgtatctgggagtctggctggattttccacttttttattagaattctcaaatggcttatcggtgaaatttgtaagagagtctcaattttcctgttctgtgtcctgttctgttatgaaaccttaggatgagctcaggcaaccacagggtagctgagaaaatgggatcccttcttgcttgtttattttgtcacatctatatcctctgcatttca

SEQ ID NO: 214270 - DNA, 490 bp, Homo sapiens
aataaagtcatgagacgggatttggtcaccaaggaagtgagtatatatagagaagaggtccaagggctgggcccttgaatatttaatattatttagaagtctgtaagatgaagtagttagcagaagaaattgaggagagaccagtgaggtgggtagaaaactgaagaatgtgtttcaaggaggaagtgattgtgtcaagagatcctgataggtcaagtgagaattggccattgagtttacctatatggagggtcatagtgatagttttggtgaagagatagggacaaaagcctaattggggagagttccagagagtataggaggagaggaattagaataattgtatagacaattatttaaaggaattttgctttaagtgggattaagtaatgctatagcatcactttatagtgctttaagtaggattaaggttagttgttttaagtttgtttattcaattaaaggagttttgctttaaatgggattagag

SEQ ID NO: 214271 - DNA, 1008 bp, Homo sapiens
tcttagcctttttttctacacttgtgctgacccccaaatttccatctttagctcagacctaatcttgagacgcccatgcccagatgccttcctggcccctccacctgggtttcttggtgcacttggcagagaagttcaggtcttatgatggcctctccaggccctgcccttctaactctctgctgttatccccttaccctcccatgctcactctgtaccagccatgcggcctgcctcctatttgaaacaggggtgtcttcacttactgttccctctatctggaagctcccctggcccccagtgttcatgtaactcattcctaacttccccaggtctttcttcaagggcagtctccctgaacccccaaactaaagctgaatccccactcacttccagctttccttccctgcttctattttcctttgtaactgaacactaagttccacatgactccccgcactgtgattcccaaggtgtgggccaggatctgagggggtccccaaaattgtttcaggtgttctatgaagtcacagccactccatgatacactaaggtgtttagaggggaaaatctacattctataaagacacctttttgtttatgtcttgttcactgctgtgtctctagaactggcacacagtaggcactcaaatatttttccaagaataaaatatgtgttaaattaattgcagtgttctacatccatggattatttcaattccaactgcatcatctaatctgagtcattctcagagttttctaccaaaatgccctaatcaaagaggcaagtaaatacaaaaaaatgggaaccaggtgtggtggctcacacttgtaattccagcactttggaaggattaggtgggagaatcacttgagcctgggagttccagaccagcccgggtaacaaaacaagaccctgtctccacaaaaaaatttaaaaattagtggggtgtggcagcacgtgcctgtagtcccactactatgggagttgaggcaggaggattgcct

SEQ ID NO: 214272 - DNA, 479 bp, Homo sapiens
tgttttttctataaatctcattgctaatatctgagacaggagcaacactgagctttgtgcgtgctgcacagtgtttttgtttataagacagtttcccggtgtctaatggcattggatcccacaacaccatgggaggtcggggggtcaggcactcctagaaggccacatggagcagagcatgagaccgcaggttctgcagttgaaatgcctgtcctggagcactgctcagcctctcactggctgcctcaccttggacaagtactctgtttccttgtgcctcattttctccagctgaaaagtggaactaatacagcagtccttgcttatccacggtttcactttccagttttagttacatgcagccaatcatggtccaaaaatattaagtggaaaatcccagaagtaaacaattcataggttttaaattgtgcactgttaagagcagcttgatgaaatctcatgctgtccactccatccca

SEQ ID NO: 214273 - DNA, 472 bp, Homo sapiens
acttgaaagattagttgccatcaactgaaatgaggcagctacaagatgaagctaacagggtcacctatcagtagttcatttttggacatgttgagtttgacatggctactgagacctccaagtggctgttagtcttccaagtggagatagcaggtagccagttggagagattttggagtttggggagaaaggcatttaaaaccttgagccttgatgagatcaccaagggagtgaatgcagtacttaaagaagaccaaggactcagcccagggacattgcaacatcaagagacagagagaagagaaggaaccagtaaaggagactgaggaagaaaggtcaatgaggtaggaaaaccaagatagtggagtcttattcgggaagcaaaagtgaagagtgtttcaaggtggaaggagtggtcagctatgccaatgctgctcataggtcaagtaggatgagaacagagagttgaccc

SEQ ID NO: 214274 - DNA, 397 bp, Homo sapiens
tagggttttgtgtttgtgttcatttgggatattggcctgaagttttcttttttgttgtgtctttgccagattttggtatcaggataattctggccttgtagaatgagttagggagcagggggagtccctcctcctcaatttttttgaatattttcagtaggattggtgccagttcttatttgtatgcctggtagaattcagtgtgaatccttctagtccatggctttttttttgttggtaggtttttaattactgactcaaatttggaacttgttattggtcttttcaggttttcactttcttcctggttcaatctttggaggttgtgtgttcccataaatttatttcctctagatttcttatttgtgttcatagagatgttcataatagtctctga

SEQ ID NO: 214275 - DNA, 353 bp, Homo sapiens
gagcatttactgttcaggtggctctgtttggtctgggcatgtaaagaaatgtaaagtagaccaggtgcggtggctcacacctgtaatcctagcactttgggaggttgaggcaggcagattatttgaggtcgggagttcgagaccagcctggccaacatggtgaaacctcatctctactaaaaatacaaaaacaaacaaacaaaaaaaactagcctggcatggtggcccacacctgtaatcctaactactcagaggttgaggcaggagaatctcttgaacccgggaggccgagattgcaatgagtcgagatcgtgccactgcactccagcctgggtgatagagatggtgtctca

SEQ ID NO: 214276 - DNA, 429 bp, Homo sapiens
aaattgccttagtcttaaataatttccaagaaggttttttccactgtgaaagccttgggcacacataaacattgtctagagttccttttgggcagagcccctttgaggtgtgtgtcatggaaagatgtaggaagtagctctaagtgatgtcaaatgcctagggctgggtcttaaagactttctgtgtggaggaggaacttttttaaaaatttaaatatgaatgtatctgtgtactgtgtaatgcaacggtattatgatatcccaaagggacttttaacatacaccaaagaggcttctttataacagaattaaacaagtgttatttatgtttttgcaaagtaaccaaaatatgtgcttttattttcagatgtatcacgtcttaactttttaaaaactaaattaaggagactctttacatatttctgtgac

SEQ ID NO: 214277 - DNA, 448 bp, Homo sapiens
agacacagtcggttgttgtctgttacctcagatgccagcactttctgaatgactctggttgtctcactgggtttctaacatgttgaaagcagatgagtgtgtaagttatcttgtgtcaactgcacatggtctatctaatctatctatatgggtgattgtattactatacatagtgtacttgttttcttttttcttttttttttgtttttaagcttttatgaactggtaacaattttgcttggagctcaagatgagttgggtcctgccagatggcactgttatttctctggcagaagtagctagttattttctcttttccttcaacacttctctccttgtcctcaagcattaaatcatgcatatacaatacaaatccttacagccgctgttattttcagtccattgtatctatttcctgttgaccgaaggttatgaggcttgggtagtg

SEQ ID NO: 214278 - DNA, 352 bp, Homo sapiens
gacgcttctcctggtgccttctccctgtgctgcagtcaggaatgcctgctttccaggctcccgctgctcagctgttgccctggctctttcattcaccataagcctggaaaccgcttctcctgtgctgagtcacctgttccgtggaggctgtttcctccttgttcatggtttgctctccctgcctggttggagcacgtcttccagcagcttcctgagaaagagagtgcatgggaggtctattttgtggaatctgaaaatatctttagtatattgttgtatttgattggtattcaagggaaatacaatcctaagttggaaatccttctccctttgaattttgaaggcatgtctt

SEQ ID NO: 214279 - DNA, 493 bp, Homo sapiens
agtggtccatgtggctagattatattcacatataattttttttgatgacagtgaaacgtggttacatgcttgacaaatatatgctaaacataaaataaatgtaagtcaaatgtacaaaaagtttgttcatatttttcttttgtcagtaaatcttttgaaattgccttggttttatgatgtagttttactaggactaaacttcaatagctcataattatgtaattaattatatacagcttcaaaagcaattactaattgacccagcttgctaacatgacgcctggtgaccatcagtcactgataatgaaaacaggaaaacagctggggccacatcaactcctagcttattttgggtgccaaacagccacttaaaacaaaatttaaaatgctctgacttcagatgaaccacatcccatgatcaaaaccactcaaacagctgtcaccctgcaagctgaaagttttgagatcaaatcaaatcaaaccttctaatttg

SEQ ID NO: 214280 - DNA, 411 bp, Homo sapiens
caaaaagaaaaatggtgataataacaactcatcttcattgataacttagtgtgtgctggacatcatgccaaacatgtaacgtaagctattttagtaatccttgtgatatatgtatgtcatccttattttgcaaaagctcagagaggttaaggaacttgtctaagaccacacaggtagcaaggagggaagcacagaaggaggtcctggccattctcttcatagcttcagagaaccttctctcctgcaccttctccttggtccctggttttaatgtttggcaacactgactgccaagaaatccatcgcatctggtaatgacatggaagagtggagacaggacactggcctcaaggccaagtccatgtttccagccctgactctatgacctcctgccaaaacaaacaaacagaa

SEQ ID NO: 214281 - DNA, 448 bp, Homo sapiens
tatatcttgataatctggtaatataagttgaagaacaactttgttcttcaaaatcactttgtctattccaggttctttgcattgctctataattttagaatgagttaattaattttctcaaaacaaacaaaacgccctgctgacattttgttggcagtacattgaatcagtagataaatttagagagaattatctcaaaattgagtcttacagttcatgaacatggaatacatttccatttattgaattcatctttaatttctttccttaaggttttgttgtttcctgtctaaaggtcttgcacatctgttaaatttattcctgttttacattttttatgtttttacaaactgttaaggttttaaaaattttatttttcagtagctttgctttaatataattgttttatacttttaccctttattcagcaataaattatttaatttaa

SEQ ID NO: 214282 - DNA, 326 bp, Homo sapiens
gagttggcaggcaaaggcaagagggaagaatgtcacagaaagtggaaataaaggaaggtttttaaaaagtttcttagaagcagacaaaaacatatactggggaaaggacaccctaattcaataaatggtgctgggtaaactggatcaccaaatgcagaagaatgaaactggatccctctcaccatatacaacaattaactcaaattggattaaagacttgaatgtaggaccataagctgtaaaaattttagaagaaaacctagaaaaattattgtagacattggcctaggcaaagaatttatgactaagaaccaaaagcaaatgca

SEQ ID NO: 214283 - DNA, 531 bp, Homo sapiens
gtcaggactgatcctctcaactactgaccatttcacctccattcatgtccatgccacatcaggctgtgttgtctagatggaatgaatccaccccaaatgtccctttctggaggaagccaccattatgctgtgcctccaacacgtccacacacaccaagtcacctcgctcatgcaaggtgtgtgtcctctaacaaagtttcacgctctaaacccagataacttttgaaacccaagttctgttgattcccctactttgggtgctccatagttgctcatttgtctactaaacactgccccaggcaattaaatattccaaagtgaccagcagaatttttatgttaattctgacattgcgttgttagtacaagtgtttttcccccttcaaatttatgtctttgttactgataaatgtaactgataatgcttttttcagctatgttgccaagcatatttatataaaaatatactcagattgttttcagaatttgacaaagatgatagcaacaatgataatctcatttgttttatact

SEQ ID NO: 214284 - DNA, 290 bp, Homo sapiens
caactcgagctcgtacccctaattggttcttcgatgacgatatgattttatacttagaaaaccttaaagactgtaaaaaaaaggcaactagaattgataaacaattttagtaaggtttcaggatacaaaatccatgtacaaaatttagtagcatttctatacaccaataacatgcagactgagaatcgaatcaagaacacaatcccatttacaaatcccagaaagaaagtaaaatacctaggaatgcagctcaccaagaaggtgaaagacgtcatcgaagaaccaattag

SEQ ID NO: 214285 - DNA, 565 bp, Homo sapiens
agaaaaaagaaacattttctgaagacagaaatttggtctgacttcaaaaaaaaatcacactcatactttctccaaaccagctttatgggccttttggaaaatgaatgaggagatatttacaaatctggagacctcaagataacggaaataggcaatgcaaaaccttcttaactctttaaagtacactgacctcttactaaaaacagctatttgtttcaaagaagaaaagttttaaattggcagaagcacatgttggagaattagaacagtattatctgtctcttattcagaattcagtgagagcagagcctcctgattgtctggcataatacatttattttggtatttgttgttgttaaagcctccatgctgggaagagctgtgataaatactgatatcctcaatttaggaaggcagtccctttaggatgtagtttcagcaatgtatatatggcaaatttagaaacaaaagtttcttagcaacttatagttgaaattgaaatgagacagtataccatttactttatttgactatgccaagtaactttttaaatctgtctctgtag

SEQ ID NO: 214286 - DNA, 694 bp, Homo sapiens
gagaatgaagctttgaatgagctacaactcttgctgctttttaacgtagcttctagagtgcactgggaatgtgagctgtcgtttcttcaagactactgtggatctggagagcaagggatgggactagggcaagttaaaatagaaagctcatcattcttaatgagattgagctttttaaaaataaatgcaacttggatgcaagctttttattaatttttagagttctgataaagttgattctattttccagttttctttgtgcttttgtggaagagacagtttttagagatgcttactctgctgcttcccgcgatgctctcttcactcggtctctctcatcccatatcgccagtccccccacgcccatccttcccactgtcacaccactctcaccccctccccccacctctcactctcggcaaccccctgtgactcaccaccttctcacccctgcctacactcctaccgcccacctccgccctgccttctcctgctctcttcaatcaccctctcttctcgtctcactcctcccctcactccataactgcaccacgcgctcctcagctctctcatctcttccctctcgctcgcctcgcacccatcccacccctctctctccctcaccctatctctcgccctcacgtctttcctccttcatctcgcacctcgccgttccctcctccccgcctctcct

SEQ ID NO: 214287 - DNA, 386 bp, Homo sapiens
ttgaaagcaagcaatgttccagtgttaacatttctgatttgggggatgccagatagtgaaatttggattaaacagagggaatttatagtcttattctaattaataaatggacttaacggggttctgaaaataaaacaacctcataattagttggtaattaacatagctaagagccaggtagaactgtccaacctgtgtcatattctcacaggtgtgcccacaaaatacaatattatatagaataaatacattgcccaccttcattcatccagcaagatgtactgacttttcactgtaggcatgaacctgaagggaattaaaaatgaaggatggtccttgctctcacaaaagctgccaaattgggtacactcactcagtgtcttcaa

SEQ ID NO: 214288 - DNA, 196 bp, Homo sapiens
aaacaaacaagatcaaaagacggacaaactgtcactatggataatatttcagctaaatagatctaccaacaaaagtataggacatttagataggaggaaacaaacacaggtacaagccatatacatatctactaacccaaatctttatttcttaacatgtttaaataccataaaagtcccttctaggatggacatt

SEQ ID NO: 214289 - DNA, 191 bp, Homo sapiens
aaacaaacaagatcaaaagacggacaaactgtcactatggataatatttcagctaaatagatctaccaacaaaagtataggacatttagataggaggaaacaaacacaggtacaagccatatacagggaagccagctagatgttagagtatggagcaatcgaggaggcataaccactcttgttgggagctt

SEQ ID NO: 214290 - DNA, 445 bp, Homo sapiens
aaaaaaaaaaaaaaaaaaaaaaaaaatttggttctaataggctttggtgagactgtaagattggtgcaacttttaaaatgacaatttggcaatgtttgtcaaagctaaaaaaatgcacataccatgcttcatctagcaatttcatttctaagaatttgttctacaaatatactggctctatgtcaattaatctgtagactgactcatcaaatttaccaattgtgttggtgtattcaggaaaatttttttaaatagatatggtcaaaattacatcacttcatggaaaaatttttcagtttattctgatttcttttcaatccttttaaaagttgttttatgtatttcccccagcatcttagtatttttaggattattttgtcaacttcaaagtgcctctaccaaccttattttttggtgtttttgactaaagtttacagctatttat

SEQ ID NO: 214291 - DNA, 1059 bp, Homo sapiens
gcagaggttgcagtgagctgagattgtgccactgcactccagcctgggtgacacagcaagaccttgtctccaaaaaataaaaaaataaaaaaataactggaacattgccaaactgaatagaaaataatccaagtctatgcagtttgtaagaaatacacctaagacataaggaatgagagagactggaaataaagatatggaaaaatctattccaaaagaaagctggcatagcaggttaatagtagccaaaactgatttgaaggcaaaaatcattatttgcgttaaaaattatcagaaaaaaattgtaaaggaagaattaagcaagaagctataattccaaatcagtatgcatcttatagcatggccttaaaatagatagatagaatacaaaatatgtagatagaatataggaagaaaatatatagatacaaatatgaataaatttataaatctataaaatggaaaaatttaacatgtctttttgagtaattgatggtcaaacagacaaaaacaacttgagaagataacagaagatttgaacaaccaaccaacaggcttcattttttggatatgtaccaagccccacgcttaatagatgagaatatacattctttttagggagttttaaaaaaattgaacacacactgaattcataaatcaagtctcaacaaaaccaatgaatggatattatgcaaactattctcgtactcaattcagttaagactgaaattgagcaaaaagataaccaaaataattttatatatttggaaatttaaaagcatacttctaagtaactcatagatcaaagaaaaaataataatggaaattataagtaaagccgaatgataatataaatactgtgtatcagaattatgggttacaactaaagcagcatttagagggaaatttatatcatcacaaagaagatgagggtaagaaaaactaattaagaacattaaaaaagccaaagggaaatttacagccttacatgcttatattagaaaaaaaacagagttcattatttattagtcttagtatttgactgagaagttattttta

SEQ ID NO: 214292 - DNA, 644 bp, Homo sapiens
cagcatcaccgttgcactaattacatcattttcctgcccatgaggcctttggggcccccagagtgctgacccaggagcctgttcccccagtctatggctcagtcaccagagagggcacaagggcaattctcctcccactctctgccaaccatacaggcatggatctgccccctcaccccaaagggcctcacaagtccagaatgccagggggaagccaaccagtctcttctcaagggaagaacatgatcccagcatcttctatactatgctagatacacaaggtttcctaggactcctcagcattggtggatctgcccagacctaagcatttcataccagcagctcagctcagacctgcctggcttgcccattctcagtgggactgggatcagggtctatagaagctgcctccaaaaggtcccatgcctgaccctcataccgtatcacctaaaggttctctgactctccgtcctctgcttcctgagtcttcaataccaccctcccttgcggggcctctggcaaggcagcatgggataacaaaaagggcgggaggcagtggggtaaggagacccaagttccagtcccagagctgtagctaatggtgtggccttgggcaaatctcttccttccctggcttccatttc

SEQ ID NO: 214293 - DNA, 434 bp, Homo sapiens
tattgtcctggcacacagtctcaataatgaaaatcaatgtcagcttccttagttttaggagtaggagaaacaggtttctggagactcctagaagcatttctagatccatctcttcattagcagaaaattaacagttgactttctttccctcacactcaaacaaatgtgtcacacttgcaataaatgacattctgtcagaattgtccgtagcttcttccccatgctatcgaaacaaaacatcatttgttcctgtggtttctttgagacgatctcattgctttatatttattccaacagtagcctctgcctgcctgtcaccctcctcactattctcagtatcagtgacaatgaaggcaccatctttctgcagctaatgagagtactgctgtagccactggcattgggaccctggagtttgcctttgctggccagag

SEQ ID NO: 214294 - DNA, 402 bp, Homo sapiens
tcatggcctgtcattggtcttctggaattcgaaatcatatgggtacaggtcacaagttttcttggtcatgaagcttctctagtctcttccttgggtttgtggacacctgactcccacagaaggaggctggcaataagatataatgatctgtttgtgctgcaattgaaaaccagcagcaagaagccttattattatccaacccctcattactagtgttgtcctcctccgttagcttggtatctgccagcctgaacgggcctggcatctcctttctgccccctcccactgccatgctgtgcccttccttgctctctctggtgtctgcttcccagggactggccctcctccctgcccctgtcagcctgcctccgaggccacagatctggttttcctcccttctgt

SEQ ID NO: 214295 - DNA, 901 bp, Homo sapiens
gaagagaactacacaaaggtgaaaatagggatttgtggggcgttttcttggactctggtgaccataatcctatatggtttttttctttttctgttttagttgtttaatatgaattacattgactgatttttttaaatgttaagccaaccttgcatttctgtaataattcccatttggtcatgatgtattagtcatttagtatattgttgaatttgatttgctattttgttttgttttgttttgtttttttgtaacaagttttgcaccaatgttcacgagtgatatttgtccctaactttctttcttgcttgcttgcttttttttctttgtaattttatatcttgcccaggtttggctttggtatcagcataatgccagctttatagagtaagttgggaagtattcctgctcttcagctctctggaagagtttgtgaataattggtattatttcttccttaaatgtttggtagaattcaccaaggaagctgtctgggcctggagtttgttttgtaggaaagtttctaactataagtttgatttctgtggtagatagagggctgtacaagttatatgtacatctgtctgtgtgtgtgttgtctgtctgtcactctggccctgaagtgtgttttgtaggacagcatctaactacaagtttgatttccatggtagatggagggctatactagttatatatacatctgtctgtccgtccatctgtttgtcactccatccatccatctatctctagagtgagctttgatggtttgtgtctttcaaggagtttttctgttttatttaagtactcaaatttttcaaaatattattttcatacttgtagaatttgtagtggtgcaacctcttctattcctgatactggtaatgtctatatttttctttta

SEQ ID NO: 214296 - DNA, 407 bp, Homo sapiens
aactcataggagaagaataagcccatgcaactgaaggcagaggagaggatgctccagaatgctagaagaattaggtttgtgaaagaattagtgtttccatctgactcagagaaatctgaactgctagatcaacctgaggtggcttgaggaagacagcaggtatggctatatttgcaggatgttgagatcctacattgatctgcagtcccattacaaccaatgccatttaaatgacaactactgtgaaatgaaaatatttgcaagatccagtaggctctttgtactatgcactgaaatcctagcataagggaatattttgggtgtctctttgaagtcaagtataacaggatttgaccaatactgcctgaagtgtaaatatagtcaataaaaatcatttttacattctg

SEQ ID NO: 214297 - DNA, 500 bp, Homo sapiens
agagagagtacggagtgtctggaggcagacaaggcccagtcttgcgggagcacacaagggaggaagaagctattgtgtccggaattggttccttctggtgggttcttggtctcactgacttcaagaatgaagctgcagacccttgcagtgagtgttacagttcttaaagatggtgtgtctggagtttgttccttcagatgttcagatgtgtctggagtttcttccttctggtgggtttgtggtcttgctgacttcaggagtgaagctgtgatccattgcagtgaatgttacagctcttaaaggtggttcatctggagtttttcattcctccagatgggttcgtggtctcgctgacttcaggagtgaagccacagaccttcccagtgagtgttacagctgttaaaggtggcacgtccggagttggttgttcctcccagtgggtttgtggtctcgctggcttcaggagtgaaaccacagacctttgcagggagtgttacagc

SEQ ID NO: 214298 - DNA, 515 bp, Homo sapiens
ccatttttattactgccattgcactgggtgcccattaaacgtaatgcatacacacacaacatcaacaacaatgaccaaaactattgcttgtgcagttaatagaaaccaaatttcccagaagcttgcaactccacatgtcacatgttttgcttttttcccactgatttaagaatctctccctaagctaattttcttctccgttcgctctaccccaggccccaaatgcccatggtctaaaggtcttttgtcaaccacactcaaagacttccatctccttgagggtgaacttgtctgcctggtttcattacttgcatggcactcctctcagatggggactttgaccttctgaaattcctgttgaagattaaataccaaacccagcagtccacaggagagttaacagacggtttcagtacacacagcaagacttccagagtggtcaaattattaatccacgggaaaatgcggatcagatggtcaaacgcaggacataactcacatagggaaccggcttt

SEQ ID NO: 214299 - DNA, 294 bp, Homo sapiens
acaagcccaggagaggcctcataggaggggtcagggcacttggtgggtgtgccctgtgagttagaacctgtgagtgggaattattatcccagtttccagataagggagcaaactgaggctcagagaggttaaggaacttgtccaagctagtgataaacaaaggcaggagctgggcgcagtggctcatgcctgtaatcccagcactttgggaggctaaggcgggcagattgcttgaggccaggagttcaagaccagcttgaccaacatggcaaaatcccgtctctactaaaaata

SEQ ID NO: 214300 - DNA, 383 bp, Homo sapiens
gctggaaaccatcattctcagcaaactaacagaggaatagaaaaccaaacaccacatgttctcactcgtaagtgggagttgaacagtgagaacacatggacacagggaggggaacatcacacactggggcctgtcggagggtggggatagcattaggagaaatacctaatgtagatgacgggttgatgggtgcagcaaaccacaacggcacgtgtatacccatataacaagtctgcatgtactgcacatgtatcctagaacttaaagtataataatttaaaaaaaagtcaagctataaatagggaaaagacatctgtaatacataaaactaacaaaggattagctgttaacatattaaatagatggggaatctccccaaatca

SEQ ID NO: 214301 - DNA, 169 bp, Homo sapiens
agggggaattggagtctccctgcgggctgtggggtagggttgctgtgcagtgccccctctctagcccgttctagggagggagatgaaaacaacccccaatccgcaaacagcttggagggaaaaaagaggcactagggtgaaaggaatgaaaggtgcaagcgtagaccag

SEQ ID NO: 214302 - DNA, 665 bp, Homo sapiens
gcgacagagcgagcattccagccagcaatgaatgagagttcctgttgctcctcatcctcaccagcatttgttgttgtgaatgttcaggattttggccattctaacaggtgtgtagtggtgccttgttttaatttgcatttccctgatgacttatgatgttgagcatcttttcatatgcttatttgccatctgtatatgttctttggtgaggtgtctgtaaaggtctttggctcatttttttgtcttttttttttttaaacattgttgagttttaagagttctttgaatattttgtttgtttttttctgtatgatatctgctacagtctttgtatatttttgataacagttccttctcagatatgttttttgcaaatattttctcccaggctgtggcttatctttccattctgttgacattgtctttcagagggcagaaatttttaatgttaatgaagctcaattattgattctttgttttatggatcatgctttagcattattatctaaaatatcattgccagggtgtggggggcacgcgctggtagtcccagttacttgggaggtggaggctggaggatcacttgagtccaggagtttgaggctgcagtgagctatgatcacaccactactacagcctgggtgataaagtgagaccctgtctct

SEQ ID NO: 214303 - DNA, 286 bp, Homo sapiens
gtgacagagcaaggcaagactctgtctcaaaaaaccaaaaaaacaaaaaaaggaatgttttataatggaatgatatagtacagaaccttttgagattggctttaaagaaaaaaatcaggcagattctcttgagatctacccaaggtgctgagtatatcaacaggttgttctttttaaatctctgagtagtgtttctgccatttgtttagccattcacccatggaagaacatttggattgtttccagattttggctttacaaataaagctgctatgaacattctggt

SEQ ID NO: 214304 - DNA, 408 bp, Homo sapiens
atcctgaacaatttttaagactataaaggagttctcagagcaaaatgtttaacaaccactgatttagagaaatagggagttaaaagagaaacatggagggccaggtgctatggctcagcctgtaatcccagcactttgagaggccgaggtgggtggaccacttgaggtcaggagttccagaccagcctggtcaacatggtgaaaccccgtctttactaaaaatacaaaaattagctgggagtggtggtgggcacctgtaatcccagctactcgggagactgaggcaggagaatcacttgaacctgggaggcggaagttgcagtgagccgagatcatgccactgcactcgagcctgggtgacagagcaagactctgctgcccgccgcaccacgccctactggggcaaaa

SEQ ID NO: 214305 - DNA, 406 bp, Homo sapiens
tatgtagaaactttaatcagaagatcccttaaacagaagaataactacccttagagttgggagaaaaccaagactatattgttaagtagttaacaatgttaaatgttacagagatcaagtaacataagaaatcaaccaagatacattggccaggtgcggtggctcatgcctgtaattccagcactttgggaggccgaggtggacagatcacttgaggtcaggagttcgagaccagcctggccaacatggtgaaaccccgtctctactaaaagtacaaaaattagccgggcatggtggtgtgcaccttaatcccagctactcaggaggctgaggcagtagaatcgcagcctgggcaacaaagtgagactctgtctcaaaaaaaaaaagcaaaagaaaaagaaatcta

SEQ ID NO: 214306 - DNA, 683 bp, Homo sapiens
tggctcatgcctgtaatcccagcactttgggaggccgaggcaggtggatcacgaggtcaggagatcgagaccatcctggctaacacggtgaaaccccgtctctactaaaattacaaaaaaaaattagccaggcatggtggcgggctcctatagtcccagccactcgagaggctgaggcaggagaatggcatgaacccgggaggcagagcttgcagtgagctgaaatcacgccactgcactccagcctgggcgactgagcaagactccgtctcaaaaaaaaaaagaaaaagaaaaagctcttgacttaacaccacacatgtagtgtgccacttcccttgaaaatctgggacagtgccaggaatagtgggtcagaggacctgtgttcaaagctcaatctcataaatcaatccaatgaagtgggacaatccaatagcaggcagcctgagggagaatcattccatgctctcctatcctagctttctaacacaagacagcattccttcactctactatttgtttttcccaaacagataagccctgtcttacaatacaggctgagtattcctaatttgaaaatccaaaactttttgaccaccaatctgacactcaaaagaaaatctcattgaatcatttcagattttgaatttttggattagggatgatgaactgatataatgcaaata

SEQ ID NO: 214307 - DNA, 359 bp, Homo sapiens
agccgggaccccctttctggggcactcacagcatgggccacagcctctgttcctgcccatgtcctacttgggtggtgatacctggcattggggcatctctgcttctggactcaagggcccagggtcgggttctggggtaggggtcagaaaatgtttttggtgaggggccaaatggtaaacgtggctttctacggatgttcagctgcacaggcaactgcagaaccatgcaatgcacacgtgtggctgcacgtcagcgagactgtattttattagtagtagtagtattgtttgagatggagtctcgctgtgttgccccccattgcactatagcctgggcaacagagtgagcccttgtctca

SEQ ID NO: 214308 - DNA, 273 bp, Homo sapiens
agagaatcgagtaatggtagcgcccttcttcagtgaaggtttcttcctggaaacagaaccggaagaagcaagtggtcaaaggtcacattggatcagctacaatgatggacagcagggaagagtctcaatgggtactattgtgtccacgctgggcattacctgtgttgcagccacacagacctgatttaggctgcccttgcaagtagcaagtactaaacaccattattgttttgatgaaaagggtcctgtggattgtttttggtctgcatgtta

SEQ ID NO: 214309 - DNA, 598 bp, Homo sapiens
tattttgtctctttcctaggatcagtttatgtttgtacattctagcatctgcagggttttgacatgtcatttccagttaaggactcgctatgagttgctcatgttacctaatatttaagtagcaaggggattccattattagttgctttacaaatgattcacctagacattcagacacaaacctaggcttacttgttttcttttctcatcaaagcagctggaaaagaaatgaaaagcagcaacagcaagggggagtttaaggattttatgcagacagataagaaaatatagccagctcaaggggtaataaaatattataaaataaatagcaattgtttggcatttgtagagatccaagtgacactactaagtggcattcatatcacactcatatactaaagaaggttcctgtccccctagttttatgtctttgctatatatataattattggtaagttctgtttgccctggaataaagacgttgggaaagatcatgttgttaatagtagctatcacttacagagcagaaacaatgggctatacagaaattattacatttaatccttatgccaaccatgtaataactgctattatcccc

SEQ ID NO: 214310 - DNA, 256 bp, Homo sapiens
tattatccccagttacagatgagaaaactgaagctcagagagtgaaaggacttgcctaaagacacacagctgcccaggatcccaaccatcttatgggtggaggagtcaacctcagctcctcttccaggtggccggccaagctcggatcacacccggcatccctcatccacatcgcctcttccccaccacccacgaccagtaatccagtgtgcatagttgtaaacttgtttctttaaataaacagtcttgagtttca

SEQ ID NO: 214311 - DNA, 651 bp, Homo sapiens
acttttctcctcaaatgtcatttaaatctcattaggtagatctttgtgaaatgatggcactggcaataatgattcctttttagttctccagtcattttggccagtggaagggcctggggaaaagcattagtatttggctgattggtattagtaggggccatgaagaattaataaaaattgtaagacttttttacccttcccccctcaattggatgggcaaactcagatttgataggggttaattatgccagattattttgcttgttttgtcactagctggtaaatgagagttggctttgtccttaaattgaggtatcaagatgttgggactgcagctagggtgggggaatatgaaatgagggtgtgtgtttgagagacatttgggcaaatagaatggcaagttgggtataggaaatgatgctacacgaggagtcacctgccatggctaggacagggctgcttctaatttatgatatttactcattgcagttttgttgtcatttaagcctgaggtctaaaagtttaagtgcctgcccattaaagcaaacaaaaaaaatcatcttatttgaatgattgatttatctgggttctggttaaaatttggttattcatgtatgtatctgaataggatttcagttcgttatccatgtt

SEQ ID NO: 214312 - DNA, 464 bp, Homo sapiens
gtaaataatttctggcattgagccgaatcagaactgctctgacataaaagaaaaactgtaatccatagccccaggcccaacacctgggctgtctcagctgggaacttgtttcaggtcgacttgggtttgagtcgtggccccagaacttcacagttgtgtagtcatggagaagtcagttaacctcagtgaatctcagcatccagtgagaaaatcctcatctcctttatagggatgctggatgtgtgcctagcacagtgcctggcttgcagacagtgtccccaaacagaaccagccctgaataaattgtgtgacacacaggcctcagttcttgaaaaggcttgagagaccaggcatgtggcttatgcctataatcccagcactttgagaggctgaggctggaggatcacttgagctcaggagtttgagactagcctgggcagcacattgagactttgtctctaaaa

SEQ ID NO: 214313 - DNA, 466 bp, Homo sapiens
agcagtttggtgggctacctgaaatccctggagagggattagaagcaggccagttctgatggggagttcatgcttagaggagaggtgatgcacacgataagttccatttgcttgttttaacctagggacaagtatacttggcaaggcatgcgatatagtaggggcactggcagagagatcacagcttttctggcctgaggaaccaggagattgagtgtggggaagccacagaagagaggcaatttggaagggaaagatccaaagagaagattccccagttctctctgcctactttttaggctaacccctgaaccaagcaaggtagttgcctgcttcaaaaacaaaaacaaagcagggtgtgttggcacatgcccgtagtctcagatacttaagaggctgaggcacgagattgcttgagctcaggagttcaagaccagccagggctacgtaagcaagaccttatctg

SEQ ID NO: 214314 - DNA, 353 bp, Homo sapiens
atgtgataattgatccatattttttcaatctgtggatttaaaactagggagattaatagagaagatgctatcttttgtgcattgtgtgttctttgcaagtaatgatagaaaaccaccaagcaaatagatgttctgagcctctaaaagattgcctctcctcagagtctccagtatttttatattactgagctttccttttaatagaaatcctatttgtgatttcaaaaggatgtatagcataaactttggaagccttgtatttgtggactcattcgggctataaagtgacggggaagcatgcacaaagatttgccttagtgaagatggcacgaaagccttgacgagggtttctg

SEQ ID NO: 214315 - DNA, 572 bp, Homo sapiens
atcagtttgtctttacaatattctcctgagggtgggtgacaagcaaacaccatcgtccctgttttacatgggacagaaaggagcaagaaacagaaccctgacaaaatcactttgccatcaatttaatgcatggcttttagtgattcgaaaatagaactcctgatgacttatttctagttcacattcctgccctttgctaaatcaggcagtctccttttgctttaattcatgcatttctaaaatttcacgaagaattctcattaatattaaaatagcagcctactgaaaccaagttttctttctaaaagaagggaaaagaaaatggtgtgcaaacagtcttaatgagttgatcttcaaaacaccactagcaatgacagagaagacctatcattttcaacaggggagagaagacctctctcccaactctcctttattaaatatttggtaagaagcaaataaatagaaacagatggctctagacagcataggagcaggaaagcattgccccatgggacagaatgactcagtctcatggtcagtcctggcccacagcactgactctaacttcaaag

SEQ ID NO: 214316 - DNA, 431 bp, Homo sapiens
aagccaaagaggcgactggaagctcaggctgttcggcggcctcggggcgaccacaggccaggccctggtcctgatccacgaaccaaggcgcctcctctcccccaggaagtgagctactgcgcccctcggagcacccaggcgagcccgggcaccgggagaacgctctacactcggcgcccagccccgggacgccgcccagcgcacggctccggctgagcacccgggcagcggtagctgcggggaagaggggcgtgttccctgagcctcggagccccaaggccgggtccaggcgggacagaggaaggcggcaagcccagcacgctgtccgtgacggcggctctcgttcccaagccccgccggctggcgtggcgacgcgctgtagtccgcgcgcccttgcggggacagcagtcgtgcgcgccttgtgcggccgc

SEQ ID NO: 214317 - DNA, 240 bp, Homo sapiens
agccaagattgtgtcattgtactccagcctgggcaacaggagcaagactccatctcaaaaaaaaaaaaaaaaaaaaggaaaaaaacttagtggcttaaaacaacatttattttgtttgtgaatctgtaatttgtacagggcttggcaggatcagcttgtcctcactcagtatcagttgcggtgagccaagattgagtcattgtactccagcctgggcaacaggagcaagactccatttca

SEQ ID NO: 214318 - DNA, 631 bp, Homo sapiens
agacatggaatcttttcatcacctgaagactccctcattcccctgatagtaactattcttccctagaggtaacctcttttctgatatttgtcaccataaatttttgtttacttattttttgaggtataagatacttgtagtaaagtgcatgaagtgtactttttttttttttttttttttgagatggcgtctcgctctgtcgtccaggctggagtgcagtggtgcgatctcggctcactgcaagctccacttcccaggttcacgtcattctcttgcctcagcctcctgagtagctgggactacaggtgcccgccaacacgcccagctaatgtttttgtatttttagtagagtcagggtttcaccgtgttagccaggatggtctcgatctcctgacctcatgatccacccgccttggcctcccaaagtgctgggattacaggcatgagccaccacaccaggctgaagtgtactattcttaagtatatggcttgatgatttcttttaacctatgaatacacctatataactattctctagaaaaatatatggaatatttaatggcttttataaaaaatagcagctttattgagatataattgacataccatggaatacatttttaaagtatac

SEQ ID NO: 214319 - DNA, 414 bp, Homo sapiens
ccaagttttccttccttttaaaaatgtcttcattctgcttgattgtcttccattcttcccttaaaccgtaatctgttatcatagcagtcaaaccttacggaaaattgcatttgagacacttaggatataaatattaagtataattttgagaaatccttttcattttatattgaagtagtctgtaattaaatgcagtgatatgttttcaggagaaagaatttatgtctaggaaagaaaagttttttttttttttttttttttttttttttaaataaaaggagtaggtttaacattggccaggtgcagtggctcaagcctgtaattccaacactttgggaatcctaggccagaggatcacttgagcccaggagtttgagaccagcctggacaacgaagtgagaccacatccctaca

SEQ ID NO: 214320 - DNA, 225 bp, Homo sapiens
tctctaacatgtactgctcggaggttgggttctgctccggatcagcgatacgctgatccggaagccaagcatttcccaaactcatcagaccctcagatccttttttgtaacacttgctagcattttgggaaatgctgctatgtgtagttgattaatataagtattagaacaaaatattttcatcaggttgctttaattacttgcctgttgcaaatcaaaaggata

SEQ ID NO: 214321 - DNA, 442 bp, Homo sapiens
  misc_feature (285)..(285): n is a, c, g, or t
gctttcttggtttcatggtaagactaaacttttcctgtggaccttgcatttctctatattgtgaatttctctgagtcatgtgtcttactctgtactctgaatattgcttcctagtagcccctgactagcagcagaatgtggacctgatgggctttctgctacctggtgagcatgtgttgcaagttgaccctatgctggcactgggctaataacagccggggtggctgaataccacaattacactctctttgcctgaggcctccataaaacatagtgagactgagnccctgtccccacaaaaaaaaaaaaaaaaaaaaaaatacagctgggtgcagtggctcatgcctgtaatcccagcactttgggaggccgaggtggacggatcacctgaggtcaggagttcgagaccagcctggccaacgtggcgaaacctgtctctatt

SEQ ID NO: 214322 - DNA, 231 bp, Homo sapiens
ctgaacccaccctctgctcttgactgccctttgaagaacctctccattccttcctcctggggcatctcttgggtgggggaggaaatctcagccctgggaggagagtaggggccttttccttgccctcctttgggaactggagaagagcgggagattgtgctggaggcgggagggggcactcgcttggctccatctcaaggaaatgggtctctgactcaaattggattcaga

SEQ ID NO: 214323 - DNA, 399 bp, Homo sapiens
gccgaggtgcgaggatcacctgagcctggaaggttgagactgcagtgagctatcattgtgccaactccagcctggtaacagagtgccttttttcaaaaaaaaaaaaaaaaaaggatttgggaggatatgcatatgttatattcaaatacatgccattttattcatatatcagggacttgagcatcctttgatcttggtctctgccgggtatcctgggaccagccccctgtcgatacagagggaccgctgtctaagaaccgctggtcctatctttgacttctggcggaataggagctccatgtaaaaaggaggagaagctgcagcgggttattagccatttgtgagtcaggtcactgtaaaactttatcaaaagtttaaaagacaaaaagcatcctcata

SEQ ID NO: 214324 - DNA, 263 bp, Homo sapiens
aggaacctgctgcccagctttcctccacaggcttgatgtgtttgagccagaagtatggggcgtttgcggggtcctccacaagtacaaacagggttctgtcccttttcaggggtcccagaggaaaagcactcctatagactctgagcaggggcagctgccacattccgtttgcttcctgagcttgtctaggtgaacagatttcaggtggaaggtaagaaacgggatgaaatgacttgagcgggacagcttgcttccaggcttcc

SEQ ID NO: 214325 - DNA, 537 bp, Homo sapiens
gcgcctggggccggccgcgctctcgggctcgcaggcgctgggtctcggctccggctccggctccgcgccgctggctctgcgtcgctcgcactccagccgggggcaccctcatcccaggctgactgacgtccctggcacccaaatgtcgcggggagtgcggggccagggtgcgccctccctcctcctccagccagtgaaacccgggacagcggcacccagccccagggcggaggccgtctctgctgcgcgcagcgacgcacccaggcccaagggccgggagatccgcggggaacccggagacctgcgtcccagaggggccgagggttgcaccgcgcccgctcccacgggcctcttccgagaggacgcttctccctcgtgtccgcgggaagtcctcggatcctggatgagaaagagccttctctcaccggctcccagaccccgcgctttttaatacctgtccttgcagagcgactggtcattttaggcccgagtcgagcctctcttgattaataaatgaatatggctcgttttgtttta

SEQ ID NO: 214326 - DNA, 481 bp, Homo sapiens
cggtagatattaccacttaaactggaaacctagtgagcctcagttaaaaatccattgttaccctttaccctttctcagaaactgctaagagattttgatctctatattttcttttttctcaatgcttttatggtgctttagctcatttctactagaccatataaacactataattatattaaaaaaatttagacatataaaggtttaaattatagacctgattccacttcttatctagctgttgctttgaacatgtcattttatctctctggacctcagtcttctcatctataaattaggtgactgaactggctgatcctgaatctccttccagctctgactttctttgtctgcagtatggaagttatcacttaatactaacacattaccagatttgacagaattcagcatccatttatgataagaactcttgcaaactagatatagaaggtaactttcttaacctggtaaagagcatgta

SEQ ID NO: 214327 - DNA, 209 bp, Homo sapiens
acatacctagaagaattgctggatctaaagattaccattctacaattctgattagtaccacactaaattacccatcagaaacactgtatcaaactacactctcacagtgtatgagtggtgctatagtttgtttgaatgatggtgccccctccaaaattcatgttgaaacttaaaccccaatgcaacagtcttaagaggtggcctttggg

SEQ ID NO: 214328 - DNA, 327 bp, Homo sapiens
gtggatgggtaggtggatggttacctgggcaggtgaatgagtaaatgggtaggtggatgagtggatgggttggtgggtaggtggatcagtaggtagatgggtagataggtgggtgaatcggtaagtggatgggtagatgggctggccagcgagctggctataccttggagcagtcatccttaaagactatcaagtaggcgtatccatgaattaatgacgaggaaccaagaagatagtaaatgacaaagctaaatgcagtagcaaagctgatacaaggtgacatggagctcaaagaaggagcagatttttaataatatgtctaaagca

SEQ ID NO: 214329 - DNA, 601 bp, Homo sapiens
cgggctccccgagcgggcttcccctctgcccggcgcgatggagcgggtcggtgagcggaacaaaggcgcctgcccgggggagcgggtcttccgctgaagagcgcgggtggcgcgccgcgacggccgcctgcgggccaaggtgggaggctgtgcggccccaggcgcggcgcgctccgccgtgggcgggcggcgatccctgagtccggcacctgtgcgccgctccctctgtgcctcccgggcagccccgcctgccggcctcggagtccgcggcgccggcggctagaggtccagaggcgaaccacttgctggtgcagaagagaaaccctcaaatccctggcctttcgcggagacgcctggacggggccgtgcgccgtggactgagcaggcgtctcggggagcacttctgcagagcgaggacttccatgtgagcgattccgttctccccaccaccaatccgacctcccagccgtctccgccgcccgagcatccttgaggtgggacgagcaggggcttggatccctgccggccgtctggtgtgtgaggcttgcacggcccctggctgccccgcgcctcgccggagcccgagggggcgcaggtccgg

SEQ ID NO: 214330 - DNA, 96 bp, Homo sapiens
tcatgtatcatgtttgaaaatgaagaatctttacccagtctctaaactgggttcctttgacacagttatggaataaaatctttgatgtttccttct

SEQ ID NO: 214331 - DNA, 134 bp, Homo sapiens
gtacactgtgcttatagttgacaatattgtcatacacatttaaaaatttattaaaacggtagaccttatgttatttgttcgtaccaaaataaaaaacaaacaaaccaatttccagatgtttgagcctgaaaaat

SEQ ID NO: 214332 - DNA, 393 bp, Homo sapiens
catcagtggcctggtgcacagtgttaacatgaattattcttttgtatcccagatcaggccttgctctccagtgttgattttgtccatattgaagtcatatttatggctgggtgcagtggctcatgcttgtaatcccagcactttgggaggctgaggtggacggatcacttgaggtcaggagttcgagaccaccctagccaacatggtgaatcccagtctgtcttaaaaatacaaaaatttagccaggtgtagtgatgcgtgcctgtagtctcagctattcaggaggctgagacaggagcaccacctgaacctgggaggtggaggccgcagttagagctgagatcgcaccattgcacttcaacctgggtgacagagcaagacttcatcacaaaa

SEQ ID NO: 214333 - DNA, 512 bp, Homo sapiens
caggtggtatgaggttcaggaggcagcccagcgaatattgctaaggcttaggctctgttctagtagttgcaaacccactgctggtgccaagtcaggcagagaaggaacgctgctgccacacagtgtctgcccctggcatccaggtgtcacatacacacggttatttccaaatgttgtttaatgtgtgcccctagcatcctagcagtttggcagaagaacatacacatttattgaatttcctctggcctagctgcttagtagattccaaatgaataatagaagaaatgttgtggtaaatgtaacgcatgaaatgtgggtgttagaggggtcttagatattatttagcctatcctctgaattgtacagataagagacagatccagaaaggtgaggtgatctgctatagaccatgagttagctgccaagatggaatggaagctttaattgtctgatgcctattttgttgctttttctacttgatagaacttatggatcaaatagtattccataag

SEQ ID NO: 214334 - DNA, 278 bp, Homo sapiens
cttagcacagtcccttgcacattataaagcctcaataaatgctatttggtttttatttaaaagatttaatgaattgttaatttttaaaaaatagcaaacatgggggtaacaaaattttaaaagctcaaatatctgcaagtggcacgaaaataataattcagttactcttcacaaagatatttattgttaaaagcttcttatgtttttcaggggggaacattattcatatgtcagtgtatcaatctaccttctatatatatttttaaaaattactgtac

SEQ ID NO: 214335 - DNA, 378 bp, Homo sapiens
aggtaagccaccacgcccggcctctttgctattatcatgctgcgttgggaggttttcttaaaaggcacacaacaattttgacagtaatttctatagtttcattttttatttttattttttattgtttgagatgtttgaaaaaccaagagaaaaccaatgtaagaagactaggcttttaacttttttttgtttttgttgtttttttttttttttttggggggggggtctcccttttttccccaagctggggtgcaggggcacaatttgggttaattgaaacttcccggtccgggtttaaaggggttttccttgcctaagcctccaaaggggggggatttacatgtccccaccaaaacccccagctaatttttgtatttt

SEQ ID NO: 214336 - DNA, 244 bp, Homo sapiens
taaacagctaccaaatccatgaatagtccaaacaatactgaacagttctgtttctgcaggtggtctggggtcttaaccatcttcttcatcatctgtttctctcttcctgttttcaccttttccgctttcttcctcctcttcatcctcatcttcatcctcatccatcttcatctttatcaagtccaaattcttcttcctcctcactgacttcatctttgtcatcatccccttctgtcgtcttctc

SEQ ID NO: 214337 - DNA, 453 bp, Homo sapiens
attaactgaaaaccatctatcagcagcttatagtttgggcagataatttgatatctattttttcttggaattttatgtaaaagtccatactgcttaatcagattaaccatacaaatgcctagcacagaacagatgatcaatcaatgccaaatgaattaaattttaaaatttgaatctcatatgtgtaaagatgtttattgaagtattgcttgtaatagtagaaatcttgaaaaacccatgtctattagtagtggactggtatagtaaattacagtgtgcccttataatggatggtaagtctattgctcctatgaaagctaatatgtgttactaagtgaaaagaagcaagatgtggaacagcctacatggtatgattatctttttgttattttaaaagtacaagtacgtggttattgtatgctggtgtagacatgataaacgtacttgtttttt

SEQ ID NO: 214338 - DNA, 252 bp, Homo sapiens
gctcggcactcgcctgatttgtgggaggattgcttaagccagggaggtcgaggctgcagtgagccacgactgtaccactggagtccagcttgggcgacagggcaatactgtctcttaaaaaaaaaaaaaaaaaaaaaaaaaaagggggctttttttttttaaaaaaaaaaagaaattttttttgggtttccacccttttggaaaaatttaaggattggccaggggttaatcccttaaatccaaaaaaaaaag

SEQ ID NO: 214339 - DNA, 560 bp, Homo sapiens
ggtaacattgtttatgttcatcgcacaatcatctggaaatataagaggtggagctctgttttggtctggagacctaactcgagcattatgattatacatgagtcagctacattcaaaggccagcattctagtccttagtttaatccttgaaaatcaagtgcttcttttctaacttctactgaaaggaaacttcacctgtcattgtatacattgaagtgttctgaatcttatttgtaatcaatagtcctttgttattttgtgggcctttttttaagtgtttgttttgttaactatgcttaaaagttattaaaacttgatcttgttttgggagttttaccctttaagttcctcctctagcatggtaattctcatgctagataagaaatgtacactgtcagttccctggtaacagctgggatgtcccaatcagaatggtgactttagtttggcatctgatggaatgggtggccatggtgagggagaaccagggaactctggtaaactgaatggaagtagtgaaagaagtagattttttttcccttacgttctcagaactagtt

SEQ ID NO: 214340 - DNA, 483 bp, Homo sapiens
ccaatcaacatccaaccccattaacatccaaccatttttttgttttttagagtaatgaatctaaaaaacaaaaaaatggttaaaatgttatatggctagtgactggtaaaggtgggatttgaatgtgatactgaatttagagcccatactgttattttgcttcaaattaagaaatatgtagtttttggttaccaaatgctgttttttaaataaatcattgtttagttcctattgaagttttcacagatgtaaagtaaaatggagaaaataagcaggatgtagtgaatttctaatgaagctattttttcccacttttttctattttgacaaatactcttcctacttttacaaaatgaatttttaaaactatctgtacttaacagaatatcaactggaaacttcatttgggaccctggataaaagcctcagaagtctgggaactgttgagctaaatgacttgcccagatcacacagttaatatgt

SEQ ID NO: 214341 - DNA, 710 bp, Homo sapiens
gggcagggagctcggagcagagaggccctcagtaaatacaacagtgcctgacgttaccagaagcaatcattgtgcctaagttggaataaactgttcacagtagaagccaatccacccaccccaaaggaattccatctctgctgtttgatctggttttttgttttgttttgtttttgttgttgttattgttgttgttgtttttgagacagtctcgctctgtcgcccaggctggagtgtggtggcgcgatctcggctcactgcaacctccgcctcccgggttcacaccattctcctgcctcagcctcccgagtagctgggactacaggtgcccacgcccggctaatttttttgtatttttttagtagagatggggtttcaccgtgttagccaggatggtctcgatctcctgaccttgtgatctgcccgccttggcctctcaaagtgctgggatttcaggcgtgagccaccacgcccggtcgtctttgatctgttttctcttgctccattgaatagaggctggaccacgcagacggaaagcaatcagagagactcttcattgggtagacaaccacccccgtcaaaagcagaatcttttgcagaggggttggtcttgtctccatcatgtctccctcttcaaagaaacgatggggaaagatcatgaagtaggatcctacaaattttctataaagtacttgtttgaaaatctgaaa

SEQ ID NO: 214342 - DNA, 321 bp, Homo sapiens
aaagttaccttcataaattccattgctatgtgggtaagaagcatcttctgaaaaatgccaaagtacataaagttattattatatattattattacttttcagacagggtcttgctctgttgcccaggctgcagtgcagtgcatgaacacaatttattgcagccttgaccttctgggtgtgagtgatcctcccacctcagcctcccatgtagctggaactacaggcacatgacaccatacctgggtaattttttgattttttttttcttttttttgtagagatggggtcacaccatgttggctaggctggtctcaaactcct

SEQ ID NO: 214343 - DNA, 294 bp, Homo sapiens
gaaaaataatagtactattgatgagacagagtaccatccattcttacattgcagtcacattggatctacactgaattaacaagctgcagccccagccaccgctagagcggtgagggcacaccggatcccagatctgcaggcggctgagcaggtggagcccaacgaagagatgtttcctgctgcaggcaattatgcaaaatgacaagtgattgcttttccttttaaagacaacccctttggaaaaagcttttttcttgaggaccctatggaaatggggggttggtgggaacttca

SEQ ID NO: 214344 - DNA, 238 bp, Homo sapiens
ggggtttctgcaggaagaagggtgtcccctttgactggaaactgatcttactgtatttgagaactgctaggcattcaccgtcatccttatggctgttaaaatcacttgctctgcatgctctgcaaactttatcttgcccatattcagctgctggtttgtggaatgccaaagtcagtagtccaagttgagttagtttctacttagatgagttcaggtaaaacaaagattgggggaagtt

SEQ ID NO: 214345 - DNA, 779 bp, Homo sapiens
cacagtggctcacacctgtaatcccagcactttgggaggccgaggcaggcacatcacttgaggcatggagtttaagaccagcagggccaacatggcaaaaccccatttctaataaaaatacaaaaaattagccaggcatggtgatgcaggcccaaagccccagctacttgggaggctgaggcatcagaatcccttgaacctgggaagcggaggttgcagtgagctgagatcacgccactgcatgccagcctgggcaacagacaagaccctgtatctaccactgctccccgccaaaaaagaaaaagccaggtatagtggcacacgcctgcaatctcagctactctggaggctgagacgggaggattgcttgagccaaggagtttgaagctgtaatgagctatgatcgcaccactgcactacagcctgggtgacagagcgagacctgtctcaaccaaaaactgaaaactaaagtcagagatggaggatgtcaggtttcaagcaccaacttgttgcacccttgctgcttgaaaacagaggtaaagactgagtgtagcttctagcacctgagaacagaccctgattggcagccagccagaaaacagaaaccttagtcctacaaccacaggaactgaaacctgtcgataagaataagctttgaagtggattttccacagagcctctgatagaacttagcctggcaaactacattttagccaatatgataatcttagaagagaatcctgccacattgtgctggatttctgatttacaaaactgaa

SEQ ID NO: 214346 - DNA, 599 bp, Homo sapiens
agttcagttctgggttctgacgctcttaaaggaccccggagcgggagttagttaggaggggtttccttttcagtgtgctcgtcatggttgagctcaggctctgaagccacacaaccccagacttgaatttcctcctttctggtgactgtgggcagaaggcttgaccgttttctgtgcctcagtatccacatctgctaaatggaaacaatcatcgctgtgtcgctggcttttgaaccattttaatgtaaacaaaacggtttttaccaattagttcattactgcaagatattaatgccacctgctctcatcgtacatattccagtgaatctgggatataacattttataatgcaacttgggcccataaaggccttaaaatcaccctgcggccgggcgcggtggctcactcctgtaatcctagcacttggggaggccaaggcagacggatcatgaggtcaggagttcgagacagcctggccaacatagtgaaaccccgtctctactcaaaatacaaaaggcaggagaatcgcgtgaacccgggaggcagaggcttcagtgagccgagatcatgccattgcactccggcccgggcgacagtgc

SEQ ID NO: 214347 - DNA, 687 bp, Homo sapiens
agtcactaagtccagccccactcaaaggggtataagaatgtgtgaacatacgttaaaacctccatgctaattagtaagtatttgagggggaggtgatactttgaggttacggatctgctgcaactcggctcttgcctcatcagaggaaagaattcatccaagaagagtaagacagaaagtgagactgaggcaagttttagcgaaggagtgaaaatttattaaaaggttttacagcaggaaaaacaggaagtaaagtacactcttggaagagggccaaccaggcaatttgagagattgaggtgctcagtgcgacctttgacttggggtttaatgtgctgggatgctctggagtttcacatctcttctcccctgattctttcttgttgagatggagtttcattcttgtcacccaggctggagagcaatggcagtcttggctcactgcagcctctgcctcccgggttcaagcaattctcctgcctcaacctcccgagtagctggtattacaggcacctgccaccacgcccagctagtttttttgtatatttagtagagacggggtttcgccatgttggccaggctggtctcaaactcctgacctcaggtgatccacctgcctcggcctcccaaagtgctgggattacaggcgtgagccaccacgcctggccttccctgattctttcactg

SEQ ID NO: 214348 - DNA, 319 bp, Homo sapiens
gtgctgggacaggggcttccagtggggccccatgaacatttattctgttgctagtgaggtgtttgtctcactggcttttgcaacatataaccagtgcttcccgcctgatgtcctcacttgctgagaatgaggctaactactccaaacagcaaactgaataccatccagcaatcacgttcctttgtatttgcccaaaggaactgaaaacttgggtccacacaaaaacctgcacaagagatatacgcagccttattcaccagtgcccaaactcagacacaaccaaggcgtccttcagcgggcaaacggataaaccatgtca

SEQ ID NO: 214349 - DNA, 536 bp, Homo sapiens
accaacctggccaacatggtgaaacctgtctgtacaaaaattagctgggtgtggtggtgcacgcctgtaatcccagctacttggcagactgagacaggaggcagagtttgcagtgagtcgtgatgatgccactgcactccagcctgggagacagagcaagactctgtctcaaaaaaataaaataaaatggttcctgagtatttttagattcgtagagtactaagcagaatgtacagtaaaacatgcctaatttcctattttctgggcttgctgtggaccacattttaagtcactgtgaaatacagatttgggatgttgaagacagactctaaaatttgcttttatcttcacagtaggtggggttcattcactgtgtgagtaaatcacataactgctttctatgggttatgtcatcgttattcttatccagagataatttggaaaaatgtcctaccagtctcagatgcttctgtgggtctctttttatattatgtggcaatcaaaactgccatcaactgactgattatcttaccaca

SEQ ID NO: 214350 - DNA, 626 bp, Homo sapiens
ggggagtaatcacagatcctcctctgcttataatcctctaattctctagcggttttctgttggagttaaataaactccaaactcctcatctttgcctccaaggctccgctgatctgggcctcaccattctttcatgccccctcccctatcatactctcttgggtccccactctggccatcctggactttttgtatccctcagacatcccaagctgttgcctgccccaggctccttgaatgtctgtttcttcttctctctggaaaactcctgtccagctgctatacgggcttctgccatcttttctctccaatgcatgccagaggcgtggttatgattagcaaaatggatgttgcaagtaactttttcattggattggctagaagtgtcatagagagaccccatcccgctttctttggcatgaacagagtataaaaatctcgcaggggccgggcgtggtggctcatgcctgtaatcccagcactttgggaggctgaggtgggcggatcacgaggtcaggagatcgagaccatcctggctaacacagtgaaaccccatctctactaaaactacaaaaaattagccaagcatggtggcgggcgcctgtagtcccagctactcgggaggc

SEQ ID NO: 214351 - DNA, 309 bp, Homo sapiens
gctaatttatgtatttttagtggtgatgggattttgccatgttggctgggctggtctcgaatccctgacctcaggtgatccacccgcctcggcctcccaaagtgctgggattacaggcatgagccaccacgcccagccaaaaagaatgtcagtttctttccaaacttttgttcttgtacaaatattcttaaatagtactctttttactcaaatagcaagcaccatcagctcaaaggttcatcctagaagtggaaaaatgttgggtcccagatatctgttatgcagttttcccaaagggactttccttaa

SEQ ID NO: 214352 - DNA, 542 bp, Homo sapiens
ggaggaagaaagaaaattagaaatatggtggttcaggctgggggaaatgcctgaaaggaaatgaaaaacttaaattttttatattgaccttctgctaacagtttgtcacacaagcatagaacggatcatgtgccttctctgcagcttctcgtacaactgccaaccatgaaaggggggctgggccaggccccataagaggcactaacaatcatttttaaaggcaaggcccctaaaaacaagtggcccattccttttcaaggctcaaatcttatgtaccggcaaatctgaatttgaaaaggaagatttatgtggatttctgaaatcatgattttccattacccttttccccaggggctataaagaaaaaaaaatttcaagagtcgacatgaattccttcagcatcaagtaacattatgatgatgagtcgagtgttaacaaatcagaaacacatggtcttaattgactgtgaaataaataatgtttcgaaatgaaagggagaaaacacgttcagatgtaaagcattaaaaaggcttcaaaacctc

SEQ ID NO: 214353 - DNA, 756 bp, Homo sapiens
tacaagacattcaggtggcattgagtcacgtcttatcagtgctggtgatttcagaggaagagaacactgccttccaagtctcccaacccttttgtgaacacctggtgtagaagagtaatgtttatgctggctttcttgagtggcttcatgaggattttattatttttactactttttttgctgacttaattggcattttctatgttttatagggataaaaacatctttcatataattctggcctgttttaggggtatcagatatatatatctaaatatgcacgttgttgtttgacaaagaacatttcacacctaattgagcttttcagccgggatactccacctagagtactttgcacatacatgagatctaaggttcataaaccactttggcagtgcctgccacattcacaagtgtccactgaatgtcaatttcttgccttttctttgccctcctccttttgtgaaatgatatttggcttccagggcctgtcagggctgccggtgcaccacacttccctgagattcagcattcctttcctatgagcaaggaactggaacaggcggctgactcttgtctaaatcagatccccaggactcctagcctgtgacttcattgctgaaccccaatgctgcagtactctttggatgcagagaatgttggtgtaaatgccactgaggttcttctgcatccattttatttcatgttcctcagttttatattttttatattttatcagttttaccctgcacagaa

SEQ ID NO: 214354 - DNA, 396 bp, Homo sapiens
cctgcctctgtgaggctcaggaccaggctgtcttgctggcgtttgatttctcacacattggaagttcttcagttatcagcagaggcaagaggcatatttttatgctggggtctttgagtgtcacagcaaattaaatggtggtccttctggtaaaggaagaggctaagtgggaaaatatatgaaaattaaagcaatccactagatgtttttttctttttttttttgcagtaggaacagcatgccgaagtgaacactactgacttcctttaaaatttttcacaatgccttctgttttatctagaaattgagctttaagggaaaatagagtgacagagacaaaaggaaaagtgtaatccctttggcttcttccagtaagctttagaactcagcacccaa

SEQ ID NO: 214355 - DNA, 705 bp, Homo sapiens
aacccagttggtagccatgagacacttgtgaatttgtctttgtccctcctctttcccttgggatagtaaactgtaggtgcattcatgggaaggaatgtacaaagatggcattcctttgtgcaagaagtcctatctccctgccgtctctgtactttgtgtctttagcattgtgcttgtctctctatattgtgatgatctgctgacttctagcctcttcaactagactctaagctccttgagagacatgtggtaatggtctactctgagtccttacccctccgcttgacacagagagggtcttatataaactcttgtaaaacaaatgaatataatcctgtattatctaatttgccttagcttctaagacgtggaatagttggatagttgcatggaataaatatttgcataactaattaagagtgaaggaattaattcacttccaacattttttttcctttcaaagatttattatcagtaggtctcatgtctgttttctaggctactatgctttctctatttacggcagctttaatttggttaaactttatttagattctgttgcgaggtgggcactgtaataaatactgtggagattccaaggaggaaaaagacctgatccctattgtagcactaagaaaggaccttgaatgccaacctatatggaatccggtcctaagaattgctacaaaacgttgtacagggtag

SEQ ID NO: 214356 - DNA, 423 bp, Homo sapiens
tacagtcagaagtcatattgcccttgatcagcccaccattatgcctgttagcccattgtgccttgatttataattctttgtgtccagcctaactttcttcttagtctacaagattctgaattgtctctgccttctccagcacagcctagtatgggacttggaatatagtatgtactcaggaagtgtttattgaatgaatgaatggatgaattaataaaccaacgagctgtctgctatgattggtcgttactaatcacgcagcactccacccttctaggtcattgtcaaggttattgacatgattcacacactcacatacatatctttgattagcataaagtcacatttgaattcaagatattatcataattattatttcttcccaaatgcattagcttctactagtctgctgccttttttttt

SEQ ID NO: 214357 - DNA, 301 bp, Homo sapiens
tctctcaacagtttctggcttacctcagatataacctatgtaaagcatttagcattaaatgtagtataacagattttcattgctgccatcattgatgacatcaacatcatcaacatcatcatcatttctaaacaaataacaaaagtctcagaaacaaatatgaatcaagttagggttctgatgtgttctccttattctatttcttttctgagtgccatttttgtttgtttgttttctatcctaattttctaaatttttcatttgtccccatattaaaaaactgtaaacactctgatggggt

SEQ ID NO: 214358 - DNA, 270 bp, Homo sapiens
ctcccaacctcaggttatccgccagcctcagcctcccaaagtattgggattataggcatgagccaccgtgcccagcctgcatttcatttaactttgctacactgtatatgttgtgtaggtactggacaaatgggtcctaattttataatatctagtatctagatattaaagagtttgtcaatataagacaaaactagagttagtaaactaatatattttgtacactttgtgttaaaattaattaaaaggctatcttccgaaaaggacttt

SEQ ID NO: 214359 - DNA, 465 bp, Homo sapiens
tcaagggtagtacatgactagtaggaaaggataatttactgcatagaatggatgtcttagagcattagggcttaattttttgttttgttttgttttgtttttttgagatggagtctcactctgttgcccaggctggagtgtagtggcacgatctcggctcactgcagccactgcctcctgggttcaagcgattcttctgcctgagcctcccgagtagctgggattacaggcatctgccatcatggctggctaatttttgtatttttatagagatggggtttcaccatattggccaggttggtcttgagctcctgagctcaggtgatccgcccgccttgacctcccaaagtgctgggattacgggcatgagccaccacacctagccagggcttaattttttttttttttttgggaaatggagtctcgctctttgacccaggccagactgcagtggtgctgtctcgg

SEQ ID NO: 214360 - DNA, 405 bp, Homo sapiens
tttgcaggtggaatagaaaaatgctgaattttttctcttctttatcccttctaccccgtgctattaaaatctgtatccagacaattgtactgatttcattgaaacccttcaaaataactctttatagctcacgatttcatgcatttagggcatgtaaaacctcagaggaaacctgtgattaagagccatctcattgcagcggcttctattgtgttctcaaagtgttatttctttcttcaattagagatgagaaagttcattcctgacttacgcacccctgcattgtgtcaactgtcatattgtgttttgtttcctgggccagaaaggcagacatcaccccttgcacagctttgctgtgctgcatctcctgtttccatccctccctcttcagtgtccttcagcaga

SEQ ID NO: 214361 - DNA, 342 bp, Homo sapiens
tgaggttgtaattctcatgtttaatagttgcgcatgtgccaaaaaaaactcctgacattttccatttggctacctttaacagttctttgttgagttgggagggtttcataattaaagtggtgatttttttctattttgaaactcatccttttggcttgctttctctcccctcttcaaaaaaggagcggggagggaatcactactggcataaagcctcaaactgaagtttataaagatcatagctttatgctgccaataatttgtcagtttgggccacctcccaaaggccagatctgacacctgtcctcagggtccacccagttttccaggccgaggccggca

SEQ ID NO: 214362 - DNA, 625 bp, Homo sapiens
aagcaccttgaagggattccaaggaggattacttacaaaacaaaacaaaccaaacctcactgctataaagaattataccccttttcatacacagtaagagttacgtggttgtactgtagttattttagcacagtgcatgacgtagtactgacttaaagtcaaaggaaacaagataaaaatgtaatctgagttttctaacttaaaaagaaaatggtgagggcaattttccctttatagatcttttctagctattaaatgaaaaaataaaatattgttattttataaccctgaagaaatactgtattaagataatgataattggccaggtgcagtggctcacgcctgtaatcccagcactttgggaggccgaggcgggtggatcacctgacgtcaggaatttgagaccagcctggccaacacggcgaaaccctatctctactaaaactacaaaaaattagcggggtgtggtgggcctgtcgtcctagctacttgagaggctgaggctgaagaattgcttgaacctgggaggcagaggttgcagtgagctgagatcgagccattgcacttcagcctgggcaacagagcaagactctatctccaaaaaaaaaaaaaaaaaaaaaaaaaa

SEQ ID NO: 214363 - DNA, 583 bp, Homo sapiens
agaaagagccttactgcagatctcattctttccttcaaagccagtttgcccattcctcttcagaaacctttaagagtggttattgggagagatgataagactccatctgcttaaggagtccctctaacccagaatagtagatgtaaacacctgacatgttgttatagagtgaatgtttgtgttcccctccaatccgtatgttgaaattccaagccccaatgtgttcgcattgggaggtgaggcctttgggaggtaaatagatcatgaaggtgaagtcttcatgaatggattagtgtccttataaaagagaccccagagagctctctcatcctgtttctgccatgtgaggacacagcaagaagttggtcatctgcaacctgaagtggctcctccccagaaactgaatctgctggggtcttaatggtgggcttcccagcctccagaattatgagtgtaaatgtttgttgtttaagctacccagtctagggtagtttgctatactaccccaaactgactaagatacatatgtttgtcatccactcagttgttttcctaaaataaatgaagtcagctccaaaaagaa

SEQ ID NO: 214364 - DNA, 368 bp, Homo sapiens
ttgattcaaagccccgaaatagactgtgctcaaagaggcctacaaggagacagattctaattaaattgtcaaagatcaaaaccaaagtgcattttgaaagccaaaaagaaaagcaacttgtcacaaggaagccattatggactataagcagatttttttttagcagaaaccttgcaggcaaggagagagtaggatgatgtattcaaagtactgggagaaatcttccaaccaagaatactttacctgtaacataccctttaagaatgaaagaaaaataaagactttctcagacaaaaaaaaaaaaaaactgagaaagtcatcaccaccagaaccatgttacaaaaagtgctaaagggagccttcaaata

SEQ ID NO: 214365 - DNA, 908 bp, Homo sapiens
aggcaggcttggtagtctccctgagttgagaagatatagctgggggcccaggaaatccaaagtggctacacttcatggaaaacgagtaccaataattagagagatgccagagaacctcagagatctgcaaggtgccccctctaatattcagttgaatatttgtgcatgagtttaggaaagtcattaaaagcagtgaaatggtggagcagggaggctatctaaaaggcttagtgagaataacctcgtggtgacaaaatctctcagcatttgcttgtttataaaggattttatttctccttcacttatgaagcttagtttggctggatatgaaattctgggttgaaaattcttttctttaagaatgttgaatattggcccccactctcttctggcttgtagagtttctgctgaaagatctgctgttagtctgatgggcttccctttgtgggtaacccgacctttctttctggctgtccttaacattttttccttcatttcaaccttggtgaatctaacaattatgtgtcttggggttgctcttctcgaggagtatctttgtggcattctctgtatttcctgaatttgaatgttggcctgccctggtaggttggggaagttctcctggataatatcctgaagaatgttttccaacttggttccattctccccatcactttcaggtacaccaatcaaacgtagatttggtcttttcacatatttcttggaggctttgtttgtttctttttactctcttttctctaaacattttttctcactttatttcattaatttgatcttcaatcactgataccctttcttccacttcatcgaattggctattgaagcttgtgcatgtgtcacggagttcttgtgccatggttttcagttccatcaggtaatttaaggct

SEQ ID NO: 214366 - DNA, 334 bp, Homo sapiens
tctgtattcttagtagagacagggtttcaccatgttagccaggatggtctcgatctcctgacctcatgatccgcccgcctcagcctcccaaagtgctgggattacaggcgtgaggcaccgcacccggcccacagccctttcattttcaaagcccatgctggaggaaacccctcatgctgagtccctctcacactgtgagtctctatgctcaggaagaacccagtcctttcaaggtctcacctgattaggacagtccaagcaggataaacccagcctaaagtcaactaattgagacccttaattatatccactaactcccttctgtcgtcttctc

SEQ ID NO: 214367 - DNA, 465 bp, Homo sapiens
gtagggatggggtttcattatgttggccaggctggtcttaaattcctgacctcaagtgatccacccaccttggcctcccaaagtgctgggattacaggtgtaagccattgtgcccggccagcattaatttcatattaagttggagtgggtggtgagaggaaatctgcatttattgatcccctatttcagtctaagggttcaccttatgtaatcttcctggaggggtaggtggaagtgaccaggaagaatatgggtgagaagctgttgaattaaaaattcattttgtgcttcataggctagacttgcatctggaaaaacaaaatgatttaattatggaattatagaataattgttaaattgattataattactttaaaaattcttgttattcattctactagctaatatgtaaccatcaaatgaaatcttttacattaaagtagatagaaaaatattttataagta

SEQ ID NO: 214368 - DNA, 1224 bp, Homo sapiens
catggtaagacatttggattttattctgaggttagtgggaagccattagagagttttaaacaggacataatatagtacctggggtagccagcctccaaaacatcctccagtgatcctgggatccttgtattacactctgtgtgtagcccctctcacattgactagggctgacccaataggatgctgcaatgtgacggtatataactttcaaggataggtcataaaagacattgtgactctgccttggtctctcaaatgtctccctctggggaagccagccaccatgttgtgaagatactcaagcagccctatggagaggcccacacactggggaggcactgcggctttctgccgacagccttgtgaatgagacaccttgaaagaggatcctccagccccagccaagctttcaaatggttccaactctgacatgctgacaacttcatgagaggccctgagccagaaccacccaaactcctgacccattagtgtgttatgtaacaaatgtttgttgtttcatgccactaagttttggggcaatttgctacctctagccattgttcccagctggtgtgtagtctgactggcaggtgcccatgctttattagtggtttgatattttgactatcggccctgagtaggaggaatgacacagagaggagatagagttgtgagtgagaggaggccaaatcgtggtgtcagagcgagaagcagcaccctggggagggctgagtcacttgtgctgtctggaggaaggcggagcaaagatctgcagcccagctgactgtggtctcagcttttctagcctccaggctttctcccgggttcctaagtctgtatgtgctcactggaaatgccccatgacttggggtgacatgggtctgaaaggagcatgcaagcagcccccccacattgcagttttgctttctgtggtttcagttacctgcggtcaaccaccatctaaaaatagaaaaaattcaaacttagatgatttccgaagatcttaataatcaggacaaccgtgaacttctcatgcaaccgtcaatgcctgagacaatggagtgaaagctaccagatccttaagagaaaagtgtcccccaggactcttaaagccaccagccctgatgttggccacgggaaaagacaatcaaggaaaatctccgaccttcggtgaaatgcagagactaagggacccctgtgctgcgtgtgatgcgattttgagag

SEQ ID NO: 214369 - DNA, 1133 bp, Homo sapiens
catggtaagacatttggattttattctgaggttagtgggaagccattagagagttttaaacaggacataatatagtacctggggtagccagcctccaaaacatcctccagtgatcctgggatccttgtattacactctgtgtgtagcccctctcacattgactagggctgacccaataggatgctgcaatgtgacggtatataactttcaaggataggtcataaaagacattgtgactctgccttggtctctcaaatgtctccctctggggaagccagccaccatgttgtgaagatactcaagcagccctatggagaggcccacacactggggaggcactgcggctttctgccgacagccttgtgaatgagacaccttgaaagaggatcctccagccccagccaagctttcaaatggttccaactctgacatgctgacaacttcatgagaggccctgagccagaaccacccaaactcctgacccattagtgtgttatgtaacaaatgtttgttgtttcatgccactaagttttggggcaatttgctacctctagccattgttcccagctggtgtgtagtctgactggcaggtgcccatgctttattagtggtttgatattttgactatcggccctgagtaggaggaatgacacagagaggagatagagttgtgagtgagaggaggccaaatcgtggtgtcagagcgagaagcagcaccctggggagggctgagtcacttgtgctgtctggaggaaggcggagcaaagatctgcagcccagctgactgtggtctcagcttttctagcctccaggctttctcccgggttcctaagtctgtatgtgctcactggaaatgccccatgacttggggtgacatggaaaaaattcaaacttagatgatttccgaagatcttaataatcaggacaaccgtgaacttctcatgcaaccgtcaatgcctgagacaatggagtgaaagctaccagatccttaagagaaaagtgtcccccaggactcttaaagccaccagccctgatgttggccacgggaaaagacaatcaaggaaaatctccgaccttcggtgaaatgcagagactaagggacccctgtgctgcgtgtgatgcgattttgagag

SEQ ID NO: 214370 - DNA, 289 bp, Homo sapiens
agaagggtagataggagcctgcagtcgcctctaaaatcctacctaaccatcccatggtcactcgggcccatgccttcctctccttcgctgtttgatttctattctgttgggcccgccttcctctgagctgcattagtgttagtgctcagaaatcaccataatcacgaaaataataataataaatctttaacatactacctaaagggaacctgcaataatcttgaaaaagaaaaagagaaaaattttaaaatcctgctataggagaaaaaaagagaaaaaaataaaaatc

SEQ ID NO: 214371 - DNA, 716 bp, Homo sapiens
tccctagtgataattttgtatatatttttgtatttttaaggttttaatcataaagaaaaagttgtaatggatttcagcttacctgtacatagaaagttagcactgaatgttggcaaataataggtgttgagaaaaggggatctacactttaaaatgataccagctgtagtggtgattaagccattatgaagtgtcagaactggaagtcacttctgagccttagctgatctttctttaaaatgcatactgataaaaacttttacttttattaacatattaataatataaaagcattgtcttgctattctttttaaatgtcatgaatttcatatatgtaatactgaattgtattacttacataatactcattaaatgttttctataaatttatggtgccatttttaaaatagcatctaaaataaaagaatgggtcttttcatttacacaattatttctccatcatttttctttccaatagctttagatagcatatacatagtagttatggacacttgcttattagaactatgaaatgaagtaagtgaaagtgtttagttataggtaacattaaatggcaaaaagaggaaacaggtataaattgaaagcactggatctaaactaaaaaatgaggtctagtttcttcactgttacagatctgggcaagtttcttgaccaataaagcacgacagtcagcacctgtactgctactctcacaa

SEQ ID NO: 214372 - DNA, 470 bp, Homo sapiens
ataagctaattacataggattgacacatataacacaatatactctaggctgggaagtttgtgaccagttcaatccctgactaagctctgtttctgaggacttgttgaatgatgccaatctttgtccttcttggtgtctaattcattcaataattatggttatatcagccattaattatgaggctttattgtatcaagtgttagagaaagtaaaaattagataggcaattatattcagatgctacatcttttggcccaaagcaatttacctaattctttaaatcttctctttactcatgtgtgaaatgagaaaatttatatcttccttataggattgctgaaaggacttaatgaaataacgcatgtaaaacagtacagtaccagacgtatggtaatgaataaataaataattttagattatgatgatgatgaagtgcttgaaaattgaaaataaactatttaacttttgta

SEQ ID NO: 214373 - DNA, 589 bp, Homo sapiens
gtgaagccaggttggtttgactgtgctctctcactcagggtcctgtaatccaggatctagagtttccaagtgtggcttcctaggccttttgggcctgctcttcttccattgccttccccacctgggctccctctatctcaagattagggttcctcccagggccccctggaggccagctttcattttcatcttgagcagccgtggaaaattaaggactcaaccactttaattttggggtcttagtaattatctgacaccacccactcaactctacccactagttattacaataataacaataataatttagagaagcgatggcaatgatcacagcgtttacagaatccgggactgggcggagatagatatagcctcacacttcctttttctatcagtgtggtactagttttgggagtaaggactgttggagtctagtcagttctggcaaggatgccatatatcacatgactgaatgtgcccctaaatgcctgtgtaccttcatttccccctctgtaaaatgtgggaaaaagtcttgcaagacgatgtgctttcagcttcctgaaataaagtcatgataagcaaccttttc

SEQ ID NO: 214374 - DNA, 1404 bp, Homo sapiens
  misc_feature (1173)..(1173): n is a, c, g, or t
  misc_feature (1384)..(1384): n is a, c, g, or t
agcatatccttgcttcattcagagaggtcctcccaggtaagtacataaaatagcacatcctgtctgtctcttctctaaccttgctttatttttcttcaagacatttagcacttcctgacattatgttacataatgacttgtttattgtccttcttcactcgagtataatctctatatggaaaggaacttgcttattttgtttacccttgcatatccagcttttacaacagtatttggcatgtagtaagtggtcagcagatatttgttgaatggatgaatgcttaaatccttccaggtatatttggcactgcccagtatttgggcatctgaaggttggcagagttttaaggagtactgccttttcttggccagaccgcagccagtttcctagacaggaggtctttggtccttttatagggagatgcaggagaagcagcgtcatacaggctgaggtttaggcacagctagtcaagactaagacaagacctaagattgctccaactctgggataaagaatacattagagctgtcctgtgaagccttaaaccagggatgtaggggtagtaagaagattaagataaggctgatataactccaagggggaaatgacataactccaaacctagacccccttttcattctactttcaattcatttgttcattcagtaattgaatgctaagtgttaaatctaggtaaaagaaacacagaggaaaataagacaaataataaccctgctttcatttaactcacattttaaaggggaaggacagtcaatacaaattagtaacttcttacagtgttcagggctagggaagaaaataaaagaaggtactggaatagagaagatgggaagagagaaattgagcacatagactatttatatcctttaatcttcatgtgaattaggtcaaggtttcggatgggtctgtccctacacattttggaaacctggggtatttttgcgggattctgagccaacatagcgacttaatcacagcatacttcttaacacgagttttcccacccttattaacctgggggagtccacccatagaactctctcacactataaatattgttaataccacacgcgtcttcatggggtcatctcccaacttgccacggtcccacactctcgtctattccaactactcgttcctacgggacttcntgcatatactccggcatcggcactcactcctccgcttctcattcagcgcactgtctctctatatctactcactcaacctttgcatatcatcttcacacgttcaacactctctcctcttctctcgtgtcgctcttcctcttcgcctctgactctgtgcgactcctactactcgtctccattcgcgcaccctcgctcgtctctactacacatnctcgcgcgtcggctaccctc

SEQ ID NO: 214375 - DNA, 504 bp, Homo sapiens
aacgctacttagtttgcatgaatgtctaccaaacagcctaactggcaaaagccagtctgcattgtaaagccagtggaccaagatagactaaattttctgtcagaaaaagtctgactttgtttttaaattcagataaagttgttgaatatgtccttatcacaatgatctatcatattttttagttctcattattagacagaaacagagttaagtcacagagccatacttgtgtttgtggtgtgactgaaacaagatcagcccccttcattgaattttacctagatgctctttctttttgctctttggttcttatggaaaagccccttttgtcccttagtttagaacccttatatttttatacccctgagcattgtagcgtggaaagatctgggatgaatgacaggtatgtgttctttctatgaagtgggagaagagtgattgaaaacagaggcagttcaattttaagaaagagaacattagagaaattggctctcttaatactat

SEQ ID NO: 214376 - DNA, 373 bp, Homo sapiens
cagttccccgtgggccgagtgcaccgcctgctccgcaagggtaattatgccgagcgggttggagccggcgcgccagtgtacctggctgcggtgctggagtacctgaccgctgagatcctggagctggctggcaatgcggcccgcgacaacaagaagacccgtatcatcccgcgtcacctccaactggccatccgcaacgacgaggagctcaacaagctgctgggcaaagtcaccatcgcgcagggtggtgtcttgcccaatatccaggccgtgctgctgcctaagaagactgagagccaccataaggccaaataaggagcgaggttgtgaaaactggaaaacaaaggctcttttcagagccattctacactgt

SEQ ID NO: 214377 - DNA, 338 bp, Homo sapiens
caggtacaaatatctggatcgtctgtgagagaaagaactgaaaatgcacagcttccatcgtcctttaaatagctttctggattgaagagcattataattaaaccgcatcaagtgtcactgcagagaagcatgtaaattatgggtctgagtgtgggcaagaaatgttatttgattgcttgacaatcaaaaccagaagatgttcacatatgcataacccagatttgttgtaattatatcagatgcagaagaagtgggaggaataggtgtagctttgaatttaataatcacttgtttatctctctttcaaataaaaaaactgtttataaatactataggaa

SEQ ID NO: 214378 - DNA, 433 bp, Homo sapiens
catagatatgatacatatatcctttacatgtatgatacataactttaaaaatggccaatacatttcatatgtccttcaatgttccaaaaattattatttttgtctatacacttgactgaaaaatcttggctgagtatacaatgtatgagtcatgtattttttctgttagaattttgccagcatttctccactgcattggtcattggaagttgatgtctgaaatgctcccaatttgctttttctccaccacactgttctaagcacagtgttcagtgctggaggcacaaagatggagaagtctcaggtcccttcattgagaagctccccgactagggtgtggttgagccccaaatcattcatctgcctcatggacataattctaacccaatagttgtgaataacttaaagtataataataataaaataaaattac

SEQ ID NO: 214379 - DNA, 169 bp, Homo sapiens
actaatcccattcatgaaagctctgccatcatgagctaatcacctcccaaaggccccatctctgaatactatcacatttaaggttaggtttcaatatgtgaattttgagggaacacggaacattcagaccatagcagcttgtcagaagtcctgatgcctgtggccaatc

SEQ ID NO: 214380 - DNA, 210 bp, Homo sapiens
ttacagagtatgactttgtaactgaaccttaccaaaatcttcccataggatctttttcactcatgctaaatttcattctctccctttccctacatgatgtctcatcatatgactggaaagaacactggaatgactggaatgagaattggaagattttgttctgatccttgctttgtctcaaccaattgttcttcagccccaccatttttg

SEQ ID NO: 214381 - DNA, 418 bp, Homo sapiens
cctagtagctggaagtacaggcgcacgccaccacacccagctaatttttgtatttttagtagagacggggtttcaccattggccaggctggtctcgaactcctgacctcgtgatacgcctgcctcagcctcccaaagtgctgggattacaggcatgagccaccgcgcccggccaaaaattttgtaattttttttttttggtggagggaggatagaagctcagccacctcttgcccagtctgcagcaggtcagccaggaacctcaaccatctctgcagccagagcctgtcttcatggtggacagagccatctcgctttgtcacccaggctcgggtacagtggcacagtctcagctcactgcagcctcaacctcttgggctcaagcgatcctgccacctcagcctcccaagtagctggga

SEQ ID NO: 214382 - DNA, 432 bp, Homo sapiens
atgccacatgggtctgaggtcactgtgcagtgcggcgcttgggcagtgacctggtcctttcactctttcctccatacttccttatctcaaggtaagaaaggaagattgacaactcaggctgtagagtcagagagtcctgggatcaaatcccagcttaaccatataatctgtgtgactttgggtgaatgattgaaacgatctgtgctccgtgtcaccatccacacggtagggatcacagttggtctctgtctctgggaggtctgtgggctttaaatgagacagtagagatgaagtgcttagagctgtgccccgtgcatggccagtgtgcaatgagatggtctcagagtattatggctggagtcaccacttgtattaccaggaagcccagcctctgtgattacaggattccaactatggtgactctgcacctct

SEQ ID NO: 214383 - DNA, 129 bp, Homo sapiens
gcaaatgtattgaaatgagaagtattataaagatagaggaaacacatcatgtttagtggtcttgaaaatgataaacttttacagaaaagaaaataattatgacaacttgggcccttcctggaaatttcc

SEQ ID NO: 214384 - DNA, 424 bp, Homo sapiens
caacccccacttgggcagttctctgttcctggaaggcaaagccctcagccacttcctggaagcagagaaggtgggggcaaagttgcaaggcctggtctccctggttcccgggttgggggaggcatcttggtgagtcagggccggacttgcagcaggccggaggctgggagaataacacagaaacacggagggtgctggggcccagttcttcaggtaggctgtcactgttgcccacccttcccctacagccatccccacagcctcctgcacccagagacagctggggtggaggagaggctggggcctgaatcccacatttgcccccacttagcggctgtgtaaactcgggcaggttgcttcaccctctctaagcctcagtttcctcattgtaaaaccggcaatattgcttaaaaaaaatcatcat

SEQ ID NO: 214385 - DNA, 122 bp, Homo sapiens
cagtgaatactcccccacagtccactaccaagctggtatgtatcatgtcacaagtaacctgaaagactgagaccctctctgacatttagagaaaaaagataataaagttgttggtagagtaa

SEQ ID NO: 214386 - DNA, 822 bp, Homo sapiens
cgatggtgcatgcctataatgccagctacttgggaggctgaggcaggaggatcgtttgagcccaggagttcaaggctgccatgagctatgatcacaccactgcactccagcctgggtgacagagggagaccctgtctctgaaaaaaaaacgtgtatgtgtgtgtaaaccatgtggcagctatgaatgggaaacaaggaacaatatccctagaaggtaacctatagctcaaagtttactcatgcgtagcaagcccgttgccataggatatgaggagaattgaccagtaattcattggaaggtcctatgttaaaggaattccccccttcttctgatgccagggaaaaggaggaaattttactgttacttttggaatctgttctgagtacagtatggtaatgatggtgaactttggtcccagcctcataggcaaataaaaggataacctcattgccacacctgctgtgtgtccagtgtgtctgataaagctggagtattcccccttcccttgttccatggacataagatgagaattgatgggtgctgtacctggtctgcccctgtgggtactagggtaaggcaggggcttcctctttttggtgaagtgaacttttgtggctggtgctaaggcaatgctggagtcctttgccaccagctcctctcttgcagactctgctgcttgggggtatctgtttatttgttttttgccacactgatctggagcacagtgctgaaatgatttttccctttaccatctctcgctttaaaaatgttatgcttgttctcatgctcatactcatatttttaataaagggcatggtagc

SEQ ID NO: 214387 - DNA, 105 bp, Homo sapiens
tatatatatatatatatatatatgtggaaaaaagtatataacagcacttgtcataagagaaaagaatgtattttatgtgattatctgtgtactgaatgtccctag

SEQ ID NO: 214388 - DNA, 465 bp, Homo sapiens
ctcatgtcattggatgactacctttcactcacgccggttctaaacatacaccctctggagaggctgattccaaagggattcaggactcagatgtggcaaccattgctgagaaaaaggctacaatattagaaccagactaccatattagaaccaagtacatattctgcattgagaaaccccagctccttctcatactcagctggtagaattatggcaccaaagagattggagtaagatcaccaggaaaaccaacaatccaagaaaaaaaatctaaaaacagcaacaggtttttggatgtccttcagtgaaatgtccaagcaagaatatccccatgaagctttccagtcaacaaaccttgtacacacacaggattttcacttggctttctaatgtctaactcttcaatacgaactgactgccaaggattatcagacaatgtgaggaaaacctctcgcataaaagacc

SEQ ID NO: 214389 - DNA, 479 bp, Homo sapiens
agctgctgcctggtcataatgcctggaggcttcagccttctgacagcagcaagaggaagttattttggaaccctgctggtcatgagggctggggccttgataccttccagagctggcccaatcatggtctcaagaaagggcttgggaggccctgataaaccaagtattcattccatacttcttagatggggaactaggattgacaaataccaaaatgtaaatcagtgggaaaataacatttacaaaaatttattttacacactaattttttttttttttttttgaggcaaggtcttcctctgtcacccaggctggagtgcagtggtgcgatattggctcatcgcaacccccacctcctgggctcaggcaagcctcctagtagctaggactacaggcatgcaccaccacaccttgttttgtattttttgtagagacagggttttgccatgtcttcaaccaggctcctgcagcttctgggc

SEQ ID NO: 214390 - DNA, 453 bp, Homo sapiens
aaatagaggaaggtgtcatatttctttgtaagtagcagaaaacaaagcagagcctacttaggtagccagcccaccttctggttccatgcatggttcattgtctgttcctccttggggcatttctggtcctagctttaaactaaaaattaggccaggtgcagtggctcatgcgtgtaatcccaacaccttggaaaaccgaggcgggaggatctcttgaggccagcgtgagtaacatagtgagaccctgtctctacaaaaaaaattaaaaatcagccaggcatggtggagggagcctgtagtcccatctacttgggaagctgagacaggatagcagcttgtgcccaggaaattgaggccacagggagcccgtgattgtgcaactgcactccagcctgggtaacagaatgagactgtgtctctaagaaaataaagtaaaaatttgaaaaacctaaa

SEQ ID NO: 214391 - DNA, 330 bp, Homo sapiens
catctgtgatattcctgccaaagatgctaacctgagtctatatgtgaagaaacttcaaacccaaatggagacattgtctaccagataactggctaacaatcttttatagtgtggcaatcatgaaagtcaagaaaaaaactgaagaaccatctcagactgacaaagactagagacatgacaactaaatgcaatgtgtgattgtgaagaaaattctttcgctatgaaaggcatcgttgggacagttggcaaacattgaacggggtctgcagattagataatgaaatgtattaatgttcattaaaaaaaatttttttttgagatggagtctca

SEQ ID NO: 214392 - DNA, 534 bp, Homo sapiens
tccacagaatagactcactttcttcttgttgattttatgtgaatggttctcattacccaaactttatattataattctataatgttcaataaaataaaaacttcttggactgaatatttttaatacccagattgcttgcaagatactccaggctagccaggattttgcagggatatacgtgcagatgcgtcactagggaatgcctaaggaatgaacaagcaggcagcaagggcctgtgggggcagccatatgtgtctctctggaatcagtgaggaagctggaagcagagcagctcagccctctcgctccccctcagtgcttccagagacccctaacacagaagcttcctcctaaagaaatggcccactcagctcttttcctttccacgcttcttcagcttcctcactactgacaatattctggttgaaacattatttcctgaatcctagctctatccttggtgatgagcacacctaggttcaactgcaagataatagtgtagtgttatttggtattccaaggtcaacagtttat

SEQ ID NO: 214393 - DNA, 462 bp, Homo sapiens
cagatcaaacctgttcctggacccagtccagtttctgtcgcaactccaaacccagtttggatcagaaattttctcaaactccaaaacacaaatccatggagctccaaaatctgagagggagcttacgatgatccccagccactctgagagatccatggacacaaaaatgggtcctgcattgtcttcactcagcactcctggggtcgctagaagctccatttcagaacccgcttctgacaccatctgataaaagaaaaacttcagccgaattaaatttaaagaagtttaattgagcaatgaaccattcgtgaatcaggcagtccccagaatcacagcagattcacagagattcctggggtgccgcgtggtcagaacaaatgtatagataaaaaaggtaaagtggcgtacaggaatcagaagtgaggcacaaaagcagtgagattgggccaggcgcggtggctc

SEQ ID NO: 214394 - DNA, 325 bp, Homo sapiens
ttaatctagtagctttcattgacattagtataaaatgcatgcgttttttgtttaaaaatgataacagcagctatcttttgtaccatgctccattattttcaaattaccaacaaatctcatttgagcctcataatgctgagttggttttatttccatttttcggaggaaacatggtcaaagagggaacttttttttgttttgtttttcagtactcataaaggctcagtaatgtaaactggtacaactttcctggaaagcttcagaagtcatgcccttaatccagtaattgtacttgtagtaatccatcctaagaagacaaaagggg

SEQ ID NO: 214395 - DNA, 510 bp, Homo sapiens
cttattcgaatgtcctgttttgtggcttgttcagttttttaagagatgagaaaatgtgcaacataacaggaaaatgttaacagctttttgtgagaaggttaaagagctcttcatcctagaggagggaaggtttcctgtgtagtttctctgcacaagattcttctatataagtggtagggacctggtgttttccagcttctctgggaaaacagacttaaactacctatgaagaatccaagaggccggagcggtggctcatgcctataattccagcactttgggagaatgaggcaggaggattgcttgaggttatgagttcaagaccagcctgggcaacaaagcacaacctcgtctctacacaaaatagaaaaaaatttaataaggcatgggtgctgtgcatctgtagtcccagctactcgggaggctgaggcgggaagatcacctgagcccagaagatcgaggccgctgtgaaccatgatcatgccactgtactccagcatgcatgcgtgt

SEQ ID NO: 214396 - DNA, 444 bp, Homo sapiens
caatttttttttgtgtgtaacactcccaccagccccaacgtgggtttctggaaaaggctgttcctcgatagaattcacttcacatctctattttgtattctgacgattattggagtataaactgtccttcctgaaacaccctaatcaactaacttggctaagttctttcctaaacaaacactgtgcagcttccagttctttttctgcaagaaataccaaattagctgctttgtggtttgctggtgagccctgagaccttcatttcattattaggcagtccccagcctacagagagaactgcccaaaatatctaaaactggctgttgtggaagttcatttcatttcatttctgtgcctgcttccgttgctgatcttgaacataggctgtatatcaaaatgttaccagaggatgaaaaacacatgaataagatgattatgttggca

SEQ ID NO: 214397 - DNA, 175 bp, Homo sapiens
tacaatttgcatttattttgttatgagagtgaagtcagggaatttttcatatatttaagagccatttttacttccttttagtggcctgcctgctcatgtattttggtcatttttttgctgttgtgttgttggcctttttgtattgattttaggaacccttcatattttgaatctt

SEQ ID NO: 214398 - DNA, 311 bp, Homo sapiens
taaaccagaatctcagtatagtactttaggaggtaaaagatcataatattcagttatattgatgaattacagcaactgaaattctcagaaaaaaattaatgaaaatgtgaattgtcaatttgtctaaaatcattcacagagtaaaacataagtgctcaacttgattatattaggaaatagatagaaataaaggtaattgagccagtgtatgtgacctaaaatataatgcccttagtgaccatagggttggtctcatttgtacatagtggtgggccatgatgaactgtgttttgccctttgaatttttcctt

SEQ ID NO: 214399 - DNA, 732 bp, Homo sapiens
caatttatttattcaatctattattattatgttagatatgagaccttgctatgttgcctagatgggtctcaaactcctgagctcaagtaatccttctgtctcagcctcctgagcaggtgggactataggcatgcaccactgcacctgacaatcatttattgatggcagtatgaactcatggacatttgttttatccttaagttataacccaatattatattattttattgctaaattatttcagttttggccattgaagctcttttgtttaatgcccatgtcattttgacatacctctatcattgtgggatttctttttacttttttgcagatatttctttagtttttggcactacaagaggctctagtttcatcatctatcctgccccagcccaagattcaaccatttcttcaagtagcccttgctcctttttactgtacattgtaattaataatcaagttcttggcactaggttcttcagaaatttttttttagtttatatgtttgttgataaggtattgataaagattctgctagtgattaccaatgtaacttttggcaaattatctgaaacatggaaataataatttctacttcataggactgttgtacattttaaatggattcactaggatagtgcacggagtaaaaggaaacaaatagtaactctaaatggtattattacaaattcattggaaataaataaatgtaaatttgcttccaaaagtcaa

SEQ ID NO: 214400 - DNA, 704 bp, Homo sapiens
caatttatttattcaatctattattattatgttagatatgagaccttgctatgttgcctagatgggtctcaaactcctgagctcaagtaatccttctgtctcagcctcctgagcaggtgggactataggcatgcaccactgcacctgacaatcatttattgatggcagtatgaactcatggacatttgttttatccttaagttataacccaatattatattattttattgctaaattatttcagttttggccattgaagctcttttgtttaatgcccatgtcattttgacatacctctatcattgtgggatttctttttacttttttgcagatatttctttagtttttggcactacaagaggctctagtttcatcatctatcctgccccagcccaagattcaaccatttcttcaagtagcccttgctcctttttactgtacattgtaattaataatcaagttcttggcactaggttcttcagaaatttttttttagtttatatgtttgttgataaggtattgataaagattctgctagtgattaccaatgtaacttttggcaaattatctgaaacatggaaataataatttctacttcataggactgttgtacattttaaatggattcactaggatagggcgggtaaggaacatagtactctaatggtttttccattcttggataatatggattggtccaagtt

SEQ ID NO: 214401 - DNA, 723 bp, Homo sapiens
cacccccgtctcctggccggtttccttttctgcagtttgccgcctccaagccgccctgcgcttcctgcccgtgtctgacaaagactctgctcccttactgaacaccacagtgcccgccacgggctgccactcaaggtcacatccgcacgaccaccccctgcagcctacctgccagtgtcatctctggtcacccctccctcccaggatccatctcctcatcgtgcttccgcacctgcggttcattccctgggccaagaatgtccctcctaattctttgttcatccttagagaccctgataaatgtcaccacaggagtggaaccttcccctgccccaccccagacttagtctctccacaacagcttgcacatccccttgtccaacattacacttgtccctacacacagctgcctcctctaccagactctgagctgctggagtgtgcggcctggctcttgttctcctcatcccccaccccacacacaaggcccggcacagagcagccattggcaataaataaaccgcattttaaaaaatgagtaagtggaagaccataagaactgggtagttgctgggtatgcggaaggggctggactgttgagcgttcatctgaggcttcttggaggccacactgggcagggttagatggaaggtcaatagatttggtgcagcgagaggacctcagggaagcaccagagtgacctgtgatgttaatttaacaaac

SEQ ID NO: 214402 - DNA, 895 bp, Homo sapiens
cctagatgcattatctcttttattacatattatctcttttatttctcacaatagccaatgaataaggtggtataattaccattacacaaataagcaaacaaggcctagaaacctgaagcaactttttcaatcagcatcatacacaggattcaaatctagcccagtaaatatttgttatctcttaaactggtcgtgtactttgaaatgaagaaggcataagttcaccaaatataaaacgtaggactaaatgcaattgtgaaggatttaaaaagtagatttgatgcatccttgcccttatgaggtttatagtctagctgtgcttgtagaatataataagggctctgactgaggaactggaagaaagtatggcattttgtaagagggggaatgcctttttcctccttcttggaaaatcatagggtacaataacatttgaactggttctgacaagtagaaatggtaaaaaatcaaaatataaaaataggagtaaacaggaaggtagttgtctgctaagttccacaccttgtactgtccttgatatgaacggtccagtttaactttagtatggaccctgtgtcaggctgttatgagaaataaggctggaaagataaatccattaaacatggtggacctagggaggtacatgtgacaggttaaggtagagtttgaactctattttgtagacagtggaatgcattgaagtttttgaaagaaagagtatacaactagaattataattaactttaaaaccaaatacagtatatattcatattttaatatagtagcgtagacatactagatgttaaatgtaatccttttcttctgtctcatccattctctttttgtctttttctcatccattcctggtgcagtcatacgtagaatagattagaag

SEQ ID NO: 214403 - DNA, 210 bp, Homo sapiens
agtagggctcagtatttttggaaggaagttagaagagtctctgattattagtatcaatgatttttgaccattttatttttaaatacttgtttcaaaatctctggtaaatttctgtgtgaaataatttgtttactttagtatttcttgacagggaatacaggtatcccctataaatggcaagctgctatagttatccttagtataacacat

SEQ ID NO: 214404 - DNA, 380 bp, Homo sapiens
acagaaaaaaagctaagggcccatccagataaaatgcagtctgagcagagtgtactatattacctagtatatgatttagtgcctaagcgcaaacctgaaaaaaaattttttttttacttccaagtgacctcatccacaaacctcaaatatttagaatgctaaacatgtgaaaaacatctggccttttaaataaactagtatagtgccatgatagcattcatttacttctagatacccagttgtcctctattttaagtgtgtataaaaatcatttgagagaatcttaaaaatgaaaattactatacccagagagtttgatttagtaggtgtggagtcaggcctactatggtggttaaaatacgtccacaatttaatgctcc

SEQ ID NO: 214405 - DNA, 375 bp, Homo sapiens
agtgcctgtgtgtatgccagtgcctgtgtgcgctcagagagtgtatgcacgtgagttttcccagtgtagatacagcagctgagttcagtgagtgctggggctggcttgctgctgctctggaaaaccagttctgcgcatctcttcccagctccgcattcagtgacggggagttggtggatggcaattgggcacagtagagtattcacgcagaaaccagcccaggccatgcaccaggcctcttttcctcggagaggcaatgataggtcctttactggcacatagtggctgcatgtgcttctgtgtagatgtgggtgtctctgagtacacaggtgtgagcacactctgtccctgagggtgtatacacgaggcgccgca

SEQ ID NO: 214406 - DNA, 1621 bp, Homo sapiens
tgaaacatcagcgagttcacactggtgagcggccttatgaatgcaatgaatgtgggaagttatttagccagagctccagcctcaatagccatcggagacttcacactggtgaacggccttaccagtgcagtgaatgtgggaaattctttaaccaaagctccagcctcaataaccaccggagacttcacaccggcgagcggccttatgagtgcagcgaatgtgggaaaaccttcaggcagaggtccaatctgaggcagcacctgaaagttcacaaaccagacaggccttacgaatgcagcgaatgtgggaaagccttcaaccaaaggcctaccctcattcggcatcagaagattcacatcagagaaaggagcatggagaatgtgctccttccctgttcacagcacacaccagagataagctctgagaacagaccttatcagggcgctgtcaactacaagttgaaacttgttcatccaagtacccaccctggggaggttccctaggaatgctagctgtgttggaagctttctggagacaagttacattctcttactgtagagtttatcagcgttttttcactgctggggttgtgatagaagccatgtcagcaccacacactgcagctctccaaagagtgtgtccaccactccactgtgctcagggaaggcagacctctcctctctctttccaatccctaaagggaattaggagtagtctgaagccttgggaagatgtcattcccgccctgtatggctggtttagccatggacatgaccagcttttggctgtgaagacctgagcagggttttgccaacagcttgttctagagaaggtttccctttttctgggacattgttggtctcatgttatgcctgtgaaggatttgtccagccttcatgttactctacacaacaacttatctcctgtgtattgccctggttcatgtgatgataatggccttatgataaagccgcctttagtcttccaaaaaaaaaaaaaaaaaaaaagaaaaaaaacagaacaaaccacgcgaggcggactctatctaggtctccgggcgggcgagcgacaaccagggggtgatctggaacaaggcggctcgctgggggtcaaacagacgtggtggtccgcaggaccccacacgctgactgtgcacaacacggggggaacaaactacggggaggggtcccccaacagaagggggcgggtggcatagtacggttctcggaaacaaaccgggggctcaccgcgcgctatgaaggacccgccgggcaaaaacgaaggaccgacagcgaagcgcggccgagaggacccagccgaacccgccggccgaggcaccggagccaggccaccatggtggttcacaacagtcaccgtccggacacacactggctccgtcctggtggagcacttgacccccccaccgcccgccgccgcggccagagcagacggtggagagttcaaacctcacaaccccaatcatgggcgagacggatctcacatctccggagcgcgcacgccccggaccatggatcgcccagcgcgcagcggcccgacaacgcggagaagtgcaccaccatacaacagccacaacacatcaccagcgccacgcccccaacac

SEQ ID NO: 214407 - DNA, 2273 bp, Homo sapiens
tgaaacatcagcgagttcacactggtgagcggccttatgaatgcaatgaatgtgggaagttatttagccagagctccagcctcaatagccatcggagacttcacactggtgaacggccttaccagtgcagtgaatgtgggaaattctttaaccaaagctccagcctcaataaccaccggagacttcacaccggcgagcggccttatgagtgcagcgaatgtgggaaaaccttcaggcagaggtccaatctgaggcagcacctgaaagttcacaaaccagacaggccttacgaatgcagcgaatgtgggaaagccttcaaccaaaggcctaccctcattcggcatcagaagattcacatcagagaaaggagcatggagaatgtgctccttccctgttcacagcacacaccagagataagctctgagaacagaccttatcagggcgctgtcaactacaagttgaaacttgttcatccaagtacccaccctggggaggttccctaggaatgctagctgtgttggaagctttctggagacaagttacattctcttactgtagagtttatcagcgttttttcactgctggggttgtgatagaagccatgtcagcaccacacactgcagctctccaaagagtgtgtccaccactccactgtgctcagggaaggcagacctctcctctctctttccaatccctaaagggaattaggagtagtctgaagccttgggaagatgtcattcccgccctgtatggctggtttagccatggacatgaccagcttttggctgtgaagacctgagcagggttttgccaacagcttgttctagagaaggtttccctttttctgggacattgttggtctcatgttatgcctgtgaaggatttgtccagccttcatgttactctacacaacaacttatctcctgtgtattgccctggttcatgtgatgataatggccttatgataaagccgcctttagtcttccatgttctgatcactgtgtggggtggttcaagagcagagttaagatctaccaaactgaaggggtctccagattatcttggaggggacaggaggatggcagagaaacaactgtcaatccagatttgacctcatttgcattgccaccaaggcctcctaggaaaaattgtaggaatttatgggtataatattgtggtctgaatggcgtgaatttttatcccgaggagggggcagttgtgacaacctccagtgcatgtgggaacagcatgaattgggtcccttattcccagggggtgccccatattccccaatactgtaaagcagatgctgtttagcacctgccaaggagccatatgccctgaagttcagcattaggcaggtatctcttaactgtaagacataccaggcccagctgggaccataatttgtacagaaacactggatgtgattaatagggagtaggcgagattatagcaaaccagcagaaatggaactctgctaaatgtgcatccgtgaatgctcccttgaatgtggctgtgcaggattcagggtttgcagaaattctcaggacctcagacctctgtcctatgactaatgttactggcagagcaaataatctaaaggttttggttttgtggattaccatctccgtgctgtgcatctgaaggccagtgctgtgctggcaggaaaatagggactgagaaaaagcagatcctatactatagggactgtagtatctatgacgtagccagccattctttgctcccaaggcaagaagaaagagatgacagagtcaatatagggttgccaaatcggattttctaaaatgagtaggaagttggatttttatgtgcaacagtttcttttaatgctttgttgatatgtgattgtcatgcaataattattcatatttggtaagttttgtacatatattatgtacactcagggaaccaataccataatcatgataatgaacgtatccatcacctgcaaagctacctcatgcccctttacattccctccttgccttccctaggaaaccgttgatttacattttttactttagatttgtttgccttttctagaattaacacaattggaatcataaagtatttatactctcaaaaaaaaaaaaaaaaaaaagaaaataataaaaaaaaaaaaaattttatcacaattatactatttttctccactctacttttatactttattaatttttaccattattccactatttcctctatttgcccattctccctattccactatcttacactctctgctcccc

SEQ ID NO: 214408 - DNA, 333 bp, Homo sapiens
gtatctgtgaaacagaatttatttgatgcctaggtttctccctcacccgacgaagaccaaatgctgctgatccgtaagtaacttcgcaaggtaaactgaggggcctggcagcatctgggcctcccttaaaggtcgaaatcaagtgcgctcgccctccttctgtccgccttttccctttaaggtcctcgaggctgcttcgctgcagaaagtaactccgcgtcgccgccgcggaaagtggggcaactttgcctatcagcagaaaccttttgatccatctgaggcgacaaaccagaccaaacgcccgcccaagctgttccgagcctccggggggag

SEQ ID NO: 214409 - DNA, 441 bp, Homo sapiens
atataaatatagtaaaatagtgaatcttttagaccaacagcttacaactaaaaatgatgaagatgaactgcttattattctggttttctcttctgtatatgggaaagagtttttcctcctgtactatgggttacaaagtcagagttatggcgttttgttaccatggatgaaaaaccttgggaacaagtggggtagctcatgtttgcttttatgactccaaggaaaaaccagaaggtagtggattggagcttctttgtaagcacagatgtaaagtgcttgccacgactgtgaaaataattttaacaaatatggtagccacgctactgaattagtggttcatcatttatagaaatacataaagcaatgtcttatagcttatttattcaccgatgtctaagtttggagtgtttgatcacatcaggctcatgtattgactaatca

SEQ ID NO: 214410 - DNA, 411 bp, Homo sapiens
tcacttgagcccaggaaggtgagaccagccgaggcaacataatgagacaatatctccaaaaacaaagaaacaaacatataatctaagttatggtgctttatacatagggtactgaaaaactccctcagtgttgggtatctctgaaataaagaattagtataaacatctattgttttctatcttttgatattaaaagatagaattccaagcagccaatagaatactgaagtatcttttaatgaactaataaggattgatctttaaaatatatggtgaagtggctgggtgccgtggctcacgcctgtaatcctagcactctgggaggctgaggcaggcagatcgcttgagctcaggagttcaagaccagcctggacaacatggtgaaaccacatccctaccaaaaaaaaaaaa

SEQ ID NO: 214411 - DNA, 782 bp, Homo sapiens
aagaactgcaaatattctgtgaggaggattatttttccccctttccttttctattttcttaaagaatctttatttatctttaaaaagacagggtctcactatgttgcccagggtggtctcaaactcctggtctcaagtgatcctcctgccttggcctcccccaaagtgctgggattacaggtgtgagccaccatgcctggccatttttccccttaatggatataaacaaacagcaacaaaaaaacatagcttttacttgactatcaaaatcatagtggcctgcaatagctgcctccccactttacattaatgactgatagggaggccaaaaacgatgttgaatttactcactgcatacaacttccccaaagacagcagggctagcagtctaaaacattttttctgatcaattagtatctcttttcttttttgccaaggcatactaaaaacaaattggaaaaaagcactgaaatcttcactggggcatccaagatgttagctggaatgccatgccctaaagatgtgtcctggattccaaaagcaaacaatggcaaagagtattccccctgttcaaaaactccaaacgtggctgggcgcagtggctcatgactgtaatcccaacactctgggtggctgaggcgggaggatcacctgaggtcaggagttcgagaccagcctgaccaacatggtgaaaccccgtctctacgaaaaatacaaaaaatagctgggcatagtggcaggcgcctatcatctcagctactcgggaggctggggcaggagaa

SEQ ID NO: 214412 - DNA, 635 bp, Homo sapiens
caataaccctggagtcatccctaactgttctctttctcacaccccgcatcccatccatcggaaatcccatgagctccgctttcaccaggcccactgccacacctgatccaagcacccatcatgtctctccatctcttgcttcctggctgtaagggcctcactggtttccctgccacccaggctcagcactgccagcatggcctctttaaacctaattcaaatggcatcactgctctgctcaaaatccccacaagaactccgcatttccaaggcctcacgctgtgctctccctgtgacctcaccaactccacacccctctccatgtctgtacccacggtgctctcaccacaagggtcttctggcttcactgggaatatcccaagtatatggtcctcctaccttaaagtcctttgcagtggctgttctctctatctggaacattcttcacccagacagcctcatggcaaactccctcatctccatcaaatcctccaactcctggccaggcgccgtggctcacgcctgtaatcctagcacattgggaggccgaggcgggcgtatcacgaggtcaggagatagagaccatcctggctaacatggtgaaatcccgtctctactaaaaatacaaaaaatta

SEQ ID NO: 214413 - DNA, 334 bp, Homo sapiens
tacaaaacaaacgaacatgaacttcaaggtatggagagtgtaaatcactgcaaactctcccaagcctccaaatgctacaaagctacttagccaaggaccaaagaaaaactcgataggtgattattcttattaaataaacattatcctgcctttgcattgcttcctagttgacagagcattttcacatatattactgccatcgaatccccatgacagcccatacaggaagcagggctagtaccacgcatatctccattttggatggaaccattttttaaaatacagacacacacgcacacccccacacggagagagagagagagagagagagaga

SEQ ID NO: 214414 - DNA, 477 bp, Homo sapiens
cagtgcctggcattcaaaaaatgcattcagaaaaatttggtattcaaaaaatgcttgatgaattgactgactgcctgaatgaataaataaattggtggattaatgactgaatggagtacagaagactgtggtcccagaagaccttaacattgagcttgctgcagactgaatgtttgcctcctctcaaaattaatatgttgaaacctaatccttaatgtgatagtattaggatgtggggcctttggaaagtgattaggttatgaaggtggagccctcgtgaatgggagtagtatccttataaaagataccccagagaggtcccttgtcccttccaacatgtgaggctacagtgaaaagatggccatctgtaaaccaggaagtgagtcctcaccagataccacatctgttgtgctttgatcttggatttccctgtccccagaactgtggtaaataaatttctgttgtttgtaagccacc

SEQ ID NO: 214415 - DNA, 332 bp, Homo sapiens
ggcaaatagctaacatgtgtagagaccagctgtgagccatctcccttactcctcatggcacaggagcagccctaggaaacagaaagacaacaggatccgttgagaagcaattgatttgggtacaaaaagcccatccttttgacaacgaagctatatttcatatacaaacacaggcatgggtatatctaggcatgctgtgtgtatttgttgtcagtacagttgtccctctgtatcattaggggattggttccagaacgtccacatatgccaaaatccaagcatactcaagtcctgcaggggccctgcagaatccaagtacaggaaaagccggc

SEQ ID NO: 214416 - DNA, 355 bp, Homo sapiens
atgttgggggtgaataggcatgagaactccttatgttgcttaaaaaaggcaacttcacgtgttctgtgtttggtgacctgatgccattcagtaaaggggagagagagggaggtgtgagaggatacacaacatcaagccttcaccacagacaatccaggtttaagaaaaactacaaaagaagttgaagacctggaaatggacctaattaaaaatactctcaccgccgctttgttccctccaggtctacctaccctttgcccatttgaagactcagacttacgttatggtttgtaagaaaaaattgtgagacctggatagtgcaaagttacactcaagagatggacttagaaaataa

SEQ ID NO: 214417 - DNA, 595 bp, Homo sapiens
ccacaacaagtcaacagctatttatgttgacaccatctgaattaactggcctcaaagctaacctgacattttgcgatctgccatctgtctaggaaggaagtttattctgacaaagacaaagactaaaaggtgtttgtgcatcagcttatctcttctaaggaccttaataagaaggtcaactttgtggtgcttcaaacttttcttactagcaagatctgaggcatgttggagcataaatatttctactaggatatgagccctttaaactatagtggtttattctttttactaggatggatttttaaccttccagtggaatgtataaaggctaagtcacttttcctaagcaaagttttaagatgatttttagaacaggtttaggtttacagcaaaattgagagaaaggcacagagatatcccatatactcctgcccccatatacacacagtctccctactatgctgtagccatatttacagcaacttttccggaaatgtaggattagaagttaggctttctgtattttttcctttaatttgtttttagatttttttaatatgtgaagacattgcttttcttctgttagatatgttag

SEQ ID NO: 214418 - DNA, 548 bp, Homo sapiens
tagtcctcttcacctcagtttcccagctgggaaagctcaagcccaggcattgtaggtccctgtggctttacgtacacctgaaagtggcagggacgggtcagcagagaccctgatcctaccattaggttctgaatgggaaaaggaactacagaagcatctccaccaaagctcttcttgccaaagtttacttctgtattgtttaggccttggaggtaaaggataaaattgtccagacagctaattattttcttcaggtggctgagtagctgggaccacaggcatgtgccaccacgcccggctagttttttgcattcagtagacatggggtttcaccatgttggtcaggctggcctcaaactcctggcctcaagtgatccacctgccttggcctcccaaagtgctgggattacaggtgtgagccaccacactcagccagcccccttactttccttggagaccatatactgtggcttgtgccaaagtggtacagcatggatttccagctcccctatctacttgctgatgggagcaagatgcggaactctatg

SEQ ID NO: 214419 - DNA, 431 bp, Homo sapiens
tctatatcgaagagcctcaaggctgatgtttttatcatttggccttttaaagtgagtttttttgtcacttaacatgcataatgtgtaaagaggtggactattactgctgtgcattagtgggtgtatcagtccactagtctatcacaggaagtgtacaatatactgtacaagctgttttttccaaacagttttaggctgtttgccttttgaaagagagtacaatagtgtacaatttctaattttgaatattatgctaatcaagtgtcttagcccttaccatgtgccaacactgtgaacaacctcacaatgtgtgactattatcccacttttacaaatgtggctgtggctcacagggttagtgacctgccaagggtcacccaagattctgaaccaggtgagggactctggatccctctttataaatactttat

SEQ ID NO: 214420 - DNA, 152 bp, Homo sapiens
acaatcttaggttgccacattgatttcaacattctgaaatgcatttatatgtctcattaactattttcttgttaatgtttctgagtcagaaagacatcttaatgataatatagaatgtattatagtacagattccaaaatcctaggatactc

SEQ ID NO: 214421 - DNA, 272 bp, Homo sapiens
tatcttctaaaagaagattatctacatattgatatgaaaaaatgcattttggtatcacagttatttactataaatattcattaaataatacttttaaatgtgtaaccttccaggaattggtaatttgggaaattgtcatagacatgtttcctatttatttcccttttatataattgtgttttctctgaaatcagatgcattatttgaattttgctggaaaagggaatagcagttaaattgataaattaacaaaccaaataacttttagttaa

SEQ ID NO: 214422 - DNA, 335 bp, Homo sapiens
accttgcctctactaaaaatacaaaaaaaattagccaatgtggtaacttgcacctgtaggccgaggtactcaggaagttgaggtgggaggatcacctgagctcaggaatttgaggccgtagtaagctatgatcacaccactgcaccccagcctgggcagcagcatagctagaccccatctccaccaaaaatttaagaatcagctaggctgtggtgatgtgcacctgtaattctcgctacttggaaggcttgagcccaggagtttgaagctgcagtgagctatgttcgtgccactatactccaacctgagagacagagtgagaccctgtcttaaaa

SEQ ID NO: 214423 - DNA, 441 bp, Homo sapiens
ccccgcccaccggcgggtgcagctgagggcgcggccgaaggtgcccgacgccgcccacgagctcgactccacgctcggctactaggaccttctgcacttgcaccgagcaagcagcgaaatggctgtggcttcgtaccggtgactcgcgtcttggagattttaacactcctcaacgtccccaagggtgagggggtccaagggtggcgactatcccaaaaggcggggactcttcgggcctccctgccccgtcgtccctccttcctcggccttgccccggagctgtcctgggtttctgtctcctcccggagggagcgcttacggggtggggtggacctagggctgtcgcgcctgccgtgtggtcctggagaatgaggcttaccaaaggctcaagacagcgtccccatggagtgacatggttaaagtgttgaaagaaaagaactg

SEQ ID NO: 214424 - DNA, 396 bp, Homo sapiens
gcaagtctggcttaccaatctatcttgtccagcttttctctttctggctggcaagtaagtcagatggcctgcatactgcaggcccaaatgcctgcagttcatgggtgaaatgggaggcctcgtatgacctcatctccaaggtgctttctacaaacgtttaccaaatgcatatcaaggataaccaagctgctaaaaaaaatttatttcacatcatagtacacaagcatcatttatagtttggctttgagaacttttctggtattacatttatggaaaatgtataaaagaaataagttttggttatatttttatatttagaaagtaaaaatttgcttaaattgatcactgttctttttttatttgattgtcatttcaataaaaaatatttgaaagaaa

SEQ ID NO: 214425 - DNA, 759 bp, Homo sapiens
ggcgggcagatcacttgaggccagggattcgagaccagcctggctaacgtggcataacccctaaatctactaaaaaatagaaaacttagccaggcgtggtggtgcacacctgtaatcccagctactcgggaggctgaggcagaagaatcgcttgaacccagtagggtggaggttgcagtgagccaagatcacaccaccgcactccaacctgggtgacagagcgagactctgtctcaaaaaataaaaataaaaaaatagtggttcacttatactgcctacttaaattttgataaatgaattccattttacatgacttgttattccatatatctgtaaaatatcataggtcatttagtatttttctgaaacattacaccacgctataggaccctaatatacaccatgccataggaccctaatacactcagtgtagaggacagtgtcaggcctgtctcccagcattgctgtcatgaaagggttccattataggtaaaacttaatttgatgcattcagttgaaccataagaaattgccattattacttgtctgaaatggtcaaatatcagcattctttgtggacttaatagtttattaaatctaacattaagtctaatatttttgtttatgggtggcagggtaagaagattctttgtagaaagaggtatataaagataagtttgattttgttctagctttggttcatgtgcaagctgaggcttcccacaggaaaggcaagaaatctcattatctttttaatag

SEQ ID NO: 214426 - DNA, 333 bp, Homo sapiens
gctggagaagatgcagcttgaggccatgctagaggctcaggactttgatgtatagtggtaagaagattttagccagttcaagaggggaaataatccacattattttgtgggaatgtgttaacaaaagacagcacaagggttagaaaaggctgaacaaatcagaccttaatcacaaagggacaggcacaaaaagacaaagcaacaaattaatgagatggaccatgcttcattcttcctggtatacatggtatgcagcacagtgcctggtaatgttttattcatcttggtataaatggtatgtagacctcaataaatattccaaagaatgatagc

SEQ ID NO: 214427 - DNA, 443 bp, Homo sapiens
cccgtggggtatggggcttctaagccaagatggaccctatactctctgaagtgcttcttgtctgtttgcacctgagctgccacttggagttccagagaggaggccctggacagcatgtgggctgctgtaaagacccccacagaggagggatgcctgaagctatcctcctggccatggtggttcctggcagtttgtttgtgagtagactcccagaagcagtgacctacagtggtcttgtgagtcagtgttttgctgaactgaaggaggcccctggtagacatgagagtcatgagagggtaggtttgctctccatacttgctggggccgacgtgacatgttgtcttcccgccaagtttcctcacacatgctggtctgactcttcaaacataagtttgcagggagttgtttctctgtcactggaagatattcagagcccggtaata

SEQ ID NO: 214428 - DNA, 510 bp, Homo sapiens
cacaaaagtggaaacaatccaaatattcctcagtagatgaatggataaaatgtggtatattcatacaatggaatactattctgccataacaggaatgaagttctgatacatgctaaaatgtggacgtaccttgaaaacattatgctaaattaaagaagtcagacactaaaggccacatattgtatggttccttttacatgaaatgttcagaacaggcaaatctagagaagcagaaagtagattagtggttatcaagggctggggttggaggcattggggagtgattggtaatgatatgggatttcttttgggaatgaatgaaaatattctaaaattggtggtatttatgtaattttatgaatatgttaaaaaccactgaattgtatactttaagagagtgaattttatgttatatctcaataaagctgtgataaaacaacccattctacacaaaacaaaatatttgataagtgaatgaatggatctcttcacattatatgtacttgaaag

SEQ ID NO: 214429 - DNA, 448 bp, Homo sapiens
ccctacttttgaggttttgggactcggactggcttcctggctcctcagcttgcagacagcttattgtgggacttcactttgtgattgtgtgagccaattctcctaataaactccccttcatatatacatatatcctattagttgtgtccctttagtgaactctaatataaggatgatgatatggaaacataaatacacaaatataggccagaagtagagcaaatttctaatagtaaataacaatgaaaagtcagagacagataattaaaaaagcagtaactacaaaggaaatgaaatcagtgtgtcgaagagatatccagcttttatgttcattgcagcactgttcaaaatagctaagataaggattcaacgtctatgtctatcaacagatgaatggataaagaaaatgtggtacatacacacaatggaatactactcaaccttaaaa

SEQ ID NO: 214430 - DNA, 561 bp, Homo sapiens
agtagagatggggttttgccatgttggccaggctggtcttgaactcctgacctcaggtgatccacccgcctcggcctcccaaagtgctgggattacaggcgtgagccactgcacccggccccacacctgtctttactctccaccaccctgactccataagcctcccctctaccatgttgggaacctgcccttgagttggctttgcacacagacaccatcttaggtattcccacagcccccagggcttggtcactcattagccatgtcagtctctccatcctaagttcttgatttgtgtagatatggggacacaagaactagagaggtgatgttacctgctcagtgtcacacagcacatctaagcatcaatccccaaatccccagaatgccagatggctccagctcttcctcaagggaatgctttttctttctcttctttctgaaagcttccctctggcttccctttggctttcaatgggttgtccccatgccaggggcacctgcgtggttgttgtggttttgtgtttcccttccctttggcttttttttttccttgttttt

SEQ ID NO: 214431 - DNA, 401 bp, Homo sapiens
  misc_feature (113)..(113): n is a, c, g, or t
aatgtttcaggttttcactcaaaggagttgcccattggagcatttcagatttgggatttttggatttgggatgctcacctgctaagtacaatgtaaatattccaaaatttggngaaaaaaatctgaaatccagaacacttctgatcctgtgcattttggataagggatactcatcctgtcaagtatcttccttgataagtagactcatttgtctaatgactctacataattgtatcatttgaaaatatggatttattggtgatattatgtaactgttcattatgctgcccattgtgattcctgtaaagttacatgttggtatgacatagaacaatatctttttaaattttatttgattttattatttatttttttgagacggaatctcgctctgtcgccca

SEQ ID NO: 214432 - DNA, 348 bp, Homo sapiens
ctcatctttatccaactagaaacatgttaaaagaacttgtgcaggaaaagagatagaaggggtcaaatgaagccagatgtgagagttagcaatagcaatcaaattgatttaaggattaaatgtcaaagccaattcaaaaagaaaattaaaaaaaaatttttcctaggcctgagtataaaaatatagaatgcccactgtcacaaagtaatgaagttatgaatattccaaaattaagtaagctattacattggataagaaacccacagctgacaattcggttcctcttagttggctttccttgtttttttttttttttttttttttttgttacagtactgcctgaaaaat

SEQ ID NO: 214433 - DNA, 271 bp, Homo sapiens
ttatatacaatgctagtataaagatgaaaatgatgatattattaatactaataatagcaattactatttattaatctttgttctattctagacactgttctaatcactttacgtacattttcttgcttacaatacaaattcatgatatcgaaacagtgcttttcccattttacagatgaataaatttaggtttcgatgggttaagtaagttaaaatgaagaagttgggattcaatcttaagcttgttgacttcaattcccaattgtacaat

SEQ ID NO: 214434 - DNA, 109 bp, Homo sapiens
ctttctcttccaagtgggtacagccaaaggacagccctccagagctggccgtggtcagggctggacatgcccagccgtatttctaaacttacccccttctggaattcac

SEQ ID NO: 214435 - DNA, 126 bp, Homo sapiens
ggtagttacaaaaaaaaacaaacccagtccccctcagctgttaggcaccttcccaagccctgtgatttcactgggcggagaaattaatttggagccctggagagcgggaggggattgtaaaatcat

SEQ ID NO: 214436 - DNA, 467 bp, Homo sapiens
gatacacttcctattggcttgcatttcactttcttgagtgatgttcttactcagagaactctgaaacataggtgtttgtttttttaatttttgtactcccaaaccactcacacaatgcatttatacatgtaacattttcctctaaagctgggataatttttaatcattgtataccattgtaaaaaacaaaagagttaaaattgcatattgttggctgggcgcaatggctcatgcctgtaatcccagcagtttgggaggccgaggtgggtggatcacgaggtcaaaggatcaagaccatcctggccaacatggtgaaatcccatctctattaaaaatacaaaaattagctgggtgtggtggtgtgtgcctgtagtcccagctacttgggaggctgaggcaggagaactgcttgaacccgggaggtggaggttgcagtgtgccaagattgggccactgcactccagtcc

SEQ ID NO: 214437 - DNA, 390 bp, Homo sapiens
ggattcttattatttgtatagacttcatcgtgggtaaaatctatgattgtatttgatatgcacaacaacctatgaaatagatgtgtggtttcattcctgacattctaaagggaggaagttgaagcacaaaggagtaatatgacttacacagagtcacattagctcaggagttggcaaactgtagcctacaggctgtagtttttgtaagtaaagtttgactggagtatagccacagccatttatttatatattatccatggctgcttttgactacaacagctgggttaaatagttgagacagagactacaaataaacaatcactatatggcccttttagaagaagctgctaacccctgcattagcttgttagcaacagaatcaggatcagt

SEQ ID NO: 214438 - DNA, 525 bp, Homo sapiens
ttttttttagtagagactgggtttcaccgtgttagccaggatggtctcaatctcctgaccttgtgatccgcccaccttggccttccaaagtgctgagattacaggcgtgagccaccgtgcccggcctaagattcttggataagtcccttatttcattaagggctgcaaaatgatgatttttatgttctgtcaatgtaaagaataattttctcattaattagggctttctggtcactctgaaacacaatgtctacagaacaggcaggataaatgtttagtgtttcttaagtactaattttcagagtaagcaggtgatacctagttactccaattgttcaatataaggtcttttgtaggtggggagggtaggcttcccccttgccccacccctcttttttttttttttttgtatccctgtgaatttttcaggtttggcatatttaatgtgtttcattaattttattgtttttgatgcccaaaatgtcctgtcattggtaatgagagccccttcatgttgtctgatac

SEQ ID NO: 214439 - DNA, 291 bp, Homo sapiens
gcgtggtcgcggccgaggtactctttggcatgaagtatttttataaaataagcaaagtcattactataaaaatccctgaaatgaaacctatgtagaaattgtaataatgaagataacaaagagaggaatcactgcttacatagccatttatttagtgcttcccatctactatgcattattcagtgtgtattacatttcgtttttcatcatcacaataattttgcaagatatatacatacatataaaacataatattgtgtctgtatttattatagatgataaaacagagtt

SEQ ID NO: 214440 - DNA, 562 bp, Homo sapiens
ctatcaatttggtgttacagtaggctaaatacatttttttagacatgcagtacctcagagtttttcatcattccccttctcagaaagtttctggaaatatttgcaaaaatgagagggaaaggcaggaaaggggaagacaggtgacagtgcagtgaaagaggcttccaggctgacagctgtgtactaggcatagagaagagccactgcaggagcaggtcagatgctgtaggagcgacttcttcaggaaaattggtttaacagaaaacctgaggtgcctgaatacattcagaggagatcgagactactggggagatcataggatgaatttgtactgataacattgaaaaactaaacaaaggaatagacagttgtttagttgcattgctgtatcatgtatgttttaattattaacaaaattttgaatctaacaatagcgtttagatttgataatgctgggtggtacatgagtgttcatatcttttttacacgtttgaaatgtttcataaaaatattttcaaataatcacaaataatatatcactcccctgcttaactctataata

SEQ ID NO: 214441 - DNA, 662 bp, Homo sapiens
tcagtaaggcctcccaccctccagcctcccatccactctgttttaagaccccccactccactcaccagatatgtcatttgcagacaccacttccctctcttgggccttagtttccttttctgagaaatttgaggctgaactcaggggctcatgcctataatcccagcacttcaggaggccaaccaaagggggaagattcgttaaggccaagagttcaagaccagctatgggaaacatagcaagaccctgtcactaaaaaaaaatttaaaaattagctgggcacggtggctcatgcctgtattcccggctacttgggagattgaggcagaggatggcttgagccaggagtttgaggctgcagtaagcaccactgcaccccagcctgggtgacagagcaagactctatctctaaaaaataaaaagcaaataaaataaaaagcaaatccctcatggaactcctatcagtcatcagtaaatgagattgcaagaattgtaaaactgaaagtctgagcatggcctggcgcggtggctcacgcctataatcccagcactttgggaggccaaggcgggcagatcacctgaggtcaggagctcgaggccagcctggccctctcaggatgtgtgatctctatttcatgagaccgatctgcttctggcagctg

SEQ ID NO: 214442 - DNA, 497 bp, Homo sapiens
ccaggtcatttttttccccttgggagggcctcacatcttggccagtccctggtcacgagaggatccttgactcactcaactcttctgcagggaagtgtcctctttaggagactttgcagaggggactggtccatgggtgccctcgctggtggggcatcgtctttctctgacccaggaactcctgggggccttccctagggctcctaattcttcccatggcttttcacaccaccagccatgggggaggaaccatgagcttgtagccagctgcgctgtccttctggctttcccagtgaaaccatctcttctgccctccagtgtctctgatgccacagtacagctctgaggcacaggggggtgccacgaccctgaggtttatttaaaaaatctccaaatagtgcactccagctctctctactttgcttaatgtggaaaagtgttatttccctagaaggctctgtctctcccctgcaaataaagcctttttacccatctca

SEQ ID NO: 214443 - DNA, 487 bp, Homo sapiens
tcttttctacatttgtggagattttctaggatggcaggagattttttttaaattttttttctcgacaatatcaatttatttaggtcccttacttttactagccacccccttcccacttgcttctaatggcaaattagaatggtaacttgccccttgctcacctcatgcttggctttgggaaccggtgagaaactgcaatccattggcggtaggtacctgcaaccacaccgagctaattttttgtatatttagtggagacagggtttcaccatgttgaccaggctggtcttgaacttctgacctcaggtgatccacccgcctcggcctcccaaagtgctgggattacaggcgtgagccactgtgctcagcctccactattccatcttaacttctctcagagtgagcaaataagaggtcttcctgccgaatctgcccctatctccttctgtttggtaaacatagtagctgctgctttggttttttactc

SEQ ID NO: 214444 - DNA, 141 bp, Homo sapiens
tgcaaaacctgcagggagcccgcggtggctggagatacagggtgggcgggagagagagactggagagggaagtcctggaaatgaagccaagggggcagagctttaacccaggggctttaataaaccagttctgatgcttgt

SEQ ID NO: 214445 - DNA, 419 bp, Homo sapiens
gttacctgaacatttcttagaattctatttttattaaaaaaaagcttttgagtatattgctctgtatagttttcttagtggttgctctaggtattacaatatacatacaacaaactggtatcaatgttctactactgttttttcctctagagatggggtctcactgtgttgctcaggctggtctcaaactctgggctcaagtgatcctgccgtcttcagcctcctgagtagctgggactacagatgcacaccgccacacccagctatgttttactactttgagtgacctactggaaccttacttccatttaggatcctttattttctccctactttaatttttttttttaaacacagagtctcactctgtcgtccaggttggagtgtagtggcacaatctcggctcactgcaacctctg

SEQ ID NO: 214446 - DNA, 499 bp, Homo sapiens
ctccataacactacctatcctaaatgcagggttaatgccgaacctactgtgcaagaaatgatttactgatgaggtttcaaagaaaaccacatcaatttggatgtctgttaccttgaagtgatcattttaagagtagtagcttcttccctaggtataaaaagactattttcttcttttggtgtatttcatcctgtgttgagcaatcatttgtgaaatgaaaaagcaaaaaaactccccccactttaggatttataaatgggaagatggaggtgaagactggcctaattcataacccagtatgcattatctcatgcattgtgttgaccttggtgaaaatctttttcaaataccagcattctatatgtagaactaaagtgtttaaaactagaaacatgaattgttgttttgttaattttatgtttgtgttcagaaagcaatacccaggatccctttaatttttgtttgacttaaataaaaccatttaaattatttttgtgat

SEQ ID NO: 214447 - DNA, 784 bp, Homo sapiens
aaaatctgtataacgaataaattcaatagaataatgtcaagtacatgtagtgaataggtgctcattaaatgatatctcttcttaaaaaaaaaaaaaaaaaaaaaaaaaaaaaaaaaaaaaaaaaaaaaaaaaaaaaaaaaaaaaaaaaaaaaaaaaaaaaaaaaaaaaaaaaaaaaaccatgtagccccctatacccaaaccaatctttaaacccaaccaacttaatcattccgcccaaatttaaacccaattggccaaatccccccaaagggaagccaaataaaaatcaacggcccgcctttaaaaaacgtcgaaactgaaaaaccctggggttacccaaactaaaccccctggaaaaaaatcccctttccccaattgtgctaaattccaaaaagcccccaacggacccccttcccaaaagatgacaaaacctaatggcaaaggaaatttaaaccttaaatattagtaaaaatccggaaaaattttggtaaaaactaatttttaacccaaaacccaaatcgcaaatccctttaaaacaaaaggattcccccgaaaaagttcgaattttttccaaatttggacacaaattccttttaaaagaacgggcccttcaaaccaaaaggccaaaaaccctttttaagggcaaggcccacattcaaaaccatacccttaataaaattttttggtccaaaggccccaaaaaccactaaaacgcaaccctaaaaggacccccccattaaaaatcttcgcgcaaaaaccgacaaccttgaaaagtacgggccc

SEQ ID NO: 214448 - DNA, 220 bp, Homo sapiens
gatctttccagagagacttttaaaaaaattctgtaaccctaaaaatgatgtttgctactttttgatttgttgcaatataaacaggtaatatttacagacaatataagtaaatactgagttccttttcatactatgaactacgttattgctatgttgacctgttgagttcactgtatactttatgaagccatattctcaacaatatatcatgatatcaatg

SEQ ID NO: 214449 - DNA, 449 bp, Homo sapiens
ggtttctatcatgtttttctttacaatgaacatgtactgttttataaatttgtttaaaaagtaatcaagacaaactaagaaaggacaccaacgaagcgggactccctgcaagtctcctgggaccagccagggtgggccagcttagtgggaggattctccttggtggcggtgactggggtctcccttgtctgagctgcattctttcaagaacacacttattgcagtcagctgcccaggacttgtggagtgggtcatctggctgctcctgtgaccttccatggttttctttctgagaagcagcattttacttgctggatacctactctggaaatttgtctctgaatatgaatagcatccttctaagacctgagagtgagaacctcgcagactgcagaacactaagccacgtgatgagaatcatctgaagaatgaagccgtgctgtatttac

SEQ ID NO: 214450 - DNA, 727 bp, Homo sapiens
gcatgtttgtatcatgtttatttaaatgtgaattcatgttctaatatttctatgaccttccattgctgcaaagcagattaaagtgtaacaaaaatatcagctctttaaataaactggaaattaatctaattttgtggaagaactttaagacaagtctatgaggatggcgaaaacaatggtccacatatatagtttcttgatcctaaataaaatggtacctttgggccctttgtttagtctggcaattttctgactactatggctttttaaacagactcacacctaagtgaaacacagttgtcaaatgatttatggatctgtgattaaaggattcacttttaatgaatactattaaaacggagtaacaaaccttgctctactttaagttgaatgatagattcctctatattcaaaaaaaagcaattaactgccataattagggaaaactgtttaaagcatactgcatttacttggccacagcgccatctcatggtaattttttaaagtgctaccgtagccaaattgaactaagtcactgtactgctttcagcaaagggtgctcctcccatttgtgcatcaatgagacatatttataaagtgctaaattattctgtgccatatgtaacaaatacagtgaagattattttatgaacttattttaatcaaggcgatgctaaaagttttcaagaaaggataaataactgtaaataaagtagactcaaaaatg

SEQ ID NO: 214451 - DNA, 384 bp, Homo sapiens
cttaccttcccccccaccccccataacaacttgataaaattggagacaggagaattttaagtttgagaagatgaaggtggggaccagaattggtgacagtgacagaaaaggatagatgaatccttttctgtcgtatcaccgaaggagacctaggatttgataagggaggaggaagaataaaaaataactcaggtttggctgtgtgtggtggctcatgcctataatcccagcactttgggatgctgaggtgggcggatcacctgaggtcaggagttcaagactagcctggccaacatgatgaaaccccatctccactaaaaatacaaaaagtacccgggcacagtggtgcatgcctgtaatcccagctactcgggaggctgaggc

SEQ ID NO: 214452 - DNA, 315 bp, Homo sapiens
gccttctctccaggccctgaactttctcaagtcgacctcaccaggcccagctcatgcttctttgcagcctctccaggcccagctcctgcatctgtggtgacccctccaggcacagcctctgcctcccgtcggcctctacagtcccaacatctgcctcacagcagattcttcaggcccagcatctgcctcactgtggaccccccaagccaagctcccaacctttcagcagcttctacacacccagctcctgccacccagtggcctctttaggccaagctcatgcttcacaagggtctttccaggcccaatttttgt

SEQ ID NO: 214453 - DNA, 415 bp, Homo sapiens
catgatgccgtcagggaaaagctactttttgagagcaatgattttttttttgcaggtaaacgtatttatctgaagctggaagaacactttcagacataatgggagcattccctcatggagcatgagggtggcctaaatgaccttgtaagtgattgttgacacgaggagtctgtgacccagaatatggttttataaatttcccaccgcagggcactgatgaacgacacccagcaaaacctggacacgtgatctccaaaacatgggaaatttacgcttggagtgatttatgcccaggaaaattaggactagcaatcatttgatgctggttcttggaggaccttaaaggatttaaacactgaaaaatgaatgcatcatacaggtcactgcctcaatatattacagccctgaaaattac

SEQ ID NO: 214454 - DNA, 465 bp, Homo sapiens
ggggctctggctctctgcatcctcagcagagggtttgtgagatgggcagctacatcctatgttctgctgggctttcagtcttttcacgctgggcccttttccacctgtcttggatgaggaggcgctgtttcctattcctttgcaattccagtgaaaaatgagcctgctcagactgtcagcttcacggcttctgaaggatatgccgcagcctttttgtgacaagaaatagcttctttgtagttgctgataaatggtctgttcatctgctctgttgatgagccaggttgagggatccattattttcatagactccggggtaagtggcagccttaggaaggggagcagtggcgcaggggaacatggaggggactgcagggaagcgcgatgcagccgcagggactgtggcccctctctgcgttcaagagccagcagcggggcgcagagggagcaacaacctcaccactt

SEQ ID NO: 214455 - DNA, 540 bp, Homo sapiens
ttaaattattcatttaaatcaatttgaaaatatactccaaagctagagataactttatgtggtggaaagaggaaaagctttggagtactctaggccaagtaaggattctattatttacctgaattattgtctaaaccaactagagtgtctatcatttatctacattaacttgaatatttaggaattttatcattttctttcattgttgccttggacaaattccttcatttcttctttagagaaacactaagtcattatttctaacagatcaccagtgatggaccagaataccagaactgaagcagggagttacatgttatatgaatttcataaaatggcagaaaaagacatgcaagctaaattgccaaaatcaagtgagaggctttaaaattgcatgtttaatcagggctgaagttccctaacgttattcttattcaggatttttcctatgtattagtgtctatagatggagcagactgggccaaagctttaaaatcttagtgctttcctagcaggcagactcagaatttaaaaaaaaaa

SEQ ID NO: 214456 - DNA, 449 bp, Homo sapiens
actccaagcaagacaaactcaatgagatccacacaaagacacattataatcaaactgctgatagacaaagacagagaaaaatcttgaaatcagcaagagagaagggatttatcacatacaagccatcctcaataagattaacaacctatttttatgagaaactatggaggtcaaaagggagtggaataaaatatttaaaatacagaaagggaaaaaatgccaacaaggaatttatatacagcaaaatacttcaaaaatgaagaggaaattaagacactgccagataaaagttcactgacagacttgctctacaagaaatgttaaaggaattcttcaggctgaaataaaatgatactaaacagtaacttaaagccatacaatgaaataaaagtcactgataaggtaactacgtcgacgcggccgcgaatttagtagtagtaggcggccgc

SEQ ID NO: 214457 - DNA, 243 bp, Homo sapiens
gactaacttctctcatcctttagaattgagctgaaggatttttctcctctagaaaacaaaagctaactagcatttactaaacacacactatattctaatcactgtgcaaaacacttcgcatgcattgtcttgcctaatactctaaattcagtgatgaggtaggtattgttatgtttctacagatgggggaggccaagatgtaactcatgggaggtcatatataaatagtaaatagtagaaatg

SEQ ID NO: 214458 - DNA, 340 bp, Homo sapiens
gaggcaggcccagctcacccaacttggaagggaaccgcgcaggccactgaacttgttaaccccctggagggaaggcttgcggttccatgggtgttttgtttgtttgttttgttttgagatggagtcccactctgtcgcccaggctggagtgcagtggcacagtctcggctccctgcagcgtccgtctcccaggatcaagggattctcgtgcctcagcttctcaagtagctgggattacaggcacgcgccaccatgcatgcctaatttttgtattcttagtagagatgggtttcgccatgttggccaggctggtctcgaacttctgacctcaagtgatcca

SEQ ID NO: 214459 - DNA, 381 bp, Homo sapiens
attgcagttttcagggaagaagtagagaaagaagcaaacacaagtcacaacatctcagaagtgccaaggtcactccaacacagcaggaaaatgaaatatattagactcctgataacctaggagcaaattctatcttctgactagactacataaagattggatatatcacagttatcctgtcatgaaactactgttcttttatccagtaatagtattttaatgaggctctccagcatctctcttcatgaaacattaattaaaagattccaacaattaattaggtatcttatgtcactaaatggaaaactgtctgtctaaaacttgcaggattcctaggctcttaggaccatatttaaacaaggagcatgtaatccttcacag

SEQ ID NO: 214460 - DNA, 463 bp, Homo sapiens
gagatttgattgatgtttgtaaagtgctttgatatctttcatagagtgttcaataagagcaaaatatgtcatcagaacttagtctaaagcaaactagtcccaaaccgtcttgagtagatactaagcggttttgtgtctttgttataagttgtacttatattttcgagagaaagtttttcatgttctgattttcttttaagtgtcagctgtatgtttggggtctttacctgttaacttgagttccaacatgctttgtagatggtcagtcacctacagaggacaatttttctagccaaggagttaaatccaccttaaaatgcttcttgccaaggacaatgcctttgcaaatatttgagatgtttattctcagttgtgatttattactgaatctgtgtcttcatagcgactccttgggaggtgcaggaggaggcagagccagaaagcaagtccctgcaatcagttc

SEQ ID NO: 214461 - DNA, 597 bp, Homo sapiens
ctgttgcccaggctgcagtgcagtggctcaatcacagctcgctgcaacctctgccttccgggcttgagatcccactcagctctgacaggggtgggaccatgtgtgtgtgctgtgacactcggctaagttttttagtttggtagagatggggtctcagtatgttgcccaggctggtcttgaactcctgggctcaagcgatcctcctgcctcagcctcccaaactgctgggattataagcgtgagccaccatgcctggcctgcatgcaggtttttatgtggacataagttttcaattcagttggataaatattcaggagcaaaactgctagattgcatggtaagaatctatctatctatctatatctatatctatattttttgagacagagtctcgcactgttgcccgggctggagtgcaatgttgcgatctcggctcactgcaacctccgcctcctggcctcccgagtagctgggattataggtgcctgccaccatgccaggctaattttttgcatttttagtagagacggggtttcactatgttggctaggcttgtcttgatctcctgacctcgtgatccacctgcctcagcctccc

SEQ ID NO: 214462 - DNA, 147 bp, Homo sapiens
tctgcaatgcccatgtgaacaaataccagtgtgcccattgagtcataatcttcttccattcctcaaagtgctggctcagttggtgtggctaggcttctatctcagttctcctatatatcatctgtcttagccagttggactgccaca

SEQ ID NO: 214463 - DNA, 555 bp, Homo sapiens
agtttgtgagggtaaagggtagcagtacatatactgctgttgaaagtttacatttctgatgacttttcaaatagacaattttttggtaagtatcacactgtaaaaatgtatgtgcccttcacccatcaattccattatactaaaatatctctaggaaatagagatacatgcaatttgtttttctcagcactgcttaaaatagcaatgtatttggaaaaccccttataatggattttataaattttataaatttatcaataaatttcagtgcatccataggatgggacaatatgggacctttgcagatgtcagtagatacagatgtatgttgaggtgtgaagatgtactctgaaaaaaagttggtttgattatacatacacacaaacaatctatggtgtttgtaagccaaatatgtgtacaaaatgtaacatttcttcttttctggcaggtgtattgtgatattttctcttatctgtgatgtataaatgatcagtatgtttaaaacttctagtaaatgttttttattaatgaaattatccttggaaaaagaagaaa

SEQ ID NO: 214464 - DNA, 127 bp, Homo sapiens
aatactgattgagatataaagagaggaggtaaaaataatcagcacaagaaatattaaagacatcaagtaattccttctgatggtagtactgccaactactctctgccaataaacttgaaaacttagg

SEQ ID NO: 214465 - DNA, 444 bp, Homo sapiens
cccccaaccaggaaacaacccaaatggtcataaacagtaaaatagataaataattggtggtatattcatacaacagagtacattctaccacactaagaatgaacaatctgcttccaaatgcagtaaaatatatgaaccttacaaatgtgctaagtgaaaaaagggagatgtacaattgcgggactccatttatgtgaagtacagaaacagacaaaagtcattgatgctattcaaagtcaggatagtggttacccttgagagagagctgatgactaggagagaacaccaatcggcttctggggagctggtagtgttgtttcttgagctgggtactggtgtgttcagtttgtgaaaattcattgagctgtactattgatatatgcatctctgtgtatgtaaattatgcttcaataaaaagctttaaaatgctgtgtatatataaat

SEQ ID NO: 214466 - DNA, 88 bp, Homo sapiens
attattctctcacttaattatctggggacttgcttcactgttaatcaaatgaaagcttttgttttaaacaataaaatctcttaagcac

SEQ ID NO: 214467 - DNA, 169 bp, Homo sapiens
gcgttggggtcgctctagaggtcccaagctccaaaagagctaacataaacagtgatcttttgggatagaaaatatcttccagtttctgataacttttgcaaagatttttccaccatcatccataagttctggagtttgaataagcaaactgtatgttctttgggagcaa

SEQ ID NO: 214468 - DNA, 600 bp, Homo sapiens
ggttccatccaaccccccagtccccgtttttaaacccgacgctagacctgatacgatcggctcggacccattcattgcggtggccatctcgtcctggtgagggtattttttttttccccaaccctctgtggtggatactgaaagaccatattaggataactgtacagtatagagaaggcagtggcaagttttctctgtcatataccagagtgggcttgggcatggtggcatactcctgtggtctcagctaatcaggaggctgaggaaggaggatcgcttgggcccgggagttggagactgtggtgtgctgtgatcacaccaccacacttcaatctgggcaacagagcaagagaccctatctctaaaaaaaagtaagtatttcggacactgtgggccatacggtctctggtgcagtttctcaacatggctgttgggtgaacacaaccacgcacagaacgcaaaccaatacacgtggctgtgggcccagaaaatgttatttatggacacaaaaattggaatttcatataactgttttgtgtcatgaaaatgatttccctttttattttattttcttctcaagtattaaatatgtcaaaagcc

SEQ ID NO: 214469 - DNA, 544 bp, Homo sapiens
agtcactaatgagcctatataatgtaggggctgtgggtaatcttttgactgcttcccaaaaagcatagattaattcaaggctcagcctcagctttagctctttatttctttattctgtcacttaaatcaaatctcaattattgttttccagtacacttaatggttcagtataggttaacaatatccagtacataatttactgttaattattaagagctgattgttcatctacaggtagatttaagaccacaaaatcaaagaaattttatagacatcatagctttgtttatttatgggaaatttttattgtctatgaagtttgtcactgtttacatagacttaaatgttagcacataaatgcataatagtgtgttgtacatgttactgcttattttaaatgtagaactgaagaatgttttatcagtaggccatatatcctgaaccataaatgggaacacatgagctaatacatggtgtcatgatggatggaacagcatatttttatcagaatattttaaataaaaaaaaatctgttcaccataaa

SEQ ID NO: 214470 - DNA, 443 bp, Homo sapiens
aggataataagtaattagaggatcacacagggactagaccaggcctgctgattttccagcccccgcccttggatgtcttggattggaataccataatggtcctagttagataaaattattgatttttttaaaaatgtaattgatttaaaatagattgttggctgggagtggtggctcatgcctgtaatcccagaactttgagaggccaaggcaggtggatcacctgaggtcaggagtttgagaccagcctggccaacatggcaaaatcccatctctactaaaaatacaaaaattagccgggcatggtggtgcgtgcctgtatctcagctactcgggaggctgaagcaggagaatcacttcaacccaggaggcggagattgcagtgagccaagattgtgccactgcactccagcctgggcaacaagggtgaaaactttgtctca

SEQ ID NO: 214471 - DNA, 660 bp, Homo sapiens
gaaacactggagcagcggcgctctgttcttgtgttattttgtgctgggccccaattccccttccactcttcaaatcatctaggacagaactgatgtctgatttatgctttccccctgtagatcttggcatcattcatgtctattatttattaaatggatactgagaaaatatccatctcatttttaaaaagtaatgacatgaaagattcacatacactgtgagtcagtgaagagctcaggggagaagcagatttataaaggataaagttaatgcgtgctggagtgaggcgactgcccaataataatgtaacaaccttaggatatgtaacaggaaggaatttttatgaaattcatttccagaattcaaagaagacagtttgtagactgagtaaaaattataagcttcagtggttaacagtgtagctttctaaactggtttctgttacagtatatttacttgaagcaattgggggggtactttcttaaaacagtgttttgccttctcttaaaacactattccttctagactgtgtttttgctgctgaatttaaggtgactttcatttttctaaaaaagttacaccaaaagcacactgcaccttcttcattaaggtgaaatcatatgcctttagcttgaggacagtctctttgaaactgctta

SEQ ID NO: 214472 - DNA, 253 bp, Homo sapiens
agaaacatgacaactacttgcactgtgggatcctgggccagaaaaaggactttagtgaaaatactgatgaaatttgaataatatgtgtaggttactagttaatagtattgtatcattgttaatttcctggttttggtcattgtactatggttatataagattctaatattaggagtagctgggtgaaagccattttgcaacttttttgtaaatctaaaactgtttcaggcgaggtgcagtgactcacgcctgt

SEQ ID NO: 214473 - DNA, 441 bp, Homo sapiens
taacatatctgaatgaattcatcaatcgtctgccttataaaaaatcagtggatttattcagtgataaaaaccagtaaattttaatttagtaactactgattttgcatgctttttgcatatcaaatgtaagttgtcaggaccctattaatatgaatattttatctaaatgttacccatttaaaaattataaatatttgtcttactcatacctgcattttactaaactcattatctatagtataaaactattacgtataatctctctttcccactgaactatctgcagagatcaaaggacccattattcaggccagatgttttcatgttttttaaaattaatcttgtttgtataaagtatatttagcttattttttgacaagtccctgatattccagacttaatgggtaccaccactaaatctgaataattgatggaaatgta

SEQ ID NO: 214474 - DNA, 318 bp, Homo sapiens
tcttgaactcctgacttcaggtgatccgcccgcctcggcctcccagtgtgctgggattacaggcatgagcacccggcctgaacctctatttttacatttcttttctattttacgtttcttttcagttcttgatgcttatcatcagttcttgatgctcttagctgctaactggactgtggtatcccatgtcttcaggaagagagagtctgcttattaggagatgcttataagatatagaaatataaaaatagaggttcaggccgggtgctcatgcctgtaatcccagcacactgggaggccgaggcgggcggatcacct

SEQ ID NO: 214475 - DNA, 740 bp, Homo sapiens
agcaaatgcaaaatcatcttagaagtcagagggaaatgcctatgcagttaagagcagaatagtgctgctactattattcctaagattcttgaccttatagaagattttatatttaatcggtttctctggagcccttgttattttgctagataagagaatttgaatatgtgtcccctattctcctgctatttggtagaagagatgaactggaataagtggcacagatacgcaataagaaagtgcaaagtcagttgagagtttctgtcttggactgttaggcaagttccgtgaaggagacatttatttcatcagggttgttgaaggctaacatgtctcatttattttagaagtagacaagagggccaggtgcagtggctcacacctgtaatctcagcgttttaggaggctgaggcaggaagattgcttgagcccaggaatttgagaccaacctgagcaacatagtgagacactgtctgtaatttttaaagaaatagaaaattttaaaaattaaaaaaaaatttttttaagtagacaagggcggtccaattttaccaaacagtttaagggaagaggaggtaggaaaacctaatttcagaggtgacttacaatcccattagagggaaattcaagtgtttgaggtctggagggtaaagaagacgtggttagaaaggatacagttgtcaagctgaggagagaacctaagcagtcggaggccattggagatactggaacaacaaaag

SEQ ID NO: 214476 - DNA, 230 bp, Homo sapiens
  misc_feature (160)..(160): n is a, c, g, or t
agaatagcttgagccagaaggtcgaggctgcagcaagccatgactgcaagaccatgtcccaaaaaaagaaagaggctgggtgtggtggctcatgcttgtaataccagcagtttgggaggccgaggtgggcggactgcttgaggccaggagttgggaggtngcggtgagccaagatcatgccactgtactccagcctgggggatggagcgagacttcgtcaaaaaaaaaaa

SEQ ID NO: 214477 - DNA, 981 bp, Homo sapiens
tgaaataagtgctttggaaaaaaattaagtgggtttaaacggatagagaatgacaggggtttctatgctaaatggagtagttggaggaggccttcttgagaaggaatttttgagcagagagggctaaatgaaatgagacaagggcctatgggagtttctgggggaccaacaggcacatggttggcatgttccagaactgcaaggaggtcagtgtggctggagtccagaagcatggggaggttggagaggtatctggggggccaattaggtgggatgttgtaggcaggataaaggactcttgaatttcttctgcacatgatggcaagattggagcatgaatccctctgccacatgtgtgaggagtagattataggggtcagaagagacactgcactgaggggctgagtagggagtgaccatgctggctaagaccaccctcctagctatgctggttgggcatcatctatgactttttcttctccttcatttgctacattcgtgcatacatgcccaactgggggttttgtttttataatgcaccttacagccatcagaagcaggttgagcgtcccaggatacagactctaggacagagattagtgtgggagaggtttattgggagtgctcttgagacagtagtttgtcaaagagaaggaaagaaagcacaactgggcagagaaagaagttcaactacaatgtggtgagttctgaggctgagatggcccttcagagctgtcctgagctgtggtgagaggtaggggcctttatatccccagtgatgatcagtcattgatgccaccatcccaggaagaggtcatgaccttggccgaaggccctcttttggcagcattcccagtgacttggataatctgatcattattactgaaggggaggtctgggcaccatatcgcaacaccctggtaccacatcacccatttttacacttgttactgaaactgccttgatttaatttctcattct

SEQ ID NO: 214478 - DNA, 808 bp, Homo sapiens
gcttaacttttccctttggcatagtgagtttggggtccccaaattttcttttcttttcatagtttctttttttacatgaaaataagcttcatgaaggtagagacattgtgttttctttcattgtattatcagagcttagaaaagcatagtagatactcaataaatattgtttaacacatgaatttgacacttagcacataggcttttatcgttaattgtcttttcatgaatgatgcaaaaatgtagaatgctctttagggtaagatctcttttacaattctctctattatactttatagcacccaatccattggtttgcataataagcacacaatgcagatttgttgatatgtttttctattgacatgaatctgaaaataacatgaattgataactgatttaagtttcatttttaagtaaaagtgtggaaagcagaataatggaccctgaaagatatatgtgtcctactcctccgaacctgttaatatactactttgcatggcaaaagggattttgcatctgtgattcaggttaagaagcttgtaatgggaagattattctggattatccaggtaaatcctatctaatttcatgagtcttttaaagcagagaaccttttccagctgcagagaaccaaagatggtagtgtgagaagtaagtttgatgttgctggctttgaaggtggaggaggagggccatgaaccaaggaatgtagatggcttctagaagccagagaaggcaagaaaatggattctcccctatagccttcagaaaggaatgcagccctgatgacgatgccttgatttta

SEQ ID NO: 214479 - DNA, 638 bp, Homo sapiens
aaagaaacggcatggggcgtttctcaatgctttatcactgacctcacagttttctgtttgtttaaaacaactacaacagcaaaatatatggccagcattgtgtgattggaggcagtgtgatacccatattatcttgcacgcgtaacatctagaaggccccattaattaacaattcagtatgtcttcttttctccaaagttggggaaagttggaaagctgatgagcctaaagtgacaccagatgactctattgctttctcttctttacttgtttaagttttatgaggagttaattcttaaacctcccctctcttcaagccccagccttcccagaaataaatcacaccagcccagggtggagttatgctgctctgatggcctatgggctggagctcctgactcctctggtggatatattacagtgactaagtgtggggagcagacaggagctgcctcttcgtctcctgtttcaaagaccaaaggatctggggttggagacacaatggatcaaaggacctgcaggtctgaacaggggcaagagaaagagaggccaaagaaaagaggattccctgggaagtgggacctggctctagcatgatatgtgttaggtatctgccacatacccaggacagtctcatt

SEQ ID NO: 214480 - DNA, 570 bp, Homo sapiens
aggggaataacctcagagtatgacataagatatccactaaataaaaaatactggttgggtatggtggctcacgcctccaatcccaacattttgggaggctgagtggggaggaccatttgaggccaggagatcaagaccagcttgggcaacataaaaaggccctatctctatttcacaaacacacacacacacacacacacacacacacacacaaagaaaaaaaaaattaaagaaaaaatactttaggaaattctaaactacttgtgcagagatggacttaagagtctattccagggtttaaagaagaggcacctaatatttaaaataattcaaatactccaaaggcctttctagccttctagaactctattctgcacagtatttgtttatcctagtgcctgattaaggttttgatttttacataaaacaaagtcccagggagttcagaggcctattcataaaaagaaaagccaagaagcatcaatattaataaagcttaaccaaagagatattgaaaaacctttgtaaaattaaaaacaatgactaattcaatccaaacaactaggtcat

SEQ ID NO: 214481 - DNA, 596 bp, Homo sapiens
catgattttttggcaggtgtctatcctgggtgctccccgtgcctcacagcagagtcagcaggtccccgccagcctgagcatgagaggaagaggtcagcctccttgggccaggctctgaggaggtgtggagtagaggccccgtggttgaggagccatagagaagtgctctagccacgcccattgtgaaggccacatttgagggtgtggctttctcctagagatctgagcacagtaacagcgctcagtcacagagaggcaggagagaggttctgttcctcctgggttttggtgcccccatggctgtaagattggcctattatactctttggagtactgcatttcttcttactctcaaagcatccttgttaagaagtgggtatgaccaccatgttttttaggttagaaaaacaaggcccacagaggccaagagcgctacccacattgaaagaatgaagggcagggccagactgcacctttattagagtctttgccctgtcgggatggggacccaatttaggggccagcatgtgtctagcagtggaataggggtgcagggagggtggggcaagagccccatgtgtcctggaagctgaggg

SEQ ID NO: 214482 - DNA, 465 bp, Homo sapiens
  misc_feature (125)..(125): n is a, c, g, or t
ctgcctcagcctcccaaagcactgggattacaggtatgagccaccacgcccagcctagcagccatggttttcagtgtatctgaaccccctatcttgtcctagaatctcatggctcctccctggangattttttgaggaggctgaaggagacaggacagttctcgaggtgtcgtgtggccctatgtccatgtggaaggggtgggctggtggctatctagagagtaggcaacaacatccagccttctcccactacccgtcccgtttcaggcttgggacagaatggaaacgtcaagcaggtcaggtgcagtgggtggctcatgcctgtaatcccagcactttgggaggctgaagtgggtggatcacgaggtcaggagctcaagaccagcctggccaagatggtgaaaccctgtctctactaaaaaatacaaaaaaaattagccggatgtggtggagggtgcctgtaat

SEQ ID NO: 214483 - DNA, 337 bp, Homo sapiens
gccctgaatgctttggggagctcaccaggaaaaatccaagaaaaggccgctggccccagagcggcaaaccttccagtgtgctctttcaacaggtgatgtgggcgggggggcggattgggaggggtggggtggaaatagaggaggaaaagtgaaggaagcatgtttctttcaaggtgcctctgaagagtcaattctgagccagatcttagaatccatgagttaaagaaatgaggaattgcaaaaaatgtgtgaaaagattgaaggcagtggctcagtcaatgaaagaagaggtcaaaaagaagagcggccagacttacaggaaaactgccaacccaga

SEQ ID NO: 214484 - DNA, 259 bp, Homo sapiens
aaatcactggtatactgtgatgtgtgcataattgtgtgtgtgtgtgtgtgtgtgtgtgtgtaagccttcttgtatatccatcattaaatgttaacaaatattttgtctaatccacatattttgacaagatagcataacataataatatgatattttatccatataaagtttcagtttctgaaatacagatgaaaactactatcttgatgtaaatttgagtagaaattcctccatattgagctcttggaaggcttccttc

SEQ ID NO: 214485 - DNA, 241 bp, Homo sapiens
ctgctttttctagatgtgtcttgtctgtgacctatccaaacttcctgatctagattttctggatatactctgctgctttccaagggtgatttagccaatctctaactcggaaggagtggaaagaccatgatcaaagaggaaaatccagccctgaatttactccccagtttgccctacctcggttttcaaaggttacatccagctctgcttaccacttagaaatacttcaagctgcaagtaa

SEQ ID NO: 214486 - DNA, 525 bp, Homo sapiens
gggagactgaaaaccaagaagaactgagaactggctgcaactttcaatgtgttccccaactttcacacagaccaaattggtagagggatggagacctcatcagatgaccccagtgcgctttccactgaaccatatgtcaaagacactggagaaacgtgaggccatgaagtgatactggattccagttgagtgacatgttattttgtgtgcttccaagctatattgttgcggcagtgtggcttagtaggaacacaggtttgcatcagacagaatggggttttaatcccagctctctctcttactatttgtgtgaatttgacaagttatgcaacttctctgtatcttagtcaatccttgtaaaattccagtgaagtaggcattattactgtcctcatgttctaaaatgcagtggcatggagactttttaatctgtaaaatcttttttttgggtgaggactaaaaattataattgctattaaggatataccacatggtaggtgcttaataaatagttttttaagtttg

SEQ ID NO: 214487 - DNA, 724 bp, Homo sapiens
acagacagtggccaaggccgggaatcaattttttttctaatcgttataatgaaaggatgctgaacattgtatgtgaggtactgcttatgttaattagcttgacttagccattccacagtatatacaggcacacctcactttattgtgctttgctttattgcacttttcagctattgcatttttttaaacaaattgaaggtttatgcgaccctgcgtcaaacaagtctatcagcaccatctttccaatagcatgcgatctctttatgtctctctatcacattttggtaattctcacaatatttcagactttttcattactggtattatgaaacatagtgatctaagcaacagattttcaatgtagatgaaacagccatctcttggaaaaagatgtcatctaggactttcatagctagagagaagtcaatgcctggcttcaaagcttcaaaggacaggctgactttcttgttaggggccaatgcagctggtgactttaagttgaagccaaaattcatttaccattccaaaagtcttagagtccttaataattatgctaaatctactctgcctgtgctctatacatggaacaacgaagcttggatgacagcacaatattttaagccaactgttgagagctactactcagaaacgattcctctcgaaccattactgcttattgacaatccacctggtcacccgagctttcatggagatgtcccaggag

SEQ ID NO: 214488 - DNA, 147 bp, Homo sapiens
tggccctttgcagggaggacacaaaggtggggctgaaggtgagaggaaaagatcaagcgtaaaccccacagggagagggggaggagagggaggcaggcctgtgcctttaaaagaattttcatttaaaggctcttctctcttccacca

SEQ ID NO: 214489 - DNA, 422 bp, Homo sapiens
tcatttatcattaataatcacatttcgattttcatttccctaatgctgatgattaataatcatagtcattagggaaatgaaaataaaaaccacagtaagatacctcttcatacccacagggatggtgaagttggtgaagatttggagaaagaaaaagcaaaatggtacagctgctttggaaaacaatttgtcagtctctcaaaatggtaaaagtaaagttgccatgtgtcctagcagttctattcctaagttatacccaagagaactgaaagcatatgttcatacacaaacttgtatacagtgtttatagcagcattatttataattgccaaaaagtggaaacaactcaaatgttcatcggctgatgaatggataaataaaatgtggcatatccataggatggaatattattcagcaagaaa

SEQ ID NO: 214490 - DNA, 339 bp, Homo sapiens
gctgccaagtgtcatccagatttctctttggtattgacttcccccagcccctgggcatactgccatagagacagcccaccattttcagtcctctttgggaattgcctccttccaaggacagccatatcccacgactgctcaatgtcgaggggtaaatgtatgaccctcttcccccaacttgggacaacttgaaggaccatctcatctttagagtaccctatagggtttgccaagaacatttttgggactgcgtcaccactcagcttctccctctgcccagtctggcctcctccctctccctcctattggtgtcaattccaagacatccttataaatgtc

SEQ ID NO: 214491 - DNA, 452 bp, Homo sapiens
caaaagtggtgtcaatatcatgatcgaaaaagggagaaagagcctgattgggatatatttaagaaacaatgagaggagaggaattgaagacagagagtatggacaactattctaagatgttttgttgaaaagtagagcaaaaaatgggatgacagctggcatcagaagaaaagcaaggaaattctttttcttagatcagaaaaacaacagcatatttgtatgctgatggtaataatttactagcatcaaaattaatgacatggtcatgatatagtgaactgcaacaggaaaatccccaggtacacagcgaagagggaatataatacacaaatttaaaaattatttggatctctgaaacatctgttttgatattaacctttcattcctgcaatagttattttaagcatgttctcattttctcttgttcagtgttgccaggttattataaagtg

SEQ ID NO: 214492 - DNA, 433 bp, Homo sapiens
caagtcccctgagttccccggtcattggattaattcagtcctgctctgagaatgggcaggaaaggggagggctggacagtcggtggtcagccaggagtggagggagatggaaaaactcggagaggagagtgacctgggaacatcatggacaggatggccagccagtcccctggcatcaggggatttacaagggctcatgttggccatgctcaaagaccacaggacagtgggcactcactcccattactacccctaatacctggttgaaaagaggaagaggaagcgaatcaagtaagtgaaagtctcattgcaattggagaggtggagacctcagagtgatcaatgagatagggaagatgcacaaggagggggaatctgaatatctctatgtaaaagaatgatgttgaacttttacatacacgatatacaaagt

SEQ ID NO: 214493 - DNA, 482 bp, Homo sapiens
taccagataataggctttcagggtatgacttaccatgaccccatgctctgtaccaatacaaaaaaactctgcagttaagataaaaaatgttttttaaaaaattatagtaaattatatatgccataaatttactatcttaaccactcttaagctgacagttcactagtgttaagtacattcccattgttgtacacccatcaccacccttttcatcttcccaaactgaaaccctgtgcccattaaacagtaacttcctatgtctatgtctgttcatgctgctatagcaaaatacccaagactgggtaatttataaagagaaacttattgctcacagttctggaggctggggaatcgaagatcaaggcactagccgatttggtgtctggtgaaggctcactctgcttccaagacggtgccttgctgctgtatctttgggaggggaggaatgctgcaccctcacgggcagaagagatgaaagggcc

SEQ ID NO: 214494 - DNA, 429 bp, Homo sapiens
ctctgttccaggtgctctgctaggtgttgaattaaatgcatcatctcattttaccttcttaacaaccctatgagggaggtggattctttcctagttatagatgaagaaatcaagctgtagtgaggttaatgacttgcccagttcccagagcatgtctgtggtagtgatgtcactcaaactaagtcagctggatctcagttgcctttgcctctgttttgatgttttatcagaagaggctgtgggacctcctgccccagaactaccaggataacttgtcaaagatctagagtcacaggattacccagtgaatattatttgcaaaatctgcagaggccctaagaatttgcatttttaacaagcgccccaaggacacttgcataaactaggtctgagaactactccatgaaactagcactagagtgtgtggtg

SEQ ID NO: 214495 - DNA, 361 bp, Homo sapiens
aaaacaacaaagaacacctcaagcttttttaagggctattatttctttcgctccccagtgggggaaaaaaatggattccactgtcctgtgtacaaaaacaaggaggatgctcatacaagaatgtggctagcagcattttctgtgtttcctctttctctcacaggtgtagacactgccttttctgagtcttcatcatcccccagcatctcctgggcacctgctgggactcatccccgccccagccactggagagacagagatgagcctggtcgaggaaatcgacttggttaaggctggcgtgggaccacatgccaagtccctgactcccagtcagaaccccaaaacccatttgaggtgatcc

SEQ ID NO: 214496 - DNA, 660 bp, Homo sapiens
ggtcagataaaaaatgtctgcatacatgtaaaagctagcatcagaggtcaaatcacatcataatcagcatatacacatctacaatttctccagtaaaataaaatagtaaaaatcagtgcaacattcccaactggtaaatctgtttctgatgggatataattctgaaactgctgtcagtgtatactggggctgaacaaataagtaaacggatgttatatagtgggaacaaggttcctcacttttgaagatattatagataagcaagaaaggaaggcattctaaaaatgaatgctgtggtactgaattaaagtcagagatgtcaatataagttcctggttataatagatgaagaaatacggaatcagttgtagatacgtccatatacaaaagttggtgtgcatacatgtattatctagctctgtttgccaagaaggactagaatttatgacaccccagtagcaatgaacatacccagtgcccagattttggtttctatataggattctccagtaaaaagtacaagagctccttggataaatggctgattctgcggctagggcatggaaaatacaagatgaatctgaaacatcctatagtagcagaaagaaagtggtcaaagaacaaaaggataagggcatgtcacagggacatataaaccaa

SEQ ID NO: 214497 - DNA, 717 bp, Homo sapiens
ctggcaaccaaagcgattgtgaccacaacactcttctagatacccatgactttcatttatactaacatctagaaaaatagaaaatacattttataagacacaattcggtatcaactatatgagtcaaataataaagatttgccaactagagttaaattaaatatctgccatttaaaaatatttaaaatgcaaataataactgagaactggttaagaagaattgaaaatagagttgggctgaagactaaaatggctacctatttccatcaggttagtttaatattaaaatgtacattttcattcttaccaatgctggatgaaaactgaaagcaataaaaatgaataacattttaagtttctcatacaaagactacaaaacaaaagcaagactatgagtaattaaattcttctatgagaactttaaaaatttataatgaaacacaaatgggtaactgaaaaatgggatacagttttaatttttcccaagttatatgtctttatttttgcatattttaaaatctactatatctgtatatactaccaattaaatgtcagtaacaaacgattacaattcaccatgagaagataatttatttgacattttaggttttaattcaagtcagcaaattaaaaacctttcttgattacatatgcttaaaccctaagcttgcttagcaatatacctttcaaattactactcttgttttgttttgagat

SEQ ID NO: 214498 - DNA, 551 bp, Homo sapiens
cagaatctataacactttggctgttggtgtagaatagaacccctaaaggaatacttttaaaatactaaatgaatgctaaataaaatttagggaaggggttcttccagcatggtgtccatttgcttaataagggaataaggcagagagaggattgtgcctttgttctattaaggctgttcatcattaagattattattctctcctactaattcctgagttgtttgtagcactttataaacttgagccccagagaatgtgtgatttaataaggacacaaataataatttttaaaaatagaggctgggcatggtggctcatgtgtgtaatcctagcactttgggaggccaaggctggacagtcgcttgaggcccagagttcaaagccagcctggacaacataggaagaccccatctcaacaaataattttgaaagttagccagtgtggtggtacgcacctatagtcccagttactagggtggctgaggtgggaggatcacttgagccctgagcccaggagggtgaggctacagtgagccatgatggcaccaaaa

SEQ ID NO: 214499 - DNA, 463 bp, Homo sapiens
tgagatacacgttgcacactgtgaaacaaaggtacggaggtgaaggagagaagacatctcagaggcgcctactcaccactgtccttgcccctgtaactccctctattccatgttgaaaccagaaacatgaagctccgttgctttgcatagcagaaatagattcacattacatttttttctgattggttccctccaggagaaggaaagtttttgaaatatttctccccaatgaataccgccctcagacacaaatttgttttcattcttttagtcatctccggccccaataaaagtcagaattgtaacctatactccttcaggttcatcagccaataaaggatcctgccttgtcccttatagcaattggaagagaacctcctattttgcagtgccatttgtaattctaatagtagcagtggcttaggtttgctgatgaatgaatttgaataaatgcttctgacac

SEQ ID NO: 214500 - DNA, 531 bp, Homo sapiens
atgaacttgatgcacataaatctaagatattacacacacacctgcacatatatatctatgtatataggcacacatatatttgtatttattgatatagaaatatgagtagatttctgctaggtttatcatctactttccatttttttctttttctttttaaaataatttccaattttattatagactcagggggtccaagtgcaggtttgttacatgggtatattatgtgatgctaagaatttgggtatggatggccctgttgcccaggagagagcatagtacctgatgggtagtttttcggtccattcccctcttcccttctaccctctccagtagtccccagtgtctgtagtacctgtttttatgttcacctgtactcaatgtttagctctcatttataaatgagaacatgtagtatttggttttctgtccctctgttaattcacttaggatgatggtctccagatgaatccatgttgctgtaaaggacatcatttcattctttttcatggctgtatagtatgccatggt

SEQ ID NO: 214501 - DNA, 474 bp, Homo sapiens
agataaggttattttggaatgttaatatatgcaaaggcttagaacatgttctatcacactgtacatgcgtaataaatattagctattgcaatgatgaggttgattgttgatgatgacacaacaaattatacagcttttcttcactctagagatctttgagtttagaagataaataaaaacggccaggcgctgtggctcacacctgtaatcccagcactttgggaagccgaggcgggcggatcacgaggtcaggagatcgagaccatcctcgctaacacggtaaaagcccgtctctactaaaaatacaaaaaattagccgggcgcgttggcgggcgcctgtggtcccagctactccggaggctgaggcaggagaatggcgtgaatccgggaggcggagcttgcattaagcccagatcgcgccactgcactccagcctgggcaaaagagtgagactccgtctcaaaaaaaaaaaaa

SEQ ID NO: 214502 - DNA, 500 bp, Homo sapiens
caggaagtagagttaaaaatttttctaatagaaaaaggcttatagaatgatataaagaaagaattttttgtccagttgtataatgtgtttgtattttaagttaggtgttaattacaagagtcaaaaagttaaataaatttaaaagtttataaagtaaaaaagttacagtaagttaaggttaatttattgttgaggaaagaaatattttttgaatgtattatagccctaaatgtgcagtatgtataaaacctacagcagtgtatggtcatgtcctggccttcccattcacttcccactcgctcaccggagtcaccagagcagcctgcgtgtgcagtgtgtgtaaagcctacagcaacacggtcatgtcctggccttcccactgactcttcactcactcatggactcaccggagcagcctgcgtgtgcagtgtgtataaagcctacagcagtatacggtcgtgtcctggccttcccactgactcttcattcactcatggact

SEQ ID NO: 214503 - DNA, 459 bp, Homo sapiens
ccaggtcaagcaccctggtagtgagggagagagagaggagaggctgtagagaagagacgtagctggttggaaatggaaggcagtcttaggctgcaagttgtggaggatggctccccaagtcccttatggtcattgatcaaaggcttctaatttaggcagcaaaacatttgcccaaacgaatgtcaactaactgggtgattcttaggattgttacagctgaaccggggttccagacaaccatgggattaggattatcttcatcaaaactggagcgaagggaccaagatggatttgggtcaagttccaacccctggaactagctatccaggcttaccccgtcttgtcattagccttgcattaataagaccctacattttattcaagttttgggatcccatttatcatattaagcagttttgctgtacctggctagtacttacgaagaaatataaattcaaa

SEQ ID NO: 214504 - DNA, 341 bp, Homo sapiens
gtgaacgcccgactgcaagctggtacaaactctatttttaatacatctttctgttattaacccttgctttaatggtaacttttagtcttctaccttttagaagctacggcttctgtaaaactgcttctgcactgccagtgcttggccacatcacaacatggtcagcatttggtgacaaggagtttattaccaaagtccccaggagcgttgcttttagttaggttagtccatttgaaataaagaactgtccctctcaccccttctcattcttaccaattaggttgtactgaggttttttattttggtttcttaggtggaaggaattaaaataggttttggtg

SEQ ID NO: 214505 - DNA, 388 bp, Homo sapiens
  misc_feature (1)..(1): n is a, c, g, or t
  misc_feature (19)..(19): n is a, c, g, or t
ncgacctactactactaanattctgtgtctctgcgtctgcttgtgcaggtctctacctggaatgtcctccttgacttgaccttctcaactcgggcatccaatctcccttccaccatcagcagctctagagagcgttctctggcctactccttttttttttttttttttttttttgagacagagcctcaatctgttgcccaggctggagtgcagtgatatgatctcagctcactgcagccttcgcctctcaggttcaagtgattctcttgcctcagcctcccaagtagctggtattacaggtgcctgctaccacacccagctaatttttgtatttttagcggagatggggtttcgccattggccaggctggtcttgaacttttgacttc

SEQ ID NO: 214506 - DNA, 418 bp, Homo sapiens
aaaaatataaattttctgcagaaaatttacaagaatctacaaaaaaattaaaaataagaaaatttacaaataaatgtttccaataatcagtcacctccatttctttatactagaaataactgaaaaatgaaatttaattaaaaagcaaaatcatttataataacatctaaaagggtccactacctaggatcacatatatagaaacattgcaaggctttttccttaaggaccataaaacattggtgagaaaaattaatatcaaaataactaaatagatatactctgtatattgactgaaagacacaatattgataaaatgccaatctccctcaaatcaacataatctctatccaaatcccagcctgttattttgtgcaaattgacagttttattctaaaatgtacatagaaatgcaagg

SEQ ID NO: 214507 - DNA, 444 bp, Homo sapiens
aaaaaactgttatgtaaacatcaaaaaattcaattattgttttaatcacagtatttttatctttttagaataagtacatacaaatagtgaccattaaaatagtcattgctttattggaaaccaactttgttttttttgtgcacccactcctctctcacccttggccaaaatcaaacaaaacttactgctccttctaaaatctagaaagaatactgcctatttttgtattttgtatatgcttaaggaaggaagagtctggaagtttcttcattggcttcttacattccaactttgctagtcacaaggcctttgtaaaagagactgtggaaactacttgtttgcaagacatttcccaaatttactgtgcttggcctgtgacacttaatttcatggaatgggattcataaagatgatcttaacctttcattccttaagaatttatcg

SEQ ID NO: 214508 - DNA, 404 bp, Homo sapiens
aaaccccactcccacactacccctgtcttcccataggttgtccctgggtcctgttagaatctcagagagacatgggactacgagttatccaaattcaggaatagtcagaacaagtgagtgaaacacacctttgcctgcctgtgaagggccagcttctgcacgggcaccagagacacaaagataaatgctcccaatgacctgatttactaaggaaggagagagacaggaactcactgcttaagggctacgtttattcattcctctatccagcaaattcttcaggactccagctgtgtgcccagcattatgcaagagctgggactttaattttcagtaagacctgctttttcctttaaggagtttgaatctaagaaggaagcaggcagcactggagcaattacccc

SEQ ID NO: 214509 - DNA, 280 bp, Homo sapiens
ctcctgttctgggaactcactcgcaagcacagtttcctgacctgaccttaagagctggttccctatgggtgacacagtggtgccaagtgtcccacaggtgatgttgatttggtcaggaggtgtggttggtgaaacagcctctgagggttccaccgcgggcggcccctccacctggctctttcaggggcctgggggccaaggcacttggggctccagaacaaaagaagagaccctggtgcttgtgattggcgtgagataaaaataacaaaagaaccgctga

SEQ ID NO: 214510 - DNA, 658 bp, Homo sapiens
gaagatggaagcaaccctggtgtccattgacatttgaatggataaacaaaacatccagccatacaatgaatgttatacagccttcagaaggaaggaaattgtgacacatgctacaacatggataaaccgtaaagacatgatactaaattagtcagtcacagaagcacaaatacaaccttgtatggttccacttctgaggtacttaggtagtcaaattcatagagacagaaagtagaatggtggtcgcgtggggcagggagatgggaaaatggggacttggtgtttagtgggtacagtgtttcagtttggagagatgaaaaagttctggacgtggatggtagtaagggttgcagaataatgtgtatgtgcttaatgccacagaactgttcatgtaaaaatggttgaaatggtaaattttatgttgtgatactttaccacataagaaaagtaaaacaaaaatagtgcttggtacctagtactagtaccttctaaatgttagctctcttaataattgtattattgtttaatattattattgcagtctcttggttcatttgttcaatacatattcattgagcacctactatgtgccaggtactattatagacactgaggaaataaagataacttgagttagtgtgggatcatgaaaaaggag

SEQ ID NO: 214511 - DNA, 141 bp, Homo sapiens
agtccttccccttctcagactgtccccgccctcctcccacttactcttctttcctcagaaccctcttctttctctttccctcttacacacatacaccagtctcctcacttcccagtttcccacactcactcttctgtctcc

SEQ ID NO: 214512 - DNA, 658 bp, Homo sapiens
taatggaagtgatacttaacgttactctcatgtgaccatacaaccagatggttctacctttctataaaaacatgtttgtagagctcattgggagttacatatatttgtgtatctatgatgtacctgcctgctaaagctcatcaacactaatgaagaattagtaccaattactctagtaaatgctagtaactgcatttattttagatcaaaatttgaactaaacaaatacaaattcaaattctaggtttttatatttcctttaggaagtgtgaattccaatgaaaactatttatttcctgagaaataaatagaagatgggtagtggttactatttttcagacaaatgtattcaatgcagactgtgaaactgactgtgtctgtgagtggaactagacttagttagtgacagtcagatttccagaacactgaacctgtgaaacaaagatttttttggatcctgctatagggctagaattataatacaacaagcataggtatttaacagcagataaccattttaagaacaaccaaaatttcccacctgaatatttccccttggtaagattattgtcataaatgcccaaatgaatctactaaaaatattatttaaatgtccatatgttttagatcctatattgagtccatagaaattacaaca

SEQ ID NO: 214513 - DNA, 568 bp, Homo sapiens
  misc_feature (562)..(562): n is a, c, g, or t
taccagacaccaaacttgttagctcctcgatcttggatttcctggtgtctagaactgtgaggaataaatatctattgtttataaattaaaaaaaaaaaaaaaaaaaaaaaaaaaaaaaaaaaaaaaaaaaaaaaaaaaaaattgaatgaaaaataaaaaaaaaaaaaataaaaaaataaaaaaaaaggaggagtaaacaaaaaaaaaaaaaaaaaaagaaaaataagctctttgggggggccttgaacaaaccaatgttaagacccagaaaacataaggggagggcaaaaaatatgggcttccaggaaaaaaaacctttaaaaagaagatttttaaaaaagcaggggaataccaaaaaaaggccaacgggtaaaaaacccccacgttaaacaaaaaaaaaagggctaaaaaaaaccccattttgaaaggggggggaaaaatgaaagggacccaccccaacgccccctctaaaaagaaacaacccccagagaggaagaaaaaaatccccggtttaaactaataaaaaaaaccgcgaaaaatttttttaaaaaaaaacaattcnaccccc

SEQ ID NO: 214514 - DNA, 520 bp, Homo sapiens
ctataccatgcatttagctgcctagtgagaatatccagtaggttatcctatagttactatgaagttaacacagcccaaaaacctacttctccttgtgtttttttccaactcaatgaatgacatcactgcactcagaccagaaatctagaagtcagtcatgactcttcattctatttcgcccttcacaaagagttagctgccagctctgttatttctgccccttctttacccttcttccaatttttattatcttcttatttatcctctatgtgtcacaagaccagtctttctgggaggcatgttttatcctatccctctgcgtaggaataaccataattatcttactaattccatcccagaaaagcctgtgatccctgaggccagaattgactctttgggcctaaatagcagctataaacatcttcagtaacttgccaggctctagcatgtggcatggaattttggcatctagctaaaattcctcaacccatagttaagctactcctctttctcctaaaaa

SEQ ID NO: 214515 - DNA, 571 bp, Homo sapiens
ctcacgcctgtaatcccagcactttgggaggccgaggcgggcggatcacaaggtcaggagatcgagaccatcccggctaaaacggtgaaaccccgtctctactaaaaatacaaaaaattagccgggcgtagtggcaggcgcctgtagtcccagctacttgggaggctgaggcaggagaatggcgtgaacccgggaggtggagcttgcagtgagccgagatcccgccactgcactccagcctgggcgacagagcgagactccgtctcaaaaaaaaaaaaaaaaaaaattagccgggcatggtggtgggtgcctgtagtcccagctactcgggaggctgaggcaggagaatggcatgaacctgggaggcagagcttgcagtgagccgagatcgcgccactgccctccagcctgggcgacagaatgagactgtctcaaaaaaaagaagaagaagaagaaaatcatactgcaggaagtcaggtatgtttcctttttgagaactcaggcagacccttgaccccctctgacctcacctcccacttttctgcctctggcttctcttcagccttttcag

SEQ ID NO: 214516 - DNA, 630 bp, Homo sapiens
  misc_feature (174)..(174): n is a, c, g, or t
ctgagtagctgggactacaggcgcccgccaccacacccggctaattttttttgtattttttagtagagacggggtttcactgtgttagccaggatggtctcgatctcctgaccttgtgatccacccgcctcggcctcccaaagtgctgggattacaggcttgagccaccgcgcnctggccggcctagctaatttttaagttttttgtagagattaagtttcaccatgttgccgaggctggtcttgaactctgggcctcaagcaatcctcgcactttggcctgccaaagttttgggattacaggcatgagccactgtgcccagctgtgaattaaacttagttatgtgtacccagggctctgggcagcctgctcggtcacatccttggtttggttatcttgaccacgcattggatttgtgttatttaaaaaaaaaaaaagttatttttttttaaaggcaagcaagcaaaaacaaaacgtttattaaggttttcgactgatgacatctatttatagcacatacattgtgaagatctgtggtttcctttagattaagaaagatattgtataaaatcatctccccacataaatgtttccaccacctactcatttgtctgcaagccaggagtctgt

SEQ ID NO: 214517 - DNA, 560 bp, Homo sapiens
taaaatgaatatgtattagtttaggaataaaatttaaaatgtaggaatgctataaaagaagaaaaaattttaactgggctaaagcaaacccagtatgtcatcctattacatcagcttcttcatctttggatgaagaggttggtgactgtttcttctaatgtgagaatagctccaaattgctaaattgttcagaatttgacaagatgaaagaggaaagaaaaaggaaatcttgaaaacatttactgtttccttgttcaatggataacacatggattcctgattgggagatttttcctcttgctttgatctgaaggcagaaggaaatatattcattattgtttaaaagaatacattttaacctaactttaaaacattcatgatatatttgtgaaccataatcttattaccccaacctagaagttattttgatcactaaacttccttttcaatatcttcatatatgtgtctttacatactttaaataaaaaatatataattgtataacgttttattattttatttaatatttatcacttctaataaatatatgtaaatatgta

SEQ ID NO: 214518 - DNA, 283 bp, Homo sapiens
atatgttcaaactgctaaatgaaactatggacagagagctaaaaagaataatgtgtgaacaaagatttcaataaggagaataatgtgtgaacagagatttcaataaagagatggaaatgacaaaagaaaaaacacaaaacaaaacaattctggagctgaaaactacattaccaaactgaaaacttctctagaaagtttcaatactagaaatattgattaggcagaataaagaattatagaactagaaaatcggtcaattgaaatgatcaagtatgaagaacag

SEQ ID NO: 214519 - DNA, 350 bp, Homo sapiens
aaattgtcttttatgggaacgaatttgttaaaggtagaaaaaaaactggtagtgtatgtatgttttatagattagacactaccaaaattatttaacatttagaataattaacttgctttcaggatgacagatgacttaagaaactgatgaagggttaattaaggatattgatttttagggcagaactacaaaattatcaaatcacttaacactgtaaatatgttcctgtttcaggttttcaaagtaaataccttaatcaaatttggccctcgtctttctggcttttcttccccctcgcttctgtcttttgttccccttctcgccctgccacgttattttaaactggcatg

SEQ ID NO: 214520 - DNA, 559 bp, Homo sapiens
tctagacatctatgaagctggcttttgctactaagttttctgggaaccagaggaatcagatttatagttgatgactcaaatagcagataaagataaaagatatataacattaataataccttagagtaataaattcttaagaaatcctaatagctttttttaaattaaactttttaattttgagataaaagttgtagattcatatacagttgtaagagttcccatgtaaccgttaccctatttctcctaatgctagcatttgtcacactacagtacagttccacaaccatgccattgacattgataacagttgaagacacagggcatttccaacactgcagtgatccctcatgttcttctgtagccgggctcacttgatatggcttccaccctctccttacccttgggcaaccacaaatctgtttttcctttctataattttcattcatcgtgcattcatgtacagtttttgtgtgtttgtgtgagcataaggtttttgtcttttggggaaacagggtccaactctgttgtccaggctggagtgcaatggctcggtctt

SEQ ID NO: 214521 - DNA, 553 bp, Homo sapiens
caagggcacctatttctgcgcctgctgagctccatggagtcaccaactcacagagactttgctgtatttttacagtggcttctattgtttatcagagaagcaactttctgcattgttgatatggaaatcttctgagattgttttaactaagatctctcaaacaaaatggaagggaggaaattttattattgtcccatttgggtagtagccagaaagtaactaaatattattcacatattagtttaaccaaatactttgtcagaggaggagggaaggttaggagaattagctttaaagaatttgtatccacacattttgtatagtaactgtgaattaaatctaccgtgtatttctcatcattaaaaagaccccattgattcttgtagtcatggaactgtaatagcagtggcaggatcatgcatgtgctcttgactacagttctgcaaaagttaccattggaggaaacttggtagaggacacatgtgatgtccttgtattacctcataatggcatgtacatttatagttatctcaaaataaaaagcctaataaaa

SEQ ID NO: 214522 - DNA, 655 bp, Homo sapiens
cgcagtggcctgtaatctcagcactttgggaggccgaggcaggcggatcacgaggtcaggaggtcgagaccatcctggctaacatggtaaaaccccatctctactaaaaattaaaaataaaaaaaattagccaggcgtggtggcggatgcctgtagtcccagctacttgggagactgaggcaggagaatcgcttgaacccaggaggcaggggagcttgcagtgagcagagatcgtgccactgcaatccagcctgggtgacagagcgagactccgtctcaaaaaacaaacaaacaaaaaaaacagaaaaaggaaagggaagagaaaatcaacaaaaccaaaattgatttaatgaaaatatcaaactaatggacaaaccaagaaaacagaagacctgaattactaataccagaaatgaaacagaagataataatggtcaaccttacagaaacaggattataagggagtctcatagacaattagccaacaaactggataaatgaaacaaaatggacaaactcctagaaacacataacctactaaaaatgaatcatgaagaaacagaaaatataaatagacctataactagtaaggagattgaatcagtaatcaaaaacctcccagaattcttaagaattaaacctcttcccaagacat

SEQ ID NO: 214523 - DNA, 477 bp, Homo sapiens
ctattagaaaagacccacaaactggctgaaaagttctcaaacttactagacctggcttccccccacacaaagattttcttgtgatcataaacattagagtgaccccccccccaaagaaaaaaaagattgttaagggacacagatcaaggggaaggcaaggttctgctttttctgagcagaaagatcagatatgcaggtgcagcattcattttaagtgactggagcaggttgtatcagtttattaattggtctcgttgaactgaagtactttccaggatttcagaaagtgcagtttcagcttgttggtaccgagaattgaaatttgcattgactgtggcagtgtaagaaatttttctgagaaggtagttgtagataagtaattacataagagtgaaataataaggtgaaccagtctgaagtaatagttctgaacaagtctgccaacatttgagacatgtataccattatctcagcaga

SEQ ID NO: 214524 - DNA, 877 bp, Homo sapiens
cctcgtctgcacggatgagtggccaactcaggagccaaggctgttgcttcccagtctggtggtgaatcttccatattctgaaagagctagagtcccagactgcaccgaagcttcatgagacctctcctcatctgtgcacgtttgagtggctgactctggagcccaggctgttgcttcccagtctggtggtgaatcctccatggtctggttgagtccttttcaactagtttttgtgttgttttttgaaacctcaagtcactgactccttcagcagtggtttaaggaagtatcttaatttttaaatcacatgttgaccatgcagccaattgttggcccgtagagtgaacaaaaccagaccacaagattgagggcttggagctggagaaagggaaaagaaaaagcagactgtgactctctggggaaagaactgaaagatgacactaggaattctcaaagcgagaggaaaaggaaaggccctttttcggaaatgacctctgataaacacaccctccagggttacacctgccactgtgtcttccacggacagacaagctgcactttagcagtcctgaatacctagagacttccttaacagagagtggggaatctcgtcatcttgcatggggatgggagctcgaagggagaacctcagccttccagaaggttatataaaaccagttgagaatttccctaagaatggagcagtggacaaacaattgttattgtaatccaaatacatgagtctacctacataatggagaaatgctaacttacagaagggtcaggttggtgtttgaatggttttaatttccttttataaaattacaggaattatacaattacattgattaattgtaatcagttttgagtctagcta

SEQ ID NO: 214525 - DNA, 421 bp, Homo sapiens
gcattagacaacttttttcagtttgttctgttttaatttataaatctataaaatagagttaacctaccttcatagggttattgtgaacattaaataatttaattttgtaaagtacttagaaatgccatgtgacatatagtaattaatatttgctgctatttttttaactgttactattattctttattattctgttatgatttacttgatttgttaacttaaacttatatatgttagctttcttatataagtcacctgttttatatattatacattcatatctctttatcacatttcgtacatcagatttagatttaaacatttcacctagaaaatggtttttttgtgtgtgttatgatgccagtgcctgcttgtcaacagttttatttgagcagctataaacatggtgatgtttgtgcaa

SEQ ID NO: 214526 - DNA, 398 bp, Homo sapiens
ggattacagttgcatgccaccacacccagctaatttttgtatttttagtagagactgggtttcatcatattggtaaggctgctctcaaactcctgacctcaggtgatccacccgcctcggcctcccaaagtgctgggattacaggcgtgagccactgtgcccagcaaggaatcttttttagggtgatagaaatcttctaaaaattatactgtgttgatgatcacacaattctgcacattaactgaaaatcactgaattgtatgctgaaaatgagtgacttttgtggaatgtaaattatacctcaaaagaatgttattcctttttttttctgaaatggagtttttcactcttgttacccaggctggagtgcaatggcatggtcttggctcactgcaacc

SEQ ID NO: 214527 - DNA, 613 bp, Homo sapiens
acattatagactatgatgattataatctctttgggctttcctgatctgtgatttctgaataaaataattttaagagtcttactgtccccgaaaacaatgaagctattccatataatcaagaacatataattttgttcctataaatactcagagattttcattgataaattaaccatctatcctttaaataatgttactaaaaaaagtagcaggtttagtctgtgttgaaggttatgaaacaatgactggaaagtgaaagatgggagtcaaaatgaccatttgctgctacttaaggactttcagcacagtggagggacgagaacgcggctttagagtcaggagacctggtttgaatccctgccttgccgctcactgaccatgggcaagtttacttagtgtcaggattttgtttctttctctggaaatgcacttgtgagttgagaaatgaaatgaaaggatgtattagactgtgaatttcatgtgggcaagaacctggctaccctccattgtcccctgtcacagtgtagacacatggtgcttccatagtgagtagaatatccattgttatttattttaaaatatggcaactattctccatgaaggtgttagagaa

SEQ ID NO: 214528 - DNA, 426 bp, Homo sapiens
tagagcactttggccttatgcttgcttttagctttctcatgtgccctaggtattgggaggacgagaagcaaacagccattgggaggatctatacaagcaagcagttttgtgctgctaaatttggattttgggggaaagacaactatctttgtttactaagataccaaggatgctcagttattcattcattaattccattatatgaagcctactgtgtgacaagtcctggagatacaaagatgaaaggtgaaggccctggtctcaaaggagctttttttccttaagattttataaatagatactcatggcattataggatatggtgaaaaacagtgtgctaatttgttgtcaataaagtgaactcaggatctaagccaggtgtgcatgtgtgtgtgagtatatgtgtggataaggccaagtctctgc

SEQ ID NO: 214529 - DNA, 427 bp, Homo sapiens
tgagcccaggaggtcaaggctgcagtgagtgcacagcctgggcaacggaatgtgaccttgtctcaaaaaaaaaaaaatcactgcattattttaataaaaacatgtatcttattggctgggtgcagtggctcatgcctgtaatcccagcactttgggaggccgaggtgggaggattgcttgagctcaggaattcaaggccagcctggttaatatagtgagacatctatactacaattcaaaacaacaataaaaaaattagctgggcatggtggcacacacctatagtcttagctactcagagggctgaggcggaaggaatgcttgagcccagaaggtcaaggctaaagtgagccctgatggtgccattgcacttcacagagtgaagagtgggtgacagagtgagaccctgtctcaaaaaaaagaaaaa

SEQ ID NO: 214530 - DNA, 447 bp, Homo sapiens
ggggcccggggaggacagctgctttctactcgaattttaaggaaacttactcgtatccagtttccacaagccaaattgaaattgtgtcttgaaaaacagtttttgtgcccactcgtgcttcttaacgtgactcctgtttggagaatttgcagaaccatctggctccagagtcttcagctatttacagagcagacccatagagtaataaattactctctgcctattattgtatttccctttttcctccctaaacgttcttttcatttttcggctcctgaacccgaggtgtgggttacatttctgtgggtgcacacattgccatgagtgccgctgcctagtgcttctgtcattgaagtctggtctccaagccactgtcccaagccagcatgactctagcttcctggaattccattcatctcttcgggatgggacgtcagccgcctcgct

SEQ ID NO: 214531 - DNA, 512 bp, Homo sapiens
catggtggctcacagttgtagtcccagctactaaggaggccaaggtggaggactgcttgagcccaggaggttgaggctgcagtgagctgtgatggcaccacggcactccagcctgggtgacagagcgaaactctgtctcaaaacaacagcaacaacagttacatcagcaaaaaaccaacagaaaatcatgcctctggggtcccttcccaccctggatgcagatgaggtgttcctgggtgcccagacagattagttcagccgcagagtaaagagctgcctccaggatcctccctttctaggcaaagacagacaccgcctcgccatccacttgcagttaagaatcaggtcggctaattagccgggagtggtggcggcgggcgcctgtagccccagctactcgggaggctgaggcaggagaatggcatgaacctgggaggtggagtttgcagtgagccgaaatcgagccactgcactccagcctgggtgacagagccagactctgtctccagaaa

SEQ ID NO: 214532 - DNA, 355 bp, Homo sapiens
cagctcacttaacaacagaaatgatagaaggcagatgacaatgaaattatttctttaaaatgtcaaagaaaagtgcagtcatgcatcacttaactatgggataggtttttttgagaaagcattgttgggtgattttgtcattgtgcaaacattatggagtgtccttacataggctactacacacctaggctatatgttatagcctgttgctcataggctacaaacctgtgcagcgtgttcttgtactgaatacggtaggtaatcggaacacaatggtaaatatttgtgtgtctaaacacatggaaacatagaaaaggtacagtaaaaatacagtattataatcttatgggaccac

SEQ ID NO: 214533 - DNA, 591 bp, Homo sapiens
gtgagtgggtgtgtgtgtgagagtggatgtggatgtgtggcagtgaacaggagagatctcagcctcttcatcttccatagaaaaagcccttaactaacgtctaaattgaaaacttaaggatcaagcagcagcagcagtacatcgtctagaaatacgaaggtgaattcttgtcattacatattgcatgtgaccactggacttgtaaaaattgtacatagtaagattgacacaaacacaaattaaagagaagctgcattttggaccatctcccattcacgtcccagggggagcaggaggctctcggaggccccgctgacacagtccccagcccaacgccagttgagacctgccgggggtaccaacagtgactcctagacagagccatgcgtcagtgcctccacaccacgaggcttcactttctcagtcctggaatgacttcctccgaccccgcagattctgtgcgggaagctgaacagtccctgtgaggaatgtttgcgaggattagagccggtcacacaaacgcattcctacaaataccatcttccatttctcagaaggaagaggcagctgtaacaaggcaaactgagccac

SEQ ID NO: 214534 - DNA, 380 bp, Homo sapiens
taagtaaattagcatgtcccccacatatatatgtcacagatattttctccagttgtttttaatctttgttctttatcttatagaagacacttttaagtgaccacatttgtgccttctaggttttctgtcctgcttagaaataccttttaccctcccaggttataataatattcaccaatgttttcttcaaattatgagtatgatttcattgtttccaaggcacatatttaggcagctaacttgggaggcagagcagaggagaaattcatgagggactgtcctagaggcaaggagactagttagcaggtatttcagtacagtttctggggaggagacagagaggtcatgaactaagccagtggaaatagcaaggaagagta

SEQ ID NO: 214535 - DNA, 465 bp, Homo sapiens
aattaataatattcagcaaacattttaaaatccaagtagaaaaagattgctttattttaatatctttatttaaaaatttgatgtgttaattatagttaataactccccttcattcaatagctaactttaaattattgtgttaaaaattttgtgttaaatttgtgtaagctttttgttacaaagctacagtaatcaaaacaatatagtactgatataaacatagatatacagaacaatggagtagaacaaagaacccagatataaacccttacatatgtggtcaaatgattatatttttgcaactaaaaagcttacataaaatttaatgcaacacaaaatttactatcttaaccattttcgttgtacagttcagtggtacatcacattgtacattcacattgttatgcagccatcaccaccatccatctctaaaactcttttcatcttgcaaaattgaaattctac

SEQ ID NO: 214536 - DNA, 410 bp, Homo sapiens
gatttgcacagaaattagaggaatagtaacttgctttttaaatgtcaaatttgtttttaattagtatctttgcacttccctagagcgtaatgatcctaagggttaaaaatcgattattgtagtcaattgatatatatttgttttttgtctgttgtcttcccctctccccacatctgttaacaaaatatatttcacagtcacacttttccccaaactaatttacggactgtcttcttttgcctttcttttgagtttaaggcatcatcttacatgaaaatttctataggccaggcatagtggtgcccacctgcaatcccagctactcaggaagtggaggtatgaggattacctgagcccaggagttcaagtccagcctagacaacatagcaagaccctgtctcaagtattaa

SEQ ID NO: 214537 - DNA, 166 bp, Homo sapiens
cttggctgggggtaggaggcattcggcaaacatttttgtgacagctcctgtgctaagtgctgaggccgtgaagataagtatgtccttgccttgggggaatttgcagttttctgggtgagacgatgatgtgatatttcaggtgttaagatccagccctatatgacgg

SEQ ID NO: 214538 - DNA, 475 bp, Homo sapiens
tgtggtggctcacgcctgtaatcccagcactttgggagactgaggctggtggatcacttgaggtcaggagttcgagaccagcctggccatcatgatgaaaccccatctctactaaaaatacagaaattagctgggtatggtggcaggtgcctgtaatcccagctactggggcggctgaagcagaagaattgcttgaactcgggaggccgaggttgcagtgagctgagattgcgtcactgcactgcagcctgggcaacagagcaagactctgtctcaaaaaagaaaaaacaaaagaacaactcctcaaaatcttcctaagattttatccccaggcaaatgcaaagacatgttcttgattttatattaaaaactcttgtgcaccattctaacgtattgtgcacacacttcattcttgtaatttaaaatgttgaactctgaagttttgtcatagtaatagctaaagggtatgtgttta

SEQ ID NO: 214539 - DNA, 312 bp, Homo sapiens
ctgagatcccaccaccgcactccagcctgggtgacagcgagactccatctcaaaaaaaaaaaaaaattgactatgacactgtcaaaagtcttaccgagggtagtggtttaaagtacatacaaaactctttgatatgccttccttcaaaaggtagagcccaatcctctccctttacatgtgggctggacttagtaacttagtccagaatcagtggaaataacagtatatgacttctgacactaggtcataaaaggcattgtggcttttccttgcctcctctgttaaattgtttgctctggggaaagctagctg

SEQ ID NO: 214540 - DNA, 497 bp, Homo sapiens
ggagggtcaaatgtggagaaatgaggggactcctttattctatttacagcatcccagtagctgaggagcacaaagacagctgtgatgcaaaggaaacatgatgggctttaaaatgagaagggctgagttcagattctacctgtgccatgtattaactgtgtgaccttaggcaagttgattaactgctctgggcctcagtctttccaccctgaaaagggcaataataacacccacctcacaggatcaaatggccaatgtgtttaagtacctcttgcaaattacacggtcctaaactattgtcatcagaagcaagtgaaaaatctccagctgctggattctctacggaaatattttgacccccagccaagttactttctgccaagctgcaggagctgatgaaataaattcctgttttaatatcagccttgtttaatactagagacaattaggagattaaatctgcaacaaaaagaaaaatagataatatatcaccctgg

SEQ ID NO: 214541 - DNA, 475 bp, Homo sapiens
tgttatttgttgcctgtctctctgactgcagaatatccaccctatagaggggagggactcggtttcatttactgttctatccctagcacctaggacagttccttgcacatggtaagtgccgggtaaatacctgctaagtgaataaaagaaactctctgagaaattctcctctagctggtagggtgctagagaactttgcttcctcattgctttcatgtactgccggcattgtctttctttctttctttcaaatagagatggggcccaagcgctgcggctcacacctgtaatcccagcactttgggaggccaaggctggcagatcacctgaagtcaggagttcaagaccagcctggtcaacatggtgaaacccctgtctctaataaaaatacaaaaattagctgggtgtgttggcaggcgcctgtaatcccagctacttgggaggctgaggcaggagaatcgcttgaacctgggag

SEQ ID NO: 214542 - DNA, 114 bp, Homo sapiens
cttgggaggctgaggtgggaggattgccaggagcctaggaggcagacattgcagtgagctgagctctcgccactgcactccaggctgggagtggacaaagggagaccttgtctc

SEQ ID NO: 214543 - DNA, 359 bp, Homo sapiens
caagtgccgcagtacttgggcccacgcttcgcagcgtggaatcagcggcggggcgcggcggcacgaggaagctgtgcaaagccgaaggggcagcctcagaccaggaaccttacccgtctggcgggtcttatggccgagtcaccgtggcggcgcggcagctcgggcccggttcttccgggcgggccggggtggtcacctctgcaaagcagggtttctgggccgtgatcgagtcttgctcacgggcatgtcgggaaacgcctgctgcgctccctgcctgaaaatccactcttgaaaatgcactcccttaggttaaaacgctgcctttcctaaggaccttctttaaaagtaaatcctaacat

SEQ ID NO: 214544 - DNA, 407 bp, Homo sapiens
ggctagtgaggaactcaggggccctgagcgcgatttccagctgaaccagaaagctttgtcgccatcttcccagtttccaagtgcagaaatcttgaggcacattcggtagctcctttttgatcctgtccctcacccaccttcacacacacacacgcagtccatgaggaagttcatttggcctctcagccttgctttgtccatctgagaacaccaccagacctcgaggtcttttcccggccttgcagccctgcaggtgctggcaggcttgctctagcatatctatctttcggaagggacagagggagccaccctgcctctactaggcccttgcataggcgtgtcctcccacagttcttgccacctagagctcccaaccctgcacctcactccaggcatcgattacattg

SEQ ID NO: 214545 - DNA, 531 bp, Homo sapiens
cagtggtgcctctacccccaaagcctggtaatttttgcatctgagtttaagtgactggttgcatgcattttgctgtgagtgctacttatgccatgagggaagccagatatagctgcattcttgatgtctgtctgatatcagtcttgcagccagaaatttttgagctctctttggtaaaggagagaaaatccacaaagcatgcttcctccacctctgtttccctacttcagttttttccctccccagctccccaaaccatactcattcatggaaattatttttctgctgtcactggaaaataatacaactctgatacttcaggcatgagatgactctgattgtttttcagtgttcttgccttagacaaaattaaatcaccggcagtgtgtcgcatccagccaacatcaaagctcttgtctgggttctatgagagccttgcaagtttctgaatcagtcagaaattatcgcggagctgagactaatcaatgaggaagttccattttatttttcaaatataatttctcttgtagc

SEQ ID NO: 214546 - DNA, 698 bp, Homo sapiens
accgttcgacatgaggtttgggatggggacaaggattcacaccatatcagtgtcttatgcatagtaaaacattttatgaatgattgtctctatgtgctgtagctgtatatcctccagtatggtagccacaggccacttgtggctaaatttaagtgaaatgaaagattcagttccttgggcacactagccacgttttccaggcctgacagccatgtgctgctgatggctgccttattggaccacacagatagtgaaaggtttctgtcacggctgagaggttctgttggccagtgcttgttcagctaaggttaaaatattaaccacctacacttcctttgtatctaaacccatttccttggttcttttccaatacttatttcctgggtagccctttgtgttacagggaaattgtgaattttcatattaaaggcaactcacctgggatatggcttgctgaaagggaagaggcagacgctgtagtatatagtcagtgctcaatgaagggaaaggggcttcacttccccaacagagtggccctccaaaagggtctcactttgtagcccaggctggtctcaaactcctaggctcaaatggtcctccaatcttggcctcccaaagtgctgggactacaggcgtttgccaccacatccagctgctgctccatctttaaagttgtcttgcccacactttgtgtgtgt

SEQ ID NO: 214547 - DNA, 100 bp, Homo sapiens
ctcttctttctttttccttcctccctccctgtctccctccctctctgcctccctccctccctccctcttccttccttccttccttccttcctcccttctt

SEQ ID NO: 214548 - DNA, 406 bp, Homo sapiens
agctttgatatgcaaatgctggctattagaaattgtccacccaatatggcaactcctgccttcttcttcctgtcccggtgtgtgccacgtgtcatggctgcctccggataacaccatgtgttcagaacatcatggcaacctgcatttgcatattaaagggctaaggtgggtggaccaggtgttttgcaggctacataaatgacacacctggtcaaaccaatcccctgggccctatgcaaaccagacactgccccctgcagcatcccaatataagcaaccacttttctgccacacaccaagtttctgtttgttctaatcccccctccctctgtctctgtatgggggagctgttttcttcttccttccttcttgcctaataaactctccactccttaaaaccattaca

SEQ ID NO: 214549 - DNA, 436 bp, Homo sapiens
cctggcagcccaacttgagacacaaaactcctgaaaagaaaagtaaccaaaccagaatttgcactagggaagtttgaaagaagttgatccattttgagaagagagttacagaaaacaaataaggaacccattgacgtcctagtaggctgagctcgacgtcacttcttccacagagtatacacgtcaagaacttaaaaagcattaacttctgccagatatgaaattattgtctttctggtggagaaaaggagccacagagaggttctaggtaaaacatggactttttttttttttaatgtggattatctgctagaataaaatttagtagatgtctataaattttctacattactagaatgctgttcaatcagatattgttcaaaataaatcatactgctgctgagaaatatttttctcaggagacaacctaaccaaa

SEQ ID NO: 214550 - DNA, 329 bp, Homo sapiens
aaatgggggagagtgattccagcattatttttatccctaccactaatgcttggctcaattcagctgcatgacgtggtggagaaagagctaaattatgagaaaaaagatagaaaggacaattatattttcttccccttcaatatttgtactgggccttacagtaacctgaaattcctgattcttagtcaacctgaaatttacaagtaagttgggtcattaatcttaaccatgatgctcaccaatatggatgcaccttgaggaaatcctagcattttgtgcttagagttggactctgaagaaaatagccattccctcgtgctgcgacagtt

SEQ ID NO: 214551 - DNA, 402 bp, Homo sapiens
agtgacgcttggaagatgttagtttctctgcccttccctctgcaagtgtcacctccccttgatcctttctgctctgtactcatttgggatacttggaaggactgtggtcagagcactgtgctgcctagttttagctttgctgatgtggtcaggaaaaatcaacattccacatagggtatggccagaaaagaaacatcccattgccactaaatccaaagtgatggcatggtgctccttgaataatctttccgtagatatccaggatggatggaagaccaggcagggcaacttggctgtcttcggaaaatttctggtttaattggtttttcctcagtgttaaataacagagcctgcttaaaggtccagtgaggactaatggctttacttccattgaacggcttc

SEQ ID NO: 214552 - DNA, 827 bp, Homo sapiens
taagggaatgaggaaggcttgggaatcgagggagtgggggtgttgtgcagaatccattccttattcaatgtctgcaccgggtgttatgtaattttagtggcacatgggtgcaaagcctagactgggcttctcccctcctttgtttatataacttttgggtgagttttgcaaggttgtctcttttttttcctcctccctaacctgatggaggttggtgctttggaaaaagcaaagcgacctgggctagtaatcttttggagaggtgtcatcattgtctcctttctggtcattatgtaggcatgtatgactttgtatgtgtactgttagagctcaaggaagacattaaggatacacagtttgttgactgcactgagcggttatttttaacatttctgcgttaccaatatcgaatttcaaacttccatttcaaaggacttaaaatttacacctggttgtgtgccttgcttgtctgaacagaatgcttgcataaataatgagattgttgcttgggcgttgagtagcagaaaatttctatccaaccaccaaagactcagaaaccattgagaaccctaataataatttaaaaagccatacccaatgttatgtgtgtgtatacttacatattcacattcaaatattttcagtagtattttccatctgttatcaggggggccacaaccagaagcttgttggccagcattggagttttaggcttccaggctacctctagcacactggtgaagtgttaagaggcgtggcagatttgaatcctagttgctgcattgttatgcaaaatgagacacactttttctttgaggaatctaatt

SEQ ID NO: 214553 - DNA, 509 bp, Homo sapiens
tcaagcacacccacctttgcttttagttaatcagtcacatacttgacacagagcttgggcctggaaacccaaagaagtgcctgcctcagtgtggagagtctggatggacactgctcagccaactgaccagaattgacggatgaaaggcaagaagttgctctgctggagggtgactcctggaagggcctgcctagatagaggacatccaggagcaggtcctttttgtctaggggacaggagacaaacctggaagttaaaatgatttcctatctcaacacacggtgcagagaaagcagatttggggcatccagtgcccactccttctgtattgcagagaactgtccatcagactccacagcagcctttagctttggagggcctgggccttactgggtgtcagcagcctgttgtctatctgtctatcctgctatctatcatgtatcactctctcatctcctgtgtttccatccaggtctgcacgaataccaatactctatgctttgtacttt

SEQ ID NO: 214554 - DNA, 1104 bp, Homo sapiens
ttaaacgatgaacgtttctatgggcctcctaagtcatcttatgcctaaaaataaatttatcagcactagatattagatttgaaataagtcattgttcattattgatggttgtcagtttctccttcctttttgggcatgcataaagacacacttggtgctgattccatgtgatttatggaatgtcattttcacaatgatctttctagaatttgtgtgtaaggttgtgatatccatgtacagctgtaactatatatacttgtctgttagcattcagtggaccattatcattactatcatcacattacctgggcttcaactgggcccaagtactctatatactacctgtaataggtttttccttgaaatatccttatctttcactctacagctaaactgataacaaggtcagtttctttatgtcattttattcccatacctaaaattgcatctatttgtgagctttctgcctttttgtaacgctcagtgcaccaaaagcgtctgtttttagtgcagtcacataatatataagtgtgggatacccttctgcagcttcagtgagacaaatcactttttaaaaaacattccattttattggcatcactagatgtttttaggaccctgtccttttcacttttctgtaggctttcttttttttttaaatggaagatgattattttgtttgttcttgatttcctgttattgaaaacagcatcttccttcttgcaatggccactaatagcacacaatgcgttttctttgattgtagcagaaaatgcaaatgataattgtatgttgggctcgatgaggccttgaacatagctgagtcctaatcagatgtatatactctgatgattacaaataggtacatgttgggtttctgtgatgtttcaaaaatacaattatataattatgatgtaaactctttaagaattcaattataaaagcaataatcaggtaacctctatttggagctgctacatccaatattgtgactgaaaattaactaaagagagataatttttcaaatgatgtataatttgcaatattttcccttgcaactttagcaaatacacatattccaagtaaaactttatttagtcccat

SEQ ID NO: 214555 - DNA, 515 bp, Homo sapiens
atcagtctgaactcttggagttgtatgacattgctggccactatattataattatcatcatcattatccttgttattactatcaatttttaaaaaggccatggcaccccagaaggtacagatcctctgaatgctaagattgtgtttttacagttgtctagtataggacaggcttctcatgtggaaaagaggattcagtgtggtatcaaaaaattgattggaaggcttcctctcttactctctcatacatagacattcacaaacaccatctttgtttagtaaactgtggagactcttccaaaagaaaatagacactaatttttggagaatccattcagctttcacaggcctctaaatagcacaggtgttagaattactaaggataacgattacattaaccaggagcaaaactaaaaatacatcgttctactttcatacttggaaatatcggccttttgatattacaaaaaggccaattttgccaggtccttcgaaatttcaaagaaagattcagta

SEQ ID NO: 214556 - DNA, 197 bp, Homo sapiens
gacagagcgagactccatctcaaaacaaacaaacaaaaaaaacccacatcttttgattcttaaaggacagtgactatttgcacaactcagtatggaaaataaggttttgcccagcgtgccattttttatcacgtgggtgcctttacactcctttttctacgatgctttctccaagttcccttggaatattctctcat

SEQ ID NO: 214557 - DNA, 168 bp, Homo sapiens
ctttctctcactccttctttccctcccttctttctctctctcctttctttctctttctttctctctctctttctcactccttccttccctcccttctttctctctctcttctttctctttctctctttctctctccttccttccctccctcccttctttctctctctc

SEQ ID NO: 214558 - DNA, 897 bp, Homo sapiens
tgcagagaacaagtcctttctagcagtggctcaggactactgttttgaaaagtctaattactttgcttctctgaccttgattgctacctttaaaagaagctttaaagcctgtttggtctcctaaacttgccaagccctgctgcctgggtctagtcagtaatcttgccctgcacagacctcttactgtctgaccacaggccttagctaaccccatttgtgtcacaccccactgctatgcctcctttggaaaggcctatctaagaagtagctccttatataaatggaaggacactaaagactcctgatggagtaaacacagaggagataaggaatcaagggtggagggattggtcttggacatggtaaatgtagagatagagactatctagtcagaaaggttaaacttgatagtcttcattctacaaagtaggatgcaaattcttttcaaagaggaactgtgaattgtatagtatgtgaattatctttcaataaagctatttttaaacagcagagaatgtaagagatggactagaattaggaaagtattgggtttaaaagtcacattcatattacgatggcaattcctggttatggatctctttaatgatgtttctatacagagtgaatgtagtagtctgtatgtttctctcttcctttttaattgaaatattagattgctccaaaggtttccatacaacctgttcaactttctagcagtcattccagaaagggaacaaatgaagtgtaaccatatatttactaatcaacaaatgcaaacatgatggctatattaaatattcaaatgcataaataatatttatattatatgtgttaggctgtacataacagactaggcaactagcagtggcttaaataaaaaatatttattattaaata

SEQ ID NO: 214559 - DNA, 412 bp, Homo sapiens
tggctttgtaattttatatttctttctaggctgatacattgagtttatttagttagaagtgtatttccacagactgattatctgtttttttaaatgcttcttcacagttgtataccacttaaggtatgtagctttgtagccaatctaaattggaattgggtttttgttattgtcgtttggtacattggtcactttataaatgtttaactttttgttttgagttaattatagatttgcatgcagttttaagaaataatagagagaggccgggtgtggtggcttatgcctgtgattccagttacttgggaggctgaggcaggaggattgcttgaagcccagagttcaaagatgtagtgagctgtgatggtgccacagcactccagcctgggtgacagtgagaccccagctctac

SEQ ID NO: 214560 - DNA, 523 bp, Homo sapiens
aaggctttgctcttgaggagccagctggggaaaccactggtaggcatgcctgggagccaggctttgtcctagcgcaggatggggggtcatagagggctgaggactgcgtgaggatgagcagtcaggaagtagagccatgtgcacctgggacaatcaggatcttgccacagcaggagggtcagagaagcaagtcccaggtagatgtggggtgagggaatgggatggatatcaaacaagggtgctgctgactttgaccagcctgctccagaaacctcactaccctcctgtcgcctctgaagtccaggcacctcagtccaccactgaagagtttttcaggatctggcctctgcctcctctcccatgtgtttgttctccacaacttttgcccctcaattctagctcctagccaagtggctgttcctcacttcagattcagatgtccatcctcagctccaagtttccacagaggtggctcggccaggctgctgtgctcagtgttagctctcagcacaggtggtgagcc

SEQ ID NO: 214561 - DNA, 369 bp, Homo sapiens
tcatgcaaagagagcctgacgaggcagaggaaagatcatggcaggacttctgtcttggtggacagatgtaggatgtggataccaaagaattgagtagatctgtcacaaagcaatggaagatgacatttgatatgggtgggccaactgcgaataaaaagaagatgttcacttgggagatagaaaagagaagttctagtcatgacttttccaatttacttgctatataaccttgaataagtaccctctctgaattcctgtctccttacctgtggaatgaagacaaaaattcctaaggctctagcaagattgtcaaacaaaggcctatatgtgtgagttgcaaataaaaggaaagcaccttctgaaaaaaaa

SEQ ID NO: 214562 - DNA, 360 bp, Homo sapiens
tgagatcatttaaactccaaattttaaataagaaccacttattgatcatgtatgttctttttgtttattcaacaaatatttactgggcacctcctatgtgccaaacactgtgctaagtactttacatgcattgtcctgtttaataccattaatccccaagacagatactcccctcattttacagctgcaattgcacagccagcaggtggcagaaccaagatttaaactcatatttctctgatttcaaagcccatgtctttaaccagtaaacttaaatggctttcctaacacttgaatacttagtcttttaaattttagcatattcttagtctgggcaacatggtgagaccctgtctctac

SEQ ID NO: 214563 - DNA, 372 bp, Homo sapiens
  misc_feature (110)..(110): n is a, c, g, or t
  misc_feature (113)..(113): n is a, c, g, or t
  misc_feature (117)..(118): n is a, c, g, or t
  misc_feature (123)..(123): n is a, c, g, or t
  misc_feature (125)..(125): n is a, c, g, or t
  misc_feature (127)..(128): n is a, c, g, or t
  misc_feature (130)..(130): n is a, c, g, or t
  misc_feature (152)..(152): n is a, c, g, or t
  misc_feature (159)..(160): n is a, c, g, or t
  misc_feature (162)..(162): n is a, c, g, or t
  misc_feature (165)..(165): n is a, c, g, or t
  misc_feature (172)..(172): n is a, c, g, or t
  misc_feature (178)..(178): n is a, c, g, or t
  misc_feature (180)..(180): n is a, c, g, or t
tctattcggaatcagacatgaggcaaactcaatgttacacccatagagacaaagtatgataaccgcccatctgctaggtcaattattacttgcggcgtaactcagcaaanttngcgnntatgnantnntntgcctcagactcatggatatcnaccccgnntncgntatcttnctcatngngtatctctgtatgaaagaagagccctagaaaacaatgtgtaacgtccctccaagatggggtgttctggaacaatccctcagacaacgaaggcaattgttgatgggcaacattgggaagaccccagagatggaatgtcctaggcctttccatgttctctttctcattctccctccattgacttgataggtggc

SEQ ID NO: 214564 - DNA, 293 bp, Homo sapiens
taattatggatagtgtggtatatgagcagaaattccccttaaccagtgttcttgcccaggctagcccaaatgagcccaggctagcctagattcccaagtgtgtatcttgagaacgaggaagagccctagaaaacaatgtgtaacgtccctccaagatggggtgttctggaacaatccctcagacaacgaaggcaattgttgatgggcaacattgggaagaccccagagatggaatgtcctaggcctttccatgttctctttctcattctccctccattgacttgataggtggc

SEQ ID NO: 214565 - DNA, 555 bp, Homo sapiens
gccctgtcgcccaggctggagtgcagtgatgtgatcatggcgtactgtagccctgaattcctgggttcaagcgaccctactacctcagcttcccaagtagctgggactacaggcaagcaccatcatgcctggctaatttttaaatttttttgtagagatagggtctccctgtgttgctcaggctggctttgaaattctggcctcaggtgatccttcactttggcctcccaaagtgttaggattggaagcatgagacactgtacccggccttctttatatgatcctcaaatgagtttttggggagcaaaagtgtgggagggtagggaagagaaaggttattttcttctatttcaagtttgtggttaaatggagacactagaagaggtgtcagtagttcaactcgaaaatggtataagtgccagttattgggttaatgtgtttataatgtcctcttacagtaaaattatgtgtagaatatacatatgtaactaacctgcacattgtgcacatgtaccctaaaacttaaagtataataataaaaaaataaaaaataaa

SEQ ID NO: 214566 - DNA, 714 bp, Homo sapiens
cgtggtgggttcacgcctgtaatcccagcactttgggaggccgaggcaggcagatcacctgaggtcaggagtttgagaccagcctgaccaggagaaaccctgtctctactaaaaatacaaaattagccgggcgtggtggtacatgcctataatcccagctactcaggaggctgaggcaggaaaaccgcttgaatccaggaggtggaggttgaggtgagccgagatcacgccactgtactccagcctgggcaacaagagcgaaactctgtctcaaaataaataaataaataaaaatttaaaaaattgaaaaagtgggaaaattatttaaagttctaatttatttctgtacatttccaagctcctctcactgccctacagcataaacaaagtcagaatctcagtaatttataagaagaaaaataatagtggacaatatctgaaaaaatggactgaatgagaatcattttgaagcaaaggtcttggacaaactgcaaaggtttggcagatgcctagcaaattagtgaataaccaccatgacctctccaggtgtaactaaatcctggaagtgtataaacatagaaacagtcctttatgacaaaaaaagatgagttacttttgaaaagtacagaaataaagctgtcagcttcacagtgccatatggatgctcttttccagattaaccaaattacttaacatcagaccaaaattaaacca

SEQ ID NO: 214567 - DNA, 253 bp, Homo sapiens
ctgaatctataacaccatcacacaatgtctgcaaactggtgctcaaaaataaaagaagccaaacttagagattaagtgaagcatgctgcactttgaacacaatgagcaaaacagacttcaaaacaagtactttcaaggagtgcttgtacaagtctaatcattttaaatccacatcaacatctttctaaaggcaacacaatcagcacttgactattttcctcttcctaaaaaaacaaaaaattaactataatta

SEQ ID NO: 214568 - DNA, 364 bp, Homo sapiens
agcccagggggcatgaacaaaactcaagcagaagcactgctgtccacagaggtttctggctggcaaagcaacaccctaaggatcctatgacaataggtatatatgtataggcagaaacatagtatatattggttttagtactatccatggtttcaggcagccaccaggggcttggaatgtgtccctgtagataagggaggaggattttaatagctgaaaacttctccaatcttggggaagataggggcatttgggtacatgaggcttaaatgtgcccaaataggtttgacttaaagaggacttcactgagacacattataatcaaattgtcaaacatcaaagataattttgaaagcagtaagag

SEQ ID NO: 214569 - DNA, 773 bp, Homo sapiens
ggtctcaaactcttgacctcaagttctccacccgccttggcctcccaaagtgctgggattactagcatgaaccactgcgcccagcctcgtatctgtgtcctttctttctgggaccggaagaggtttcaggttcccagtggaaattccctgcccctcaccttgaatcagcctttggccaaagagccttggagaatgatatttaatatttaaaaaccaggaactgagaactgagtgtgctcattgctatggggatatcattgctcctgggctccttgggtgcagagacccagggaaatagatgtttctgtgtatgctttcacactgtccctccctctcaagcccaactccacaggatgcttcctcaccttcctcttgccatctagtatcacgcttctgtagtgagaatctgctgcctacagcaacaacatattgacacatccattctcttctataggacacaaaaaaaggtttcagaaatttttacgttggtgctgccacatccacagcacgtcctaatcctacgggaaacaatccttgcttatcagaggtgcatatctaaattcaatagcttaccaatatcttcttgggagtaggccaaaaggaaacagaaaacccacattaaaaaaaaagtttcttttcgctaaacgttttcctgaagccgaatctgaagtggggaggacgtcagtcgtcctcgtcattctcgttgaagtcatcgtcctcctcgtcgtcctccccgacgtaggacaccggagtctccagcctggccgcgtgta

SEQ ID NO: 214570 - DNA, 857 bp, Homo sapiens
tatacgtgtggaacagaataatcacaccatctcactgtatcatagcacagattactcattggtaacagagagaagggagcttcaacagggagccatctggtgaatacaccttctccatccttggcctcccaaagtgctgggattactagcatgaaccactgcgcccagcctcgtatctgtgtcctttctttctgggaccggaagaggtttcaggttcccagtggaaattccctgcccctcaccttgaatcagcctttggccaaagagccttggagaatgatatttaatatttaaaaaccaggaactgagaactgagtgtgctcattgctatggggatatcattgctcctgggctccttgggtgcagagacccagggaaatagatgtttctgtgtatgctttcacactgtccctccctctcaagcccaactccacaggatgcttcctcaccttcctcttgccatctagtatcacgcttctgtagtgagaatctgctgcctacagcaacaacatattgacacatccattctcttctataggacacaaaaaaaggtttcagaaatttttacgttggtgctgccacatccacagcacgtcctaatcctacgggaaacaatccttgcttatcagaggtgcatatctaaattcaatagcttaccaatatcttcttgggagtaggccaaaaggaaacagaaaacccacattaaaaaaaaagtttcttttcgctaaacgttttcctgaagccgaatctgaagtggggaggacgtcagtcgtcctcgtcattctcgttgaagtcatcgtcctcctcgtcgtcctccccgacgtaggacaccggagtctccagcctggccgcgtgta

SEQ ID NO: 214571 - DNA, 1009 bp, Homo sapiens
tgaaggcatgcagaaagcagtctggagcccagaagggacacaccagcacagtctggtaggctacagcagcaagtctctaaagaaaggctgagaacacccagaacaggagagttcaggtccaggatggccagcctgttccggtcctatctgccagcaatctggctgctgctgagccaactccttagagaaagcctagcagcagagctgaggggatgtggtccccgatttggaaaacacttgctgtcatattgccccatgcctgagaagacattcaccaccaccccaggagggtggctgctggaatctggacgtcccaaagaaatggtgtcaacctccaacaacaaagatggacaagccttaggtacgacatcagaattcattcctaatttgtcaccagagctgaagaaaccactgtctgaagggcagccatcattgaagaaaataatactttcccgcaaaaagagaagtggacgtcacagatttgatccattctgttgtgaagtaatttgtgacgatggaacttcagttaaattatgtacatagtagagtaatcatggactggacatctcatccattctcatatgtattctcaatgacaaattcactgatgcccaattaaatgattgctgtttattagaacatgagaatcattattagtattcacatgtttcacttgctctgtactaatatagtctctccaaatggaggaagttagatagatggaataagttctagtagttgatagtacaatggggaaattatacttaacaataattcactgtatattccaaaatagctagaagagaattgtaatgattccaacacaaaaaagatgaatgttagtttggatgcatatcccaattaccctgatttgatcattacacattatatacacgtatcaaaatatcacatgtactacaaaaatgtgtataactgtaatatgtgaactacaaacttactggaaataaatttttaaagttttacacacataaacacatacgttcacaca

SEQ ID NO: 214572 - DNA, 746 bp, Homo sapiens
cttatcccacatttaactttcctatcaaactcccaaaagacacaaacatacctgagaaatggtgtcaacctccaacaacaaagatggacaagccttaggtacgacatcagaattcattcctaatttgtcaccagagctgaagaaaccactgtctgaagggcagccatcattgaagaaaataatactttcccgcaaaaagagaagtggacgtcacagatttgatccattctgttgtgaagtaatttgtgacgatggaacttcagttaaattatgtacatagtagagtaatcatggactggacatctcatccattctcatatgtattctcaatgacaaattcactgatgcccaattaaatgattgctgtttattagaacatgagaatcattattagtattcacatgtttcacttgctctgtactaatatagtctctccaaatggaggaagttagatagatggaataagttctagtagttgatagtacaatggggaaattatacttaacaataattcactgtatattccaaaatagctagaagagaattgtaatgattccaacacaaaaaagatgaatgttagtttggatgcatatcccaattaccctgatttgatcattacacattatatacacgtatcaaaatatcacatgtactacaaaaatgtgtataactgtaatatgtgaactacaaacttactggaaataaatttttaaagttttacacacataaacacatacgttcacaca

SEQ ID NO: 214573 - DNA, 434 bp, Homo sapiens
  misc_feature (352)..(352): n is a, c, g, or t
  misc_feature (421)..(421): n is a, c, g, or t
  misc_feature (426)..(426): n is a, c, g, or t
tgaaggcatgcagaaagcagtctggagcccagaagggacacaccagcacagtctggtaggctacagcagcaagtctctaaagaaaggctgagaacacccagaacaggagagttcaggtccaggatggccagcctgttccggtcctatctgccagcaatctggctgctgctgagccaactccttagagaaagcctagcagcagagctgaggggatgtggtccccgatttggaaaacacttgctgtcatattgccccatgcctgagaagacattcaccaccaccccaggagggtggctgctggaatctggacgtcccaaagggttctcaccaggaaatcttcatggggaagttngggggtaggagggaggaagcttgcagggaaaaacataaggaacagccttcacctttgggagggtttttnggtgncttttccc

SEQ ID NO: 214574 - DNA, 329 bp, Homo sapiens
agctggggctactgccaccacattcatctaattttctatttttgggggagacagagtcttgctatgttgcccgggctgttcttgaactcctggcctcaagtgatcctcctgtctcagcctcccaatgtgctgggattacaggtgtgagccaccacacctgatcctcttctgctgctggttaatagttacacgcttttcctaatgctaatcactgacaactactgattaatccacacattttatgtgtgcctacttttagaaaacccagccaaacatcataccttcctaggtgcaagaatcctatttccaacttctaaaattccctatgg

SEQ ID NO: 214575 - DNA, 480 bp, Homo sapiens
cgaagaagctgaaagttttgctccaaatgccattgtttatccatttttgaccacctgatctgttccattagcttcaaaagatgccttttcatttgtttcgttttgccttcgatggccttccgcctgccgcaagcaaccctctagaatatgggcctgtgcttggcttttctacacaaacatgagcagccttcaattactgggggacattcatttcctccttccaactagagagtgaggagtgtcccggggagagtgggtccttgagctcctctgggccttgcttgggacttggtccaggaggttatgggaagaaactggtttagaagctgacctcatgggttcgctattcttatgtaacacttaggaagagcagagacccacgcgattcagtcccagagcaatgttgcggtcaagagaacacagtccagctaccaacagttatttcaaaataattcaagctctttgtttatatttctgaaa

SEQ ID NO: 214576 - DNA, 638 bp, Homo sapiens
tttaactgtacatagcacatatgaaagcacttttcacagctattgttcatagaacatgcttataagccagaaccataaaaccttaattataatacatcaactccatacttccaaagaacataccttcccacaggaatatcgaccagtacttttcatcgtacattcagtcgttcatcgtacatagcacattacagtcaaataaatcctcgtcaccacagatatccccccccagatagtggtttctcgctcaccatcctccgtgaaatcaatatcctgcacaagagtgctactctcctcactccgggcccaaacacttgggggtagctcttctagtcagccagaaagtccttcagcctcgccaggagcagtggctcatgtttgtaatcccagcactttgggaggccaaggcaggcggatcacttgaggtcaagagtttgagaccagcctgggcaacatggtgaaaccctgtctctaccaaaaatacaaaaattagccgggtgtggtggtgcatgccggtaatcccagctactcggaggctgaggcaggagagtcgcttgaacctaggagacagaggctgcagtgaaccaagatcgcatcactgcactccagcctgggcgacagagcaagactccgtgtca

SEQ ID NO: 214577 - DNA, 547 bp, Homo sapiens
cagactaatttactagagaggctcacagagctcaaggaaacactgatgtttactagtttattataaaggatattacaaaggatacaaataaagagatgcatagggcaaggaaaggggggagggtcgcagatccccccccaccctccccaacccaccatcctccaagaacatccttgtgttcagctatccggaagctccctgaacactgtccttttgggtttttatggaggcttcattactaggcatgattgattaaattattggccatgagtgaccagcttcacagcccccctccccttcgtggaggttaggaggtagggctcagatttccagccctctaatcttgccttggtctttctggtgaccagcccccatcctgaagctgcctaggggctgccaaccattgatgataactcattagtatacaaaaagacatcaccttgtagagactcttaagtattttaggagttgtaagccagaaaatgaggtcaaagaccaaatatatatttcacagtatcactacatattttaagacccaggaaaagtt

SEQ ID NO: 214578 - DNA, 188 bp, Homo sapiens
tccaagacataacctgatggccgtgcaagatttcttaatcgactgtggaccgtgagagtctgcatctcattttaattaagatgggaaaagaaagaacaaaagagcaactcccaggttatagagaaactggattttagtgtaatattgaagtgtagcattgctaataataacaaacctttcccctgcca

SEQ ID NO: 214579 - DNA, 835 bp, Homo sapiens
taaacagtaactccccattctcccttcccctagtgcctagtaaccaccattctattttctgtatctgtgagtttgagtgctctaagtacctcatgtaagtggaatcatacagtgtttattctttctcgtctggtttatttcacttagcctagtatctttaaaattcgttcatgttgtagcatgcatcagaactcctttgaaaggctgaatgatattccactgtatgtatataccatattttatttatccatcaatagacatttgggttgtttccaccttttggctattgtgaataatgctgctatgaacattggtgtacaaatatttgttcaagtccccggtatatacccagagtggaattgctggatcatgttctaattttatgcctaatttttttgaggggacaccatactgttctgcacagctgctatgccatcttacattcccaccaacaatgcagcatgttccagtttccccacagccttgccaacagttgttattttccgttttttgttttttgttttttttttgataatacccaccctaatgggtgtgaagtgatatttcattgtggttttgatttgcatttttctaatgattggtaatgttgagcatcttttcatatgcttattggccatctgtgtattttttttttttttttggacacatgtctattcaagtcttttgctcatgttttaattgggttgttgagttttctggttgttcaattttaggagttcttcatatgttctggatattaatctcttatcagacacatgttttgcaaatattttctcttgttctgtggttttatcttttaactttggtgtcttta

SEQ ID NO: 214580 - DNA, 643 bp, Homo sapiens
acgtttactgctccttaatagggtagaattctaattttaattattggtccaggaggaattttaaaagttatgggactggctttagagttttaaatttgctgaaaacagcagtcttagagttgtgttcaaaatgctttgaagtttgttaggcaatattttaaatattgaatttctgatttccaaacttcatgaatgtgtggaagaaaattggaagtttaaattgcattcaggtgaagatttagataattagaacgctagaagaagactatgagtgatttcatagtactcataaaaaagtgagttcaacttgcccacttcaaactgtagactaagatctgtttcctttgaaaactaaattttattttaggaaaaaatgccatagacagtgtcagattgaaggactaccacccctgggctcagtggctcacacctgtaattcctgcactttgggaggctgaggcaggtgaatcacttgaagtcaggagtttgagaccagcctggctaacatggtgaaatcctgtctctactaaaaatacaaaaattagctgggcatggtggcaaacgtctgtagtcccagctactcaggaggctgaggcaggagtatcacttgaacggggaggcagaggttgcagtgagctgagat

SEQ ID NO: 214581 - DNA, 386 bp, Homo sapiens
aactcaccacatcacatacatattcataagactatcagtgatttatcagcagaaaccttgtgggccagaaagacttggtatgatatagtaaaagtgctggggacaaaacaaaaacaaaaacaaaacaaaaaaaccgccagccataacataaataccataaccaacaacaatatccttcagaaatgaaggggaaacaaagacttttccaggaaaacaaaagctgcaggagtacatcaccattagacctgccttccacgaaatcctaaagggaactcttcatgttaaaataaaaggacacaagacagcaacatgaaagcatgtaaaagtatgaagctcactgataagggtaaatttatagataaataaaaatatggtaattctgtaat

SEQ ID NO: 214582 - DNA, 409 bp, Homo sapiens
aagatgaattttgtttgatgctaagaaggatgaatttaggggacagagggagtgtggaaacagactctaaagggattttgtggtaattcctaaaggatataaaaaggacagacatgaggctgggtgcggtggctcacgcctgtaattccagcactttgggaggccaaggcgggcggatcacttaaggtcaggagcccgagaccagcctggccagcatggtgaaacctcgtctctactaaaaatacaaaaattagctgggcatggtggcgggtgcctataatcccagctacttgggaggctgaggcaggagaattgcttgaacccagtaggcagaggttgtagtgagctgagatcgtgccactgcactccagcctgggcaacagagtgagacttggtctcaaataaaaac

SEQ ID NO: 214583 - DNA, 536 bp, Homo sapiens
ttctttttttttttttttttttttattgagacagagtcttgctctgtcacccaggctggggtgcagtgatgcaatttcagctcactgcaacctctgcctcccgggttcaagcatttctcctgcctcagcctcccaagtagctgggattacaggctcctgccaccatgcccggctaattttttgtatttttagtagacatagggtttcaccatgttggccaggctggtcttgaactcctgacttcaggtgatcctcccgcctcggcctcccaaagtgctgggattacaggcatgagccatcacttctctttccttaccttggagaatggtaggcagccagagaaaccctgtgagaaaccaaatcaacctgatgtttccaagctagtttttctacagcagcttacaccacttttcccttatcttcgcctgtaccttgtgtgttaaccacactctcaactacttactcttcactgaacacagcacattcttttatctctgcaggccttcacgcctgccatgtattgctcctttcattat

SEQ ID NO: 214584 - DNA, 486 bp, Homo sapiens
gtatctatagtcactccgcaagagaacctcatctcccaccttcccaagttagatgtggctgtcagatcaacagcgacattagattctcatcagaggacaaaccctatcgtgaactgtgcatgtgagggatctaggctgcacacacctcatgagaagctaactaatgcctgatgatctgaggtggaacagtttcaccccgaaaccatcccccatctccccttccccatctgtggaaaaaaactgtcttccacgaaactcgtccacggtgccaaaaaggtgggggaccgctggattagggggaatgtctgaagaaaaggaagtcctagtggtgaaaaaggcaccactgaaggcaaaaatgttcaattctttcctcaaaacaccaaagaaactaatataacttttcttgcagctattctggtaaacgaaaaacccttgtttttgaaataagatatatctgttctttaaaaatgcttattcttttataat

SEQ ID NO: 214585 - DNA, 510 bp, Homo sapiens
tggggaaaggacaccctattcagcacaaatggtgctggggaaactggcaagccaaatgtaagacaatgagaaactggatcctcagctgtcaccttatacaaaaatcaactcaagatggatcaaggacttcaatctaagacctgaaactgtaaaatttccagaagataacatcggaaaaaccctagtagacatgggcttagacaaagttttcatgaccaagaacccaaaagcaaatgcaacaaaaacaaagaggtggaacttaattaaactaaagagcttttgcatggcaaaagcaacagtcagcaaagtaacagacaactcacagagcgggagaaaatcttcacaatctatatatctgacaaagtactaatatccagaatctacaaggaactcaaacaaattagcaacaatccaaacaaaaagggggttaaggatatgaacagacaattctcaaaagaagatatacaaatggccaatgaacatatgaaaaaatgctcaacatcaccaatg

SEQ ID NO: 214586 - DNA, 414 bp, Homo sapiens
ctgaaacatggaacagatacagaaaaaaatgaattacagatttttttaaatgatggaaatactatttttgtgcaatttactgacatttaacattctgtaccatgactctgtctaccagagctgaagaccagtaggctggaagtttaacactgaaatattcatctcatttttctcacttttttttattaacagacatgatatcctcatgtattcagaactgcatccccagtaactacccaaggtgataaggaaaaaaatgcgtttgttttccagaaaagagaaacatgacccaaagggaatggaacagagaatcacatttaaataggaatataacatttctgagaggagagagagagaggtctattatcatgctgagtttcaataaaagtttttattttaatcacttgggtagaa

SEQ ID NO: 214587 - DNA, 639 bp, Homo sapiens
tttctgaatagctcttcgtagaaactaaagaccagttttgacttagagaagtaaagtttgcctgattttcaccatactcaccttagtgtaacaagctctcctctaagttttaagtcttgagatgggattttattgtgaatgcttgacccaagttccttttgttctcaggcccttattatttaaggcatggagaatatctgaatattttatctaagccagtgttgctgtattcctctccagctaagtaatttgaattgtcagcggttgtcagattatactagtttgttttgtctaatttttgacacctcaccccttaatgaagaatgactcagtaaacagaaaaataccaacaaagagagagagaggaaaaaaaaaaacaactaatacctaaaatctatttaactattccccaggtaatcatgagttttctgtacttacataccccttctctgcttatgtcccttgtttacagaagcacttcggttagtgactctcctgagaacaaggtatttctgtgcaatgacagagcttcctaacttgataaattcaggccagatatctcagactgcaataatgatgataataataataattgcagttaatatttaaacagtatttactatgtgccatgtactgtct

SEQ ID NO: 214588 - DNA, 599 bp, Homo sapiens
cacagtggcttatacctgtaatcccagcactttgggaggccgaggtgggcagatcatctgaggtcaggagtttgagaccagcctggccaacacggtgaaatgctgtctctactaaaaatacaaaaaaaaaaaaaattagccaggtgtggtggcaggtgcctgtaatcccagctaacttgggaggctgaggcaggagaatcacttgaactcgggaggcggaggttgcagtgagctgagatcgtgccattgcactccagcctgggcgataaaagcaagactcctcctcctcctcaaaaaaaaaaaaagcaggataattcaacatacaaaacccagtagcatttgtatacgctaacagcaaacaatctgaaaaagaagttgagtgcaatcccatttccaacagctacaaagaatgtaaaatacctaagaatcgatgtaaccaaagtgaaagatctatacaagaaaaactataaaactgatgaaataaattgaagaggatgcaaaaaaatggagagatatcccatgctatgtattggaaaaattaatattgttaaaataacaatattacccaaagcaatttatagatttggtgcaatctctgt

SEQ ID NO: 214589 - DNA, 569 bp, Homo sapiens
agctacagatttagtcattcatttcatgatacatgttcatcatataatgaaatcaagcaaaatatccatgtcatgaatcaaatcagactgactttgtcagaaaaaggtctggcttgaaaattcaggttgtgttactgaattttgaacatacaaaaatcattaaaaaccatcacagaacaccttttgtaaatgattagtgaaaacagtcaagatttaaaatttcccttatttaacttataacaagtcgcagtcatctgtggcaaaaacaagttatttaggaagcaagttaggttgatgaaaggcaagatattctttcaatataggtgtgtacgtatattgaactaaggtatttggcttttggcagaattaagaatcaaataaaattctttagtgttaataatattaacttttactaggattacgcttttcctatagaatgttatcctgctaaaaactaactggcagatatctagaacctaatttattttctgttaagaggtagtaaatatttcccatttcataagatgaagtagattcatatttgactgtatttggagtaaatatttcac

SEQ ID NO: 214590 - DNA, 470 bp, Homo sapiens
agatactcaggcaggcccctgactttgcgctccaaaggaattggactttatcttgaaaagtatgggggccatgcaggtatcttgaatgatataatcaggcaagtagaaaataacattgataagggcatgaacacagatatattctttatctcttgctggaaagtgagttaaataaatcagagatgtttaagttcattcgaaattctgatttttttcatatgagattttgttttgagggcaagatgacatccatttaggccttggggagaatgcaattacaggagtgttttttttttttttaatattcttatgaaacttttcaaacttatacaaaagtagtataataaactccatgtgtccatcatctagttctaacaagccatactttttttggtcatatttgtttcagcattttccccccgaattattgtaaagcaaatcataaacattatgacgtttattgctaaaga

SEQ ID NO: 214591 - DNA, 517 bp, Homo sapiens
actactcttctccttcatttctaatcatctgtccgctcaggtgtcatctctccagttttgaactagttgctatttgtcttcagagcactctaaccatgtttttttctctatctctcccgttacactgttaaagtctttattatcaagcttcattgtaattccagcctctagcccaatgtctggcccctactaaataataaatgggccagtcatggtggctcatacccataatcctagcaccttgggaggccaaggtgggtggattaattgagcccaggagttcgagaccagcctaggcaacacggtaaaaccttgtctctacaaaaaaatagaattatatatacccaaaataaaggaaattaaaaaaaaacaatagctgggtgtggtggtgcattcttgtagtcaagaggctgaggtaggacaatcacttgagcctggggaacttgaggcagtggtgagttgtgacggcaccactgcactctagcctgggagacagagctagaccttgtctccaaag

SEQ ID NO: 214592 - DNA, 590 bp, Homo sapiens
ggggggcctgccgactcagccccccctccatccttgaacgcagattatattcaacgtccatattgtatgagaaggtttaatgaaagcgcagctgagcgacatactaatttctgcaaggatcagtcttctcgccgagtctttaatccagctcagacagcagccaaattggcatccagagctcagggtagggctcagatgggtccaaaaaaagaaccaactgttaccagtgctgtgggagctttgctgcagaacagggtcctggtggccacgaatgaagtcccaaccaagtcaggattagctatggaccctgcttctggagcaaaactcagacaaggatttagtaaatcttctaaaaaagattaactcctagaagccagactgcctccctgaaacccatcagcctggatggttgcgtacccgagaatgccacctaaggggaaggaacggtagatgtgatgtctgtttttacacccttgattcttcttgaagcatcacttagaacaagtaaaacttgcttcagatttttatttactccctttgaagttttcaaaacaaaagcattaaacacatcaacctgtataaaaaaaaaa

SEQ ID NO: 214593 - DNA, 569 bp, Homo sapiens
tgacaactttgcctattattgtgagtttctatttaaaaaaaattcaaccatttactactgtggtagacagaaaaaatggccctttaaacatgttcatgtcctaatcactggaatctgtgttactttacatggcaaaagagactttgctgacgtgattaatgttaaggaccttgagatggggaggttaccctggatgatctgagtgggcccattataattataagtgtccttagaagtggaagagagagagggaagaggatcagagaaagagatggtgattagggaagcagggtcagagagatgtaacatagttgactttgaatatggaggaagaaggctaagccaaagaatttgtttggcttctagaattttgaaaagacaaggaaatatattctctcctggagcatccagaaaggtactcagccctggtgataactttgattttaatgcagtaagacctaagtctgagttctaacttgcgaaactataaaatgataaatttgtgttgttcaatgccaccaaatttctggtaatttgagagagcagcaatagaaaacccatacatatac

SEQ ID NO: 214594 - DNA, 1122 bp, Homo sapiens
aagattatcactttaaggtggataatgatgaaaatgagcaccagttatctttaagaacggtcagtttaggggctggtgcaaaggatgagttgcacattgttgaagcagaggcaatgaattacgaaggcagtccaattaaagtaacactggcaactttgaaaatgtctgtacagccaacggtttcccttgggggctttgaaataacaccaccagtggtcttaaggttgaagtgtggttcagggccagtgcatattagtggacagcacttagtagctgtggaggaagatgcagagtcagaagatgaagaggaggaggatgtgaaactcttaagtatatctggaaagcggtctgcccctggaggtggtagcaaggttccacagaaaaaagtaaaacttgctgctgatgaagatgatgacgatgatgatgaagaagatgatgatgaagatgatgatgatgatgattttgatgatgaggaagctgaagaaaaagtgccagtgaagcaatctatacgagatactccagccaaaatgcacaaagtcaatcagaatggaaaagactcaaacatcatcaacaccaagatcaaaaggacaagaatccttcaagaaacaggaaaaaaactcctaaaacaccaaaaggacctagttctgtagaagacattaaagcaaaaatgcaagcaagtatagaaaaaggtggttctcttcccaaagtggaagccaaattcatcaattatgtgaagaattgcttccggatgactgaccaagaggctattcaagatctctggcagtggaggaagtctctttaagaaaatagtttaaacaatttgttaaaaaattttccgtcttatttcatttctgtaacagttgatatctggctgtcctttttataatgcagagtgagaactttccctaccgtgtttgataaatgttgtccaggttctattgccaagaatgtgttgtccaaaatgcctgtttagtttttaaagatggaactccaccctttgcttggttttaagtatgtatggaatgttatgataggacatagtagtagcggtggtcagacatggaaatggtggggagacaaaaatatacatgtgaaataaaactcagtattttaataaagtaa

SEQ ID NO: 214595 - DNA, 358 bp, Homo sapiens
actgtgcggcgttttacagcaagaacactctatgaccatcacgcggtttaacgggccttgtttacatattaaaacctcttctgccgccgttctttgtcttttattgaagccattcttacagggataacaagaattttggccagaaatatagctataattaagcattatcgggtgtggcggttcaaagtgctgggaatacagatgtgagccactgcgcccggccaattgtagaacattttcattaccctcaaaagaaacctcataccaattaactgtcattttccattttcccattgcctattcctaggcaattgctaatctgttcttgcctctatagatttgcctcttctggacattt

SEQ ID NO: 214596 - DNA, 493 bp, Homo sapiens
atcagaggagatagcatatatttgctggtttatgctcaaatatatgcgggtattcaggggaacttaccattacagtagcttgtgggttcacagaagaggtacatctatagattaagaaaggcataactaatggtcagttcccattataagaatgtccaatggattaagagtttatgctgcttttcatattttagccattatagtcagtgaactacgagtaggaaggtagattttgctgttaatgttatggagttatttagtgttcccgagtatgctagttttcatgtgtggaatgaagtatctggttggaacctctgtattaattagttatacttatgttttgtaaaccatatgtcacattaaaaagtttttagtgtttttaaaatcagtttctttgtgttctttacataatgagttgttatattatttactgtaattacatgagtcttggtctgtcgcccaggctggagtgcagtggcatgatctcagctca

SEQ ID NO: 214597 - DNA, 2109 bp, Homo sapiens
agaaatgatagtaaaggttaacataaaaagactataaatatataattgctccccattctaacctcagcttctttaaaatatataaaattatataaggtaataattataagaatatgtcattggggtttgtaacactcatagatgtaatatatataacaatattaccattaaaaaggggaaagggaaggtagctatgtggcaataacatttctatatgttactagcattaagttagtatgaaattgaatcaaactgaatctgattataatgagttaaagtgtgtatggtaagccctaagaaataattaaaagtatatagggaaaaataattaaagatattaaaacactaccttaaaattttacttaatgtgaaagaaggcatagagaggaacagaagaacaaaaaccccatgatacacacacacaaaaatggtagacataaattcaactataccagtaataacattaaatgtgaactgattaaacaatccaatcaaaagagattgtcagactggataaaaaaagattaaattatatgatgtgtataagagacacagtttggaatcaaagatacaaatatattgagagtaaaaggatgaaaaaagatataccatacaaacagcaacaacaaaaatgctggtgtggttacagtaagatcaggcaaaataggcttcaaaatagaaaatgttactagaaatagagacatattttataatgcaaaatggtcaacccatcaggaaaatatattaattgtaaagatatgtgcacctaaaaatagagcacccaaatgtataaagtaaaaattgtcaagaatgaaggggaaaatagacagctcaacaataggagttgaagattgcaatataccactttctttctttttatttttttttttgagatggagttttcactcttgttgcccaggctggagtacaatggcatgatctcggctcaccgcaacctccacctcccgggttctagcaattctcctgcctcagcctcctgagtagctgggattacaggcatgtgccaccacgcccagctaatttttttgtatttttaatagagactgggtttcgccatgttggtcaggctggtctcgacctctcgaccttagatgatccacccacctcggcctcccaaagtgctaggattacaggtgtgagccaccactcccggcttttttattgatttatttttgagatggagtttcactcttattgcccaggctggagtgcaatggcacaatcttggctcaccacaacctctgcctcctgggttcaagcgattctcctgcctcagcctcctgagtagctgggattataggcatgcgccaccacgcctggctaattttgtatttttttagtagacacggggtttctccatgttgatcaggctggtcatgaactcctgacctcaggtgatctgcccaccttggcctcccgaagtgctgggattacaggcgtgagccaccacaccaggccatgcaatacaccactttcaaaaacaatcaagacaagtaggcagaagatgacaagaaacagaagatctgaacaacactaaaaaccaaccagacctaacagacgtatatagaacacccaactcaataataacagaatatacattcttctcaagtgcatatagagcagtctccagaatagattatatgccaggccaaaaacaaaccttaataaatttaaaagaatagaaataatacaaaatatattctctaagcacagtgtaattaaattaataattaataacaaacagaaagaaactggaaaactcacaaataagcagaaatttaacaacacactcctaaaaccaatgggtcaaaaagaaatcaaaagagaaattccaaaatatttgagattaatgaaaataaagacataacatagcaaaatttatggtaagcaatattaagaggagtttttttctggctgcaaatacctacattttcaaaaaagaaagatcttaaataaataacctaatcttctaccttaagacactggaaaaaaaaaaaagagcaacctaaacctaaagcaagccaaaggaaggaaacagtaaagattagagtgaacattaatgaaatagagaatagcaaagcaatagag

SEQ ID NO: 214598 - DNA, 422 bp, Homo sapiens
atctcctgagctcgtgacctgcctggctcggcctcccggggtgctgggattgcaggcgtgagccaccacgcccggccaaaagagggaatattaccattaagcttacagaaatttaacaacacactcctaaaaccaatgggtcaaaaagaaatcaaaagagaaattccaaaatatttgagattaatgaaaataaagacataacatagcaaaatttatggtaagcaatattaagaggagtttttttctggctgcaaatacctacattttcaaaaaagaaagatcttaaataaataacctaatcttctaccttaagacactggaaaaaaaaaaaagagcaacctaaacctaaagcaagccaaaggaaggaaacagtaaagattagagtgaacattaatgaaatagagaatagcaaagcaatagag

SEQ ID NO: 214599 - DNA, 501 bp, Homo sapiens
gtctgtttccttatgtgcaaagaataatagtgtgtatttcctgagcttgtggtaaagatgaaaggtatgaattcgtgtgaagcggttagaaccatggagtaagcgtgtgttggctgtcatcatcactgaggtaggtgctgtcatcaccctcattttacatgtggagaaactgatttctcagaggttgcctaacttgccgatgatggtatagcaataaatcagaacgaagagttgaaccctggctgtttgactctggtatcaggggtatttttctctgtaccttcttgctataccactaggctggtgttataaattcaagataagaaaaacaaaagccaggtatttttcccctggtaattattgtatagatatattatcaaggccagaagttaagtcctgtgttatttctctctgctgtcagctaagtatcatctgtaatgacggaagggaaaatgttacatagataataaaaaatggtggataataaaaataattgctgct

SEQ ID NO: 214600 - DNA, 223 bp, Homo sapiens
ctcagaaaataaaagagataaggcaaagaaaggaaacacaaaaaacaaaagtaaactgaaaaatagaagaagacgataaacaagtgaagttttggtcaaggcactgtccttatctttcactaggagtggtggaacatagaggcagtatctggatggagcggttccattgtgatgatttctggtggccaaaacaggcagctagtgcacgaaagccatcttggta

SEQ ID NO: 214601 - DNA, 466 bp, Homo sapiens
taatacttttagtgtgcatgcgtgtatttctaatcactgttattttttaagtatttgtaaaattagaaaaattgcttttatttcttgaaaagttgtcacatgcttagtttgaagttttactctccagatgtttttgagttgcataaaaatcttgcattcatcattcaaaaaatactaaatttcacatgagactcaaaaatttctgaatgatggaactcagacttccaatacattcatacatgctagagctgaaagtaagcagggaatttcagctctaaacacatttttgagacagttatctgtgagtgaaaacagggtattataacaaaagatgagtttcaatcttaactacagtgtttgttactgtgaatgctataataatacataagtaaaatgagtgtaaatgtaataaattattttatactgctgtatacatatgaaataaataaaactaggatacatatta

SEQ ID NO: 214602 - DNA, 480 bp, Homo sapiens
aaatgcagttagtgaaacaaagatgaagacatcagtcttctcccagagagtgaagaacaggagtgtgaagaggatggttcagagacagagactggtggccaggaggacctagaagatttacaggaggaagaggaagtgtcagatatgggtggtgacaatcctgaagtgggcaagaaagctagaaactcaagcaaatttgagctgaggaaaagcccagttttcagtgatgaggattctgaccttgactttgatatcagcaaattggaacagcagagcaaggtgcaaaacacaggacatggaaaaccaagagaaaagtccataatagacgagaaattcttccaactctctgaaatggaggcttatttagaaaacagagaaaaagaagaggaacgaaaagatgataatgatgatgagtcagttaaaagttccagaaatgtgaacaacaaagatttttttgatccagttgaaagtgatgaagac

SEQ ID NO: 214603 - DNA, 378 bp, Homo sapiens
tggtatatgctgtagtgtctagtgttcttgtagcacttttctcaatccatgtaatcagctttactattacattttagatcatttcattcttcaaacagttaaaaatcttttcactccaggaaagactgttttatttcttctgctgctcactgccatgctaagtaatatgcttattctgctgtttcatgatttgtccaaattttggcactattctttggcttcctactgttgaagatgagaaattagcaattttattttattttatttttattttttgagacaaggtcttgttgtgttgcccaggcaggagtgttgcagtgagctgagattatgccactgcactcgagcctgggcgacagagtgagactccgtctcaaa

SEQ ID NO: 214604 - DNA, 408 bp, Homo sapiens
agctgagatttctaagtgtgttgttagtgttagcacttgtagaaggatgttcattaggaagttcttgtttcagtttttcagagaaactccccattaagaaagatcattcaggaacatggctaccaagaaagaggaaagggaggagggaggctttcagctataagcattaaggggatattgtatcagtagtcttagttctaaagatttgcttctgagaattaattggagcaaatacatctcaagggaagaaaaaaaaagatttatagggcagggacagtagttgtccttgcaagtagaggacacttcattttgcagctgaatcaataccacaactaattatttctggttatcttttacgcatttgtaagacattgcttttgttcagtgtaataaaaaacccattgtttg

SEQ ID NO: 214605 - DNA, 544 bp, Homo sapiens
ttttaaattcccttaacatttgttttagagcttagaaattacattgaaggttatactaaacaggttctgattagtgtgactaaaagtgtgaagtttttaccctctttttaatgtgtaccttgaataagatttgggttgtcttaatttatattcaagtagacataaataggttgcttcacttctcaagatattaagtgaactgttttaaaagacttgcgattaacttctttggtagctaggtaatcacttagttgaacttctgggcaagtgtatgcagaaagctcaagtcaaggaacttgtgagccaccaatataggtactcaacttgctttgaactgtgagtgtttgatgtagacctaaaagtactgtttaatatctgaatgccttaattgtatatttcttactgatagttctgatttttgggttttgcctccttcagctgagtctagagatgtgaaactttagaattattatagcaaaaatagttgctcatggttttggagcacttaactttgtggaactatgcatattcctctcatttaaac

SEQ ID NO: 214606 - DNA, 530 bp, Homo sapiens
cttggagagagatgcacagaagttcaccattacatagtattttgtaataaatgtaagtcaccctaggagcatcaataatagtaaaatgaggtaagataattaggacttgattactctgagtatgcattacctttgtttttaataacatgtacttaattggaagtttgtgtaatttaattttttttattggctgcatttaacagctaactcacaaaattcctaaaaattaacagtagactttcaccagccagtatatgctggctccagcacacccctgagaatggttgattaatatggaatggccatgctgtgtaattttatgcaactatttaaaagaatgaattggagctctataggggatttggaggaatttttacaaagaattgtcaaataagaaagcaaaatatagaaccacagaatcatttttataacacaatgatcccccctcaataaaaccctctctatatgtgtctgtacacattaataaataattgcataagtatccagaatcaacttgatttgggggcata

SEQ ID NO: 214607 - DNA, 431 bp, Homo sapiens
gaactccagtcccctggagaggcaaggaaaacacacacacatctctgacaaatgcacatgagacaggacataacagttactgttcaatggtaagtaggcagtaagaaatccagcactgatcctaatagcaaaagaaaaccacaaggaagattacccttcacacaaaagcagaacctaacttacaaggtaaattacttcaggaacttccagtcacaatttagcaaatgacacaaaacaggagtatatggagagaagaaaccaggatgagataagataatttaagaaaagtgagataaattttaaaaggatactaagaaattaagattgcaatagcagaaataaagccaacattagaagtgaaaaagaaaaatcaaacgagtggtaaaaaagggcaaacttttgagcagttcacataggggacagaaatggtg

SEQ ID NO: 214608 - DNA, 159 bp, Homo sapiens
ttacgtgaaaggtatcctagaacatttgctagaaagcaaagcttgttgcacatctgtccacagaattcatcaagcatcaggccagtgtgtttcagttatcactatgtggcaggcatttcccacacgctgtttaatttccaccagaaacctgcagagagg

SEQ ID NO: 214609 - DNA, 289 bp, Homo sapiens
tcgtgccactgcactccaccctgggcaacagaaaagtccctgtctctgaaaataaaaacagtaagaaaacaggaccatcactcacagcacctctgcctctgccctacctacttgaatgaggagcagggtgtctcagctggtcagagcagcccttgggacatataagcggagataggtagaggctgttggttgctcaacatcagcaggatccgaagcttgaaaagaggtgggaaaatatggtcagctctatggtggtgatggaagtgcaggaaacaagaccgggtaccga

SEQ ID NO: 214610 - DNA, 427 bp, Homo sapiens
cagagaaaaataattactcttgaacatagtactcttaactttttacctcgctggtagggtacattttaagaaccaagaggattacaatgaaatctgaaactttataatagttttattgttggtaatttaaaagctgttttatgtatagtgcagcatcaagcaaattagtatgttcatggtattagaaactaagactttcaggaatagatatggcatacaaatataaagtcaaaaattaaggattttttaagttttagagtgatttatttgggttttattttggagtatggaaatgtggaactagatagaggtggtagttgcacagcattgtgaatatactaagcatgactgaattgttcactttaaagtgtttacttttatgttatatgaattttgcctcaataaattaaaacaattttgttaaaga

SEQ ID NO: 214611 - DNA, 365 bp, Homo sapiens
cttcaccttcagggactcaggaatgctccttgctaaagatttgaatagggccagcagccgctcggaattattcaatagaatcattttgtgggatgcttcagtcctcaagcccttcaagaaaaaaactctgaagagaagtggagggaaaatgttaaaggaccagatgaaattaaaatgcactttacacatctccattcaagtaacactcatgatgtaggtactgttagtatcgtcttcattttgaatacgccaaagcttagagagactaaataaatttctcaagttcttacagggataaacgacagagtcatatccaaaacccatgcatttcctctctggtggaatgaataaaagtgaatattaag

SEQ ID NO: 214612 - DNA, 716 bp, Homo sapiens
gcggccgcctactactactactgctcgaattcaagcttctaacgatgtacggggacatgttctcactaccccaatacttaatatactttgttctcagtatccttgttgttagtaccctgttctcactaccccttttcttagtacccctgaggggggaaaaaaaggatgataatggggtataagtctcaaaaaacttttggattgtttgatttgaactgagtcaaaggtaaaaccagtgttctggagttcgacttctgggtgcaaatccctgttgcatcatttactggccttgtggcttgaataggttattaaactctgtaaaatgggcattaaaatcgtgtgtcattcatagtgttgctgtgaatatgtgagccattccatattgagggttcacacagtgtccagcaactggctaaagtttgcaaaccttacccattattattgtcattgttagtggtatactttgaggctgtcacaaataagcagatatttcttcttgtgagagctatataatcccttagtgtagagaaaaatttaattttgttacaagtgatccaagccaggtatggtggcaagtgcctgtatacccagctgtacttgggagggtgaagtgggaagattgcttgagaccaggggttcgaggctgccgtgagccttgtttgcatcactgcattccagcctggatgacatagcaagaccctgtctccttaaaaaaa

SEQ ID NO: 214613 - DNA, 527 bp, Homo sapiens
tgtctacagatgaggtttccatttgtcaaaaggagatataaaactaagtaaggaattggtagattttctcttcatccactctcagtgctaatataagaacttaaaggggattttttggccgtaattcaatatgacattaatgttagaaaattattcacctaaatgaacaaaaagttttccaaagtaaaaaaattatcttgataatgtaaatttatatgctattcaaacttgaaatgcatgaaacaatttttatggtagtatactttattatgaatcgtttataatttttgaagcaaaaacaatgtgaaatcatagtaaatagtataagatttggaactagacagatataaattcaaatcctacctctactaattgtgttcctatgggcttcttgcttaatcttttggagtttccatttctccatctgtaaagtgaggataacaaaatacttcatgtagttgtgaaaactgaaattagatgtttaaaacacttaatacaacatctgacataataaagcatgctccata

SEQ ID NO: 214614 - DNA, 562 bp, Homo sapiens
tcaatgcagcggactcgtcagatgataatatcaagacacctgcccttccaccctcagcggatgataatctcaagacaccttccgagcgtcagctcactccccttccaccctcagctccaccctcagcagatgataatatcaagacacctgccgagcgtctgcgggggccgcttccaccctcagcggatgataatctcaagacaccttccgagcgtcagctcactccccttccaccctcagctccaccctcagcagatgataatatcaagacacctgccgagcgtctgcgggggccgcttccaccctcagcggatgataatctcaagacaccttccgagcgtcagctcactccccttccaccctcagctccaccctcagcagatgataatatcaagacacctgccgagcgtctgcgggggccgcttccaccctcagcggatgataatctcaagacaccttccgagcgtcagctcactccccttccaccctcagctccaccctcagcagatgataatatcaagacacctgccttccaccctcagcggatgataatctcaagaca

SEQ ID NO: 214615 - DNA, 687 bp, Homo sapiens
taatctcaagacaccttccgagcgtcagctcactccccttccaccctcagctccaccctcagcagatgataatatcaagacacctgccgagcgtctgcgggggccgcttccaccctcagcggatgataatctcaagacaccttctgagcgtcagctcactccccttccaccctcagctccaccctcagcagatgataatatcaagacacctgccgagcgtctgcgggggccgcttccaccctcagcggatgataatctcaagacacctcccttagctactcaggaggctgaggcagaaaaaccacgcaaacccaagaggcagagggcggctgagatggaaccacctcccgaacccaagaggcggagggtcggtgacgtggaaccgtcacgcaaacccaagaggcggagggccgctgacgtggaaccatcatcacccgaacccaagaggcggagggtcggtgatgtggaaccgtcacgcaaacccaagaggcggagggccgctgacgtggaaccatcatcacccgaacccaagaggcggagggtcggtgacgtggaaccgtcacgcaaacccaagaggcggagggccgctgacgtggaaccatcattacccgaacccaagaggcggaggttgagctgagaagaggccagtgcactcaagcctgagcaataagaataaaaccgagtaga

SEQ ID NO: 214616 - DNA, 812 bp, Homo sapiens
tcaatgcagcggactcgtcagatgataatatcaagacacctgcccttccaccctcagcggatgataatctcaagacaccttccgagcgtcagctcactccccttccaccctcagctccaccctcagcagatgataatatcaagacacctgccgagcgtctgcgggggccgcttccaccctcagcggatgataatctcaagacaccttccgagcgtcagctcactccccttccaccctcagctccaccctcagcagatgataatatcaagacacctgccgagcgtctgcgggggccgcttccaccctcagcggatgataatctcaagacaccttccgagcgtcagctcactccccttccaccctcagctccaccctcagcagatgataatatcaagacacctgccgagcgtctgcgggggccgcttccaccctcagcggatgataatctcaagacaccttccgagcgtcagctcactccccttccaccctcagctccaccctcagcagatgataatatcaagacacctgccgagcgtctgcgggggccgcttccaccctcagcggatgataatctcaagacaccttccgagcgtcagctcactccccttccaccctcagctccaccctcagcagatgataatatcaagacacctgccgagcgtctgcggggagcgtctgcgggggccgcttccaccctcagcggatgataatctcaagacaccttccgagcgtcagctcactccccttccaccctcagctccaccctcagcagatgataatatcaagacacctgccgagcgtctgcgggggcc

SEQ ID NO: 214617 - DNA, 503 bp, Homo sapiens
ggcactccatgctggctgttgacagcaccactctgcaagcccacacaagaggacccagatggaacgcgaaatgaaaaacacatcgggcagaggacacgctacaacgcaaaaaacaatggcggagatgtgtgcgctgtggcacgacatgcacagcggctgcaggaggggagctggagccaaccaggagacacttggggtctctctgaatttgcagcatgcacacacgcctctaagaggaaaagcccatggttggccagcctgtgctacatgaaaagatcaccaagaaactagagcagtaaaagcaggtgcagaacagctgatgggcgatcccactgtgtgaactgaaaagcaaacaggctgagcctgcagggtggggaggaccgggtgttcatgcacatctctggatctaagtgtctgcaggagcaagctcagggaactgtggccaattttgctttgttcaataggcttttctatatttataaaagaataaccttaatgctttt

SEQ ID NO: 214618 - DNA, 406 bp, Homo sapiens
ccactgcactccagcctgggcaacagagcgagactctgtctcaaaagccacaattagaagacaagttaatatttgtatgtgtacgtataaacgtccagaaggttatgcaccagattgttaataggaaacattgtcagaacgttaccctttgatgctgaagctaaaaaggatgagcattttttatccatatgcataacaagaaaggccagactaagcaacatagcaagatcctgtctctacaaaataaaaataaaaataattaactgagtgtggtggcatgcacctgtagtcccagctactcagaaggctgagtggaaggattgcttgagtccaggagctggaggctgcaataagttatgattgcaccattgcactccagcctgggcaacagagcaagcctctatct

SEQ ID NO: 214619 - DNA, 497 bp, Homo sapiens
taatagacttcatatgttgatgcagttgacatcagtatcaaactattttacatgtgatctggtgtatttcctgaggaaatctgcaagatatttattaagaactaataaaataaacctctccatgagtttttaggtagttttcaatttttcatgtctgtctcgtttcctcttatcaatgagttgctattttctctctctactctgaccatcgcaaaaggaaacaaaaataaatgttttaaactgttcctgaagggacagagagagaatagttctgccatgatgtatcagccgggactgtatttttagtgcagcattgtagaaactaaaaatatcctgttatagtagatcctttttataggtctgtgtgtgtgtgtgcgcgcgcgtgtgtgtgtgtttataatgtacgcacaagtgcctttgtgcatcagcagccactcttcacattacagctggactccattagtccttgaaaattaatgtaatcctagttaagaaaa

SEQ ID NO: 214620 - DNA, 338 bp, Homo sapiens
atgggctcccacaatgcctctgccatcctaggctgcaataaaagcccccacctggtgcctggcttgaggcctatggggacagacaggcaggcagacagcttcggctggggcacaaccctgcctatgtacctgctatggccctagtcctgcccgacacactaagtgtggttgctgggctggccacaggcctcacctcagaaggcactctgtgcttggccaggcgcggtggctcaggcctgtaatcccagcactttgggaggccaaggcgggtggatcacgaggtcaggagatcgagaccatcctagctaacagggtgaaaccccatctctgctaaaaat

SEQ ID NO: 214621 - DNA, 511 bp, Homo sapiens
gaacacagggatgtcctcgtgctgctgcccagccgggagcaactgcggctggccgtgggggtgaaggctactggccgcgagcttttccagcaagtgtgcaacgtggcgagcatcagagacgcgcagttctttggcctctgtgtggtcagaaacaatgagtatatatttatggatttggagcaaaagctcagcaagtacttctcaaaagattggaagaaagaaagaaatgaaggaaatgagaaacccagagcccccttcgtggccttcctccgagtgcagcactacgtggaaaacggaagggtcataaggtaacggcatgcggactgtaaggggtgtttcctggaatactgaaaatctgccgcatgacgtggaagtcccctgaaggccacacattacatttgagtttatccaaaaacaaaaaacaaacaaacaaccccactatatcggctgtttgctttggggttaacacaggaattctatttaatcgaaaggtatacagactgtgtcataa

SEQ ID NO: 214622 - DNA, 131 bp, Homo sapiens
cacgaatatttaaaatagcagaatgatggtatatccatgctacaaaatactatggaatatattaaaaagaatcaggtaaggccaggtgaggaggcttatgcagaaacagggtgggacatattcgcacgtga

SEQ ID NO: 214623 - DNA, 217 bp, Homo sapiens
cattaagaagccaacaatttttccccacatagagggaataatttagacttcttagaaaataataattattattattgagatggagtttcactccagcctgggcaactagagtgaaactctgtctccctgctgccaaaaaagaaaaaagaaatacctttcatgttccctccaagttctttgttaaaaaaaaataaaaaccaaacccaaaaaactcaca

SEQ ID NO: 214624 - DNA, 500 bp, Homo sapiens
aatgagcactcgaggctggaaaaatggtgccatagacttgcagggtcgattgagagcattgctacgaaccttcatcatgtaaaaaatgcaatgtctgaagcacaacaaagtgatgtgcaacaaaacaaggtatggctaattagatgagtctccatggaccactagtgtttctgtatatcttataagcagaggtactgactgcataatttttcaaggatgtttatatgatagagaagatagagatagtatctccctccaaaatgaagggcaggtatatttagagccttggaagatagagagtgcctctttctggaccaaacggcattataaaagctttatgttccctatgctcagggttcctttcctgtaatgcaaccatctgcacatacagatatcacctggtctttgcattgccctgtgggaactggggcttgggaaccagaacaagaaaatgttgatattttgactatttctgtgagtaataaagttctttgtctcta

SEQ ID NO: 214625 - DNA, 438 bp, Homo sapiens
attgacttttgtattgagcaataagtgaagtccaaaacatctgttgagtacctttcccgtatggggagcttcacctggtatggtgactgtatcagtcatttatgatagatgtaagtttgaaatcctgcactgctgattaataactgtgtaagtttgagcctttgtttactggtctgcaaattggggataataatatttaccaaagagggttgtactgtggattaaataagataatttagatggaatacctagcaaaattattagtaaatgctgttttcctttccttcatatgagaatcagaacaatcttttgaagaatcaaaacaatctttttgtgcgtgcgtgtgtgtgtgtgtgtgtgcctttattgtaatcctgtgaggtagaaaaggcagatgttaatgaagaaatcgaggcacaatcaagttatgtggttggc

SEQ ID NO: 214626 - DNA, 252 bp, Homo sapiens
tttgaaaattagtttgtgttttataaggtcaaatggcttctttaaattcatactgtgctattgtatctagcctggcatgtttctttactgtagttctttttctgaatttttaaacccctttgtgatttcacagagttagtaattatgttgggatgttggggcgtggactggatgtagctaaacatactcagatttgactcacattcaaatgtactcaaacattcaaatttaaagttgtctgccaaagcaaac

SEQ ID NO: 214627 - DNA, 495 bp, Homo sapiens
gaagctaggaagtcgtatctcattgtgcttttactttgcctttcgttcattatgaatgagattgaacatattttcatatgcctattgggcatttggataccactccaccgaagtgccttttgcccattttcttttgggttgtcaattttttctgattcataggagttcttcatatattccagttatgtatgttgcaaatattgatttaacaagattctttttttttttttttgagacggagtctcactctgtcacccaggctggagtgctgtggctcgatctcagctcactgcaagctccacctcctgtgttcacgccattctcctgcttcagcctcccgagtggctgggactacaggcgcccgccaccacgcccagctattttttacaaaatatttttagtagagatggggtttcaccgtgttagccaggatggtctccatctcctgacattgtgatctgcccgcctcggcctcccaaagtgctgggattacag

SEQ ID NO: 214628 - DNA, 524 bp, Homo sapiens
agaacaaagatcatcgcttttttcctgggtaattccaccaacccttctgctcagtgagcctgtgcccaggggtggacatgagaacctgctcttccccaagctgatcttagtaccaacagcttctcctgaggctcaaatgaagaaaaaggaggaaaactggctcagctggacttactagaggcagcatgctagtctctgccgtggtgctcacctaaaatattctcaggagcagttttaattaaatgagattttcacccagttactgctgaacgtagagcccacataacccgtatgtagactgtgattggctgtatacaaagctatgcagtctgcctttcacagtacaatgcctaggagctgggctctggagtcagagggcctggagtgtattctgggtccgtcatttattaactgtgtgatgctgggcaaatgactaagcttttctgtgcttcagttacttcatctttaaaatgggaataagaataatgcctataagattgctgtaaatgggttaatgactggat

SEQ ID NO: 214629 - DNA, 228 bp, Homo sapiens
ataaaaataatttggagcaaatttgcatactgtaatacattcaactttatgactaaatgatacatggtgatcacgcattccacaagagaatggccctcagacagtaaacatatttttgtcttaaaattagtgccactgggcaaggcggctcatatctgtaatcccagcactttgagaggctgcaggaggatcacttgagcctaggaatttgagaccagcctgggcaac

SEQ ID NO: 214630 - DNA, 963 bp, Homo sapiens
acgggtggatcacttgaagtcaggagtttgagaccagcctgaccaacatggagaaatcctgtctctactagaagtacaaaaattagccgggcatagtggcaggtgcctgtaatcccagctactcaagagggtgaggcaggagaatcacttaaaaacccccgggaggtggaggttgcagtgagctgagattgtgccactgtattccagcctgggccacagagtcagactgtctaaaaaataataataacaaataaaaaataaataataaaataaaaaaatgaaaaaagttaaaagtaggtgtgataggggaacaggaagaatcaggtatatatatccatgcctaaccatcagatgtggaggtcctatgtgatgaataacttttagtgaaaaacagatgagctgtttaatccaaacaagccttacattttgcttatcataattgaaagacacagaatttcatcaacatttaatgctaaaatatgatctaacagtacatttaatagagaaaaaatggaaatgagtattgcccccgaaaacttcatataagatcaaaacaccaattttttatgtcttttgcttcaaaaataaatttcttaattttcctttttccttcaataattaaacacacaatgagttcccaaatgaagcacttccggtacacttgacaagtaccttatttgtgccaatgacattgttaagagaccttctcattttatccctagaacccacactttcctttttccgttttccaaaggtgttttatagaacaagggtaaaaggctatgacatattataatactggcacacagagactgaaagctcctaagcaatccgctccattcaccaagtgaaatggttcctcctccgtgcagctgagggttgaccaggcgggtccaaggtccctctccttccttaaggaggggctgctgccaagattggtccttggctggcaactgggaagtt

SEQ ID NO: 214631 - DNA, 414 bp, Homo sapiens
aaatgcctcaccatctgggcagacacctttctctcgcttctcgaaaatcactgaggcagagcaatgtttctccatccattattctcctaccctggagggtgcaaagatgtgtttttaggagtccttgagaatatgtgtccttctaaagaagtaagttgcaccaaacacaaatcattaaggtaaatagttaaaggaaggcttatatttaaaacactaatgtttctagaacaaaaattctatcagtcattcacactatagaataatttagcttaatcagttgatttcttccctaatacacagctgagagactctgctctatgagaatctaagttttgctagaaagaagaagaaaaatattacttttatctgattaagctgctgctcttgttctccaaataggagtatctgggcacg

SEQ ID NO: 214632 - DNA, 198 bp, Homo sapiens
ttccctgctgtaaccactccctggccactgcctatgtttgctcaaggccttggggctctacaataaacaggtggaaaagccatccaggtctgtgcccttcccttcagggtggcaagttcccccaagccccaggtgggtccagagatgttgtctaggagtcagggactagagtaaaaaacctttgaagtctacctggca

SEQ ID NO: 214633 - DNA, 437 bp, Homo sapiens
tgtgtgggccaccccatacatcctgcttgtccttcaaaggcaaggctcagcctctacccaggaagttcctcccatcagctccactgtacaacggcctccttttctgcctgcccacagcaccttgtctcctctatcctcatcctcctcctggtcctgacacccccactcccttttactcattcaatgaaacaatgtagatgaaggaactctgggaacaataaagcatcatagcaagtgaagatacccactttttgtgtgcacaactcacagaattgcaatctaagtagggaacaaattaaaaaaaacagaaaaaagcataatcaaaaatgtttagggctgagcatggtggcttatgcctgtaataccagcactttgggaggccaaggcaggaggattgcttgagtccaggagtttgagaccagcctgggcaatatagt

SEQ ID NO: 214634 - DNA, 517 bp, Homo sapiens
cagagttttcaccatgttggccaggctggtctcaaactcctgacctcaggtgatctgcccgcctcagcctcccaaactgttgggattacaggcgtgagccaccgctcgcagcttaatttttgtttctaatgtcagtccctcctgcccaccccaaataacatctattgcttttgttaccaaaataatatgtctttgttatagaaaatagacaatctaaagatataattactcctaattttaccatccacatgtaatacctatacctttttttttaattgaagtgagactcataaaattaatgattttacagtgtacagttcagaggcatttaatagttgcagcattgtgcaaccatcacttctttttttttgaaacagagtttcgctctgtcacccaggctggagtgcagtggtgcgatctcagctcactgcaacctccgcctcccgggttcaagcgattctcctgcctcagcctcccaaagtagctgggattagagacgcgtgccaccacacccggg

SEQ ID NO: 214635 - DNA, 314 bp, Homo sapiens
ccagactcagctctgtcctcctccgtttcctcctctgttttgggccatagcacacaacacttccggtttgtcccttgcagatgatgtgtgccggctccttgagatcagcgagtatgcattagttttgtgtctgcagcatctcatgtggtgcattgcatcaataaatgctcaacaaatcagaaatcatactcaatacacgcttgttgaatgagcaaatcttcttttgactcttaggaaccttgggggcaagaaccccagccctgcagcgccccacagtcccttacagggtggcgtgtggggcggaggggagagga

SEQ ID NO: 214636 - DNA, 443 bp, Homo sapiens
cactctcccccatccaccctccttttacttacctccttttacttacttccactcctcactccactctcctggcaactgttccagaaaaaggagccgggagccacaagggggacccaggctggtctgtgtaagaacaggctgtgccaggttttcagatgcaattaattttcaagataagctctaaacttctgaaatgtctttgcaattgaaatgctgatacagtcgtcaaccactgcagtacataatcataaatcttgagcacagatagtttttgttggtaataatgaagtacaatatacatttaattagtgtgagatttaggaaacgtgcagtgtaataaaacaatattctaattagggttggggaaacgtttaaatactatttgtgcagtaccgttcaatgaaactcttacaaactacactcaaatctgctgtttctaagca

SEQ ID NO: 214637 - DNA, 275 bp, Homo sapiens
catcacaatgtatcaaaagatccccatacgctaatcctttctatctctgaaatgtccttcaaagcaatcctcatagcactctttctcctactgtatttatgcctttgtcatttcttacctgaataactcaaatttcctattctttattccttctgccagcctcccacattatcaaatctactctccatcttcctaaaatacatatctaaaaatgtagcttgtttgcttaaaaaccagaggacaacatctacatttttatggcatacaagactctg

SEQ ID NO: 214638 - DNA, 566 bp, Homo sapiens
ccctagacagcaagaccccccgcagtacagcaagacccaactctcttctttctcttcctcctcatcctactcaacatgaagatgacaaggatgaagaccttcatgatggtccacttcacttaatgaatagtaaatagtaaattttctcttcctcatgatgtttgaaataatattttcttttctctagcttattttattgtaacaatacagtatactatacacacacaaaatatgtgttaatcaactgtttatgttattggtaaggcttatggttaacagtgggctcttaatagctacactgtggtggagtcaaaagttatatacagggtctcgactgtctgggggtttggtgcccctaatctctgcattgttcaagggacaaccacagtgttatttctgttagacatgtgtcagcaccctatgctgttactgtgacttgctatttttttaaatctcccttgtaactgtaggataactctctgtataactctagtgaatccccagtaagtgcaaattaaaatggtgacctgtatctttaaagaaaattaaatctttatacatgctca

SEQ ID NO: 214639 - DNA, 757 bp, Homo sapiens
attccaaatttaatcttcaatggtaagaggccactaagcagagaatgaaatgaactggaaccctgataaactgtaaattgaaatgataattatcactaaaacagagggattcaatccagctgcctggggatgtttcattatataaattattattatctattccagtattggcagaggaagggctatgcgtctattagacttaggccaaatttggcatgctggtttctaccaatagcacatgctggtgattttacttttcagaactcacatatttatctcatttgatctcatcacaacctgagacacgagtcataatgaggactatggggctaattttatatccagtgaaccagccaagtttcatgcagttgagaaatggtaaactgtccagacatagtggctcacgcctgtaattccaacactttgggaggccgaggcaggcggatcacctgagtccaggagttggagaccagagtggccaatatgtagaaaccctgtctctacaaaaagtacaaaaattagctgggggtgttggcacacacttgtaattccagctaatccggaggctgaggcatgaggattgcttgagctcgggaggtggagtttgcagtgaggggagatgctgccactgcactccagccgtggtgacagaacgagactctggctaataaatttaattaaattatttattaggaaagggtacttttttagccactggtctgtctggttctggccacaactggttcctggtgggagc

SEQ ID NO: 214640 - DNA, 459 bp, Homo sapiens
aatcattagtcccattctactgatggtcagagttattaggtaacttgctcaagattacatagttaatgtaattagtagacctgtgattcaaattcaggctgtctggctccagagtctgatcttgaccgccacgctagtatttaggcaactgtacatacccagcctcttcagttttccttgaaattcacgtccatattcctgcttggcaactgttagctgggaatcagtagctgctgccccctttaggcagggcattgtaatacatttgttacggtccccactactctattctagagtttattttattactccctgttcactttactcattgatatttattttacctgtcagatcctgtaggtatttaagttttcagactctggcatgcaacattcattaccttgggcttgcaaaataaaaaagccacggagagaaaaatcacattaaattaaatattta

SEQ ID NO: 214641 - DNA, 428 bp, Homo sapiens
tgctttccccaaatctcccaaatccatggttttcaaatgtctttttcattgagtgacaatccacttatgctctgggtccccagacgtgggggtgcaggcctcttgggattatccctaaagaaataggacgcctaatttcaagatggtttatttttaaaaattagaaatgttgactccttgtaatacagtgattttgtttaaatctggaagcgtcagtggctgccacctcatagtgagcaccaagacctgttcacagaaaactgctggaacagcttgtccagggtgccggttccctaactcttagagctccagtctcttctgccataaagtggggagaatggaaccagcccgtgagggtgtgggggatgagggttggttgcaaagaggccagtcccggtggggactctgcaatggtgaagcactctcaa

SEQ ID NO: 214642 - DNA, 369 bp, Homo sapiens
ctcttccactaaaatagcaatttaaatccctaacgtttaaactggataaaacgcttaagctgtaaaggttggggggaaaaatagaaatttacttgaaaaggaaaatgaaacagagtatctctgggggaaaccttgactatgttttgacccaactgggatatacatgtcgatttaaatgccaggtcgatttcaaggccagattccaggtatttgaaggcatttgctatgtatcttttctgttgttgtaaagttatggttggacacattctggttgtattgatctcagagtaaaaatgctcctagtaataagaaagtggggattctgattccgaggacccagaatcatttatgtattaaaggaggaaatct

SEQ ID NO: 214643 - DNA, 412 bp, Homo sapiens
caaatttctctactattttgagggaacatgtcctattgtagaaagataaaccttttacaattgttcgtcataagaggaaatctgctttaaaaatatttcatagggctgtcttactcttattcctaaaaaaagttattactgtagaactagttagcaagagttactctgttctgggttacttgggattcactgttagcaaagactaacaattagtttgtatatccgtatatggatgtaggtggtcacagtaatttcctgcttgattttttttgaattccaattaatataggaagtttctgaatttctaggtatttcaggatttgcatatacttagagttcaattatgttttaaacacattatctgtgcaagtgactgtcctaaatgttgtggctaaagaggaggaagcataaa

SEQ ID NO: 214644 - DNA, 228 bp, Homo sapiens
ggtggaaaatccctctcccctttcttccacactttctttccttctaaactatgtctcataaagtcagaccacagaaccctttcaaatacagttagggcagacagagaccactacagagagccccagtgtttccttcctcgcttgaaaaggcaagaccttctcaaaaagtagaggtaggccttggtaagggcctcctttggaggaaagaaaaggcaaaagtaaggcatg

SEQ ID NO: 214645 - DNA, 483 bp, Homo sapiens
atacgcagtgagattagtcccattttttggttttgaacggaagctataagcagtttgtaaacctgtctacggccacaaatatggttgtggaacctagattcacattcagcaattataactccagatcccgtgctgtttctgttttctatttgcaaaccacctctctaattaactggctaactttgttatgtaattaacaggttgatgggcattgtattctggtaatagcaacctttgcactttgttctatgtaacatattttcctgaacagtcacatgtgaagtgactttttccctatttaaattccctcggttggccaggtgcggcggctcacggttgtgatcctagcaccttgggaggcctcggcgggttgatcacttaaggctggtctcaaacccctgacctcgtgatccgcccacctcagcctcccaaagtgctgggattacatgcatgagccaccccacctggcactgtttcactttc

SEQ ID NO: 214646 - DNA, 452 bp, Homo sapiens
aggaaaaagaacttggaagacactgcttcattatgataccttggtaataaatgcagaggatctaaaaaggtgatgaatttcaagagaaagagtatttacattctcaaagtagttctggaacaaaagctaaataaacctcacatagccatatcctaggatcacagctgaaataaaagggccagatgtggtggctcacacctgcaatcacagcactttgggagactgaggcaggaggatcacttgaggccagtagtttgaaacaagccttggcagcatggtgagaccccagctctatcaaaaaattaaaaaaattagccaggtgtggtggccaatctggaggccaacgcaggaggatcacttgagcccaggagttggaggctgtagtgagctatgattgtgccactgccctgggcaacagagggagactcggtctctaaaaataatgattgact

SEQ ID NO: 214647 - DNA, 1401 bp, Homo sapiens
agaaagaccttatgagtgtagtgaatgtgggaaattttttagagatagctacaaactcattattcatcagagagttcatactggagaaaagccttatgaatgcagcaactgtgggaagtttcttagataccgctctacattcattaaacatcataaagtttgcactggggagaagcctcatgagtgcagtaaatgtagggaattgtttaggactaaatcgagccttattatacatcagcagtctcacactggagaaagtccttttaagttaagggaatgtgggaaagacttcaacaaatgtaatactggtcagcgccaaaaaactcacactggagaaaggtcttatgagtgtggtgaatccagcaaagtgtttaaatacaactccagcctcattaaacatcagataattcatactggaaaaaggccttagtggagtgaatgcaggaaagtcaccaaaactgtcacctcattcagcaccaaaaggttcacatcggaccaagaacctattaatatatgtaaatctaatgttgaaagagttcagatggaaatctgcgaggatttcctgctgggaactacattaaaaacatttatgtccaggcgtggtggctcacgcctgtaatcccagcactttgggaggcagaggtgggtggatcacctgaggtcaggagtttgagaccagccgggccaacatggtgaagccccatctctactaaaaatacaaaaattagctgggcatggtggcaggtgcctgtaatcccagctattcaggggactgaggcagggagcatcacttgaacctgggaggcggaggttgcagtgaactgagattgttccattgcactccagcctgggtgacagggcgagactctgtctcaaaaagaaaaaaattataattgtggcaaattacaggtaacttaaaatctaccatcttaacccatatttaactgtactgttcagtagtgttaagtcattcgcattgttgtcaattaatatccagaagttttttcaacttaatgaaactaaaacattataccctttaaaccaggggtccacaacccccaggctgcaaactggtaccagtctgtggcctgttaggaaccgggccagcatcactacctgagcttcacctcctgtcagatgagcagcattagattctcatagcagcctgagccctattgtgaactgtgcctgtgagggatctaggttgtgtgctccttatgagaatctaactaatacctgatgatctgaggtgggacagttttattctgaaactgtctgccccctcctctgtccctgatgcgtggaaaaattggcttccatgaaaccagtccctggtgccaaagaggttggggaccgctgctttaaactactcctcttcctcattccctacgccaaccagcc

SEQ ID NO: 214648 - DNA, 455 bp, Homo sapiens
ctaaaccaaagggaatatcagtgtatctagtacacagcagaatgaatgaaaaaagacccataccaagatacagcatcataaaatttcggagagaaaaagttcctaaatcattccaaagagaataaacgggtcacatgcaaatgaatcaaaatcagaaagaaatacaactcagtggccacactagatgccagaaaactatggcagaaatctttcaaaagtatataattattttaaacctagaatgtaatacatagccagacatgtaggagggtggaataaagatattttcagacacatagaacccaaaacattttatttcatgcagtagggatgaagaagttaatagaagttgtgttgcagcaaaacaaaggagtaaatcaagacagaaagcgatttgagattcaggatactaggagtccaacacaggggaatagtgacaattattaatttctaga

SEQ ID NO: 214649 - DNA, 276 bp, Homo sapiens
ggatggagagagaagaagagagagagatgtctggagagatactgcagaaaccaatactgctgttttgggagtgaagaaatcgaaaagctgagtgcgagatgtaagaagaagatttacattgcattatctttctgttctatttgaatttgaatttttctttctttttttttttttttttttttttgagacggagtctggctctgtcgcccaggctggagtgcagtggcgcgatctcggctcactgcaagctccgcctcccgggttcacgccattctc

SEQ ID NO: 214650 - DNA, 1236 bp, Homo sapiens
  misc_feature (173)..(173): n is a, c, g, or t
gccgaggtcgggccattgtactccagcctgggcaacaagagcgaaaccctgtctcaaaaacaataataataataataataataataataataatatcaatagtaattgtgccaagcgtggtggctcacacccgtaatcccaggacttgaggaggcagaggcaggaggattgcntgagtccaggagttcaagaccaatcctggcaacatagcaagacccatctctgaaaaaaatttaaaaattagctggatatggtggtgtgcccctgtagttccaggtacttgggaagctaaggtggaaggatcacttgatctcaggaggaatacctgagccatggttgtgccactgcactcctaggtgacagagcaagacctgtctcaaaaaaaaaaaaaaaaaaattgtaacacgacttttgcagctatacaaaatatttaaaatctcaagtattcaccctagatagagttattatctaagcattttatcttatccatcttaataattgcaaatatgaaatctagatctttattcctatgttacttttgggaaatctgttaacatttttgagccttacttttcctgtttgtgacatgaagggtgtggggatgacagagatggcattgttagatgggttaaataaaacaatgtatataaagtggccaataaagagcttggcacacaatgggatgccaaacagatgttaaaatatgtactcatagattttagaattagatgtttaacagatgctattattaaaattcttcattttccaaaggctgtgccttttgtattcttgtgtaattaccccttggaaagccttgagtaaagataccagatgtagtgtaatttcattaatgaaggagagtaaaatagcatagattataacaagaggacaaaactgaagagctcattccagaaactacctggaatagtgaatagaggatggcagagccaagcaacctggggtttttaattctgtcatttactggctattgtgacattgagcaagtggcttaatgttcccatcttatttataaaatgagcttaataatccctcttctgttttgtttttgatgatttgagatagcatttgtaaagcttagtacagtatctggcacttagtaggcattcaatggccaaaaaatatatgaaaaaatgctcaacatcactaatgatcagagaaatgcaaatcaaaaccacaatgcagtaccaccttactcctgcaagaatggccgtaatc

SEQ ID NO: 214651 - DNA, 569 bp, Homo sapiens
taagaaaaacagaagccacaggaaaaagggagctccggaaacaacatacggtgcaaaaccctttaagtttcagctgctcccagttagaggacactcaactgctccaggcaagagcccgacaaggggccagttgaccagggaattaatgagcaacaggaacacgactcccttgggaatgttctctgcaaaccagggacatagacggctccagggaccagctgcccctctctcccctacattggcctctttttcttcctgtccttatttcctcctgcccactcccctcctcttctcactgttgcttcctcctgtcccattatttccttcttctcctttgtcagttctttagtcctcttaggggacatccctcaagcattgcagactgtgtgccatttaaggccaaatacatccctgtctaagacaaagagaagaataattagttacaacgggctgggcatgatggctcatgcctgtaatcccagcactttcggaggccaaggtgggtggatcacctgaggtcagaagttcgagaccagcctggccaacatggtaaaactccgtctctagta

SEQ ID NO: 214652 - DNA, 397 bp, Homo sapiens
cctgtgtagaatcaaatatattagaacttagtcttgttacttggtctgaattggaaacatttccagtgcctaccagttgcacacatcattatccactcataattagttgtttaatctgaaaagagcaagttctgctccatcacctaacatctgttcacttttactcttagctctgttcaaccaaatcccattattgtcaggagaggctctggcagacttgtatcatttacgaatggtttctatttctttgtagatttctaattctttgttctcgtagctgctacattctctgataataaataacattatgcagttatttttcggaacttgtgcttgttttcaaaataacaagactaagaactaaagatttatttgtctgaagtcacacagtgcctca

SEQ ID NO: 214653 - DNA, 997 bp, Homo sapiens
gtaaatcaaccagacgttctgtcattcaccagcaatatctctccatagtattctacacccatgtgccttcatgaaatatttcattatgctggtggaagaaatattcaaatgaatgtgctttttcagggatggtgacaccagaatgttttaaatctgttcattaccacaacaaggataaatggcgtttctgccaaagacttttgataacgggtgcagtaatgcatgccagcactttctgaaattaaaggttctaccctgagaggtttcacatgcttacccaggaatgctccttgaaaagataatctcctcagacataagcctggccacagaaaagtctctctaaggtcagcagtttctagagtgacgaagtgagaattcgattcttatctgttcacagactctacaaatctcaaaacaccttcctgaagaacaccctgggggaaaaatacaaaaaacctcatggatttagccatagatcatatatattttgaattgtcactctttcactcaacaaataaatatctcctatgtgccaaatcatgagctagaggttggaacagcacattgcatagagaacttggtccctagcctgagggattcagaatcttgggcaccatcatttctgttttcatcattgttgtcatcagtgtcttttgagacattcttattttgatctcctttgatttttatatattatgattatttccaatataattttaaaataagaattttatacttatggaaaaatatatttcatctaatttgaaaaaataaggaaacagtgctttgctttccctagccttccttctcatttactgtaagataataatttttctttttcagggttcgtttcaattttttgcaaaggatttagcaatgaaacactaaaatctcaggcattttcattaagctcattttttactttcctcatatatagcctatatgctttatttaatctttattctttacattaaattaaaattatttttaaaatgac

SEQ ID NO: 214654 - DNA, 1097 bp, Homo sapiens
gtaaatcaaccagacgttctgtcattcaccagcaatatctctccatagtattctacacccatgtgccttcatgaaatatttcattatgctggtggaagaaatattcaaatgaatgtgctttttcagggatggtgacaccagaatgttttaaatctgttcattaccacaacaaggataaatggcgtttctgccaaagacttttgataacgggtgcagtaatgcatgccagcactttctgaaattaaaggttctaccctgagaggtttcacatgcttacccaggaatgctccttgaaaagataatctcctcagacataagcctggccacagaaaagtctctctaaggtcagcagtttctagagtgacgaagtgagaattcgattcttatctgttcacagactctacaaatctcaaaacaccttcctgaagaacaccctgggggaaaaatacaaaaaacctcatggatttagccatagatcatatatattttgaattgtcactctttcactcaacaaataaatatctcctatgtgccaaatcatgagctagaggttggaacagcacattgcatagagaacttggtccctagcctgagggattcagaatcttgggcaccatggtgtcagatttcattaatggtgggaacagtagctaattgagacaggtgtatatgtgattcacaatgaatttctataatatgggtgtatggccaatttatttttgaattaaaaatacataactgtgggagagtataatcgatactgtatcaaagaaaaaaatagttttggctgcatgggatgagaagagaggtttttgtagcattatagtcatattaaggtatattatgaggaggtcctataatgatttgtaggactcggaggatatgcttttatgtttaatatagtggattttcaaaggagccatatgggtataatccaatgcgtggataatagagaaaaatataattactaggtggccaatgagctccgtctttttgtcgttacttgtggcattctactgatctgttccggcttggaatgttatagatttgttttaattcatggtggacactaaaaaacagggggctcgctatgcccg

SEQ ID NO: 214655 - DNA, 187 bp, Homo sapiens
aggttccggtgccagcgtcccgtttgttctgcctacctgtcaagcgcaggatgccagtttagaggagactgacattgcttatgaaatcagatgtacaccatgcacccccggcaccctgatacatgtgcctttgtcctttttaaaaatctggttaataaaaatgcatacgttttcatgtctcattgaa

SEQ ID NO: 214656 - DNA, 560 bp, Homo sapiens
aagtactttagaacaaggcctgtttcttttctgccatccaatgagagcagagaatctccaatgaaactgactagatttatgaatgttttttatatgtagagaggggcagaaacatgttcattttcccatgaaggaacaagtcccaagggtttatcatctgcctgaaggcactgctaacgaatttgtcaaatcctttatccagcacagctttaccaagcagctgcacagtcaggcctttgcacttctcattctcataggtccagtttaagatctcattcagtcctgaactgcttcggtcctttgcattcctgctgtcttggcctccacctagaccaagtcggcagtctccctacattaccctacattcagctgcatcctatgctccaaggcctttcaccaggggccagaaatgctcccacaaccctcaatggtctcactacaacagttccgaatcttattccaaatgctatagtatctgaaacggttcaccaatagggataatgtttctccaactggagaccttcaataaaacacttcaataggtgctttaatttctgtca

SEQ ID NO: 214657 - DNA, 511 bp, Homo sapiens
aatacaggtatgctccaacttaatcaaatattcaaatttcatatacaagaaagactagccagtgatgattccctttgtcaaagaatgtgccattgaatgtctgtaaatagctcatctatgacagaatatggcttctccataaaatcatggatgtctagtaactgctttcttcttcttttttcaattaacaaatggtattgccaatagtatcacattgagttgctatcttttcttctgaagatgccaaagctgccacatctgtgacctttttccatactttttcagtggatttggtagtttaacacctctttaccacaatgttatttctttttagtgataggggaactgagggagtaatagacttgacagcaatcacaaaacgagattatagcaaaactggagcttactcttgatctgtccaactaggaaatgtagtttaaaaaaaacttcatcctgactggccacatataatatttaaaaagaaaaataaagaagtaatatagtcattaat

SEQ ID NO: 214658 - DNA, 381 bp, Homo sapiens
ctgaactgcaagccatctctaagacttacactctaaggggaaagaaaaaggaaaaaaaatggttgggaatactgagtttgagattttgaagtcccagcctgatacggcttggctgtgtccccacacaaatctcatcttgaattgtagctcccctaatccccatatgttgtgggagggacctggtgggaggtaactggatcacgggggtggatctttcccatgctgttctcatgatggtgaataagtctcatgagatctgatggatgtataaagaggagttcccctgcacaagtcctctcttgcctgccatgatgtaagaagtctttttgctcttccttcatcttccaccatgattatgaggcctccccagccacgtggaac

SEQ ID NO: 214659 - DNA, 374 bp, Homo sapiens
tttttttgtctgcttataatctatcaataactgacaggtatgcttcaaaactcccattatgacagtgagtgtatgtctttctccttatggttctgccaatctttgttttctgtgtttggaagctatgttatcaggagcatacaaattcaaaattgttttctcttcctggtgtactaaacagtacaaatacttatgacctctaacctcacgcagggcttttgctctgaagtctctagtcaggaggaaggagtctaatatgactaaaactacctatcagtttttgttcggtaatgtatcttaaacagctctcctgaggtataactctcatacgataaactttatatatttcaggccgggtgcagtggctcacgcct

SEQ ID NO: 214660 - DNA, 506 bp, Homo sapiens
ctcctgagtagctgggactatgggcatgccccaccacacccagctaattttgtatttttagtagagacagcgtttcgccatgttggccagtctgatcttgaactcctgattttaagtgatccacctgcctcagcctcccaaagtgctgggattacaggtgtgagccactgcgcctggccaattctgaacctttctattagatacttcaaccttctgccacttgtctcccaccctcccaatcccttttacttgtttattttttagaaaaccatagcacacaccattttctaatatatacacgaattacttaaagtttaatgattgtttccttgtttgtctctgcagagtataagccccacaagggcaggaatctttgtcagtgctgttatctgatttatcccaaatgcctgggacagtatcttacacatagtaggttcccaataaatgtgtgtattaggctatgagctgggatgtttttggctctcttcccataatatctgagttat

SEQ ID NO: 214661 - DNA, 373 bp, Homo sapiens
ttaagtgagtaaaatggattcatataggaatagaatatggtagaatatgggttagtttagtaaagcatttttttttagtgtaaagttaaacttatattccttgaagttctaataagattttcaaggcctcttctagtttaattcttcttattgattagagtccgagtttagatgaataccgtttgtaaaaatgataccgtattctaagtattaacttttccatctccccaaatgccaaaaactgctctgttccctctctgtgtcactgctgaacctgaactttgacccttctcgtattttccctcctgcttaccttcagagtagctgggactaaagccatgtgccaccacacctagctcatttttaaattaaa

SEQ ID NO: 214662 - DNA, 242 bp, Homo sapiens
gaaaggaaatctctgaatgtttgtgaaggtgttgacccatggatactaaggtatgtgaaaataactcacacatctcaggtgtttaatgaggatcaataacaatttgtgggcccatcagctctacagtcctatcacctcaaatcacacacaggaaccctgcttctgaaaagtggcacttgggagagagaatggcagagtgaaatccaattagcaagatctgcaaaagaggcacatgtgccaga

SEQ ID NO: 214663 - DNA, 625 bp, Homo sapiens
agaggttcttgtaacatactacatgcattagatggctgtgattctgaatttcagatactgatgtgtttaggctgcctcagacagggacaactctcgttagaatactaccgagggaactgtaatagaaatttactttacttaatgatggctacctatctcccaagtcccaagtcatactcattagaaataagtatcttgagtgcaaagctagcattctagttcagaaccagaacacaggagctatacagaactagcctacttagttatatctctatataagctatatatctatttatatttttagtattttttcattacaaaaaaagtgttttaagacatctcaggctaaactagaataaagacaattaagtgtttcacaagtttattgtaatgagaaactcactatatgtcattcagtatttattatatatattttatttgtaagtgtgtctatgtttactatttctacgttactctatttttaatagaaaatacatttctcaatgctttttaattgctttgattaataagtatataatagtgccatccaaatattaacattcattacagctaatatataaacctgaactgattgggacacactagaatgtctataccatgtgac

SEQ ID NO: 214664 - DNA, 501 bp, Homo sapiens
agctgccacccccggccaaaataaaatgtaagcctttctaatcagtgatcaacttccaaattctcaacttcatcctgtctggtacatcatttgccatcaacagcacaaagcctgccctgctttcccaaacacttcccctgcttagaatttattcatcatcatttctcttgtccttcaaaagcccatctcctctgaggcctatgagacagagctacaaaacctgctattcctgattactacagttatcttgtcatctccaaactgcatcctttcatcccttggagatcttagtgcctgattcattaactactttcactccactactattccttgatcactgccagtgagttcaacatccacaggccagttccttgacccctgcatttccgacaatcttttcttcaacagaccttagccactcaattccatagtcataccgttgaccttataattgccaataaaatcaccacttccagactacaactgtaagccttccaccct

SEQ ID NO: 214665 - DNA, 385 bp, Homo sapiens
ccatgctacataaatattacaatcattatgtatcagttaaaaaaaattaagtaataaaaaatttaaatgaagtattcaagaagaagaaaaatgacataaagaaacttataaacaaagaatggaaaggcatcagaaaataaatcaaggaaggtaaaatataatctttaatattttaatacataattgatttaagggataatatacagttaaagcaatgaattgggtgcttatagtatatataaaagtgaaattaatggtagcaatttcacaaagaggaaaaaaattggaacaattccattatatttgtgctaaacataacgtgacctgatactatttgaaggaagaaatacaatatttaaaaatatagtagaccccacaacagcca

SEQ ID NO: 214666 - DNA, 438 bp, Homo sapiens
tactctttatgaagcagggaaatacaggcacagatgtcaacttaatgtgtgaaagaaataccagaatgataaactagaaactattgaaactggtttcttacagggaatacatgagaatggggtagaaagattgggagtaatgggaataagatagtagggatagggagcagcacttctctgactatagttttttatatgactttgactctcagaaccctggtaattttttacgtagtctccagaaataacataaaataacttagatgttggcaagtgtggagaaaggagcccaaaatgtaatgcaagcactaacagatgaacaatattaacttgatttatgaagtcaatgaataacactgacttgagtggggaagaaaagaactaagtaactttggaaaacagtattttgattaggcattctaaagctaaacacaagac

SEQ ID NO: 214667 - DNA, 435 bp, Homo sapiens
taaaattctagcatgctctctttcctgtcagaattaactgagttggattccctacaaaatctagtaccttagtattacttaacaggaaacttctcctaaggaacttgtatagccagagcaaggagccataagaaatggaacagaaatgtcagctttgaatttttgtgtcatagtaagctatctaccacaaatcttgccagaggaaggaggaaagaccagcctctctctttcatttgttttcttccattatttgtatgagccactaagaatgactaaatactcccagtatctgaaagtcattggagattactattgattgtcaagtatttaggaatgattccattcacctttatataagaatgggacagcagcctgactggagaattttcttccttataagtgatccagaaggtatccttattatcttctatttta

SEQ ID NO: 214668 - DNA, 338 bp, Homo sapiens
gatgtgtttaaagagctgtgtccgtgtgattggagcgtgaggtaccatagggggtgttgtgagagatgagaggtaggccccaggggaatcaagatactgagggaatttttatgcctggctaaggagttttcaattttatctgacaaccactgggtgtaattttatccaaaggagctgcattatcagatgtacgctctgaaagatttctctggaggccatgttgaggctggattgcaggtccgcagggatgggaaggagaccagttagtaagagaaaagataggttttagaagattaagtccctgggatggccagctgatgggaggagaaataaaaaag

SEQ ID NO: 214669 - DNA, 518 bp, Homo sapiens
agagtccctcagttcttcctaagcagtctgtacagctgagagcaaggtcagcagtttctctgtcaggcctttgacttcattcatcagactggatgcttattaaacatctactacatgcaaagttctgtaccagatgaagttgaaggcaggttacactgccccggtgtggcttataattgacctggaaatatttccagagttaggtaacagacagaataccttcctcattctcagctgttattttggaacagagaactttacaaaagctttgtctttgtaaataataaaatgttacacactgataaaaagtattccagaaaccaaacacataacaccattttttaattttagaaaactgccattgctcttacttagaatgccagtgttttctgaaggttcaaaacactgaagttacagacgattaaaacattgcactgttacaactgctgctttccacatggttcttgttcatacagttttttagagcaaagtaaaaatgttctcttgagcatagcaaa

SEQ ID NO: 214670 - DNA, 272 bp, Homo sapiens
ttctcaaattagtaagaaattatttctgtaataagggtaagcttcaatcacagatgagttttcgaatttgaaaattcaaaatacatactacatgtagaattcttataaattaatttaaaatatttaacaccacagtagaaaatggaacaacttggctgggcgtggtgcctcacacctataatcccagtactttgtgaggccaaggcgggaagattgccaacagccaggagtttgagacaaggctgggcaatatagcgagaccccatctctac

SEQ ID NO: 214671 - DNA, 518 bp, Homo sapiens
agcactgtgatacagagaaagtccagctcaccaccaagatggctactgagccgctggtgggcgcggagtgtggtgtctgcagcgtgaacatgccgggcaaaggaataatgcatgtcagggataaggtggagaaggactgtgccaggcttcatcactctactcagaatggcacacagtttagaatttataaatgatttatttctggagtgatccactgcatattttcagacggtggttgatcgtggataactgaaagcaaaacctgactgaaaggggctgctgtgttcatgtcagcaatgctgatgccctcgaggccagaagagtaaccaccaatctggtacctgagcacctggctgtaagtccaccctccatttctggccagggccgaggaattctctcttcttctctttattttcctcttgatttgagaaggtcaactctgagcatgctctaaacacaaatcagcatctctacacttcttcggcaccaggtgttgctactgtctttctgattagaaa

SEQ ID NO: 214672 - DNA, 650 bp, Homo sapiens
ggctctgaccagcaccatggcagttggcaagaacaagcgccttacgaaaggcggcaaaaagggagccaagaagaaagtggttgatccattttctaagaaagattggtatgatgtgaaagcacctgctatgttcaatataagaaatattggaaagacgctcgtcaccaggacccaaggaaccaaaattgcatctgatggtctcaagggtcgtgtgtttgaagtgagtcttgctgatttgcagaatgatgaagttgcatttagaaaattcaagctgattactgaagatgttcagggtaaaaactgcctgactaacttccatggcatggatcttacccgtgacaaaatgtgttccatggtcaaaaaatggcagacaatgattgaagctcacgttgatgtcaagactaccgatggttacttgcttcatctgttctgtgttggttttactaaaaaacgcaacaatcagatacagaagacctcttatgctcagcaccaacaggtccgccaaatccagaagaagatgatggaaatcatgacctgagaggtgcacgacaatgacttgaagaagtcgtcaacaaattgattccagacagcattggaaaagacatagaaaaggcttgccaatctatttatcctctccatgatgtcttcgt

SEQ ID NO: 214673 - DNA, 428 bp, Homo sapiens
ccatcttttcaggggagattcgttgagtgtcctctaccatttgacttcgtaaacctttgtttcccaatgtgtggcctgggtgctaactatactagaaccatcctgggaatgcctattaaaaattcaggtattaagccaggcatggtggctcttgccttcagtcccagcactttgggagaccaaggcaggtggatggatcacttgaggacaagagttcgaaaatagcctggccaacaaagtgaacgtctctactaaaaatacaaaaattagtgggacatggtagcgtatatctgtagtgccagctacttgggaggctgaggcacaaggatctcttgagcccgggaggcagaggttgcagtgagtcaagatcgtgccactgcattccagcttgggtaactgagagatcctgtctcaaaacaaaacaaaac

SEQ ID NO: 214674 - DNA, 476 bp, Homo sapiens
gaggtgtaatctagcccattacctatttttgtaaatatagttttactgggatataaccaggtccatttctcttaccaggtatctgcggctgttgtactgaaatggcagagttcagtagttgtgacagagactgtattgacaacagactcttaaatatgtcctatctggccctttatagaaaaagtttgctggctgggcgaggtggctcatgcctgtaatcctagcactttgggaggccgaggcgggtgtatcacgaggtcaggagatcgagaccatcctggctaacacggtgaaaccccgtctctactaaaagtacaaaaaattagccgggcgtggtggtgggcgcctgtagtcccagctacttgggaggctgaggcgggagaatggcgtgaacctgggaggcggagcttgcagtgagccaagatcgctccactgcactccagcctgggtgacagagcgagactccatctcacaaa

SEQ ID NO: 214675 - DNA, 335 bp, Homo sapiens
ctgtgctgctgtcatgacagtgagtctcaaggtctgatgtgtattataagggggagttttcatacacaaactctctttgcctgctgccatccatgtaagacatgacttgctcctctttgccttccaccatgattgtgagacttccccagccacgtggaactgtaagtcccattaaacctctttcttttgtaaattgcccagtctctggtttgtctttatcatacaggtagggggccttaggtaggaaaaagcaatacagtaaataatcttcctctttgtagtggtaagccacataaaatggagaaacccttttgccgaaaacagctacaaatgcc

SEQ ID NO: 214676 - DNA, 402 bp, Homo sapiens
atgtttctgagaggaaagatgtaggtcaatgttcataaagatgggggcaggaggtgagagaaaagtttaaaattaaaattctggttggtattgaaaataataaaaggggctgggtatggtggatcacacctgtaatcccggcactttgggagaccgaggcaggtggatcatttgagttcagaagttcaagaccagcctggccaacatggtgaaaccctgtctccactaaaaacacaaaaattggctggtggtagtggcacacctctgtaatccccggtactcaggaggctgaggcaggaaaattgcttgagcctgggaggcggaagttgcggtaagccaagatcgtgccactgcactccagcctgggtgacagcgagattccgtctcaaaaaacaaacaaac

SEQ ID NO: 214677 - DNA, 414 bp, Homo sapiens
actgagctatgattgccactgcacttcagcctgggagacagaggaagaccctgtatctgttccccccgaaatttagcgattgtattcctttacatcatacagtagagagttgatgtttgtgttcactccactaacctcattccacgttcccctgccagtatacttcagaatatctcagatccaattcaaaatttcatcttaaaaggtagaattattttcacagtttcacagtttagttttgattactgaaagcatttctttcattttgtctaattgaacaaatttatgcaaagaattggggacttattcctcattagtattgttcatctacaggtggaaataagttcaagtatgtgttgcagtattaattaaaggcaaagtgacctacttgtattatattctgaataaataatg

SEQ ID NO: 214678 - DNA, 509 bp, Homo sapiens
tgtagaatggggatgataatgatatctatctgagagggctagtgtacagttcaaatgtgagctacatctgtgagtggcttgccaataatatagtgctaaaggaatatgttaaaataattggttgagaggccattaggctgaggcagctccagcactctgggttctatctaagcaagttgaaacctgattcactggaaatagtaacacaaaacttaagcttaaccagtcagaagctgccaaataagctctcaataggaactttccacttgaatgattcaaataaggccactgctccacttcaaccagtgaaatattttctttgccttgtttccacattcaccctgtaaaagcctgtaactcatactcctgttggtggaacccccaaccacctgtggtctggaattgcctgatttataaattgctgttagctcaaagaaactgtttgtattttaatgtgcttcagtttatcttttaacagtaaaatataatctttaatattttactatgta

SEQ ID NO: 214679 - DNA, 497 bp, Homo sapiens
ggaaatcgcagctgcctacatccacatgatgcccaacgccgttccccccggggaccgggaggtggacaacgatgaggagaaggagagtcctttcgatcgcatgtcccagatctatcagacatccccagatggtgaccctgttgcagagtctgtctgagagctggactgcgagggggagatttctttagacaaaataacacctttcaccccaaatggattccattaaactgcattaagaaaccccctcatggatctgcataaccacacagacattgacaagcatgcacacacaagcaaatacatggctttccagtactgctccctttatcatgtgtttctgtgtagtagctggtgtgcttagaaacctcaccccattgattgatagttcaaagaattggcagaagcagttgcaataaactcagtcaaatgtacccagcctaccagagatggaacaatgatcctgtgagagaagagagtatggtgctggctccttaaaa

SEQ ID NO: 214680 - DNA, 128 bp, Homo sapiens
cagtatatggagctccaagaatatgaaacaaacttgagattccataatacatcatgaatctttgatggtagatttaattagcagtcagcagtaacagtgttttagcttgaacctctgggctataagat

SEQ ID NO: 214681 - DNA, 389 bp, Homo sapiens
ggaacacagatgagctgggaagaggctgatactctcagatgccgtggagttgggagtgtgaggacccgggaaggactgggatcctgcagagcctggccttgcaggccctgctggggagtgtgttcagtcctggagacatgggagctgtaggatattttgaaccaggagggtttcagaattcctcttcaaggccatctgggtacgtggactgcaaagcacctggcagctccctgtgcccacgaagttactgtgctccatgttgtgcatggctcttctcctcacctgtcatccaggggtgtcataggtatgctgccctgttcctcagactgtaaactggcttcttgattaccctcatggctccttttccttcacatgagattttatggttt

SEQ ID NO: 214682 - DNA, 384 bp, Homo sapiens
agctaaaaggaaaagtcaagctggaaactgctcagggcaaacctgccttccattctatgcaaagtcaccgtctgttcactaagacagatgtatattctgattgcttcttttggaaagacttatcagaaactcaaatgaatgcaaccatttttctctcagctacttgtgacctggaagccagttccctgcttctgttgtccccatctttctggaagaagctaatatacttcttacatatattgattgatgtctcatatctctctacaatgtataaaactaagctgttcccctaccaacttgggcacatgtcatcaggacttcctgaggttgtgtcatggatgtacgtcctaaatcttggcaaaataaactttctaaattaaacca

SEQ ID NO: 214683 - DNA, 182 bp, Homo sapiens
ctgggttagtgccaaggcatgttcactgcattacacaaattgattagagaagtcatagtccctcacacttgctaagctgacgattcagcctgtcaaggtgccattgtgcagtcgggtgggaaggtcaccttggccataaatcctggaagccacctggctgagagctctctgtaaacagcttt

SEQ ID NO: 214684 - DNA, 238 bp, Homo sapiens
tggtgtcaatgaattttatgaaatacttaatcattggattcataagtccaggtgaagcaccacagagtatgtttacaaaatggcaataggcatgcgcatgtatatctttttttgttaacacctttgttgactttgtggtttggcaaaggtgaccaaccctgcttttattctctatcaccttacatacactcatgtaattctaacttctttttattccctaaaagtattcacttaaata

SEQ ID NO: 214685 - DNA, 359 bp, Homo sapiens
ttttttttttttgagagagtctctgtcgcccaggctggagtgcagtggcacaatctcggctcactgcaacctccacctctggggttcaagcagttctcctccctcagcctcccaagtagctgggattacaggtgtgcaccaccacacctggctaatttttgtatttttggtagagacggggtttcaccatgttggccaggctggcctgagactcctgacctcaggcgatccggccatctcgacctcccaaagtgctgggattacaggcgtgagccaccacacccagcctcctcaccaacttttgatattactagtttttttcttttcagcccttctgtcgtcttctcgcccccgtatag

SEQ ID NO: 214686 - DNA, 417 bp, Homo sapiens
ggcctcatcctcattcttcaaagccaggcatgtagcatcttccggctcctctctctcgctctgaccttcctgcctctctgttacaaggatccacttttgtggctaaaatgggtccatcctccccagcctgaatgtgaagaccccctcctccacggcaccccattgcccaggacaaggatggggcccatcactgctgcccagaggatagggagaccctctccaggtttcctgggaaggcatcaagatgttcgcaaggctcaaagaaaaaagaaatggctgggcatggtggctcatgcctgtgatccgagctctttgggagaccaaggcaggagaaccacttgagcccaggagtttgaaaccagcttggacagtgatgggcaaaccccatctctacaaaaaataaaaaagttagctgga

SEQ ID NO: 214687 - DNA, 434 bp, Homo sapiens
aggggaacagaaaaggggagaggtagacttgaaatggattctggataaagtcttaaaacctgcaacttgtttttcatgctaacactgcgtggcccagattagtcttaaatgttcattcccctttcctggtggcaaggagaaagttccctaagtcagctcgagcctctggctcgtcctcattgcctctgggcaaaccttaaggtcagtgtttccttgaaactagataaactgaccctgcagtgcccagcccggccccgcgggcgccccgcgtgacggcgctcgggcggcaggaccggcctggggacgcgcggggcggcgcggttgcccttttgaatgcctcctgcggctcggagcgctggcgggcgctggagtgtgagtgaatgtagccccgcggagccaatgagctgggaccggatgcgatatatcctctggga

SEQ ID NO: 214688 - DNA, 637 bp, Homo sapiens
cctcaagtgatctgcccaccttggcctcccaaagtgctaggattacaggcgtgaaccatcgcacctggccggatgtttatattttactattctgaaagagttttccatacacttaagtatgaaatataagccctttgctattatgttacagttgcgtatgtgtactcaatttaccttaatttttgcccagtattttttatggaagtacaattgttttataaacagttaattagaattgcttaattctatcaattttttgttcagcgtttctatctttgatatcatactataaagtcttacctaagtcaaatttcttctaatgctttatcatttctttttaatacattttatctaaaaattactttagtgtaaggtatttgataggaatctaaatttgttttttaaatggttatataatttactgactattacttttcaggattggacgtggtgactctgacgttcgtatgggctgatgcctgaacgatactagccaactttttttttttttttttttttgagacggattttcactccagccagggtgacagagcgaggcaccatctcataataaaacgaatatgacagctattctccctggttcggccccccacccccagataccagctgcttttgt

SEQ ID NO: 214689 - DNA, 141 bp, Homo sapiens
tgcctgtctctctcactctctctctctgtgtgtctctctctctctttctgtttctctctgtctctctgtccgtctctgtctttctctgtctgtctctttgtctgtctgtctttgtctttccttctctctgtctctgtctct

SEQ ID NO: 214690 - DNA, 457 bp, Homo sapiens
acaagagcgaaactcagtcaagaaggagggagggaggaagggagggagggagagaaggaaggagggagggaagggaaggaaggctaattcaaaactagtacttatcatcatggccacatctgccaggcaccgatcccacttcctgtcaagcctccactccaacatctccccacccatggctccctatctcatttaatttattgaatattacactgaaagtgaaaaacagaatggttttatgggtactcaaagtatggtttctgctgactgcatcacttttgcaccattgtaaagttgaaaaattgttaagttgaaccatcataagtcacagactgtattttattccttttgatgctatttcaaatggaattgttttgtgtattttatttttggaaagttcattgctagtgaatagaaataaaattgacttatgttgctcttgtattcttcaaaaaag

SEQ ID NO: 214691 - DNA, 461 bp, Homo sapiens
cagaccctaccgggtgtcccccctaacacagggtcccatgtgaggttgcagctcccatgccaccacccccagtgtccttgagggcgagttgggttgcccttctggaggccattagtgcttgtcacagcagcgtgttgggagatggagtctgagggccgtgatctgtgctccctctgggagtgtggtctggaagggacagaggaaagaggagcagaaggagccagaaaccaagcaggcgcggtggctcatgtctgggattataggcgtgagccaccacgccaggccagacctggctaattaaaaaaaaaaatactcccaaagcactgggctgacaggtgtgacctgtttaattcttttgtttgtttctttacttcttattgtctgcctctcttcagaagctaattcccattagagcaggtgctgtattctttgccaccacgccaggccagacctggctaatt

SEQ ID NO: 214692 - DNA, 456 bp, Homo sapiens
actgccacttacctattcacttcttgtgctggttagacataagttcaccatagtgcttcttttaatgttttattttctttctaaagaaaaaagtacagaaaaaatgaggtttaagttcattaaacagcccaaatgttcatcaacaagtttatagttcagataaacttctagttaatgccaactaatctatagtgacagaaagcagagcagtgaaatctgagtacagggcaggaaacaaaagagaggaaggaattagaaagtgtcatgagaaattcggggaagtgtatgtgtggtcattatgtttcatgggcgtttatatgtcaaaacttgttaaactgcacactttatatatgtgtagtttatatgtaaattacacttcaataaaactgtaaaaaataaaaatttataagttttatttttaagaaaaggagaccgccaacaaggtctcagaaagtg

SEQ ID NO: 214693 - DNA, 477 bp, Homo sapiens
cacactcccaccaacttccaggcccacctcaatatcctgatgtgatgctctccttagacctcttgtggttcttcagccaggagatggagagagtggggttgctaggagccaggcagtgaaagttggttgtggtggccagcatggctggcagtttcctgtccatccactggggcaaagtccaggaaggggtctctgctggtggaagcacacatgaaggccatagctgaggtgaggaacagagacccatctgaccagacccccgattcaagatcaccctgcccactccgagtctcatgtttttctcctgtgtagggagagtgttgacatttcaaggacatctacttgggctgaatgaggctcccaggagcttcaacacaatgtccccacccagtcatgctcagagctggcaatgtgtgcctttctattccctctgcttcccccaagtggctgctcctgctgagaggctggggttcttca

SEQ ID NO: 214694 - DNA, 331 bp, Homo sapiens
ccaagttttctgtaatgagtttacaaaatttttctgattgacaaaaataatgacctttttttaaatgcttgataccattctttctatgggatttgtctctgtccccatcccttttctcacccctctccccacaaaaagtagaaaattccacagatattattgttctgttactcatcagcatgtaaataacaagaggctttaagtatataaaatatggccaggagtatgcaatttgaacaggaaatggcgtgaaccgaggaggcagaacttgcagtgagccgagatcgctccactgcactccagcctaggggacagagtgagactccaactc

SEQ ID NO: 214695 - DNA, 502 bp, Homo sapiens
aacctgataccctgaaaatgactgggaaaaagatgaacagatccatattgggttattggctcccaaaataagaaagcaaaaaacaacatatgtccactgtcgaatagttcgtaccccaaaaaatctattgtgaagcctaagaaaactataagacaacattcccagcaaaattaaatatagtcaagtgaacattttatgatataaaacaaagaaattaaggaactgagaacaaagtggacaaacaggaagggctggaaagaagtgattgaactcagaaaatggaagaaaatgacagttatctgagaaatgaggagtaattacagggtgcccaagggagaatacacccgaaaaattaataagggacattaaagaaacaaaggaaaatgaagaggatgaaaataagataaagaattatttgaaaaagttagagataaaacagtggaaatggaagacagatccaaaaggcataacatttgtatatgtgtccttgaagaacaaaaac

SEQ ID NO: 214696 - DNA, 449 bp, Homo sapiens
tgccttgaattaggaattaaggcttttccgttctatgtgtcgtatcttttgtcaagactgggaatggtagggtttacttaaggcattgaggaagaccccagggggctagaactttgggcaaaataaggtcactgggggcaggtgatgaggatggggatgttagctgctattgcagttgctgagataaaacccagccaggtaggctgcagtaattagaagtaccacagactgtgtgacagatactagtcaaagaaaatagaatcaggcagatcagtgagagatcacgcgagtatgctagaaggctgttatgtgtagctataaagacttactacgggccaatatgcaaacatccacacagtcaggaagtctgagagcatcttgaggcttggcctcaaggacgaaaactcttccaaccctgaagctgaggttctcaaacttgagcacgtcag

SEQ ID NO: 214697 - DNA, 428 bp, Homo sapiens
ggtcacagaaaaggaggtcagacagatgttcccactggcctagaagaaggccaaaatccatgttgtgaactgcccacaggggccactcctggggtaaataactccaaaatcctctagttactgagagaggtccctggctaatacctagaaagataatggacactcacagtcctaaaactacaaggaaatgaattctgacaacaataagtgagtttagaagaagactccaagcccagatgagaacctcaggcctaggtgacatgttaatttcatcctaatgagaccctgagcagagaatccagtcacaaacactggacacttgacctccaaaaaaaaagtaagataaaaaatactgttgttttgtgcctctaagtttgtggtaatttgctatgcagtgagagaaaaataatacaattggaaagagatga

SEQ ID NO: 214698 - DNA, 413 bp, Homo sapiens
atgattcatgtcccagtgggatggagtgggaaggtgtaaaatttcatcatactcctcagactggcacataatttaaaacctaagtattatttatgtctggaagtctttatttaatatttcagatcacagttgaccttggaaagcaaaactgaagataaggaaagactactctattctcattgctgggcaaagtccctcatacttagtaagtgatgtctttccttaatgaagtcacagacctaattttatgttttagcccttccacttataagatatacatccaaaaaaaggacaaagcactccaaaggggaaatgtatctttttgtcaagtcagggaatacttagtaaggagaagacaatttgagttatcagtgtcaagagagaagttggattgcaggaacaaagttgatgcc

SEQ ID NO: 214699 - DNA, 429 bp, Homo sapiens
actggagagacgcctgtgacatcccagcaggtgccactggggaggccggggcagctgggtacttcagctctctctcttctgcgtctccaggccccctcagctgcagcagctcccccgattttacttagtccgtgttcctagggtcacattccctgaggcagcacctgtggcgcggcgtgcgttcctagtaaacacgcaccgagagcacggtgtgcgttcctagtaaacgtgcaccgagacaaggctggggcttgtgcttctggtcacctgcatcccaacgagccctgggaagatggtctggaaggaaagagtatgtgtttgtgatattagggagtgagagtcttggactcgagagatgttcgtttattcttggttaattttctgattgaatagaaagtcctaggtaggcatcaatttaaccgactaaaa

SEQ ID NO: 214700 - DNA, 415 bp, Homo sapiens
agaggagtttagttccaagtctaagtctgaaacaaagatgtcttcctgagacaaactccttcctatcttggggatcagatctccttagcaaagctaacaaattaggtgcgagattggaaattatggctcaggagccatgcagccagaagccacatgattcctaagctccccaactgtgcctgtatataagattattggtgtcaaacctaagattggtgttcaaggtatttttcagaccctgccttatgatggactagctggcacacccagaccggtaaactggctcatctggtcctgtggcccccactcagggactgactcagtgcagtaaacaagctctgacactgtgatttcatccccaacccaaccaatcagctttgcacattccctagccccttgcctgccaaactatcca

SEQ ID NO: 214701 - DNA, 565 bp, Homo sapiens
atgtggtaggagctttgcttttaagggaggagggctagagggcagattggatccagtcccagttctgtccctaaccagtggtggctccttggacagattattccctgaaaaagggggataccttgggtgactgccagagtctcctccagttctgacattctatgttccctgaataactactagacctaacttaccagtggccccctactgttttgtaggacttgccaagaccatttagtcattcagttaacacatacttattagcacctagtttgtacccatagatggtggtaaggaaaacacaatgggaactggatatgaggtgagcaaaaacagatgaagtccctgcccttcagtgttttcagtctagtaggggccacggatattatatttcattaattctgagactcatatttgaacatttgtcaagtcaggatgcatcttcaaattgacaggatattataatttaattggcagcatttgttttttattcatgccaaatagaaaaataatataatcaggattatacaaataactataaaattctaatggataattgccgaag

SEQ ID NO: 214702 - DNA, 1302 bp, Homo sapiens
ggcaaattcatatgctggagtttcatttttaaagcagttgaatcaacaaggtatgccttcattaattatatttattaggtgtttttaataatctgaggaatcttgtaaattgaatgctgtattacagtaaagtgaactttttttatttagacaaatgatctaacccagttaagcatgcgtagaagaaagcctggaagaaaaaaaacactaaaattttatagtagcatggttgtagtttttatctaccttgttttcaacagtgagaatgtattccttctgtaatcaactgatttagcttttctctatggcatttttgagaatttattcatttaaattgaatacacaataactacgtgtaaagtaaagctttgtgttctaagattgtgtctacacttagttttcatcctaaacatttagagaaattgattagaggaatgataataattatattaattgatttggacaattcagttagaggactaatttataattttttgtgctgctttataacttaacaaagcgtaacctatgaactaagctattattatcatcatttcaaattggaggatactgaggctcagaatttgggacttaggttttatagttaggaaattaaaaaaccaatataaattcatggttaaaaaaattcatacaatgctagtgaagtcttctttctgctttaggccctcatttgctttcccagaggcagccattcttgccagtttcttgtgtgaatttccagtaatagtctgtgtatatgcgaataaatatatatgtatactgtatatgtatattcttttgtgtaagctgtttattgtttcacagtttgttgttatattatttttagcttaactgatttaggagattgctctataacatcacatatagatctcccttattgttttcaaaacctcagggtatttctatatgtgaacttactgttatttattttactggccacctaatgctggacatttattttgttttcaatcttttgttacaactatgctgcagtggatactcttttacatgtttttgtgcacatgtgtgagcatatggattaatttctagtaggtgtaatttttgggccagaggatacttttaatctgcatagatactgctaatttggggtaggcatagtggctcaggcctataattccagtgctttgggaggctgaggcggaaggattgattgaagccaagagttcaaggcctgggtaacatagtgaaatccatctgggacaaaaaaaaaattttttttaattagctgggcatggtggtgtgtgcccgtagtcctagcag

SEQ ID NO: 214703 - DNA, 650 bp, Homo sapiens
ggcaaattcatatgctggagtttcatttttaaagcagttgaatcaacaaggtatgccttcattaattatatttattaggtgtttttaataatctgaggaatcttgtaaattgaatgctgtattacagtaaagtgaactttttttatttagacaaatgatctaacccagttaagcatgcgtagaagaaagcctggaagaaaaaaaacactaaaattttatagtagcatggttgtagtttttatctaccttgttttcaacagtgagaatgtattccttctgtaatcaactgatttagcttttctctatggcatttttgagaatttattcatttaaattgaatacacaataactacgtgtaaagtaaagctttgtgttctaagattgtgtctacacttagttttcatcctaaacatttagagaaattgattagaggaatgataataattatattaattgatttggacaattcagttagaggactaatttataattttttgtgctgctttataacttaacaaagcgtaacctatgaactaagctattattatcatcatttcaaattggaggatactgaggctcagaatttgggacttaggttttatagttaggaaattaaaaacccttttattcttgggaaaaaatctaccagg

SEQ ID NO: 214704 - DNA, 715 bp, Homo sapiens
tgctttcaagtatcacttaaccaatctgtatatggcttcatgtttggatgacacagagaatggtacaatgttccagaatactagatataatttgaattgagcaaattcacatgcaatccattttgataccatggatctaatttggtctaattctgtcctgtattgcctgcgacctcctcccctcccaccagttccaaagctaactggaggggtggagagactgtccaggcccctgcagggagacagaaagaggcagcaagcttggctctgtacaaaagtctgaaacccagcactttaggagactgaggcacagagagtgcttggagccaggagtttaagaccagcctgggcaacacagaaaaacccccatctctacaacaaaaatagaaacacttagctggcgatggtagcacatgcctgtagtccctctactatagaagctgaggcgtgaaggttactcgagcccaggagttctaggtcacagtgagctgtgattgcgccactgaactctagcctgggctatgaaggaagacttgtctcaaaaaaaaaaaaaaaaagtctgcacctggatcaggaggggagctggcacctagcaaacatctgttgactgactggcataaacatttatttataaaaaatttacttccaaagacatttccctctttgcttttagagatcaacttggaggctgaaatgacttcacaggagaaggctt

SEQ ID NO: 214705 - DNA, 431 bp, Homo sapiens
tcttactttgtaattaaaaatgaatgcactgcaagtaaaagaaaatggtgcagctctggaaagctgcacactaagctgttgacaatggggactaggctgagggttctgtcactttatacatacacactctggactgtttgaatttgtctcaagaggtacttttctttttcttttttttgagacagatctgggcaacaagagggaaattccgccttaaaaaaaaaaaaaagttttcccagcaccatttcttgaagagactatcctttccccagtgagtgttcttggcacctttgtcaaaaatcagttggctaagccggggcagtggcgcacacctgtaatcccagcactttgggcggctgaggtgggcggatcaccttaggtcaggggttcaaaaccagtctggccaacatggtgaaactccgactctacta

SEQ ID NO: 214706 - DNA, 580 bp, Homo sapiens
tgattcagtgccatcatcagcagaagcgagcagctgtgtgaaaccactgcttctctgagcctgggatgtgttaacgatatattctcagaagtaaataatccttttgctaacaagacgaaccctatttactcactttcattcccttgaggtttgaattcagcccggtgaccgtgtcataaatatcattctgacctccaagggggctgttcctgaatctgagttcttttgcacgtgtccttctcggaggttaaactgtccacccagccatgttgccttatattcgtcatattttttaaaggaaccaaaggggttaattggtttcttcagtaaagagacttttgccgaagaaagcaatttagaaaaaaaaaaaaaaaaaaaagaaagcaattttaggttagtttgtgtagtagccagggaaatgtactgaaaggggtggaccatgtttctgttgtgcagataacctacatactgctttagaaatgtgtgatttccagcgtgtgctaaaataagaagtggttgtttgatttatctcccacaatggtatggcattctcttcctaagtggcatttcattcgcaagc

SEQ ID NO: 214707 - DNA, 591 bp, Homo sapiens
ttataatcaaatttccgtgctaaatgacattcctgcgagcaccatgacagttgacaatcaccatgacaatgacagaagaaaccataaaatgacaaaaaggaaggcggcaactctggttctgagttttctgcccatttccagaaaagatgtgaatattcttctctttgcttttaatgcctgaccctgtcattagagatattctgtatctgtgacttcctggttttcataagctgagaaggtgatttgtgagccaatctcctggttctcaatttcatggccattgaatgaagctggtactgcttgatactcactttctgttctgtgtattggcttcctggcactgaagagggaaagacctatttaatggggtgggggcgggggggaccagctttatcagtaacagaaagttaggacagtcattccttttcaagacacctcttcatcctcaaagattaaacagctctttcttaatgtcataacaatcaaaatttggaataaagctccttatggatcacgggtgagagtgaatttgctctttgaaagaacagatgtcacaatatatgaacatattttcattttattaaacatgct

SEQ ID NO: 214708 - DNA, 469 bp, Homo sapiens
aaagatttaaaggtcattcagagatgtatatttaggattagaattgctgggttacaggctgttcccgtgtgtgacttgactaggtttgtcagattgttttctaaaagtttttagtgtacattctcacccacagaagatgagcgttcccattgctgagcaccctcagcaactctgggaggggtgaaatactagctcattgtgttttaaattggcctttccctgattactcaaaaaactgagcatcttttcgggttaattgaccattcttgtgtgctttctgtgaaatatctgttcaagagaaagaaatatctgttcactatctatattagtctgttttcacactgctgataaagacatacctgagactgggctggtctcaaactcctgacctcaggcatgagtcaccacacctggcctgctctgttactctatgagcatataagaattattttaggagagctgctactta

SEQ ID NO: 214709 - DNA, 587 bp, Homo sapiens
tggaagctggcaccctctccatgacttcaggctcatgaacgcacttcgtgaaagatctggcactgcaggatgagcttcccacctctcgctgggaccgaggctggcacgttctgggaaccctgctttcgagtgtgtcacctggggcggatgtggcactcaccgatcttgtttcagggaactcacatcacttttgaaaagcgggagacagattccatgacttgtttttgttttgttttaatacattttaattgtgagaacgattatcccctttccaaaactaaagttttgagcctctcagagtaaatttctagatacgcttaaaaaaaagtaatgtttttcatcactgttactgctcagttgtcaaaataagacttgtgagtctttgggaagaagaggattatacttgtacttacaaaattattctaacaatgcctgtggctaagaggaccctcaaaatgagtaaggaactgtaacagctcacaagggaccacaggctctgcagagtggcttcggaatccaagactctgaagcacacctgggtgtcctgccaggaactgcagctgcgcgccacatgcgccctgtcagat

SEQ ID NO: 214710 - DNA, 456 bp, Homo sapiens
agaaagttgattgtgcagttactatgagactcagttcactgatggagaaactaagagagcacagttaattatgataattccctatatttaacatttggatttgtttgctttgtgttttttgttgtgtttgttggttttgagatggagtctcactctgtcaccctggctggagtgcagtggtatgatctcggctcactgcaacctctgcctcccggattcaagcaattctcctgcctcagccttctgagtagctgggattacagacatgtgccaccacaaccggctaattatttgtattttttttgtagagacagggtttctccatgttgctcaggctggtctcgaactcctgtcctcaaataatccacctgcctcggcctctcaaagtgctgggattacagccgtgagccactgcacctggcctgacatttggtatgtatccttctgattatactt

SEQ ID NO: 214711 - DNA, 290 bp, Homo sapiens
tcatcttatttaatccttcagaggattctgaggtagaaatcaaagcctcagataggatttaaaaaataaaaataaaaataagaccaggcacagtggctcacacctgtaatcccagcactttgggagactgaggcgggtggatcacctgaggtcatgagttcgagaccagcctggctaacatggtgaaaccccatctctactaaaaatacaaaaattagctgggtgtggtggcagatgcctgtaatctcagctacttgggagactgaggcaggagaattgctggaacccgc

SEQ ID NO: 214712 - DNA, 660 bp, Homo sapiens
tctccagccacatacagaagtatagaagaatctcacaagtacaatttgagttaaaaacaaaaacccagacctaaagatatacatactctgtgactccaaatttaataattgctcatagaagtcaaatagaggttaccctgtaagaatgggttggtgactagagtgagcacacccagattctggggtcctagtcatgctctgtgtcttgacctaagtatacaggtacatgtaagtttgtgaaaatgtaacaagctgtatgatacgatttttctaatattgctcatctgtgtttgaaacatatacttcagaaaatgttaaggaaaaaatagaaaaggaaaagaaaaatagaaaacctaaataatctagtacttattaaagacttgaacccgtcataaaaagcctttccacaaattaaatactaagccaagcagacttactaaattctaccaaaagctaagaagctatgtcaattttatacaaacttttcaactaatttatgagcattaatttgatacccaaacctggaaggggactatataggaaaggaaaatgataaagtcagtcttaattatgactatagattgcaagaacccttaccaaaataggagcaaattgaatcaaacaatttttttaataaggcaaaatgtaacaaccaagttg

SEQ ID NO: 214713 - DNA, 592 bp, Homo sapiens
ctgtggcttgttgcttcaaccctgggaggcccacggagttctggatgtttggggggtgcactcataagcagaaaatccaagcctctagtctggctcccctggttctggctgttaccccattacagcttccggacttcagcagagaagagcgaattctttcctctccccttacactctctggctcaggaagcagtggaaagatgtaggggtcccagaacctccctcaactggtccagtattcctgcgactgccgaccagacataaactcaccaagttttttacaagcttgtcccttcctggtgagaagctccccagatataacaacagaaacagacctatcaggttctgccaggaagaaagagccatgcgtaagtcagaccttgtggctccttcaaacactcggaggcaacattaatctggattcttggatgaaaggtctagcttgccttgccagttcatttgtaaactggacagccagaaagcacctccgagcgtggagacccactgctccactgaagcttttagggcggcaaggccttcttcagtagtctttctgtctttctttcagctgcaaattcagcagcagcattta

SEQ ID NO: 214714 - DNA, 378 bp, Homo sapiens
ggtactgcagcactgaagtagtaaagggtcacaaataggctctgaggttgtaatttgggccttcatcctggctccaccatcttcttgctgagactttgggcaagttccttaacttctctaagcctcagtgcctagtacgtaaaaagtggtggaaaaatgttggtgctatgattattcttttcagctggggcagtacctaccaattttggataaagatggtatctcctgctcattatgtcctctccatacatggggctttttattaagtcactggctcagtatttgtagggtggacccatcaaagaacccgttgtatccacaccttccagtggtttagctttaaagaaaaccctcctcctgcttatatttgtatgaggt

SEQ ID NO: 214715 - DNA, 259 bp, Homo sapiens
tcctccccactcctccccaccccaggaatctggatgctcaaggcttgactatttcctccattctcccctcactcaagccccgtgttcagaagcaatcagataaactcattcattctgaaaagtttaatgtgtgactcttccaaggacagtttgttttaacagaaaatcaagtttcagaacaaatgtccaacaggtcccaaatttaactcactatactcaagagtgtgaaaatcaaaaaagtaaatttttgtttcccatg

SEQ ID NO: 214716 - DNA, 528 bp, Homo sapiens
ctgtgagctgctgcggggctgcataagacaggtgcctgtgtggtgttcctgctcggttcgtttcctgttagctgtttcctttgatatatatactcagaggaggaatatgagggtccacgatgtcgtaggaaccagaacacaccggcatccgccagaggctgttaatcttatgtaatcaatcacagcaatgaccttggcgagcatttgccctaaacgtgactgggctcctgccaacagaaaagatattggcagtcattcctcatgggtcagtgcaatcaaagatgatagcttggcaaaaagcctcaaggatggagtggtccttgctgattcacaaataaactattttattttattttttaattcttctgagttttctgctgaaagatccagatgctattttcaaggatggtgcttcttggaagaggaagaagcaaatgatgggggatccaggcctttggcatggagacaaagtaatggaatgaaagaacaccacctgttacgtactactgtaaatctttctcccagata

SEQ ID NO: 214717 - DNA, 1200 bp, Homo sapiens
gctgctgctatttgttggcatagtgaccttccaggactattcaatagtctttattccctgtactgtacaaccactaaagtctctgctcagttaacttagtggtcagctaatgattcgacagacatttccttaaattctgtgaatcaataaatattccattctttgctgagaagctctagatgtatccatgtgtgttaagacatgccctcaacattcaggcagcttagaactctgccttagccttcacttcctacttgcacagaaactccaatcagccagaggtgaaagagtagggccctctcaggtctttcccaggcatgcacacagcttttcacatttatgcaaccttttaggtccccaggaatgtatcagagcttttcaaagaccctgtggactgcttgttccccagatttttttttcaagttttgaccaggctcttgtttgtcccatctggtatcacagtgtcaaaccacagaagtgaaaataaccaatgtgggagaaattttaggtaaatattcaataaacctttgtgttaggatatggtgccaagaaaagtgaggagacagaaatgatgctgagcctcctgtgtcattctccctgacctaactgcattatgttcatttggagaagtgggcaattcactagcagaatggactctgcttgagaaacaggctctcttcctttactcaggatgaactcccaatgccccacttaccatcatgcactaccatcaagcaaatttttcttgaactgatttccacacagttttactgtgattcagaagaaaaaattacttggcatgagatgttaagccttaaatacaatataatacaaacccttctgcacatccaagaagaagatagattacatattgaagactaaatctggatcatttttctactggacagtggggctgaggaaggaaatcaggcttcatgaccattccatactgtaattttaactcacagaatctgcactaaaaattccttaagcacttacactgttaacaagttctattgctacaacacacctgcacataaaagaaatgtttacccatagtttcacctatggcaagtgaaaacagctgttttatgatggatatgatataaaaaaaaacctactccagaatttaaatttacacaacttaaactacataatatagcatcagtatactcaacatatagtcacagacaggagcag

SEQ ID NO: 214718 - DNA, 221 bp, Homo sapiens
gtgaccacagtgaggaaactgtcaaattgaaggggagggaaaccccttctgctgctaggtcaaagcagtacctcctaaaatgtttctgtttccaggtatgtgctcttcccagcgcaggattagttgtgggcttgtatctcttcttttacagcatctggtgtgtcatcagctgtcaggatattctcagtttctgctctctctccatgagaatcttcatattg

SEQ ID NO: 214719 - DNA, 1675 bp, Homo sapiens
gaagctatatccagctgctggcagagttcctgtcaagggatcaagtcttccaacagaatggttatggtttaactcagcagaatttgttgaacaactacgacatgctggggatcatggcatggaatgcaacttgcaaaaactggctggcagcagaggctgccctggaaaagtactacctttccattttttatgggattgagttcgttgtgggagtccttggaaataccattgttgtttacggctacatcttctctctgaagaactggaacagcagtaatatttatctctttaacctctctgtctctgacttagcttttctgtgcaccctccccatgctgataaggagttatgccaatggaaactggatatatggagacgtgctctgcataagcaaccgatatgtgcttcatgccaacctctataccagcattctctttctcacttttatcagcatagatcgatacttgataattaagtatcctttccgagaacaccttctgcaaaagaaagagtttgctattttaatctccttggccatttgggttttagtaaccttagagttactacccatacttccccttataaatcctgttataactgacaatggcaccacctgtaatgattttgcaagttctggagaccccaactacaacctcatttacagcatgtgtctaacactgttggggttccttattcctctttttgtgatgtgtttcttttattacaagattgctctcttcctaaagcagaggaataggcaggttgctactgctctgccccttgaaaagcctctcaacttggtcatcatggcagtggtaatcttctctgtgctttttacaccctatcacgtcatgcggaatgtgaggatcgcttcacgcctggggagttggaagcagtatcagtgcactcaggtcgtcatcaactccttttacattgtgacacggcctttggcctttctgaacagtgtcatcaaccctgtcttctattttcttttgggagatcacttcagggacatgctgatgaatcaactgagacacaacttcaaatcccttacatcctttagcagatgggctcatgaactcctactttcattcagagaaaagtgaggggcttgtgaaacagattgttctacagatgaatctgtaagccagttacagtttgccttaactcatagacatcaatcagagagtgtcacagatttaaccttgatctaaagacaagttgtacccagagtatgtgaaaagaatgggacgacaagaatgtactggtttcttcctctaagaattgaaaggagttgaactgccttatgtttgggcatgtaactccaaaatactaggtagtataaggctttctcaatcagtgcaaaaatggaagatatataaagcaacaagttgtctgcatttgatcactggtcagattgtaaaaaaaaaaaaaattgttttggcaacattctctatgttattcttattcacatgatcctagaactttatgtgagaactgaatagcagaagatatattattaaatagtttttggaagttgtgctgttaagcaaatgtaaagtcaacagtaacaatgattaagaaaggaatataatgagttcaaagatatctatctgatatattttttatattcatcatgaatcggggtagtcttgtaatttatctaacctttttg

SEQ ID NO: 214720 - DNA, 361 bp, Homo sapiens
  misc_feature (4)..(4): n is a, c, g, or t
ctanctagaggatcccgccacggtaattttctgattggcaattggttgagttattatctaaagacctggaatcaagagaaaggagtgtctgggttaagatgaggggttgtgagcaaggtttttttttgtttttttttgagatggagtcttgctctgtcgcccaggttggagtgcagtggtgcgatctcagctcactacaacctccatctcccggattcaagcgattctcctgactcagcctcccaaagtgctgagattacaggcctaagccactgcacctggccacaggacaacttttaaagacattgttagatcactgccgaatttaggatgaactcaccttcccctgtggatgaaaaat

SEQ ID NO: 214721 - DNA, 831 bp, Homo sapiens
ccctttcagaagcccctctctctcacaggagagagagctgttctcctctctctttcttttgcctattaaacctcccctcctaaattcactcctcatatgtgtcagtgtccgtgatcttcttggcatgagatgacaaacccagggtatttaccccagacaacaatgccgcttcactttgagcctcacattatccatccataaaatgagacagtaacatttgcgtcagatgccggaggctttcaactaatagagtcaaactctgtaaaatatttaaagagattaatcctgagccaaatatgagaaccgtgacccatgacacagccccatggggtcctgagaacatgtgcccaaggttgtcgggctacaacctggcttcatacattttagggagacaaaggcatcaatcaatacatgcaagatgtacactggtttggtctggaaaggcaaaacaactcaaacagggagggcgcttctgggtcataggtaaattcaaagattttctgattggcaattggttgagttattatctaaagacctggaatcaagagaaaggagtgtctgggttaagatgaggggttgtgagcaaggtttttttttgtttttttttgagatggagtcttgctctgtcgcccaggttggagtgcagtggtgcgatctcagctcactacaacctccatctcccggattcaagcgattctcctgactcagcctcccaaagtgctgagattacaggcctaagccactgcacctggccacaggacaacttttaaagacattgttagatcactgccgaatttaggatgaactcaccttcccctgtggatgaaaaat

SEQ ID NO: 214722 - DNA, 324 bp, Homo sapiens
cctattggatgtaaagcagggaaaacacaaatatatgaagatgtctccagcatactgttatgatgtatattttttaattaatggaaaatcggatctcaccgtttcattctgcaaagcttaaaagtgaccttttgctaatgataaatgacaatatggttgacatatgaatagggctgaaatagagcacccccatccaaatacatacactttacaagtgtatgtaatgaaactaggttctcttttcagctgtagaagaaacatctttagccagctgaaaattcagatgaaaatccaaaaactgcaaagatgaaagaattggaacac

SEQ ID NO: 214723 - DNA, 431 bp, Homo sapiens
tctgtcactgaggttggagtgcagtggtgcaaccatagctcattgtaacctcaaactcctgggctcaagtgatcgtcccaccttggcctcccaaagtgctcggattataggtgtgagccagcattcctgatctaatatccccacttaagagaagagtcttctgagacatagagaagttcaccatttgcccatggaaatacagttagtaagtggaacagttggattttttttttaaaccctccaacttctggactcaagaaatcctcctgcctcagcctcctgagtagctaagactacagttgtgtgccaccacacccagctaacaggtgtttttaaaatacgttttaattattttgaaagagtttcaaagtttcagaaaaaatacaagaaaaacacaataaactctcacatacccttcactcaaactcctc

SEQ ID NO: 214724 - DNA, 634 bp, Homo sapiens
caccacaccataccacaccacactcattcaaggccacctctgagttgggctgaaatgcattggaattatataatacatccaatataatacatccaatttcaatattcccatttttgagcctttgacctgcatttttctcacaacatgtcatggaaatttgggcatttctacttaatgtgggccatcactatttccaagcttctaaaagtcattccagcaacatattaaaactggccatactagtgtataattcccttggaacaggtcctgtggaagataagatttgtcttgtaaggctctgttgaggtccctgatgatttcaagcaagcagagcaggaagttactttctaataagaaggaatataccagttatacacatccagagcattcagcacattctgagacttcagggtccaagtggctcttcccacatatctccaactaacttagcatcgcactttgtttctgtcagggcctttgatgtaggggatttggtaggtctcagaacccaaccatctcttaagttgtaaggttcctctgatcttacacttagatcctgagatttgctttgaatgtgtgaataaccaccatagtttccttttctttcttcaaagcattaataaagtagaagcag

SEQ ID NO: 214725 - DNA, 444 bp, Homo sapiens
tggttgggaggaaaatagatcaagcaggtgacaacctgcatattggggattttcctatgctgaaaattgttattctgttgcagcactccaccctcccttcacagccccaaaaaagagaagtacgagtgctgctgatgttcagggtttgaatatgttttggtttaagatgttcagtggaattagagagaatttcatcctgggcagtgcagtcaggctggaggagtattttggtttcatattactaaaccttgttttcccatcccagctgcttgtgtgctatcttggggccactgagaacctggctgggctctgcggggtgggagtgttgtcccggggctgagtccagccaggggtgaggtcgtcttggtgcacatcttgcacgttgcatgaagctcagagcccagcttggctcttgtgaacttcccctgtggggacacaccctcc

SEQ ID NO: 214726 - DNA, 462 bp, Homo sapiens
tggtgactcacgcctataatcccagcactctgggcagctgaagcatgtagatcacctgaggtcaggagttcgagaccagcctggccaatatggtgagaccctgtctctgccacaaatacaaaaattagccaggcatggtggcacacacctgtaatctgagctactcgggaggctgaggcacaagaatcacttgaactcgggaggcagaggttgcagtgagccgagatcataccactgcactacagcctggacaaaagagccagactccatctcaaaaaaaaaaaaacaaaaaaaaattcaaaaatacttataaatgcctttttttaaaactgtaaatcaagcttctcgcttttaaaagaaatccacaattggataagggaaaagcagcagcaaatattattaagcacttacatgataggtaccatgcttaccacttcatactttttgtttaatcttcataac

SEQ ID NO: 214727 - DNA, 510 bp, Homo sapiens
attgtacctttcactcttttcctgtatacaccagactcttccatgaggtggtcggcttcctttgcccgtaaggtatctacttcgatccagttctcctagaccaccctgacgtggctaagattggggctctggagtcaggcagccaagactaacaggcagcccagactccacatttccctggtgtgggaccctgggcctgttagctaacctcactcagttttctgagctgtaaagcaggaaaactaatagaaacatctttcttatatggctgacataaagaataaatgagcgaatacctgtaagagacttgatcagtacttagcacacgggaagcactcagtaaatgctggctgctgttgctaccattgttatcattattccagttcacagcaaactttctctgtgctttaaactcctttagtacatatttgcatttggcactgatcacacactgctttgtgctattactcgtcatcttacacatatggcttctctcaactaggctacaag

SEQ ID NO: 214728 - DNA, 403 bp, Homo sapiens
tggagagctgctacttttaggcccacctgtgttgtttagtccctgagcttggtcacgtgttaatggtttgcgtacttttgtcattttgcaaatcaactttatcctttcagcttaaaggaaaaagtgagttctaaaaattagtaatagagaacatagcatggatactgtgtttatttttatttacattcagtctcatcgggaagaacatagtaacattcatattcttttaaaaataagtcaaattactacttattgaaaatattttctgctgggcttggtggttcatgcctataatcccagcactttgggaggccagggtggggagatcactttagcccaggagttcaagaccagcctgggtaacatggtgaaaccccaacatggcgaaaccctgtctctaaaa

SEQ ID NO: 214729 - DNA, 113 bp, Homo sapiens
ttccaagtcagaatttctaatgaggacaatgggttccaagcactcctcctatgttctaaagagaaacacaagccacagcaaacagggcagggacaagatgaaaaatctcgagc

SEQ ID NO: 214730 - DNA, 433 bp, Homo sapiens
ggctcacaggctgggtggggatctttccactgtaccacactgcctctccttgccactccctccctggctcccctccttacaatgtcctccttttcttcttgacagtcagcaccttgttagggatccgggcaatgtgagctatgaaaagaaactttatagctctgtgctgttatgatcatattttggggggcggggtggcgagagcaggcaggaaggagccaagcaggcttgcctgcatgactgctctgtattttaatgggatccctgctggtcacaccctctcccaggctcccacaccccgagggccacatcgcggtcactgagcagtcagggaaatgaaaacagtaatcttagagtctagagcggagcagaaggcaagaccctccccactgcccccacccagaggctcagacaaggcatcaaagaagaggaa

SEQ ID NO: 214731 - DNA, 360 bp, Homo sapiens
atctccctggagctatgctaggcgctgtgatgggcagtgtttcctttaagattcacaaatgggccagagagagattagaatgcttttgtctatttgataaagaaattgaagttgtaggagatgaagtgatttgttcaggtttactcagcgagttagaggaaggcaaggattagaacacgtgtgcacacacatacacatacattttagattctaagtcttgtgagctttttttcttttaatacaactgctctgtttccatttctaaaatatggttcacatcttgctgggtttttaaaaactgagtaagtcttttctctgtttgtaactccttagcaccccaattccattaaacaaatgcac

SEQ ID NO: 214732 - DNA, 422 bp, Homo sapiens
tagagaaaaattaaaccatttatattattttctgaagctgagtaagaatggatcacatgataacatgttctcccagcaaatagcagtacatcttttgattttcttccctcccctcatgtattccaaatcaaaatctgcctattctaaatcactgtcgcagcaaaatgacaaacagaaaaagaaaagagcaaaagatgaaaataattccttttctatactgaattcaatggctcttatgtcactttggacaaattagttcagatttttctcccaattcctacctattaaaaaggtgatttctgccagggtgtggtggcttatgtctgtagtctcagcactttgggaggctgaggtaggcaaattgcttgagaccaggaggtcaagaccaacctgggcaacatggtgaaaccccatctcttaaa

SEQ ID NO: 214733 - DNA, 604 bp, Homo sapiens
agatgaataaggggcggtttctcctgttaagcaaaatgttgctttccattttccctgatgctctgtgaatgcctctcatccccatgggctcctgagtgatgtgcatgtttaaaaggatccccagctgcgagaggttttggaacctggggggttgaacagctcttaagttgttcagtgaacgaagaacagaatcatctgttggagtagaaagaactcaaaccagtcaggaggaactcttgttatagaagaccttgggaaactgttctggggttggggaacattggttataggaagtgtatggtttctttgtgggattctttgttgttggctgaaatcatttaagcttcttgactacagtctgactcacgttaaccattccttttctgatatggacattgctttcctggtcctttcttactggagatctttcgcagtctttccattgattttggtgagatgttcttagctcaaagactactgatgagttgaatggtgtagtcttgattttcgaatctggaaacttcacgtaattggaacttctttataatctctggttgctcagatcactgtttttagcaaaataaacacattttgagtcacgaga

SEQ ID NO: 214734 - DNA, 474 bp, Homo sapiens
tggatggagagaaaatatcagtttccactccagactaaaagataactttgtggcggggactatggccaataggaagtgattaatctgcgcttgtaaaggctggaaggatcagagaggaggaagtggcatactcttggaagcttcgtggttaagcatgtgcagtcagattatctgggttaaaatcacagctccaccacttgcaggctgtgtgactttgggcaagaggcttaatctctctgtgtctcaatttccttattcataaaatgggaataatctagcttgtagtatttttgtgagtctttggtgaatgaatacatgttggtccttagaaaagtccctagaatagaaagcactcaataagggccaatgagttattgttatctcaggtttccagcttgtgcatttgctatgatttgggcaggaaaccttggctccaactgcctgcagcctttagatcaaacccatcacacagat

SEQ ID NO: 214735 - DNA, 460 bp, Homo sapiens
cagacaagaaggtgtggatacaaaaactagcagttagaagaaataatagaaaatgaactccaactacttctgaaaaaaaagtaatgagggcaattaatacattgaagaaagcctcaataagtacaacagtgtagtactgacttatatatagaaaaaacctgatcagtggaaccaaatcctcagaattagacataagtgcatatgagaattttgtatgtgataaaggttgtatgttaacgtattaagtaaaagacggactattcaacaaatgggattggtacaactgggtgaccatctaaaataacatcatgttgaaaacatactgtatatattacggtaggacaaattccaaatatgctaaatatttataaacaaataaggtgataataataatattaacattatctggtgaatccatgggaggtcattatgctaagtgaaatcattcaggaacagaaag

SEQ ID NO: 214736 - DNA, 495 bp, Homo sapiens
caaaattttgaaaaaatgcagatgtttggctgactccacatctatcagattgcaatttctagtggtagtgtccaagctcctatatattttgtaccaactacctgggtaatttgatgggttttcagaactactcaactatataaaccaaagaacctcaaaccttaacatatatatgatcatgtgggaccttgttaaaatgcagattctgagtcaggagctctgggtgtgacctgagattttccagttccagcgagctccatgtgatgtccgtgctgatggtgtgtgatccacactttgaacaataaggctataaataataaccatctacattttaaaagatttcctttttttttttcatttaagtgtggtgtatctgtttcctactcttgcttattctataagagaagtgtaatgggctttagatccagtctaaaatagttttggtttggatattgtcttccattaaagtttcagtacgcagaggaaaaaaaaaaa

SEQ ID NO: 214737 - DNA, 329 bp, Homo sapiens
gaaaatgtcatggggtgaaaaaacaaaaggtagagcagggtacaagggaaataggggcatctgtagtgggggttgggggtaatgcattacactgttaagaatggccagagtaggtctcattgagaagataacatttacatgaatatttgaaagaagtagggaatggattaaccacagaaatatctgggttaggggcaatataggcagagagaactggcagtggaaaagccctaatgttggaaacaagggtggctggagtgaagtgagaaagaaggagagtaaaaggtgaggacaggagagcagtcaggataggtaggggcagagcaggg

SEQ ID NO: 214738 - DNA, 178 bp, Homo sapiens
cattttctttccctaaatgcttcatctccctacccctcctgcagtgaacctaatgtcctcgatgactcccagggcctggccgccgagggcagcctctctaggtacagtgtcaatgctacctgtctattggtgtctgtgctgggaaactagctgttccctgtctcctctgtctctctgt

SEQ ID NO: 214739 - DNA, 299 bp, Homo sapiens
tttttgtgtgttttttgtagagacagggcttcaccatgttgaccaagctggtcttgaactcctgggctcaattgattcacctgcctcggtctcctaaagtgctgggattagggacatgagccatcacacccaaccaaatgttacagttttttgtgaattagttttacatcacatagcatagtctcattcaaatatcccctctttaaaaaaagttaaaagacactatatgggaaaaaattatgttgaaatgaagtggaacaaagaggaaattatcatctaatgtatgcattaagatcatc

SEQ ID NO: 214740 - DNA, 459 bp, Homo sapiens
atcagaaatcctgggggtggagcttagcaatttgtggtttaattatccctccaagttagtctgatacatgcctaattttgagaaactctgatagagaagaaataatgcttgtcttaagatgaaatagaccatgattctagacaactcttgttaacagggtggctttggatcagatacttcatattagttgctctgtcttttaaaacttaagagtagctaccttacagtgttggtgagtattagataagtcatgtgtattcaaaagcattttgtacacagaaagctttcaaggtatgtgttctcaccacacacaaacaaaataagtatgtgaagtaatgcttatgttaattggatctatttagccattccacaatgtatatatatttaaaacaaaattttatacgcgataaatatatacaatttttatttgtgaattaaaataaaaaaattgtaaaaggc

SEQ ID NO: 214741 - DNA, 538 bp, Homo sapiens
tgcatgccacttctttacctcctgggaatgaatgcacagggctctgttgacaaatctgcgggaagtagaaaattttaccaagctcaaggttttaaggaatgacacgttccacatcaatcacagacatggcagaatgcttgggaaacatctgttgagcctaactccaatgagactgagatggtcagtggtacacactgggtcagcaagaaggatggttcagattctggtcccagaattccctgctgatgtggcatagcccaagctctggggagtggagcccatttagggatgtgtcccccaatagcaagctattgccagagactgattggaggcagaggatagggtgtttttaaagtgcacacaaggaagattctcaattgtattacattgtgaacacaaaaatttaggactccccgtgttgattgcagcttgtgtctgaggggagcttatttaaggaagacaacctgatagtcttactccttagaaggaactttaaagaatatttggttgatcatatagtcctgataagcaggaagaa

SEQ ID NO: 214742 - DNA, 515 bp, Homo sapiens
cattaattttaaccttattggacatcagagctaagtaaacttttaaaaagctgttctaagtaatgtgttcaaaatctagttgcagtcttaatcttcacaaagtgtaaatccagttaagatacttaagtaagtacctccagttagttactcttagtgagtgttttcttgtattaccactacagagaaaaatatcacttaaactggttattttgctgggggcgggggttgtgccacgcatggtggctcatgcctgtaatctcagcactttgggaggccaaggcaggcagatgtagcgaagccctgcctctacaaaaattataaaaattagccgagcgtggtgacatgtgctaatagtcccagctactcaggaggctgagataggaggatggcttgagcctgagaggcaaaggttgcagtgagctgagattgcaccaccgcactccagcccgggtgacaagagtacgaccccgtctcaaaaaaaatttgttttcatttcaattattgactttactagg

SEQ ID NO: 214743 - DNA, 412 bp, Homo sapiens
agaaattacagtcttcattctattttcttctttcaaggagcacggtaagatccatgttcacatgagagagaataagtggaaacattttacacactgtaaatgcttgagagatgttcgctgttatgttgaaagttgagtgaggggaaattctgagtggactcagagtttgaaaaccagggaacaagagcactgttctgctggaactctcttgagagtccaggggcggccgtctccccaggaaagcagggtagcgtccaagaatcatgcagcggtcagaggaactcagagactgacatttgtcacctgtccctggagagctgcagaaccataagccttacaaagatgattagcagcccacgagaccacagacagctcttccaaccagcaaacagagttggcactcttgcacaat

SEQ ID NO: 214744 - DNA, 475 bp, Homo sapiens
  misc_feature (378)..(378): n is a, c, g, or t
  misc_feature (408)..(408): n is a, c, g, or t
  misc_feature (450)..(450): n is a, c, g, or t
ttgtgatgcagttagtacttgttccttctcacatatacagatttaaatatcatctttatgttggtgaatttttatttttattttttaaaaattttatttatttatgtatttatttttgcgacggagtctcaccctgtcgcccaggctggaacgcagtggcgcaatctcggctcactacaacctccgcttcctgggttcaagcgattctcatgtctcagcctcccgcgtagttggggattacaggcacacgccaccatgcccagctaacttttggatttttagtagagatggggtttcaccatgttgagcaggctggtctcgaactcctgacctcagatgatccacccgcctcggcctcccaaaatgctgggatttagnggtgtgagccactgcaccgggcctatattnttttatatcaaagtgcataacatttacattccattcaatatntataataaagccttctagctctgtc

SEQ ID NO: 214745 - DNA, 195 bp, Homo sapiens
atgcatgctacacaacgggggtgagccacaaaacagtatgccaggtgagagctaggcacaaaaggtcaaacacactgccatacgagaggctgggcattccatttccacgaaatgtccagacagggaaatcacaggaaactactggctgcccaggtgctgaggggagggagggacggggagagagtgcttaaaggg

SEQ ID NO: 214746 - DNA, 285 bp, Homo sapiens
aactcccaaactttctcctttcagtttcttataaatttagaaaatcaaatcagttcttaaaactcagtgagaatggaactgattttggcttaaaatgcctaaaactttatttatttacttttatcttctcattcatatgtttctatcaggcaggcatactcagattacattttacatttctggtaaataaccacagtcaagtaaagggaaatataccctgaagtcataaaaagaaagaaaaaaataaaaacttattaatatgcacttacatgcaaaaacagatct

SEQ ID NO: 214747 - DNA, 1527 bp, Homo sapiens
gtctctctctctctttgtatctctgtctctttctctctccgtgtgtgtctctgtccctctctctctctctgtgtctctctccctctgtatctctctatctctctgtgtgtctctctctctgtatctctctatctctctgtgtctctccacttctctcgcccactcccctctgacctctcacccagaagtggttctaccctctcagcggagctcagcctcccttgccatgtctgctccatctcagctcctgggcagggccatgatttgctgatggaaagattcaaaaccttaggaagcaatgaccatatcttctagaacattctatttaggcttccaggggactgttccaaggcagttaaggaaaagcaaccccaagcaaatggcctgaaaccaggcaggctgtttgggttggagcttgtccgccccaggctggggctgtgcagagccttggctgcctgttcttcctgggcagggccaggagaggcgcatggctgcagcctcccagagcacctttcccggtgtcctgggccttgctcctctccaacggccttattttcctaaatttccacctcatgttcatagttgttgttgttgtttttgagacagagtctccttgctctgtctcccaggctggagtgcagtggtgtgattttggctcactgcagcctttgcctcctgggttcaagcaattctcctgtctcagtctcctgagtagctgggattacagctatgcgccaccacacccagctcatttttgtatttttagtagaggtagggtttctccatgttggccaggctggtcttgaacttgtgacctcaggtgatccacccacctcggcctcccaaagtgctgagattacaggtgtgagccaccttaaatggaaaacaaaaacacagaacaacaaggatgagaagttctgtggtccgtacctttgggttagaatatcaaacaggagctcttgggggtttgagtgccccccaccccaggcccgtggtctctcttgtctaacctgctcatgtcacctccctcctttcaacaggagtctccagccatccagtggagaggggagcttttcttgggatttcccttgtaatactacctcactctttgcccttcaccgcagacttaaccatggcctccttcctgcagagttcttgatgtgagataaaattgcttgtctttcactggaaactcccagaaagaaaggctggtgcctggtctctcctcatttccctgtcatgaacacctcgcccagcacatggagggtgacttgcgatgatatatttaaaaaataactcccagttctgagaagagccataggagtgttggctcttattatctgtcctgatttccatatgttggttgttttctattgcaaaagtaatatagtgtaatatagttcaattatagaaaacatggaaaaatactgaaagggtttaaagaagaaaataaaaatgacttaccatatctctactcaacttaacatttcagtgcaaatccttcctgtcattttatgcaaattaaaa

SEQ ID NO: 214748 - DNA, 364 bp, Homo sapiens
ctagagtatcccgttggtcgatcactgtactatatgcctgtttttcaatctacctgagcaattgtggtatttttttaatctactttttttttttttaagaggtgagggtcttgctatattgctcaggctgacatcaaactcctggactcaagcactctttctgcctcagcctcctcagtagctgggtattatggtatgtgtacatatatacttttagagacagggtctcgttctgttgtccaggctggactacagtggtataatcatggctcactgcagcctccaacactggggctcaagcaatcctcccacctcagcctcctgagtagctagggactacaggcgtgtgccaccatgcctaatc

SEQ ID NO: 214749 - DNA, 441 bp, Homo sapiens
aggtgatgtgtctgcttcccctttgccttctgccataatgtaagtttcctgagggcccctccagaagctgagcagatactagcatcgtgattcctgtacagcctgcataaccgtgagccaattccacctctttgctttatacattacccagccatggatatttctttatagcaatgcaagaatggcctaacacaatataatataatttttcctgggaaagaatttccagtgtttttttctatgaattccaagggcatatgcttacacggccagaaaagaacaataaaatcagcaaaatgcaaaatttacaaccatttctacatttctgaaagtcctgacagtaaaaaaaaaagttctattccaaaaagcaacaaaaaagctaacaatttcaaaataactgttagcaagataagtgtaggttctttaaataaaaatttaaaa

SEQ ID NO: 214750 - DNA, 524 bp, Homo sapiens
  misc_feature (262)..(262): n is a, c, g, or t
ttcatacctgttctgacatcttcttatccatagagagatgtctgaaattgtatgaagaaagagttgacgaacactatgactgggtggtggaatttttaatctgtatttgaaaaaatatataacagtatacattttaacacatataatgaagtcattattgttaaaacattgatattaaactttattattacatattacaaaaaataaaatatagtaagactttttgtttgtttaccacaatggtatttgtgctgtttttttntgcactataattcaatctttcattaggagttaaggaaataggcagtcatacactgctgattttagtgtaaattagcaaattttggggggaagaaaatttggcaaaatgtatcaaaaatgtcaatgattttcatttcactcattaattccatttaggaattttacccatggaaataatccccccaaatttattaataatattatgattgttaatagttgtaaatatgtgaatcaattcaacagaacatcaataagagctcaga

SEQ ID NO: 214751 - DNA, 354 bp, Homo sapiens
ttttatgattattataagtgtaccaggactctaaaagaaacttgtttgtataatgctattctatccaaggtatgtagcccaggaaataaccaacctgatgtgtgttatgacccattttaagcctcccatgatcacagtttttaaaataaaattaaggactggtccttttctaggtgacacaagtaaggtaacagctagaacagaagaaagaggggtcccaaaaatgtaaccttaaaatttgatgcttgtgccactattgatagtaagcagcatagaataggatgcggttctctaaattggaaaaaaaagttacacagtaaaaaaaaataagtatatctgtcaagaatcatattt

SEQ ID NO: 214752 - DNA, 339 bp, Homo sapiens
tggagaatatactgaaatttatctattctcacttctttttttggcattttcttgtaaaccagtctgtgcatgtataagggtctttgggcagaaggaagggagagagacaaaaaacagaaaacaaaacaaaacaaagaaaaccacaatcatttgaattaagccaaggatgttctaggctaaggtcaggctaagaactgaacagaggcttcctttctgccatgcctgtgggatgatattcttattgttccattttttaggaagaaccttttgtttatgtgaacctgatcatatgaatctaagaatatgtaactcttacaaataaaaaacagctagtaatta
